United States Patent Application Publication US 2005/0228172 A9 - sequence listing, part 82

SEQ ID NO: 366892 - DNA, 558 bp, Homo sapiens
atcattgtgctctcacttttgatcatatatgtccagtaaccaaaaataactatcaatagctcagctgtagtacattcaaaacaaattatatttatgtmttgcattatttggggtttagctagagcttgtattctagagccatcaaaagtctcaagcacaaaatcctgaagaggtcaaattatacaggttttagaaagccttactttcgtttaaaataaaaaacttcatatctacacaaggttcgcaattgctagagctctaggttgctgtactgtgctgaatttgcccagtaatgatggccaattacccaaaagaaaatgagaaacaagccacgttgagaattgtgaaaacaggtgtggtcaggagaaccaggttaggtgcccaccactagccagaaaaatactcgcttgcctttggagaaaagttttgttaatgtctctcaagtcaagtgtaaatatctgcaaaatgggaattataacgtttaattttcttgcagagtgattgtgaagaatacatgagataaaatttgtaaaaatgcttagaattgttcagtgattg

SEQ ID NO: 366893 - DNA, 622 bp, Homo sapiens
ccctctactccccagtcttcttagaaggactcatcggtaattaaaagagaaaaaatattatttcattttgagagctaagtgtagataagcagtctgcttacctagatgtggtattttaaaagctgtccatacatttttgtgagtcttcaatcatcatagcatttcgtaagcatcaggctatcacagcagttctcagatttgagggtcaatcagaatcacctggaggcctcattacagcacaaaaacattcccagagtttcttayccagtagatccaaggtggggccctgagaatgtgtgtgtctaatgggtttccaggtaagtctgatgctttgagaagcacctgctacttaattagggctggaattctaaaagctggaaaagaaggcatgtgttatacccattgcctgcagcaaagacaagtgagggacaattcttttgttgtttgtttgttcttaacaattgtaacaaagtcaaattatttgatctcaggagtttttctttctaagcaatagaatggttaaagatcatgaaatgagataatgtaaattagatacatgtaaatctagggagcgtgaccactacaaccagagattttgagttcttctaagttaatggcatga

SEQ ID NO: 366894 - DNA, 537 bp, Homo sapiens
aaaatcagttttggcatattcatgcatgcattactttgcaaagtcatgatggcaaaacaatgttaaattttgataggacmagtcctaaattatggcttcctgcggaatgggttacccatgggttaggagcaatcacaaattacccttcactcccaggatcccatagtatgtggaagaggatgaatgaagactgaaactgtggtgtttcaatgggagaagaaaggacagaggtgtttcctttatcttgaggattatcattactctcacctaagtgggacatccaggcattagtccatattcctccctcttacttaatcagtcaccaagtcttacagattatctttcctaaaagtctcatatccatcaccttttctattcattctgccagtttcttagttcaggtttgcatcatttctcacctggatgactaggtcagcctcccaacttgtctcatttcctccagtatggcccttgaaatgatcccccacactctgccaaaataaacttcctaaactgcaaatatgatcatgtcattat

SEQ ID NO: 366895 - DNA, 537 bp, Homo sapiens
aaaatcagttttggcatattcatgcatgcattactttgcaaagtcatgatggcaaaacaatgttaaattttgataggaccagtcctaaattatggcttcctgcggaatgggttacccatgggttaggagcaatcacaaattacccttcactcccaggatcccatagtatgtggaagaggatgaatgaagactgaaactgtggtgtttcaatgggagaagaaaggacagaggtgtttcctttatcttgaggattatcattactctcacctaagtgggacatccaggcattagtccatattcctccctcttacttaatcagtcaccaagtcttacagattatctttcctaaaagtctcatatccatcaccttttctattcattctgccagtttcttagttcaggtttgcatcatttctcacctggatgactaggtcagcctyccaacttgtctcatttcctccagtatggcccttgaaatgatcccccacactctgccaaaataaacttcctaaactgcaaatatgatcatgtcattat

SEQ ID NO: 366896 - DNA, 546 bp, Homo sapiens
actctccttcctcaatctctttaaggatatgtgctctcttgtctcttgtctctgcttctctttgcttactggcaccactcttctctacccctaaaggccaaaatttgaaactgccctggtttatatgtgttctagcccagtcctagtcttatataacattctaattcaggcacttattagacattacttgtagttctgagtctctaacccaaagtctcaattgagagagacaaattaccccaacttgggtaagtatccatcactggccctgaatgagctggatcagatagttaaaaatggagtcagtggccattcctatggggaggggtaagaaagaaagggcagtacttayagaaggtcaattgtggtctactttcaaaacaaccaacggctaaccctcatcccaattctccaatttattgtagaaacttcatagggtccatgatcagaaagtcatgcttatcattatgcttaatgatgtgctttccttgggtccacttagcattttatgaagagttgatccatgagattccttcccagttgtaa

SEQ ID NO: 366897 - DNA, 620 bp, Homo sapiens
ggggcttacgaaccaggcgtctctctagggcttattgctgtgcttattttttatcttacagagataaacagaactcatctacggtgcgtctctgaagccttgtcatttgggatttggaaaattcagtgtttttcattctacctacttaccatttatagagttcttgagctctgtccaaatatctctttgataaaaacaaaaacaatgtcaagtttgatatggaagtggaataacaaaaagtgcagaaatctgccccccaaataaacaagccatatagtttttgcctttagcattatggaagaggactgtgttagtcccttttcatgctgtgaataaagacgtacctgagagtgggcaattcacaaaagaaagagttttaatagactttcagttccacgtggctggggaggcctcacaatcatggtggraggcaagaaagagcaaagggagagtttgtgcagggaaactccttcttacaaaaccatcaggtctcatgagacttattcactatcacgagaacagtatgggaaagacctgcccccaagattcaattacctcctattagatccctcccacaacacatgggaattaaagatgagatttgggtggggacacagcca

SEQ ID NO: 366898 - DNA, 633 bp, Homo sapiens
agaaaattatccaaagagaggacatggctggtatgtggttggtgaggctgcaagggcttgagacctgaggggaggagaaggaaaatacatggtcagggaggtaagagacagtgcagagatctattttaaggtccaagaattttactctgagtgaaataaggggatatttgagggttttggaaagaggagtaatatgaactggtttgtatttttaaagaatcattttgaatgtatattgataatgggctgcagaggagagcaaaggtacaaacatggaggttgtaccttaggatgttgttgtggtaacccaagtgagcagtcatcatggttgaggtcgatgaatgtggtgagaatgtggtgagaggtcgatgtggtgagaatcatcatggttgaggcagaagtggtgagaatgtacatccacatatactttctggatatctttatacacaaaacacccagaayttgctgaggaattggatgtggaatatgagaaaaaagatctaaaggaaacttttgacctgagcaataggatgaatggtgttgcaatactctgataccaggtctgggtgttagacattatagttagacattatagtggggcggcaagtagggtagggataacaacacaaggtg

SEQ ID NO: 366899 - DNA, 595 bp, Homo sapiens
aagttttccctggcaaggtgacattaacctgagaatgaaatacaagaagaaaaaaaaagggggtggaagaaggcgggagagcattcctgtcagaggaaggattcagcacacagtccatgggatagaaacaagcttggtttatttccgaccagagagaaggccatgagctagaatgcagtgtgctgtagggagaataatatgtgaagtcagagaaggcaggaccccatagggtagagtatgtttggatgtggaagactttgggatgtgttcctagattgtaagcagatgaatgacctaaatttagctttatttttaaatgaactttctgaacactatgaagaactaaccatagaggtggaagacaaagtagaggtggatttagttttctgaygtattgaaatttaagcagattgagacttctagtcatgtgcagatgtttcaaatgtgggggccagtcaagctaaaaccagtttgaagcacgggataccaacagctatgagtcactgtcatttcccatctatatcatgaggctatgactcaccagtgtcacaatttcttttctctagaatatatttcttccgtaattagattttat

SEQ ID NO: 366900 - DNA, 595 bp, Homo sapiens
aagttttccctggcaaggtgacattaacctgagaatgaaatacaagaagaaaaaaaaagggggtggaagaaggcgggagagcattcctgtcagaggaaggattcagcacacagtccatgggatagaaacaagcttggtttatttccgaccagagagaaggccatgagctagaatgcagtgtgctgtagggagaataatatgtgaagtcagagaaggcaggaccccatagggtagagtatgtttggatgtggaagactttgggatgtgttcctagattgtaagcagatgaatgacctaaatttagctttatttttaaatgaactttctgaacactatgaagaactaaccatagaggtggaagacaaagtagaggtggatttagttttctgacgtattgaaatttaagcagattgagacttctagtcatgtgcagatgtttcaaatgtgggggccagtcaagctaaaaccagtttgaagcaygggataccaacagctatgagtcactgtcatttcccatctatatcatgaggctatgactcaccagtgtcacaatttcttttctctagaatatatttcttccgtaattagattttat

SEQ ID NO: 366901 - DNA, 374 bp, Homo sapiens
aatatacagcaacatttacaaggctaatctttataaaagtcttcaactttagatagaatcttaaaaagaaaaactttaagtagaaatccaatcaatggcctgccatagcctataagcrcaaccttatcacaaccctttgtactctcagaggtatattgggtaaaatgcattactagactgaatgatacttaggagggaatatactatgcttttgaaaaacatttcttgtaaactttacaagaacaagtaaagaataataatttctatgcctttcaatatttgtgatatgtttcccaggaactcattgtgattaaaaggagaatcaatttcatagccttgatcccaaagatctcttttttactctcattccataa

SEQ ID NO: 366902 - DNA, 615 bp, Homo sapiens
ctgatttttgtgtgtgcatgtgtgcaattctttgtccatttctaagtcttgtagatcagatcyttcacatcttacatgagaattctaaagagaaaaatgcagatttttcaagatctctgatgggtttactttagagcggggaaaatggcagcttatgtgtacatgccaaagttcccagagtcctgattgttactgagggcctagtatgagtcacgtcctgtaccaggccctggaaattaaaacaaaacaaagctaggtgaataagccataaatcctctgaggacagtgcctgtctatggacacacatggacaactttaatttattttctaagtgctcaggtaactgttgtaggagtgagtttaattcttgcactgggtattttgcagtctgaatgataataatggaaataatgacaaacatttattaagtggtaactatgggtaaatggccagtatattatttctaatccctagaatagttctaaagagcaggtgttgttatccaatttccattatcctccctttaaaaagcagaggatcagagaggtgtagcaacttgctcaaggatatatgactagtaagtttctgagtcaacattcatacccagatctagct

SEQ ID NO: 366903 - DNA, 615 bp, Homo sapiens
ctgatttttgtgtgtgcatgtgtgcaattctttgtccatttctaagtcttgtagatcagatctttcacatcttacatgagaattctaaagagaaaaatgcagatttttcaagatctctgatgggtttactttagagcggggaaaatggcagcttrtgtgtacatgccaaagttcccagagtcctgattgttactgagggcctagtatgagtcacgtcctgtaccaggccctggaaattaaaacaaaacaaagctaggtgaataagccataaatcctctgaggacagtgcctgtctatggacacacatggacaactttaatttattttctaagtgctcaggtaactgttgtaggagtgagtttaattcttgcactgggtattttgcagtctgaatgataataatggaaataatgacaaacatttattaagtggtaactatgggtaaatggccagtatattatttctaatccctagaatagttctaaagagcaggtgttgttatccaatttccattatcctccctttaaaaagcagaggatcagagaggtgtagcaacttgctcaaggatatatgactagtaagtttctgagtcaacattcatacccagatctagct

SEQ ID NO: 366904 - DNA, 613 bp, Homo sapiens
agtttctgagtcaacattcatacccagatctagcttcaaaggctatctatctattttctttgctggttctctaaataccatacaatctattattataaaatatcgtctaggaattaggtagtctgggtgggtcttgcatggtatagtagttaatacaaggcaattaatgtagaagaaaaatattttcctttatatgcttaaataagtttgcattaaaacatcatcttattttttacacatcatggaacagaaccatcatactgttcctawtgtacagaagcagaaagggctaaaaagatgaaatgccctgcgtaaggacatacaactagaaatttgcagacctgtggctgagatctgctctgcacatcccagtgtcacttcccctgtgtggttctgagctagcacaatagggatcaaagaggaacttgctgagctgcagaagcagaagtcaagtggtggctgttgttctcagatggttgtctcaatcaacctggagatgaagagagaaaagtcacccactgggtatgaatccagctttcctctctctcctccacttcatatccaactcatcttcttgactactggctttgtggcccaactgcaaccataggcc

SEQ ID NO: 366905 - DNA, 548 bp, Homo sapiens
tgactatcccttctagagcttcatttttctatgtctgcatttgtgtaaggtctagtttctataacacatctcttattctcctaaaactcatagtggctctactatcttgaggggaccatgactaatgcagtaattgttccaagaagaaccttaaagttggagttggttctctgatctgactagacgtaggagcattgaagacctgatgtcactgataaacaggacactggtagtccctggcatgcattggcaaaacattctttagattatcatctatagtcagctggaggcaagtgttctttgaaggcaaarctttgggcaagtaactaataacaaataatgttttaatgatgatagagaatataatgtctcttggtcttggttgcacaggataacttgaataaagaaaatgaaaagttcaggctttaattctcagcttcttttctagatcaagggctaagaagcttttctggctgccctaacataaactcttatccccgtagccacaatggtaagatttctgaaaaacaaacctcaaagctaatcct

SEQ ID NO: 366906 - DNA, 467 bp, Homo sapiens
ctcctaggctcaagtgatcctccttcctcagcctctcraagtgttgggattacagatatgagccatctcacttggccaggagaatatttactaacagagatgtaataagtagagagtttggattcaatgcagtagagcaagaggtgggaccgactctattcaattgtgcaattgcttgactagaggctgaactaaatagtagccaacactattaggctactagtaggtaggtaagaatcctgagcctcctttacatactgaagagaaggctcctcaaggcttaggatgataggggtgtctttgtgtactctatgtaatcgttcctcgcttaactctagctagattgctatgctaccctggaaagttcagagaacactgcctctacaaatttctcagtgcgttgagagagacactgctaagagaagcattgtcttcaagagttctgtggtggctgttctgtttaggtc

SEQ ID NO: 366907 - DNA, 467 bp, Homo sapiens
ctcctaggctcaagtgatcctccttcctcagcctctcgaagtgttgggattacagatatgagccatctcacttggccaggagaatatttactaacagagatgtaataagtagagagtttggattcaatgcagtagagcaagaggtgggaccgactctattcaattgtgcaattgcttgactagaggctgaactaaatagtagccaacactattaggctactagtaggtaggtaagaatcctgagcctcctttacatactgaagagaaggctcctcaaggcttaggatgataggggtgtctttgtgtactctatgtaatygttcctcgcttaactctagctagattgctatgctaccctggaaagttcagagaacactgcctctacaaatttctcagtgcgttgagagagacactgctaagagaagcattgtcttcaagagttctgtggtggctgttctgtttaggtc

SEQ ID NO: 366908 - DNA, 635 bp, Homo sapiens
ggaaggcacaagtgtgctagagcatggaaaatacatcccacaaaaatttagtcctaattccttggtgaaatttctaggaatctaatggtctcagcatataaacatatatcttccaaggtaagggaaaattgctgcatttgggtcctcttagcacaatggaaaaaaaaatgagtttctttggattttggaggcaacatataccaaatttgggcrtgttaatccaacccatttaccaagtaatccataagactaccagtttgagtggggcccagggtaacagataatcctctaacaagttcaggttgccaggtgaaatgttctgggattttggcccatatgacaaagcagttctattggtgctttgaagggtcactggcagaagggatgtcgtacagagccattgacagcttttgtaggtgaacgccctcaattcactatgcaacataaatcatcagaattttgaaacaaaactttgccatcttctgtgtgtatttactcttcttttgaggaacagctcctgtttattactaggtcctagcagagataaaacacttgactatgaatgacagtattaccaagccaggtgacctaggctactgatttaaaactgcatattttctgatccacacagtcat

SEQ ID NO: 366909 - DNA, 635 bp, Homo sapiens
ggaaggcacaagtgtgctagagcatggaaaatacatcccacaaaaatttagtcctaattccttggtgaaatttctaggaatctaatggtctcagcatataaacatatatcttccaaggtaagggaaaattgctgcatttgggtcctcttagcacaatggaaaaaaaaatgagtttctttggattttggaggcaacatataccaaatttgggcatgttaatccaacccatttaccaagtaatccataagactaccagtttgagtggggcccagggtaacagataatcctctaacaagttcaggttgccaggtgaaatgttctgggattttggcccatatgacaaagcagttctattggtgctttgaagggtcactggcagaagggatgtcgtacagagccattgacagcttttgtaggtgaaygccctcaattcactatgcaacataaatcatcagaattttgaaacaaaactttgccatcttctgtgtgtatttactcttcttttgaggaacagctcctgtttattactaggtcctagcagagataaaacacttgactatgaatgacagtattaccaagccaggtgacctaggctactgatttaaaactgcatattttctgatccacacagtcat

SEQ ID NO: 366910 - DNA, 635 bp, Homo sapiens
ggaaggcacaagtgtgctagagcatggaaaatacatcccacaaaaatttagtcctaattccttggtgaaatttctaggaatctaatggtctcagcatataaacatatatcttccaaggtaagggaaaattgctgcatttgggtcctcttagcacaatggaaaaaaaaatgagtttctttggattttggaggcaacatataccaaatttgggcatgttaatccaacccatttaccaagtaatccataagactaccagtttgagtggggcccagggtaacagataatcctctaacaagttcaggttgccaggtgaaatgttctgggattttggcccatatgacaaagcagttctattggtgctttgaagggtcactggcagaagggatgtcgtacagagccattgacagcttttgtaggtgaacgccctcaattcactatgcaacataaatcatcagaattttgaaacaaaactttgccatcttctgtgtgtatttactcttcttttgaggaacagctcctgtttattactaggtcctagcagagayaaaacacttgactatgaatgacagtattaccaagccaggtgacctaggctactgatttaaaactgcatattttctgatccacacagtcat

SEQ ID NO: 366911 - DNA, 353 bp, Homo sapiens
atgaaaagtcatccacttcagaggagcttgtcttaaatagatggtctcttctgtatatgtcagtcaggtccttcccccagccactgctgtccttgtctgatggactygtgactagggtagaagaacagtgattttgcataggtttatctatgtgggcttccacttgccaagttcaatctagttgtagttacctgcttttcaacaggaagcagcaacaaatatctgttatggcatcataacagcggatgctggcatcataataggggatgatcacaggggagtaatcagcctcctctgctttctaacttaacctaaaacaccttgttttcacaatacatccttccagtgttaat

SEQ ID NO: 366912 - DNA, 353 bp, Homo sapiens
atgaaaagtcatccacttcagaggagcttgtcttaaatagatggtctcttctgtatatgtcagtcaggtccttcccccagccactgctgtccttgtctgatggacttgtgactakggtagaagaacagtgattttgcataggtttatctatgtgggcttccacttgccaagttcaatctagttgtagttacctgcttttcaacaggaagcagcaacaaatatctgttatggcatcataacagcggatgctggcatcataataggggatgatcacaggggagtaatcagcctcctctgctttctaacttaacctaaaacaccttgttttcacaatacatccttccagtgttaat

SEQ ID NO: 366913 - DNA, 483 bp, Homo sapiens
atagcagggggaggaaagggggcatgtgtaatctgaaaccccagatatggtgcctggcctgaattgagataacaytgaagattttattgctgatatattataaattatttctattactgtggtcctgcgggtattgcattgtcaatgcactttgcttattacctcacttaatgttattaacacactttggggtataaaattacagttttatcatggaaaccttaaacacttacatccaaagtactgaatcaagttattatctttactgaccagacctattttattgtcattttatcgctcataaaatctgagattcaatttgatttaactattaagtaaagcttggtctactagagtttaaacccagctgtaatattaatatattaatatataagatgacttcattttattaaaggtgaggtaactttgaaaacctcttttaatgtctttctgcagctaagaaatttaacgtgacctgtttgc

SEQ ID NO: 366914 - DNA, 595 bp, Homo sapiens
agagttgttatttagctgataaaatttttaagcaaagtgttgaaaaggtggttgctttcttttgattccttatagtaaaatgcaaaggaagagataaagaaggaattgttaagcaaaaaggaaccagaacttgaaaattgaaaattctcatcccatccataatgcaataaatgagaaagcatgttctgaagagaacaccaacggtgtgactactagactgtccttcaataaagaactatggaattatatgagcacagacactgccagttggaactaaaagggataaagatgggataattggacagaatgagaagataaagctatttggctgcacacatgcactattttccaggaagaggaagaatgccccatttattgcactatggatgggctctgaattatccaggcaattcagagatcagggatacttccttggtttcaacaggccaagaagcttctgcctaaagcattgggggttaggagcatgctgcagaaccattggaatgggacttccatgwgctttgggaacaggaaattgacccatagtgtgggtgtgatgctcctatctcagtggtcctggagaaaagactattaa

SEQ ID NO: 366915 - DNA, 511 bp, Homo sapiens
ggaggaagggattatgacaccattgttgttatcagtcttgcattttttctggtgttcagagagaaccaagggacaggataaaatagtggctgggtacccaccagcactgcctgccctctgcgagctgttcttctgacaccctccttagtgtttatgtctcttcaagaattctcatgcccatatgttctcactcataagtgggaggtgaacaatgagarcacatggacacagggaggggaacatcacacacccacaccagggcctgtcacggggtgggggaaaggggagggagagcattaggacaaatacctaatacatgtggggcttaaaacctagatgatgggttgataagtgcagcaaaccaccatggcacatatatacctgcgtaacaaacctccacgttcagcacatgtatcccagaacttaaagtaaaataaaataaaataataaataaaagaattgtcatgcccatagatatgcacagcaatatttcaaatttctaatcagacct

SEQ ID NO: 366916 - DNA, 549 bp, Homo sapiens
ttcgtgtccttggaatatagaaaaaactctgatcatattcatgtctatattttgaaatatttttatttaatatattctcatgtttcatgagagaaaaccctttgaagagcccaccagagtatgagatactgggtctttgaattcatttttattaataataatttttaagttcttttaactttcctagcaataagagctcccaaatagtgtccatgctactaaagaattcacgatcagtaggaaaaccagttgtgtgtgcaattaactataatactatgagataattgcactaaatgaactgtttattaagtactaggtcgtatgagcaagggaagatcagggaaatttccagggagaaatcaacgtttatgytagtgcatgaagggtgcttagagggatcccaggtgggcacctgggcaaggacacgagaaagttgctagatagatgaaatttacattagttttgggattgaaaaatatgctgaaagtgccagatcactgagaatttttactaatagccctgctgtgaaagacaaactaaccttctcag

SEQ ID NO: 366917 - DNA, 629 bp, Homo sapiens
tgtgtatgccatgcattattttatatctcactgccccatcatgctattttcaggttgttaaaagcaatttagaaatataattttgattagttacacttactggtccattacatggaggcagtacagtgcaatggtaagcatgcaggctctggaataagatgtgtctggtttgaatcctgaaccagccaggatttgctaggcttgttaggaaagtcacgtaatttttctgaacttccatttcctcatcttcaaaatgaggaatatcatagtatctacttcctagggttttttaggaggtttgaggtcatgtaagtaaaccctttggcaaatttccagacaactaacaatcatttagtaaataaatgatagttttattattattttatttacctgtaaaacattaactattgtctggaatttgtgtttttttttctagttgtttactattaaaataattccacaatgaatattgcattagtctgttctcatgctgctaataaagacatayctaagactgggtaatttaatttataaaggaaagaggtttaatggactcataattccacatggctgaggaggcctcactatcatggtggaagacaaaggaggagcaaaaagatgttttacgt

SEQ ID NO: 366918 - DNA, 593 bp, Homo sapiens
tcagaatctataaagaacctaaggaaatcaacaggtaaaagtacttttgcttgtattattcaatttaacttaatgttatttatttatttttaatttcttttgaatgaggcaaaattcayatacataaaatttaccattttaaagtatgcaatttagtgtcaatcactacatttaaaatgttaggcaactctcacctgtgtttagttccaaaaccttttagcacccccaaaataaataccttacccattaatcagccactccctactgagatttttaaaaaataaagaaaactgagctgggaagagattgttgctggagatcattcagttcctatgtgctgactccttataagtaaagagcaaatgtttgtgtaaagaaataatagctgaaaataaatgtcctgaaatttgatggaagacacgaatacagtaatccacccatttgtggtttcactttccatagtttcagatacctgcactcaatcataaaccaaaaataggtgagtacaaacgataagatattttgagaaagagaatgttcatataattttattacagtacattgtaataattgtagtttcttacagtatattg

SEQ ID NO: 366919 - DNA, 639 bp, Homo sapiens
tatagttgaccctggagaatgcttcatttgcacttgagaagaatgtgtatattattcttgttgggtgcagggttgtacagttttctgtgaggttttgttgatttatagtgtcgttcaagctttctatttctttgttgattttttatttagttgttcaattcattattgaaagtgtagtattgaagtctccaaatactatattatatgtttagttgattatttgattaggtgagtatatgtttatacttgttatatatttctgatggcttggcccttttattattataasatgttcctcttaatctctagtaacattttatgttttaatgtttctcctttataatattagcataaccatctcagttcttttgtggttgtagtctgcaagttgtttcaggttgtttacatattacaatctaaaatatgtctcttgtagctcaaatctaacaatcttttccttttgattggactatttaatctatttacatttaatgttattgacatgattgtatgtacttctgccattttgctttttgctttctatatgcctcatgtctttttctgccttgattacttgttttggtcttctcatattaaatgaatattttctaatggaatatttaaatattttaataatat

SEQ ID NO: 366920 - DNA, 639 bp, Homo sapiens
tatagttgaccctggagaatgcttcatttgcacttgagaagaatgtgtatattattcttgttgggtgcagggttgtacagttttctgtgaggttttgttgatttatagtgtcgttcaagctttctatttctttgttgattttttatttagttgttcaattcattattgaaagtgtagtattgaagtctccaaatactatattatatgtttagttgattatttgattaggtgagtatatgtttatacttgttatatatttctgatggcttggcccttttattattataagatgttcctcttaatctctagtaacattttatgttttaatgtttctcctttataatattagcataaccatctcagttcttttgtggttrtagtctgcaagttgtttcaggttgtttacatattacaatctaaaatatgtctcttgtagctcaaatctaacaatcttttccttttgattggactatttaatctatttacatttaatgttattgacatgattgtatgtacttctgccattttgctttttgctttctatatgcctcatgtctttttctgccttgattacttgttttggtcttctcatattaaatgaatattttctaatggaatatttaaatattttaataatat

SEQ ID NO: 366921 - DNA, 639 bp, Homo sapiens
tatagttgaccctggagaatgcttcatttgcacttgagaagaatgtgtatattattcttgttgggtgcagggttgtacagttttctgtgaggttttgttgatttatagtgtcgttcaagctttctatttctttgttgattttttatttagttgttcaattcattattgaaagtgtagtattgaagtctccaaatactatattatatgtttagttgattatttgattaggtgagtatatgtttatacttgttatatatttctgatggcttggcccttttattattataagatgttcctcttaatctctagtaacattttatgttttaatgtttctcctttataatattagcataaccatctcagttcttttgtggttgtagtctgcaagttgtttcaggttgtttacatattacaatctaaaatatgtctcttgtagctcaaatctaacaatcttttccttttgattggactatttaatctatttacatttaatgttattgacatgattgtatgtacttctgccattttgctttttgytttctatatgcctcatgtctttttctgccttgattacttgttttggtcttctcatattaaatgaatattttctaatggaatatttaaatattttaataatat

SEQ ID NO: 366922 - DNA, 587 bp, Homo sapiens
aagtgggatgaaataattctcaggtctttcctaggtataaaacacctctgcagaggaaagagaaaattcacccagggtttcagcatgctggagcatgtggaatgcaagtcttgaagctttccagccatggcatttaaaaataaaaatatgaattgagacaatgcccaaactttcttatctcagacaacagtcttcttcagaagacctaccaggctgagaaaatagctttctttgaaggagtagactatttgtaattccctgggatctatctctcataattttaagaggttttttgtaagtcatgtttttctctgttttccctgtgactctttacacctctatgtctccattttcttgtacaacctcagcaaaaaaatagaaaaagaaagaaaaaatgtgctgtgagcatttagcaagttgttaaaatgtgcattagaaaatcactaatggaatagatccacccctgcttcactccctgatcttagataattgaagctttaatcccaaagatgcaccttctccctggaaaagtkcaatttgatctcaagagtaattcttgcttgagagattgagaatgctgaatccac

SEQ ID NO: 366923 - DNA, 491 bp, Homo sapiens
actgaatccttgccttatgcacttttttccattttatctaatttattgaacatgctgcagaagaactccaggaaaattgtttcagccatggccattgctaatttctaaaaggaccaaaaccagcacttcattgaactggtcattaattgcttgaactccatgtgtcaagagaaacaaccttttacttaagtactagtgcataagtaccctgagctgacttgggtgaaattcatgacaataggtttttgatggtggcaaagctgtcaatcaaatcagttgtttggggaagttaaaatgctgggtaaaggaaaaamagacatatcatttgagcttagtttgtaatctgaaaggtgccaagccattttctcacttcttcatgatgcctgcagtacacttgattctttagaacagtgaaacccaaagtaactatgagataacatttcttgctaaattacatctttgtgtatctttgcaataaacacctattacca

SEQ ID NO: 366924 - DNA, 573 bp, Homo sapiens
gtaacatttctcagctgtactgtttgctccaaggactttaagctgctttttaggtacgttcgagatccaaggtttctttatgaacatgatgtcctcctattctcttaaagtaaaggttgcatcagttgcagggacctagaagtaaaagtgaaaagtctgctagaactcacaaattgatagtacaaattttagtttgtatatttctttactatcctatttaattctatttgaggaattgggagggaaatagagaatatgaatgattcttattaaaatatgtgccaaaattaaatttctaatttttgattcattattttagcaattaatattagtaatagagttttcagtggtttgtttagaaatatatgtgtgtatgttttcatataaagctaatgaaaaagattgcattaaatttttttwaaaaagaaaatataaaagtaaaattttcttctcttatcaaccagagataactactattaattatacagcatacttccttgtagctttttcattgcatatatataatatatgccaaatcgggatcatgctacttttttaagttaaaattatatt

SEQ ID NO: 366925 - DNA, 634 bp, Homo sapiens
ggagcaaccccaactgagaaagagcactttgtttctcccaagccttggaaataacttgggaaggggcttagagacattgtgagcgcaagacaccaggaaatactgcagacattttcccagacccaggactgagagcaggattctgtttttaattcgagtgcatactaagtcaagcttttctttgtgactcagcagcatagccatgcaggcattttagtctcaggccggagattggaatggctgctctggaacaggctaggaatctccataaccaragctgtgaaaagcacctcagtagtcggcactggaattgtactctaccctgtcacaaccctgtggtagaaggagagctgctacagctgcagtttctcctgggtgatgatacttgcagacagggctggcttggtgacctgctgtgtgtgtgccattgttgggtgctccagcctgctcccctgagttcatggtgcagcaggaccctctctgcctcatacccaggcagaaattcaggcattcagagcacaccctcacatggacccacagcctgagccaccccacccttcatgagtatagatcatgatgcatcaggaccctctccacaccatgcccaggcagatttccaggtattcagagcacc

SEQ ID NO: 366926 - DNA, 586 bp, Homo sapiens
ttatgagcccaccatcatatacacagcacttcattgactgaaaggtaattaggcagttcctgaccacgtctcatttagaaattagtttctaaaaatccagagtggttctacaccaatcctaatctggtttctgtttctaagaaatgtgtttaagttaaacatctaaaaaaaatttctgtgaaattttgagctttgagcttaaaagtctgaaaacttacactctggattctggttacatgtgaaaaatactttttaaattattgtccacagcattgttgccttttttctaagctttcgtttttctgtacaggataaaacattttctcatctgaaaatatttccaaatagacccttattgccttamtctgttttgtgttgctattagtataacagaatacttcagactgggtaatttattcaaaaattagagatttatttggctcacagttctggaggatgggacatccaaagtcaaggggtcccaatcttgtgagggccttcttgctgtgttatcccatggtggaaagcatcacaatggtgagagagcaagagcagagggagccaaacttactttgtatcaggaatc

SEQ ID NO: 366927 - DNA, 568 bp, Homo sapiens
ggaacctaaatgagaagtagagacgattaaggagatcagaagtacatgtgtatgttgtggaatcaagggattgaaaatcctggggaaggggaacttcagatgaaataattttagtttataaaaataggtagttggaaattattataggcttctgaggaaaagagagataaacctgtctctacagtcaaacatatcttgactcaaagtagtaacgtggtgaccttaagcacttgagctcactgttaattttcaaccatgttccattcacctttgaaaaggccttggaaatccatatacatttctggttcttcaccccatctctatgactgtgggagatttgagagagaccatttcaggtcttctctactcagatgactctctraaccatttcgatcccactgcctgggcagtaccataaagtggtagacacagcactactttgaggagagtttgaagtgtttgtagtgtgtgccagggaaaatgagtaacaagcctcactgtccagagattgtcttaattttatctgataggttatttaataaaataggtagggaaatgcaagtcacta

SEQ ID NO: 366928 - DNA, 610 bp, Homo sapiens
actgtctacaaggctgaactctaggatgagggaagaaaaatataagtatgtcataaactctgaactcaaggtgtaaagacacatatctatacataactagacagtaaaactagaccaaaattataagcattacagagatactaaaacaagktattagaaaacataaagaggaagcaaccagggcaagtagaggagagaattcacagagtgtttgcatttgagcaaaagcacctcatgagataagaattctgacagagaaaaggggagatgggaatgaggcacagagtttgcatgattaaggcagtatgaatgtgcttgctgtgtctggcaaatgagctattaggaaaggcatggtggggagatggtacatgaaaaataaatcagggctctattatgtaaaactgatagtttaaaacaagttcaacattagtcaaggcacaattttctacttcttattctactgagatcaaaaaatagaaagcttctacgtattagatacaaaaggattcagagactgtttctcttctctaaattcccataattcagatgtttggacaactcaatctattgttttgaactattttctggagattgcatgaagtatatctta

SEQ ID NO: 366929 - DNA, 610 bp, Homo sapiens
actgtctacaaggctgaactctaggatgagggaagaaaaatataagtatgtcataaactctgaactcaaggtgtaaagacacatatctatacataactagacagtaaaactagaccaaaattataagcattacagagatactaaaacaaggtattagaaaacataaagaggaagcaaccagggcaagtagaggagagaattcacagagtgtttgcatttgagcaaaagcacctcatgagataagaattctgacagagaaaaggggagatgggaatgaggcacagagtttgcatgattaaggcagtatgaatgtgcttgctgtgtctggcaaawgagctattaggaaaggcatggtggggagatggtacatgaaaaataaatcagggctctattatgtaaaactgatagtttaaaacaagttcaacattagtcaaggcacaattttctacttcttattctactgagatcaaaaaatagaaagcttctacgtattagatacaaaaggattcagagactgtttctcttctctaaattcccataattcagatgtttggacaactcaatctattgttttgaactattttctggagattgcatgaagtatatctta

SEQ ID NO: 366930 - DNA, 601 bp, Homo sapiens
gagaacaattctgaaaggtcaccccagcttctgagttcctgtgatgttggtcaagcagaaacagatcattcagtggacagcacctacagaaaccttctccagtaaggtgtgaatcccaaccttagggagaggtgctctcttccatgattgtccttccttggatactctcccccagccatakaatacctttatagtttgttttacatatttatagttactctcctatcatagtttaataatctttggtgttaaactttcttgggaaacttcaacacagaaatataagcaggaaatgataagaaaagaaaaggctaatgttgagccaaagacacaataaaactggttgaaataagaaaagaatacattatgaaatttaaactattttgtctctaaaagccaaactgattttacataaaatcaaattagtgttttggtggccaaattggagacattcaccaaaatccataccctcaaaaaggtcagaaaacatggtgtatcaaagaaatcaagaacactgatctattctaagaccatataatcttaggtgaaaaagcctgagcagagaatacaaacgaaataatcaaaaatataatagaagaaa

SEQ ID NO: 366931 - DNA, 550 bp, Homo sapiens
actttacagcttctccttagcatatcccaattgccagcatcattacttttgtagtggtaccacaggtaactgaaaccacgaaagtgaaaccctggataaaggggaactactgtattcccattctaattgctaggatcctgttcctaactggaaactaactttagaatatgctagagaatttatgttctgcaattcaataaaacatgtgattgcccttgacagtctcaggtcattgacttgaagcagaaagttttgcttaatgactacagagcagtcttccaatccccacctgctgaactggtgcttatctcttacttgtaatatcttgtaaggaatgcaagaaacctacaaactctactattctgaktatttctacaaaggtgacctttggtgagtacgtggtctaagtcccaagaaacaacacattatagtttaactttgttaccacacttcaataattgtttctcaacctggtatatagaaattctaaccaggctcctgatccattttgcctatttcatatcttagaatctcttggttgtgccaccac

SEQ ID NO: 366932 - DNA, 594 bp, Homo sapiens
gcaactatgtgaaagaatattttaaagcagttagattcccatatgcctttctcactctatagcctggtgactatccgtccctcaatcttgcaaaacactgaagatttcttctcttagaagagtaaaacagttctctaaactaatcacagtttagggtatggtaasataatgaaaataggtgattgagaaaacaggtatactggatgttgacattcctgtgtgccctctttccttaaacagccctaagaacttcccattaggagcttaaaagagggatttcctaggatgttccggtcaaaaggaaagatctaaagatgctgttgtcaagacttctccaactaaacggaccaatggaatcaacctaaagcaaagcttatagtgacaatggcatctagaagacaatatggtcattgttttaatttctctagggaatttattctcaacactagaatttcacatccagtctatgaagcaagagtgaggacagaataaagacatttgcatgaaattactgggagatgtgctgcataaaacaagaaaaggcatggcatacagaaatcaagatatccaacaaaggaaagaggcaataaaaat

SEQ ID NO: 366933 - DNA, 533 bp, Homo sapiens
aacagttctctaaactaatcacagtttagggtatggtaagataatgaaaataggtgattgagaaaacaggtatactggatgttgacattcctgtgtgccctctttccttaaacagccctaagaacttcccattaggagcttaaaagagggatttcctaggatgttccggtcaaaaggaaagatctaaagatgctgttgtcaagacttctccaactaaacggaccaatggaatcaacctaaagcaaagcttatagtgacaatggcatctagaagacaatatggtcattgttttaatttctctagggaatttattctcaacactagaatttcacatccagtctatgaagcaagagtgaggacagaataaagacatttgcatgaaattactgggagatgtgctgcataaaacaagaaaaggcatggcatacagaaatcaagatatccaacaaaggaaagaggcaataaaaatccccaaatgatggagaagaattgcaagrttgatacctatcagaaggagtagaaggtgaccagtc

SEQ ID NO: 366934 - DNA, 656 bp, Homo sapiens
atcccctccccttgagtggaagcagaacctctggtttgtttctagctaatagaatatgacaaagacaatggcatgttaattccatagttatgtcacataagattgtgacttccattttgcaaacataccctctgttgattctctccctttctggctttgatgaagtaagctaccatatggaaaggccatgtggtaaggaactaagggaggcttacaaactgaggctctcggtcaaggaattgaaagcattcagcaaggaactggggtcctccattgacaaaccayaaggaactgaattctgccaacagccatgtgagcttggaaccagatccttccccagtcgagccacagacgaggtcccattcctgggtgacaccttgattctagtcttgtgagagaacatgaaacacaggacccaagccatgcttgaatacctgacacacgaaactgtgagataataaatattttgcataaggcactaaatttgtggtaggaatggccacacagcaatagatgaataaaggatctaaccaaaagaggccatgatttgagcacctctccaactcaggtgttacaaaacaaagattgttgagttctgcttgtcagaggtatgaattctgactgattgcccaagcctccagtttgtttgcatcatc

SEQ ID NO: 366935 - DNA, 543 bp, Homo sapiens
cctgtttgcatttccgtttatttacatatgttcctttagacctatatagacccaaaacaacctgagataaatgscactcataactgtatccctcaggggagcatataattaacaaaagcccatatatttgagcttaactgattaatcattttccctcaactctttccattataattcagtttgctttgtgttaattcctttttttaaataatctctcaactcctcctatcacccaggctgaaaaacccaggaatcaccaaagaccctctccctcaactcctgcagccaaagcccagtccaacagaatctatccaacttccttatttcacttttccagctctgattggatttgtatctataataaatcaaaaagaggtcaactaagaacaaaactaacatcattagaataaaatcaccttataaactggaatgcaaggtgctaatgttattacttttcattctgataaaatcaccttataaactggaatgcaccatgctaatgttattacttttatcttttttttagtttgtactgcacatcac

SEQ ID NO: 366936 - DNA, 543 bp, Homo sapiens
cctgtttgcatttccgtttatttacatatgttcctttagacctatatagacccaaaacaacctgagataaatgccactcataactgtatccctcagggragcatataattaacaaaagcccatatatttgagcttaactgattaatcattttccctcaactctttccattataattcagtttgctttgtgttaattcctttttttaaataatctctcaactcctcctatcacccaggctgaaaaacccaggaatcaccaaagaccctctccctcaactcctgcagccaaagcccagtccaacagaatctatccaacttccttatttcacttttccagctctgattggatttgtatctataataaatcaaaaagaggtcaactaagaacaaaactaacatcattagaataaaatcaccttataaactggaatgcaaggtgctaatgttattacttttcattctgataaaatcaccttataaactggaatgcaccatgctaatgttattacttttatcttttttttagtttgtactgcacatcac

SEQ ID NO: 366937 - DNA, 543 bp, Homo sapiens
cctgtttgcatttccgtttatttacatatgttcctttagacctatatagacccaaaacaacctgagataaatgccactcataactgtatccctcaggggagcatataattaacaaaagcccatatatttgagcttaactgattaatcattttccctcaactctttccattataattcagtttgctttgtgttaattcctttttttaaataatctctcaactcctcctatcacccaggctgaaaaacccaggaatcaccmaagaccctctccctcaactcctgcagccaaagcccagtccaacagaatctatccaacttccttatttcacttttccagctctgattggatttgtatctataataaatcaaaaagaggtcaactaagaacaaaactaacatcattagaataaaatcaccttataaactggaatgcaaggtgctaatgttattacttttcattctgataaaatcaccttataaactggaatgcaccatgctaatgttattacttttatcttttttttagtttgtactgcacatcac

SEQ ID NO: 366938 - DNA, 577 bp, Homo sapiens
tcacttttccagctctgattggatttgtatctataataaatcaaaaagaggtcaactaagaacaaaactaacatcattagaataaaatcaccttataaactggaatgcaaggtgctaatgttattacttttcattctgataaaatcaccttataaactggaatgcaccatgctaatgttattacttttatcttttttttagtttgtactgcacatcacagtyttaatttttttaacttttaagttcatggttcatatgcaagtttgttatataggtaaatttgtgtgatgtgggtttattgtacagattattttgtcacccaggtactaagtctagtactcattagttatttttcctgatcctctccacccttccagcctccaccctctgataggtcccagtgtatgttgtttccctctatgacttaaacaaaatgacaaaaaagagcaaacaaccacatttaaaagtgggcaaagaacgtgaacactttcctaaagaagatatacctgtggccaacaagcatatgaaaaaaagctcaatatcaatgatcattagagaaatgcaaatcaaaaccaca

SEQ ID NO: 366939 - DNA, 536 bp, Homo sapiens
tttaatttttttaacttttaagttcatggttcatatgcaagtttgttatataggtaaatttgtgtgatgtgggtttattgtacagattattttgtcacccaggtactaagtctagtactcattagttatttttcctgatcctctccacccttccagcctccaccctctgataggtcccagtgtatgttgtttccctctatgacttaaacaaaatgacaaaaaagagcaaacaaccacatttaaaagtgggcaaagaacgtgaacactttcctaaagaagatatacctgtggccaacaagcatatgaaaaaaagctcaatatcaatgatcattagagaaatgcaaatcaaaaccacaatgagataccatctcgcaccaatcagaatggctawtattaaaaagtcaaaaaaatagatgctgtcaaggttgcagagaaaagggaacatttatacacagttggtgggaatgtaaaattagttcaaccattgtggaagacagtgtggaaattcctcaaagatctaaagacagaaatacaat

SEQ ID NO: 366940 - DNA, 627 bp, Homo sapiens
tcctttccatcatagaaatctatcctcaaggaaagcacttctcagtgttctatctgctattctactacccttcagggattgttcaggcctcctccctttcccatacatcaagctcggggatttgcccctgcccaggactggcaaattgactttactcacatgccccgagtcagaaaactaaaatayctcttagtctgtgtagacactttcactggatgggtagaggcctttcctacggggtctaagaaggccaccgcagtcatttctttccttctgtcagacataattcctcagtttagccttcccacctctatacagtccaatagcagaccagcctttattagtcaaatcagccaagcagtttttcaggctcttggtattcagttaaacctttatttcccttacagtcctcagtcttcaggaaaggtagaacggactaatggtcttttaaaaacacacctcaccaatctcagccaccaacttaaaaaggactggacaatacttttacctctttcttttctcagaattcaggcctatcctcggaatgctgcaaggtacagcccattggagctcctgtatggacgctcctttttattaggccccagtctcattccagacaccagacca

SEQ ID NO: 366941 - DNA, 593 bp, Homo sapiens
agactgtggccagagtgcctcttcaggcctgacactgacccatccctcctcactgggaggggcctccctgcaggaactccaactccaggcaggggctcaggcacaaagctctgatctccctggccggagccactaggggtaggggtgaccacagtctctgaggaccagcagacttagcctttcctcctgctagttctgagaaatctgggcagcccagatgagtgggtttcccctcagcaaagcactccccctccaccaagggatagtcaaagagcttcattaaacgggtcctgctccctgtaccacccaactaggtgagaccatcaaacagggkttgtcagacatcctatacaggagtgatcatactggcatcagatcggtgctcctcgaggtcagagttcccagaggaaggaggaagcacccatctttgctgttttccagcctccttgagtgactggctccaggcacaggagcgagccagatgaatagtgcctgaagtgaatgcccagcaaaccacaacagccctacagaagaggggcctgaccattgaaagaaaaacaaacagaaagcaacaacaacagcatcagcaaaaa

SEQ ID NO: 366942 - DNA, 581 bp, Homo sapiens
tatttacctattaaaatggctaaaacttaaaagactkatgatatatatagcaagggtacagagcaactgtaatacttatacattactgattggaacttaatacggtacagccactttggaaagcagtttggcaatttctccaaaagttaaacacagacataacatacagtgcagtaatcccactcttacatgtttacccaagagaaataaaaacacaaagacttacatgcaaagattcataactttattaattacagccaaaatctggaaacaacccaaaagtctatcaacaggcaaatggaaaaacatgttgtagtatagccttacaataaaatactactcagcaacaaaaggaatgaaaatatcagtgaaagaagccaggcacaaaagactgtatgattctatttgtatgaaattctagaaaaaaaaattatagtgatagaaaacaaatgtgtggttgcctcagggtgggactgttgtgtggaaattggccaaaggggcatgagagatctttggaagaatgatgaaaatattttatatctttattatgggtttagttacattactatacatttttcaaa

SEQ ID NO: 366943 - DNA, 581 bp, Homo sapiens
tatttacctattaaaatggctaaaacttaaaagactgatgatatatatagcaagggtacagagcaactgtaatacttatacattactgattggaacttaatacggtacagccactttggaaagcagtttggcaatttctccaaaagttaaacacagacataacatacagtgcagtaatcccactcttacatgtttacccaagagaaataaaaacacaaagacttacatgcaaagattcataactttattaattacagccaaaatctggaaacaacccaaaagtctatcaacaggcaaatggaaaaacatgttgtagtatagccttacaataaaatactactcagcaayaaaaggaatgaaaatatcagtgaaagaagccaggcacaaaagactgtatgattctatttgtatgaaattctagaaaaaaaaattatagtgatagaaaacaaatgtgtggttgcctcagggtgggactgttgtgtggaaattggccaaaggggcatgagagatctttggaagaatgatgaaaatattttatatctttattatgggtttagttacattactatacatttttcaaa

SEQ ID NO: 366944 - DNA, 531 bp, Homo sapiens
tttgttacagcattattatggcaagagttgactcatgcaaagctaacatttgaggagaaattacaatgttctaggcactgagctacaaactttacatatattacccatttaattatcacaatgactctgtaagagaaaacattttacattgtctttctaaaatacatgatgaaactgaagcacaaataggataattgcattatccaaagtctcagagctagtaagtaaccaagtarggtttaaacccaggatgttataattctaatactcacccaatgcactaattatcaagatcaaattgaatttttaaattctattcttctagttggggtgttaaataatggttaacactcttcaatctccataaacccttttcttctcttccacctaacctgcccatcttcatacctgtatctaaacaaccatctgtttactgtaccccaactattgggttgtcagtagctagaaaagtacgctgccttgactccattacaaggttagctgatggactttccatatagctttgcaaaa

SEQ ID NO: 366945 - DNA, 582 bp, Homo sapiens
aagaaacgtagaaagatttcaaataatcagtctaatgatgcacctaaaggaattagaaaagcaagaataagccaaatcccaaagttagcagaaggaaagaagtaataaaaatcagagcagaaataaatgaaatagagaccacaaaaataaaaaagatcaacgaaaygaaaagttggcttttcaaaaagataaaattggtaaaccactagctagactaaccaagaaaaaaagagaagtccaaataaataaaatcagaaattaagaaatggaacatcacaaccaataccttagaaatacaaaatatcatcagagactattattaacagctatacataaacaaactggaaaacccagaggaagtggataaattcctggacatatacagcctaccaagaataaatcaggaagatacagaaaacctgaacagaccaataataagtaatgaaactgaatctgtaataaaaagcctcccaacaaggaaaggcttggaccagatggcttcactgccaaattctaccaaacatataaagaagaactagtactaattctcctcaaactattccaaaaaaataaagaggaggg

SEQ ID NO: 366946 - DNA, 582 bp, Homo sapiens
aagaaacgtagaaagatttcaaataatcagtctaatgatgcacctaaaggaattagaaaagcaagaataagccaaatcccaaagttagcagaaggaaagaagtaataaaaatcagagcagaaataaatgaaatagagaccacaaaaataaaaaagatcaacgaaatgaaaagttggcttttcaaaaagataaaattggtaaaccactagctagactaaccaagaaaaaaagagaagtccaaataaataaaatcagaaattaagaaatggaacatcacaaccaayaccttagaaatacaaaatatcatcagagactattattaacagctatacataaacaaactggaaaacccagaggaagtggataaattcctggacatatacagcctaccaagaataaatcaggaagatacagaaaacctgaacagaccaataataagtaatgaaactgaatctgtaataaaaagcctcccaacaaggaaaggcttggaccagatggcttcactgccaaattctaccaaacatataaagaagaactagtactaattctcctcaaactattccaaaaaaataaagaggaggg

SEQ ID NO: 366947 - DNA, 527 bp, Homo sapiens
tgcgcccggccggcaatttcttaaaataagacaacaatgaactttgccacattaattgaatctttctttcatgaacaattcttctatagcatgtgatgctgtttgayagcattttacccagagcagaacttctttcaaaatcggagtcaatcctctcaaaccctgccactactttatcaactaagtttctgtaatattttaaatcctttgttgtcatttcaacaacattcacaggattgctgagggattgttcacaggattgatgaggcctcattgtatgttgtcttttcttctacaattattttagttcttacttttaattcaaagattagatttaaatcctctcgggaggaaatttttttcttatgcattttttggatattatctgttgcatgtaagcatcctctatatgatttttatatcaaaacttaagcagcaacgttcctcaggagttgattttgtctcaagaaaccacttttttttttgctcatccacgagaaacaattcctcatctgttcaagttttat

SEQ ID NO: 366948 - DNA, 409 bp, Homo sapiens
acaaacaaacaaacaaacatgtatttgaggctggatggggaaattttaaattacaaagtgatgattaggttaaatgcctggcatgtaaagaatgagtcatggaagaaacgtggaattgggagattgggttcatttggctctgtctagagtatctgaactagatagctatttaacttctgtgactcttacttttaaaaatatctgtaaaataagggttttataccagatcaacattgcctaaatagtattacgattacgagttctgatttctagactattattaggcactattgatataaagtgtttgtagttaaatatgtttatgaaattgaagaggtctctcctgctggactttgtggactagatgtcatgataygtgtctccaaagtgggaagagaacagggagaat

SEQ ID NO: 366949 - DNA, 602 bp, Homo sapiens
taccagcctaaaatctagtccacatcctttataagactgatctctgttaataggtgaacattcctcaaactacatgaaaaaacttgcattctttctctgtgcttttgagatgtaaatttcctatcctgacttctctagaacttgatatttatcttctggaaatacaaaattcagggagatgactgtcatcagaaagaaaaaaatgtttagaaactggtcccatgaaaagtctcagaagccttctccatacaaattggtaaaaagctctagccatctggagcaggtaacgtgtcccgccaaatccagctagtgagtcttgaattattggacctggcatgtggcttaaagttaaagstgtaggatctgcttctttctgtatgattatgtcattaaatataatatagacatttttgcctgtgtttgctgatcaaacaggtatgttacctctgctaggtgtttaaggtcataatactttaaatccaacctcagagtagaatgcacagtaaatatggattgctaaaatgtatatgagtcatgggggaaaaaaaaaaaggaaaaactacatttaacttttaacttttagcttctttgatatttttgat

SEQ ID NO: 366950 - DNA, 440 bp, Homo sapiens
aaagcttttgacatttttgacaaagttctcaaaattaaattctaaattaagtctttttgacccaaattaactttgagattttccagttggcctcaaataagccagttggcttatttgatatgctaaattatatgggaagcattgtcaagtaataagggatgctaaacctgtaagttatatctatggatgttattcatatgagtgtttaaaaattatgagattcctagaagtctgatatgctattattcacaatttttggttattatgttaaaatgttgtatgccacagaaatcaccaaatttccttgtcatttgctgkttataatgaactcttaacagatttctaaccatgatcattttaagtcttgtctatagttaattgctttattctgatgatctttctgaaaagtttttgcaagcaactagaattgtaaagtgttg

SEQ ID NO: 366951 - DNA, 574 bp, Homo sapiens
ttattttgcaaacaaatcagtctactttgagtatctttactagaaatgaaagtgygtatagagagaaaaattatgtgtcagatgaaaactatagtgcacttgttattagattctaactaattgtttttgagggtccatatctacctgaaatctgggctgtattctgaaattcttctagtttcctctaatatctggccacaactctccaaaataatatttttaatttttctcccacccttctggcttgatatcattgaaattaaaactgttcttttcctgaagccctaaaattagccaaagcttgatgacttgatgtagacttcagggaaatcaccacagcagcttttgtatgaacaaccttcatgcctgttgctgtatagattactcagaaagctcacttgaaaactaaaagcaagaaaaagctgttagattgccactgcctgcactgtcttcacctgaagatactttgaggccaaatctagaaattgtctcaattggataccctctggactcaggaatgagtttatggattacttcaaacattaccttttgttttcttttgtttttatagaaa

SEQ ID NO: 366952 - DNA, 574 bp, Homo sapiens
cacccctatttcagtttttactgggttcagaggtaggccatctgagagacttaaaaaataatttaacacttggtttaaggaaaatgactatgtatacagctcatttacatggctttgcaatcatagaggtcaagaggtatagaattattccatatttaatagaagtgttaggattgctgagtgctagagatcctttcatgtgccttgatctccattttataggcgccattcgatgtttttgaaagtccatttgatatttttggtatttttattatagaaaccatttgatataggattaactgatttgataataaacattttatctatgagaaaatcagtaaaaatcatcatcagaaaagtctattgtcrttaaaatcaccttttggacattctgctaaaataataatgttcatttcttttccctgaggacacttaaatgcagcattactttgtactttattctattgcaaatgtcctttaaagaaaatgaagtacttagttgagagaacgtcttacatgattgctttaaagatcagaagtacatggaggaaatacttcacaggttgatggcttg

SEQ ID NO: 366953 - DNA, 446 bp, Homo sapiens
caaacatgagaacactgaaagcaaagaaccttcatgtggaaagaattggagggactggctacctgtgaaggtgtaagtgtaggtggggcagaaacagactgaaactcagtatcagaaagaattatacccctagacccatctccttttcacccagccaggaaactaaatctttaccactggcaagaaattagaggtttaatttttgaagaagttgaagcaaaaggattatgaattctaagactacagatatactgagtctccaaaaacaagagaattaatatctatatagtaatgaagattcataacctaccccgtgccttaccatatttgcattagacaacatggcagcayggtttatattcccagataaacaactagaatactcctccctgtagaaacagacctcctaagaaaaaaggtctataaataagcaggaaaatggtggg

SEQ ID NO: 366954 - DNA, 596 bp, Homo sapiens
ggaggtagaaaaactaaccaaaracatatcaccgtgtctgtgatgatttctcttgtggatttgcagtactttggagaagaggcactaggtaatcagtatgaatcattgtaactattattcctagccttttaagctactgaatgggagtaagagaagctgagttctattcatatttcttccagaatttctccctgggagatctaggaaagccactgtgtgctttcatttccttacttgaaattttcttttatgatacctacttttacttatttgacaattgcaaggataaattaggtgctttgtgaatgctttgaagcaactccttaagaacatgatgttacttaacaatttctattagctaatcaaatttgttcaatctaacacctctgttgattttgtcagagaatataagaatttatagaaatatatttcagataaactttataagcaaactcattaaaacattacagagcatttttatcatcagcccaaatgaaatgattgagtttgaatattagaaaggtatttggaagttgtgataaccaaaatgagacccctgaaagatgcccacatcttaatgcctgaaagtttgtaaa

SEQ ID NO: 366955 - DNA, 601 bp, Homo sapiens
tatttggtccattgtctttggcagcttctatcaagtttgtgatctttttttatcacattcatcagtaaaacaaatattacatgtcctactaatgtagggtagaacccttaaaggcatgtgtaagtagaatcaatgatctgacaggtcacaccaactggtcctcataaagacccctttttatcctctggacacagacttgctggrcaattattcacctatatttgtctattcagttttataaatgttttttgatggtacatttttattatcaatactttcttttaaagcagcctttctatcactcaatggagaattggctcacaggtagaaatcagataataaatgaccacttttctttgaagtggcgtctccaagacacttcatcattcatcattgatcattgatttcttttgattgtataaattaggtaatacccttgtttgtcccccaaattgtggttctctacatctctgtcctatctcttagtttttggaagtcagacttttagatgtcacagtgactttgctgcccattatgggaagtacaccagcctttattctgtgtttttaaatgccccctgacttctatattttggaatcct

SEQ ID NO: 366956 - DNA, 565 bp, Homo sapiens
gatgaagcataataaagaatctgtaaccatgttttcatagttgactgctatcagtttttaattttgcaccaccttcttttccttgttccccacacatgcacaagctgatgagaaagtctaggttctccgtcctttgctgctgatgaaagaatcacatcatctaagcccctrcccatgcagaggagctcttacccccagtcgcacccctattcataaaataatcttaagccattcttccttctttgcagtttcaagacattttgagagaccttcgtgttccttcagactcaattatatttgcagaaaaccttttcctatcctcctggtgtgagcatgtagcaacatcagtcacaacatctgaactgaattttcgatgtaggagtatccatcctgccttttcaggctgggcagaacagaatattaacagaatgctgtgtatattagataagtaaaatatgtgaagcacttaggacaatgtctggcctacagtgaatgttcaccctaccatgtaagttattttattagtaaatgccatgcaccactcctctccctcccagtgttttga

SEQ ID NO: 366957 - DNA, 565 bp, Homo sapiens
gatgaagcataataaagaatctgtaaccatgttttcatagttgactgctatcagtttttaattttgcaccaccttcttttccttgttccccacacatgcacaagctgatgagaaagtctaggttctccgtcctttgctgctgatgaaagaatcacatcatctaagcccctgcccatgcagaggagctcttacccccagtcgyacccctattcataaaataatcttaagccattcttccttctttgcagtttcaagacattttgagagaccttcgtgttccttcagactcaattatatttgcagaaaaccttttcctatcctcctggtgtgagcatgtagcaacatcagtcacaacatctgaactgaattttcgatgtaggagtatccatcctgccttttcaggctgggcagaacagaatattaacagaatgctgtgtatattagataagtaaaatatgtgaagcacttaggacaatgtctggcctacagtgaatgttcaccctaccatgtaagttattttattagtaaatgccatgcaccactcctctccctcccagtgttttga

SEQ ID NO: 366958 - DNA, 565 bp, Homo sapiens
gatgaagcataataaagaatctgtaaccatgttttcatagttgactgctatcagtttttaattttgcaccaccttcttttccttgttccccacacatgcacaagctgatgagaaagtctaggttctccgtcctttgctgctgatgaaagaatcacatcatctaagcccctgcccatgcagaggagctcttacccccagtcgcacccctattcataaaataatcttaagccattcttccttctttgcagtttcaagacattttgagagaccttcgtgttccttcagactcaattatatttgcagaaaaccttttcctatcctcctggtgtgagcatgtagcaacatcagtcacaacatctgaactgaattttcgatgtaggagtatccatcctgccttttcaggctgggcrgaacagaatattaacagaatgctgtgtatattagataagtaaaatatgtgaagcacttaggacaatgtctggcctacagtgaatgttcaccctaccatgtaagttattttattagtaaatgccatgcaccactcctctccctcccagtgttttga

SEQ ID NO: 366959 - DNA, 450 bp, Homo sapiens
ttttttcacatcattattttagtaattttaatttctacttagtatattagtgttattgttagtattttataktaactttattttattattaaatgtatgctattgccaggctcggtggctcacgcctgtaatcccagcactttgggaggcccaggcgggtggatcacctgaggtcgggagttcgagaccagcctgaccaacagggagaaaccctctctctactaaaaatacaaaaaaggattagtcaggtgtggtggcgcatgcctgtaattccagctagtcattactcgggaggctaaggcaggacaatcacttgaacctgggaggcggaggttgtggtgagctgagattttgccatttcactccagcctgggcaagaagagcgaatctctgactcaaaaaataaataaataaataaataaatatgttgtttactagcattataacaat

SEQ ID NO: 366960 - DNA, 556 bp, Homo sapiens
agtagctcatgcctgggtaatcctaacatattaggaggctaaggcaggaggatcacttgagcccaggagttccagattagcttgggcaacacaacaagacctcatctctacaatgattaaaaaattatccaggtayggtgtcatacatctatggtcccagctactcaggagtctgaggtgggaagatctctttggtccaggaggtcaaggctgcagtgagccgtgatcatgccactgcactcctgggtgacaggagtaagaccctgtctcaaaaataaataaataaataaataaataaataaataaataaataaatatttaaaagaaagttcaaaggagagctgcatcagaatacagttcttatccagacaaagactagtgcacacaaatatgaatttaagggaatacacattgaaatgtaagttatttattaccataaatatgaaaattgtattctaattatatgtgtcaaagtgaaaaatattcacctcataaagttcatttttattctgaaattggaattaaagtcaccaatcttcattttactatcactgag

SEQ ID NO: 366961 - DNA, 545 bp, Homo sapiens
ccattgagggtgtacaatacaatgttttcatgtacacctaaatagtaaaataattattacagtcaggcatgttaaaattcttgttgccacgtagttaccccgtgtgtgtgtgtgtgtgtgtgtgtgtgtgtgtgtgtgtgtgtgtgtggtagggcacctaaaatctaatctcttagcatatttccattatataatgtgatattattaaatatagtcctaattctatacrttagattgctagacctatttattttaaataagtaaaagtttgtgccctttgatctgtatcttccttctctctgcccctagtaaccaccattccactttccatttctatgtattcatgatttttagattccacatataagagaggtcatgcagtatttttatttctgtaacttcattatgctacttaatgtcttcttggttcatccacattgtcccaaatggcaggatttgtttctctttaatggccgagtaatatttcatcatgtccatgtgtataccacaatgtttttattcccccatccatctatagacatgta

SEQ ID NO: 366962 - DNA, 545 bp, Homo sapiens
ccattgagggtgtacaatacaatgttttcatgtacacctaaatagtaaaataattattacagtcaggcatgttaaaattcttgttgccacgtagttaccccgtgtgtgtgtgtgtgtgtgtgtgtgtgtgtgtgtgtgtgtgtgtgtggtagggcacctaaaatctaatctcttagcatatttccattatataatgtgatattattaaatatagtcctaattctatacgttagattgctagacctatttattttaaataastaaaagtttgtgccctttgatctgtatcttccttctctctgcccctagtaaccaccattccactttccatttctatgtattcatgatttttagattccacatataagagaggtcatgcagtatttttatttctgtaacttcattatgctacttaatgtcttcttggttcatccacattgtcccaaatggcaggatttgtttctctttaatggccgagtaatatttcatcatgtccatgtgtataccacaatgtttttattcccccatccatctatagacatgta

SEQ ID NO: 366963 - DNA, 545 bp, Homo sapiens
ccattgagggtgtacaatacaatgttttcatgtacacctaaatagtaaaataattattacagtcaggcatgttaaaattcttgttgccacgtagttaccccgtgtgtgtgtgtgtgtgtgtgtgtgtgtgtgtgtgtgtgtgtgtgtggtagggcacctaaaatctaatctcttagcatatttccattatataatgtgatattattaaatatagtcctaattctatacgttagattgctagacctatttattttaaataagtaaaagtttgtgccctttgatctgtatcttccttctctctgcccctagtaamcaccattccactttccatttctatgtattcatgatttttagattccacatataagagaggtcatgcagtatttttatttctgtaacttcattatgctacttaatgtcttcttggttcatccacattgtcccaaatggcaggatttgtttctctttaatggccgagtaatatttcatcatgtccatgtgtataccacaatgtttttattcccccatccatctatagacatgta

SEQ ID NO: 366964 - DNA, 545 bp, Homo sapiens
ccattgagggtgtacaatacaatgttttcatgtacacctaaatagtaaaataattattacagtcaggcatgttaaaattcttgttgccacgtagttaccccgtgtgtgtgtgtgtgtgtgtgtgtgtgtgtgtgtgtgtgtgtgtgtggtagggcacctaaaatctaatctcttagcatatttccattatataatgtgatattattaaatatagtcctaattctatacgttagattgctagacctatttattttaaataagtaaaagtttgtgccctttgatctgtatcttccttctctctgcccctagtaaccaccattccactttccatttctatgtattcatgatttttagattccacatataagagaggtcatgcagtatttttatttctgtaacttcattatgctacttaatgtcttcttggttcatccacattgtcccaaatggcaggatttgtttctctttaatggccgagtaatatttcatcatgtccatgtgtataccacaatgtttttatycccccatccatctatagacatgta

SEQ ID NO: 366965 - DNA, 547 bp, Homo sapiens
atatacccaggtaccaaacctgcatatgtaacccctgaatctaaaataaaagttgaaattattttttaaaaaagaaaaaaccgtttccttgtttcaattgcttcattcatcartgtcctgcctcttggaatattagataaatgtagttgacaaaaatttaaaaacaaagcatttttacttgtgcagttgaaaaaaacaagtctgaagggatcagggatatttcattgcttctacttactctgagtctccaactataaagcatgtcattcacagaaatgacatagatcataaatccttttttacaacttatatgttttggcttcatttttattaggtcacaggtgacctaataatacatatatgtattgtgatatacctaggttctttggagggagctactcaaatctaaaaaccataatttcaacagcaattattctaaaggatttgcccaactgaggaacaataataatgggagagactctttgtttgggtccttactattacactaataaaatactgctgtacatgatgaaacatacaacgaaat

SEQ ID NO: 366966 - DNA, 615 bp, Homo sapiens
atcaacgttactggacaggtcagagaataaggaagtaatagtaatataaatctcagttaaggaattagtaaaaatttgattcataacttctttacatgaagtatccaagagcccaaatgaaataaaaacactctaagaaaattatttaaaaagtgactctaaaggcagatgttaaaacaaagtgaagaaatacaaatagataaatgagaaaaatagttacagggaaggaaaagccttaatagattaaaggtaatgtttaagaaggtataggatatcagcacatattgcatctagaaataatctatcttttattttggcaatttatgaacatgcttttwatcctaaaacctgagtattataattgtattcagcaacaatacaggtataaaccttacccattcttcagtgctgcctcctccaggaacgtctttcaaattccctgaaaatgaatttataaagacatttgcttataccttgcttaggacacctctctctacctcagataggaacagtgtgcacactgttccctcatactggtctgcaaatcctgcatgggggaacaagtcaaaccagattcaacttagttcctctatgtggcctctcgtgaagacatat

SEQ ID NO: 366967 - DNA, 579 bp, Homo sapiens
aaacagtataattaagaacaatcagatgaaggtggcaaggagccacatactaagtctacaaaagtaggagaatagaaatacagcatccatggatgtaaagttcatgatctaatgtaatccttgtaaaaggaatgtatttgaattaatgtaattcttataataggaacatgtttgaacttaattttagttgtgcatcttagagagttcagagaactattaatgtttgcctaaattaactatgtgaattcatcttaagggttttatttaatcaaaaacgctttcattttctgttgttttaaggaacttagaaaactatcagatatctggaagtgaagtaaagcttatgaagaaaaaagcagtgtggaactgcagtgatttaaaagaaacaagatgggacccatacactcagcattaaaacatataaatctgtaattattctagtgaatttgataaacaacttcatttctagtatgttacactcacaaagctgtaattgaattgaactaaaattgttcaagagctaaatattcaaggtgaacactasgttctctgttacgtgatggatcttgtcagtgttaa

SEQ ID NO: 366968 - DNA, 465 bp, Homo sapiens
tgttctgttggcaattaacataaaacattggaatataatagatgaaagtgacattacaaattaagataattaagattagcaatgatttcattattaatatgcttgccaagaaaaagacaaacgtcttctatgtgaatcatctgcaaattaataatggaatcagaggatggtatacagagggttaaaatcaagaaagctcttgagggcaatttaatatatgattaaggagtttctaaaatataatttcttatggtaagactactaaaataatatgaatgagaatgcacaaaaccttaaatgacttgtgtaagcataatgatacatctgaaaactagcatkttacggatagtttaagaattagcaataatagcataatagtaaggtgtaggtagagatgcagaatataattttttaatcaaatccaacttttttgatttatcatgttgctcaaaatgtgacagaaaa

SEQ ID NO: 366969 - DNA, 482 bp, Homo sapiens
tttagccattgcaaactggaacaacaaaagtagcctccccttagggttgttgtgaagattaaatgattctctctctctatgtgtttgtgtgtgtgtgtctgagagagatacatatatatatatatgcctgataatattctaaaccattgaataatatcaggcagatagatattgcccagtgaatttaaattatcattattactttatcgatattggataggaaagtatcatattacaaagtaagatatcatagttaaaagttcacaatatgaagaaatgcacgtgaccacrttcccctaagtcactttcctaaacagtgcatataaatgttgaggacaatctcagtaaagtgttaagattatttttataccatctaaagtaaaagataaggatttgaaggtttgggatgtttgctttctggatttcatttggtttgttttttcaatccttagatgctttttttgtcattgctcaccaaagat

SEQ ID NO: 366970 - DNA, 581 bp, Homo sapiens
ttatcaaatatttgaccattaaaagtatattaaacattatcaatagagtggaaagataatgcaccaaatgggagaaaatattttatatagtctatttgatgaaaaactaatattcagaayaaaatgtacaaaagacttcaatatccatttatccaaagaagatatacaaacgaacaataaaaacaacatataaaaatatagtcaacatcactcatcattagacaaatgcaaatcaaaaccatgatgaggtaccacttcacatccattaggaggctattgagagagtgacagagaaagagagagagaggcagaggaataaaaaagaaaaaaggaaagaaaaacggaaaataactaatgtcagtaagatttgaaaaaatttgaaccctgatgcattgctggcatgaatgtaaggcaacttctatggaagaaaacacagctattcctcagacagttcagcagttacatgattcaataattccacttataattacacacttataactatagaaagcgggacccaaacagatacaccaatgtttatagcagcattattgacaatagccaaaagtggagaccaccca

SEQ ID NO: 366971 - DNA, 581 bp, Homo sapiens
ttatcaaatatttgaccattaaaagtatattaaacattatcaatagagtggaaagataatgcaccaaatgggagaaaatattttatatagtctatttgatgaaaaactaatattcagaataaaatgtacaaaagacttcaatatccatttatccaaagaagatatacaaacgaacaataaaaacaacatataaaaatatagtcaacatcactcrtcattagacaaatgcaaatcaaaaccatgatgaggtaccacttcacatccattaggaggctattgagagagtgacagagaaagagagagagaggcagaggaataaaaaagaaaaaaggaaagaaaaacggaaaataactaatgtcagtaagatttgaaaaaatttgaaccctgatgcattgctggcatgaatgtaaggcaacttctatggaagaaaacacagctattcctcagacagttcagcagttacatgattcaataattccacttataattacacacttataactatagaaagcgggacccaaacagatacaccaatgtttatagcagcattattgacaatagccaaaagtggagaccaccca

SEQ ID NO: 366972 - DNA, 581 bp, Homo sapiens
ttatcaaatatttgaccattaaaagtatattaaacattatcaatagagtggaaagataatgcaccaaatgggagaaaatattttatatagtctatttgatgaaaaactaatattcagaataaaatgtacaaaagacttcaatatccatttatccaaagaagatatacaaacgaacaataaaaacaacatataaaaatatagtcaacatcactcatcattagacaaatgcaaatcaaaaccatgatgaggtaccacttcacatccattaggaggctattgagagagtgacagagaaagagagagagagrcagaggaataaaaaagaaaaaaggaaagaaaaacggaaaataactaatgtcagtaagatttgaaaaaatttgaaccctgatgcattgctggcatgaatgtaaggcaacttctatggaagaaaacacagctattcctcagacagttcagcagttacatgattcaataattccacttataattacacacttataactatagaaagcgggacccaaacagatacaccaatgtttatagcagcattattgacaatagccaaaagtggagaccaccca

SEQ ID NO: 366973 - DNA, 589 bp, Homo sapiens
atttgtttaattcctgtgtacacaaagtgaaaataaaacttttatattattgtgcattataaggtgcgtatttatttaacttcatcccttaaccatgtcacactctaagatctggaactatttttagctccctgcctattatttatctgtattctaggcaagtaataactgcctctaagatgtttgatcccatacatttcttagctaagctctccactcttgacattaatttttctagaaatcctttccaatcgtcattcaacaatcgtctccgttgtctttcttctataaacctttcgaaaagctcaaacaaaccagcttttacactgaataaaaattgattgcttcttasactgttagcaatttgagagtatatttgcctttatttccccattatttagcctggtacttaagtcataaaggtcctaaacatcaattggatatgaattaatgatagtcatttaccacattctgatttcaatgcacttcaatgctatcacacattaaattaggatgggttaacacaaacagtggtggtaatgaaataaattatatattaaaaacttttattatagagcaatatggttat

SEQ ID NO: 366974 - DNA, 516 bp, Homo sapiens
ggtaatactaagagacgccctgatggatttcctgtattccatgcatactctttcttacctcygttgtggagtggtagactgatttcatcttgatagtccgagtcactcaccccagctaacaccgtaactgccttcttagcttgttgacttaaaggtaggtggagcgcaaagtgtccaggtggcagttttaacttccagtttaatggaataattgttgtgtcccctggtggcagtgttcctccatctggaactaagacctctaggccggcaaaatgcaatgtcatgggaacaggaagcaaaaattttgctagtggatcactaggggggctgttgagtggtgccacttccactccaccccttgattcctggacccatgaatcgtggctataggagaaacagtaccatataatggatggtgattcagagcatacacagccttctggagaactttgtcccagccctgcaaactgttgtcacatagttgccattgtaattgtgacttcaaaaggctattcc

SEQ ID NO: 366975 - DNA, 496 bp, Homo sapiens
gaattcaaatcgtggttttgcattctgttatttgtataatcttgagcaatttacttaacctctctctgtttcatttccttatcttcaaaggaagataaaaaaataactgacttcatgagatttgaagattctatcaagtaatagtaagtgttggcatttggcattatgcaagcttgctttaaaaaagtgaacaacctctctcaattaatccttatagcctgtttgaggcagtcactgtatatttttgccaattccaagtgaaaaaatgaagctctaaaatgttaaataacttccccaaagatayagatagaaagtatactctacccaggcctagtggcgccaacctgtaatctcagctatttgtgaggctgaggtggtaggatcgcttgagctcagaaattcaagaacagcctgggcaaaatatcaagaacccatctctaagaaatagtaatatgaaaagcagaatctagatgtgggggcttgtgtttataactta

SEQ ID NO: 366976 - DNA, 553 bp, Homo sapiens
tgtggttgcctgaaataaagggtattaaaaaggcatactttagtaaagtgtgtggcctctgtaataagccatttcgttaacaaaagaaaaaatatggaggtctgtggagtgaactggtgattagtaacacacacaatttaaggaaagaaaattacaaacgcatgattttaaattttcagtttaaaaattttcacttgaccaagaagcttctgtaatttccttcgatcatttaaccataagtctcatattgcaaaaaaatcagatgcagaatctgtcccttcaaattgccgtttaaagcctagattaattttgcagcttcacaataaatactatgtgaccatcaaggtattaattggaacaacattgaacacggagaattggaattgcattttcagtgaaaattgggaamactatgaataaagcaaactaaagaatccttctgaaccttttgttgacaacaaaaacggatctgttccccttgtcttatgcacccattataattttatttgaaacaacacatatctttatccaaatccaagagtattaccttgca

SEQ ID NO: 366977 - DNA, 620 bp, Homo sapiens
atttccacttgcaaccccagtgcaaaagaacccatttatgtcaccctccaacctataccccttasttacacaatgcaatgctaagtgagttggtgcaatgtgtggtaatagtagtaataccttggttctcaaaaatgcagtaggttcccttatggggtgagaggatactgtcaatgaagttagagtgaaaagacactgcagttttacccaatattgtataattattgtacttttattatagatttttatataaccatacaatcactttaacacattactagtgtccctctcataggactgaagggacatgtacaagtgaggggctctgaattttaaacttcattaacttctgcttttaagaatgggccagagttttttcttatgttttagtttggatttttagaaccatggccagaaatgagtatccttgtgcaagatattttttaagtgctgtctggacacaaggagtagaagtagtaggatagaaaagatgcatatatctaagcaagaatgaggtcttacttgcctgaatccacccatgggcagctctagtgcatgtgcatgaagtacacccagaatttgtccatttttctatcctttatgcattcattgacagtcat

SEQ ID NO: 366978 - DNA, 620 bp, Homo sapiens
atttccacttgcaaccccagtgcaaaagaacccatttatgtcaccctccaacctataccccttagttacacaatgcaatgctaagtgagttggtgcaatgtgtggtaatagtagtaataccttggttctcaaaaatgcagtaggttcccttatggggtgagaggatactgtcaatgaagttagagtgaaaagacactgcagttttacccaatattgtataattattgtacttttattatagatttttatataaccatacaatcactttaacacattactagtgtccctctcataggactgaagggacatgtacaagtgaggggctctgaattttaaacttcattaacttctgcttttaagaatgggccagagttttttcttatgttttagtttggatttttagaacyatggccagaaatgagtatccttgtgcaagatattttttaagtgctgtctggacacaaggagtagaagtagtaggatagaaaagatgcatatatctaagcaagaatgaggtcttacttgcctgaatccacccatgggcagctctagtgcatgtgcatgaagtacacccagaatttgtccatttttctatcctttatgcattcattgacagtcat

SEQ ID NO: 366979 - DNA, 529 bp, Homo sapiens
tccatggaaaacaatgttaggaagaatttgtggagaagatacagaatgtatagatctctgtaatacaccagtggttttgatatatccttatcctctstggaatgcagagtaggtaggaaagaatctactcttttcatgtcttttgatgtaaacactctgatttaattgcatctaattggacatttcagtcaaattgcaatttcaatttcctgagtcatcttcaacatctatgacatgacatgcagaagtaaaaaattatcagatttagtgctattttattgttagaaatagctttcagaagtacatcagtcaagtgtgtatttctgcttgaatgtgtgtgtgtttccactccaaaggcttaagaaggttgttacttccaattaagtagaaaaatgtgaaaagatatgatgttataattagctattaaatttaactgctataattaaataaaattaattatgtgattttaaagtagcaagtgaagaaattagccataaaaggtcaattttacataacaaaatataaaatt

SEQ ID NO: 366980 - DNA, 638 bp, Homo sapiens
agatgaacaataacaatggtcagaaaagaaatgtaggtagtgaaaattttgactgctatcgttttgaattgttgatgcatggggttatacccaggagtctgaattacagtgtttcattattatttacacatttctacagacagtgcacctttttattgcctgaacctgaggcataccactaccacacttcgctcttggcacaccagtggccttaaggactcataaatgcaagatacaggttttctttctttctttttttttttttttgagacggagtctcgctttgtcgcccaggcgkgagtgcagtggcgcgatctcagctcactgcaagctccgcctcccgggttcatgcaattctcctgcctcagcctcccgagtagttgtgactacaggcgcccgccaccgcacccgtctaattttttgtattttttagcagaaacggggtttcaccgtgttagccaggatggtctcgatctcctgaccttgtgatccgcccgcctccgcctcccaaagtgctgggattacaggcgtgagccaccgcgcccggccaggttttcatttaatttaatatgatgaatgtatttcattctatttttcctaagcacgtgttgtacatctcaataaaaatacaactaact

SEQ ID NO: 366981 - DNA, 634 bp, Homo sapiens
atgagccaggtgttttttttatcaaagcaattggaaaaagaccacaaaggcatttcaaagatttttaaatcttcccctccaatcacaggccttagatctaggagggcagaatggttattagagatgagcctggtgtaccctccacaggctcactaccatggctgcctcaggactctgcttcccacattccagcccagcatagcttttctgccctagctatgattcaagaagctcagaagtgactcaaccctctgcaccaaaaggtatgagcagtaagccttggcaatgcccacatgrtgctaattctacagacatgcagaatggaggaactatgaaagtgtggcttcttccacttaggtttcaaaggaagttgtgaacttcctggaagcccaggcagcaacctgccacaggaaaagagttactgcaaagagcccttactagggcaatgccgagcagaagtatggattaggagctgccacagagagtccccactagggaaatgggacccatggaaattagttcattcccaagaacacagaaccatagggctgtcagcatgtaacttctgcctaggaagctgcaggtatcagactccaccctgtgagagttactgggtggacttacccaacaaaac

SEQ ID NO: 366982 - DNA, 572 bp, Homo sapiens
taagaaaaacatagttagtgttttaaaaatgaagtaccatggactttcagcagagtgatgggtctcttcttattgatatataaaacatacttctcaccataattgtattaaagtagaagaatatttacttctactagaagtaaggttagaaggcagagtaccaatagtacctaccagtattattatagaagaagatcatgcagtttttttagatcataaaaatgcttaatttctgaggtgtaatcagttcacatatgatacatcatataaatcagtttatatatgaaaaattagagattgaaaaacaaattcatcaacatttatgttattcgttaaattaattttaaaatgaattaaaacaaaaaattaaacaataygtccaaagattttagattgatacagacaaaagttttatggactttgatgtagataagaattaataaaataggtattgaatatatacttggctaggtgtaatgtaagaaaagataaaaaatagattagtcttaattcaatagctctaaaaatatattattaaaatgtatctatttgagacgtcttcaccataaact

SEQ ID NO: 366983 - DNA, 572 bp, Homo sapiens
acctgtggaagtttgaacttgagagtggatttaggctattgggtagaacaaatttctaagcagtgaagtgttcaagatgtggtctgactgcttctaacagcctacactcatatgtgtgaacaatgaaatggcataaaactggaacttatatttaaaggagaagcagagtgtaaaagtatggaatttgaagtatggccatgtggtagaaaacaaaagcctattttctggggaggatttcaagcaaatggaagaaayttgcataagtaaaaagaagccaagtgctgatagccaagacaatgagaaaaccctctaaggcatttcagagacctttatgtagcccctcccatcacagaactagaggcctaggggtatagaatggtttttatgggctgggcccagggcatctctgccctacagagcctcggaacactggtctctgcattccagccattacagctccagcagtggttcaacagagcccaggtacagcaaaagctactgcttcaaagaatgcaaactgtaagctttggtagtgtccatgtggtgttaagcctacacatgcacagagtgca

SEQ ID NO: 366984 - DNA, 572 bp, Homo sapiens
acctgtggaagtttgaacttgagagtggatttaggctattgggtagaacaaatttctaagcagtgaagtgttcaagatgtggtctgactgcttctaacagcctacactcatatgtgtgaacaatgaaatggcataaaactggaacttatatttaaaggagaagcagagtgtaaaagtatggaatttgaagtatggccatgtggtagaaaacaaaagcctattttctggggaggatttcaagcaaatggaagaaatttgcataagtaaaaagaagccaagtgctgatagccaagacaatgagaaaaccctctaaggcatttcagagacctttatgtagcccctcccatcacagaactagaggcctaggggtatagaatggtttttatgggcygggcccagggcatctctgccctacagagcctcggaacactggtctctgcattccagccattacagctccagcagtggttcaacagagcccaggtacagcaaaagctactgcttcaaagaatgcaaactgtaagctttggtagtgtccatgtggtgttaagcctacacatgcacagagtgca

SEQ ID NO: 366985 - DNA, 377 bp, Homo sapiens
agagcctcggaacactggtctctgcattccagccattacagctccagcagtggttcaacagrgcccaggtacagcaaaagctactgcttcaaagaatgcaaactgtaagctttggtagtgtccatgtggtgttaagcctacacatgcacagagtgcaacagctgaggctttggaacctctgcctgaatttctgaggatatatggaatagccttgtgtccaagcagaagcctcctgtagggacagagcccttatggagaacctctactagggcattgcagaaggaaaatgtggggctggagtccccaaataaagtccccactggggcactgcctagtagagctgtgagaagaagatcacaccatactccagaccccag

SEQ ID NO: 366986 - DNA, 557 bp, Homo sapiens
tgaataaaacatttttttctagatggtttattttctggctgaattattttttgatgctctgtatccatgattcttaaagctggcaacatatcagtttcacttggaaactttttttttacttgtttgtttaaaaagactcctgttcactaaccccaaaggattcagatttcatatgtgaggaaagaagactagcaacatgttttttaaaggagcccaaggttaatctttatttggaaccaagcttgaaaacaaattcttaaacatgaggcagaacggaagagtatttaccagctcaggttctgggatcagaaatataggattgtgttctaactgtacaactcaytggctgtggatttgaaaaagtttccttaatctaaaacagagaaaaaaagttctaagtgaaacatgagacactaaataagcaaacaatacatgttagcattattattattatggagatgtttcagtaattttttcagatacactactcttttactaatttatactgtttggcattatctcttaattcaaaaattataattacatgcatttttatt

SEQ ID NO: 366987 - DNA, 386 bp, Homo sapiens
ccctcaaataccagttttgaggtttrtttctttcaatgaatgtggaagacaaaagtatatctataaatctggctgagtgaattaactcagcaggtctattattattatcataatttgatgagttactagcattcttttcttagggtataaaaaaactggctaccaaggttattggtactcttttcaacttgaagtgtgactccttgatggaagaagccatattataatatcgagcaattgtatttagacccatccaggtgcatcaggagaacatatatgagtcaacatgggtccaagaattagacaaacttaggtttcttccatgtttcactatttattggctgttttagttagagttacacaattgcaaaaaaaaaagaaaaatc

SEQ ID NO: 366988 - DNA, 571 bp, Homo sapiens
taagtattgagagtacttggctttcaacctcatgccttatgacttttctaaaccactgaatgtactcaaaagaagaatataacctgtcatgggttatgccagcctgggcatttaaaatctcagtgagacatgggagaaaaaagtcagtatattcaggtgtcttttactcaaagctaaaatcattggtaaacttttgcctattttatgtgattcttaaattttcttaagttttgaataataaggagtggttttaataataaaaatgtcacttttatttaaagttaaaaaccaaaagttagtgcttaatacaatataagggctatagtataatctttttttatattcaaatttagatctatggacagcaaaagacatatgtcaaataaagtctatcatctgttaaaaaactttctaaattataagtaactcagtgttaaatgcccacatctcctaatgtttcctccattttagttccctacgtagtttatgagttcrtaaacatttatttaaataaaaattcaaattccaaaacaaaaaaatccaattgggggtcatttcattaatgtttatc

SEQ ID NO: 366989 - DNA, 573 bp, Homo sapiens
atgatggacttgaaaaacagctagtttcaaatcagaataattgcctttttcttatgaagttagtctggagggtgaagactggagattgctttctttctgtgtgaattagttgtttcttttaaagaaacaaaatcaacataaggaaatacctgggagttttcaatacagatgtctccaaaagtattattgctgccatgttattttttcaatgtgtcacataatgtttatataatttataaatgataacaaagccatcaggccccatttataaaagcccagttacacatcatttagttgaattttaggattagaattaattgtctttttttgttccmagttttaaattttagtaaatgattccctgtatgtcattacagcttaatatttgcatgaaatcccagtttagctggcataattttacagccatttaaaagctattttatcatcatgccaattggtatgagggccctttagtaagaagggtgtcagccctcctggttttttttttttttgtttttttttttagtatctgcaggcggacagttatatacttatagacacccataacataat

SEQ ID NO: 366990 - DNA, 573 bp, Homo sapiens
atgatggacttgaaaaacagctagtttcaaatcagaataattgcctttttcttatgaagttagtctggagggtgaagactggagattgctttctttctgtgtgaattagttgtttcttttaaagaaacaaaatcaacataaggaaatacctgggagttttcaatacagatgtctccaaaagtattattgctgccatgttattttttcaatgtgtcacataatgtttatataatttataaatgataacaaagccatcaggccccatttataaaagcccagttacacatcatttagttgaattttaggattagaattaattgtctttttttgttcccagttttaaattttagtaaatgattccctgtatgtcattacagcttaatatttgcatgaaatcccagtttagctggcataattttacagccatttaaaagctattttatcatcatgcmaattggtatgagggccctttagtaagaagggtgtcagccctcctggttttttttttttttgtttttttttttagtatctgcaggcggacagttatatacttatagacacccataacataat

SEQ ID NO: 366991 - DNA, 573 bp, Homo sapiens
atgatggacttgaaaaacagctagtttcaaatcagaataattgcctttttcttatgaagttagtctggagggtgaagactggagattgctttctttctgtgtgaattagttgtttcttttaaagaaacaaaatcaacataaggaaatacctgggagttttcaatacagatgtctccaaaagtattattgctgccatgttattttttcaatgtgtcacataatgtttatataatttataaatgataacaaagccatcaggccccatttataaaagcccagttacacatcatttagttgaattttaggattagaattaattgtctttttttgttcccagttttaaattttagtaaatgattccctgtatgtcattacagcttaatatttgcatgaaatcccagtttagctggcataattttacagccatttaaaagctattttatcatcatgccaattggtatgagggcccttkagtaagaagggtgtcagccctcctggttttttttttttttgtttttttttttagtatctgcaggcggacagttatatacttatagacacccataacataat

SEQ ID NO: 366992 - DNA, 620 bp, Homo sapiens
  misc_feature (1)...(620): n = A,T,C or G
tcctcaaagcagaaaatcaacaaagggcctctggacttaaactggactgtaggctaagtggatttaatagacatttatagaatgttctacctatcagccgcagaatatacgtttttctcacctgtgcatggaagattctccaaaattgaccatatgcttwgtcataaagcaagcctcaataaaatcaaaaaaataaaaataatatcaagtatcttaagatctcagaccatggtggaataaaattagacgtcagtgcacgaggagaacactcaaaactacacaaaaacatggaaactaagcagattgcttctgaatgactttttggtaaatgatgaaattaaataacaaatcaaaaacttgaaggaaaatagagatacaacatatcaaaacctctgggaaatggcaaaagcagagctaagaggaaggtttatagtgtaaaatgcctacatcaaaaaaaatacagagaactgaaattaacaacctaatatcgtaactcaaggaactagaaaaacaagaacaaatcaaacccgacactagcagaagaacagaantaacaaagatcagagcacaaataaatgagattgagacaaaaaacaagaaaaagatacaaaggattaacc

SEQ ID NO: 366993 - DNA, 443 bp, Homo sapiens
taaacttgtttacatacgtgccctcaataacaaatacagtagaatgattaccatatttgataatattagattttgtttaaaatctagaattactataaaattcacacaaagccatgttacatattttgaaaacaacacaaagaattggaaacttcagtttggtccactctcatttgagctaatctcagttgcttctatggtatcaacaatcgttgtgcttgaggaagacatcagcttgaattttgcatgtctctgtacattaacaatatcatctcaatgacacagtcacaaaattcytacggttttctattgaattacgtgtatttttaagatatgagattgttttaatggatctcagaatcacctgttatacatcatgttggtttggtaagcatggaaatctattgattttatatgttccatttttctactgagtagataat

SEQ ID NO: 366994 - DNA, 485 bp, Homo sapiens
  misc_feature (1)...(485): n = A,T,C or G
nnnnnnnnnnnnnnnnnnnnnnncattcaagagatacactgtatatcatagtaactataataattattctcatccttgttcttacaccttttgcaatacattacacacttgaaaattgctaatagactttttttttattatactttaagttttagggtacatgtgcacattgtgcaggttagttacatatgtatacatgtgccatgctggtgcgctgcacccactaactcgtcatctagccttaggtatatctcccaatgctatccctccccgctccccyccacaaaaaataagtatgtgagataatggatatattaattagcttattcagtcattccacaatctatacatatatcaaaacattgcatatcataaatatatataatttatatttgtcaattaaaacataaataataaaatcataaaaatgaaggcaataatgctattttaatttgggttcctccagatactaaggcagcacataa

SEQ ID NO: 366995 - DNA, 565 bp, Homo sapiens
gacaattggaagtcaggccaatgaattttgaagtggtaacagtgaaaagatggacatgatagcatcactacaagtaaagggtggttgctgtatactgttcctttcaaagtgtagtatgttctcacaccctatggatatttggattacccaaactctcatggacgtttctactgaccctgcctactgtatccactatctataagtatccatggcttatagatagtgctgagtcagcttatgtgagattctgttatttccattcagggggactcagatcctcatccatctccaatacactgttaccaactagaagggagatctacatgggattctgtagcatgggattctgagctcatggaatagcacgtaaaaattgtggscaatcataatgcatttaaatatatctatatatattcatttttatttttgttatacaagtagaaatggtttatttggtagaagatacagtttctgaactaagtcatagtcacataatgacctacaatttgaaatgaagaaaagtagaccaagtatgtttctaagcttcccttgaataaaaacctaa

SEQ ID NO: 366996 - DNA, 521 bp, Homo sapiens
ttacagatgtgatgggtctgattggaatacggttccttgatttggctcataccaaatccccctatatagccattccatatattaatgctgttggcctgagcctgagtttcccaatgactatttctcacccaggcagatcatctgtaagctggtgcttggataatccaattttcatggcaagcaggagctcttctgcaaaagcagttctagcatttcatgaacctataacaagtgtttctactggaaaacctggaaccataaggacagtcttctattataaagctataaatccattccattaatcaaaagctgtacacatayaaaattttgtgtaaatcattttttacacatgttcatccatgtgtaaatattttaaacatagcagaaaaattcttagcaggccttgttttatgcaaaacaaaccctccagttaatcaattttatacatatgcatatcaaatttccataaattggaacatattatagtcactgagctaaaataatctactggaccagacaaa

SEQ ID NO: 366997 - DNA, 544 bp, Homo sapiens
aaaatataagttctaaaatatatccaaaaacatttctccccttctccctttatcccttaggaagatcatatcttctaaattactctactcagctgattgtaaagattagyaggcaaaatgcctgttgtaaatgaatccacttgaaacttactctactgtggattgtgtaaacaaatctgtattgtatgttctatttattcagtcaactctgctgaatgcataaaaagtctttgacttataaattttcctttttacttcataattcctttccacggatttaagtgtctttgttttttcccaaaatgatggagaataatttatcataaaaatatagaaacttcttctctgcgttaaattctcatagaaagaacacagtctttcatttataaatctgagatataatatagcatttaggggcagagaccttagaaccagaaatcctggatccaaatcttggcccatccacttactaactttgtgaccttagacaagttagttaatttctctgagtctcatttttctcatctgtggaacggaagaaaac

SEQ ID NO: 366998 - DNA, 546 bp, Homo sapiens
tttgtcccatgtctttgttattttcctcttttcctatgttcttttagaaaagtgacatactttttaccatctgttttatcttctttgttgaattttttttattagtaaaatttaagtgagcactcacagagaacctctgcacctctctggagttgtcttttggaaagcccttttctctgtcatactgacattgtgaaatcttgctaccttgatttccctgaactctcagatctgtcttctcrattaatagtgcattaaggagtttataaggttttatcagggtcctttctcctgtgccagggcctaaaaatttaccctaaatagtaagttggggaaattgtagggctttcctcttttaattactatctcttggttatctgatgtctcatgtcttaaatatgtttttttccacatattttaaatgagttttcttatctcagatagtagaagttactccatcttgaccaaaagtaaaaatcagactgcttgagtcatcctaaattcttatttttgtcttcatatttcattgtcttctataatgtcctt

SEQ ID NO: 366999 - DNA, 391 bp, Homo sapiens
caaaagaaaagcatgagatgaaaggggcctatccccctgaagtagtcatactaatttccattgctacatgagttattgatcctccacttgattttcattttctgaaatttgttgacattgatgtggtttggatatttgtcttcttgaaatctcatgttgaaatgtgattctcaatgttggaggtggggcctggtgggagatgacgggatcatggaggtggattcctcatgaatggtttagaagcatcccctgtttataagtgagttcttgctcagttagttcatgcgagataaggttgtttaaaagtctaggaccacaacctccccaccccttgctcctgctcacaccatgtgaygtacaggctccgcttctccttctaccataattagaa

SEQ ID NO: 367000 - DNA, 570 bp, Homo sapiens
ggtattgagcaccagtgtctatacctgtttgccatgtgtatgtcctctaagaaatgtctattcaaatattttgcccatgtgttgatcagattattatagtttttttcccatagagttgtttaagctctttatatattctgggtatcaattccttgtcagataggtagtttgcaaatattttctcccattcagtgggttgtctattcactttgttgattgtatctttgccgtgaagagccttttcaacttgatgtgatttcatttgtccatttttgctttggttgcctgtacgtgtggggtattgctcaagatatttttgcccagaccaatatcctggagagtttmccccaaagttttcttgtagtggtttcatagtttgaggtcttagatgtaagtatttaatttgctttgttttaactttggcatatggtgagaaataggggtctagtttcattattttgcatgtggatattcagtattcccagcaccatttgttgaaggactgtcttttccccagtgtatgttcttagcatctttgtcaaaaatgagttaactgtaggtgtgtggatt

SEQ ID NO: 367001 - DNA, 643 bp, Homo sapiens
ttttaatagctttattctggtggacaaggtaaacattaacaagctaggacatttctggcactgctgtcattctctttgggaccttgacctcacttccaaatacttccagttattattgagaattttcaggtgttaacatgtgttctaatgattatagtttacagctacagtgttgcagtcaacatttaccattcttgctccagctttccatgtagatgttcaaagctatggtggacatcaaatgttgcagccattccagtggcatgtacaacactccarggactgagcagagggcagccagagtgacagatggcaggctacactcataaccacctctgtattctattgcacttgcaacaatcttttgatgttattgatttcttgccaagtttttcctattaatgtaagatgcttgagagaaagaaccatgatttatttgattcgggttataaatatttttgaatgaatgagtgattttaagcattcatccacagctcaaactatgcaataatcactttcctttcagtgagttctttacctagagcagactgccttgtaaaacatgtaaatggacctctcacagtctaactttttatagacatgcatgacccaaatttagggtgaagactgtttaggcttaagg

SEQ ID NO: 367002 - DNA, 583 bp, Homo sapiens
atactgcctagtgagcatcctcaactcagcaaaactctcccaaactcagccagggattaaaagctctgacttacacacctaagatgttttcatcatgtacagacttagaggttattttcaacaacaacagtaattaacttacaaatgtggaattttcttataaaaaatttggcttttattcatgaatttcttcattgcatattataaaatatatccactgaattgagtttttragatctattattgtggtgttcatttattgtgtgaattttttttgcaattgtatttgacatgtacctggttaagtacttgttttcagcttttagcataataagcaatatgtgctatcatagcttcaattttcctgccaagtagagagtgacagctgtgtggcaatatctaatgcatattttcatctacagataaattggaaggaaggaaaaacagcttctgggtgggcaggtcaccatcatttaaatgaatcgttaaaattatatttttccctggaaacaaaatgtaattgcttttctgcttagatgcacactgaaagcccttatttatattattgtaacatattttctca

SEQ ID NO: 367003 - DNA, 510 bp, Homo sapiens
tataattcacaagtaaaatatgtatatttttaatggtatacaatgtgatgttttgatattagtatacattttaaaatgatgaccacagtaaatgaacatatctataacttcacatagttatatctgtgtgtatatatgaaagaatacttaagatctactctaagcaattttcargtatacaatacagtattattaactatagtcatcatactttacagtagatctccggaacttattcatcctaacaaaaactttatactctttgtctacatctccctttcttccactaccactgggaaccacattatattctctgcttctatgcatttaaaaaatattacacatgtaagtgagatcatcatgcagttcttgtttttctgtgcctacttattttacttagcataatgtcctccaggttcattcatgttgtgcagataacaagatttctttcttttttttagactgaatatttttccattatgtatatataccatttttatacatttgtct

SEQ ID NO: 367004 - DNA, 566 bp, Homo sapiens
tgcgcatgcatgtttataggagcacaatttgcaattgcaaaaaaatgttgaaccagtccaaatgcccatcagctaataagtggataaagaaaatgtgacatatatatatatataacatttatatgacatttacattatatatatatatatayacacacacacacacacaccatagaatgctactcagcaataaaaaggaacaaaataatggtatttgcagcaacctggagttggagaccattattctaagtgaagtaattcaggaatggcaaaccaaacatcatatgttctcacataactggtggctaaggtatgaggagcaacaacataagaatgatataatggaatttgggaactcagtggggaaggatgggagggtagtgagtgataaaagactacacattgagtacagtgtacactgctcgagtgatgggtgcaccaaaatctcagaaatcaccacaaaagaacttcccccatgcaaccaaacaccacctgttccccaaaaactattgttataaaaataaaaattaaataaaatccgaattccacaacctattgaacagacc

SEQ ID NO: 367005 - DNA, 599 bp, Homo sapiens
tgttacttgtataactagaagtttgagggtttttttaagtaaaatattgaacacaaagtcagccaactggtggcatgactagccacggtcaaaagttggagctatttgtaagtcattttgacaataaagaaaaggatgaactaaaaatactatgtcaccaagatggctttttcctccagagatttctgtgtcagctggggctttgatgtctggccattatctgaatggggcgcctgctcagggatcagctatgaccaccctagggagagttccgtgatgagccatcttggggacagaaggatgagtgagcagctctgcttccttccagacatctctgctcttcaccattttgtcttagcttaggtaatcttccagggctacatgattgtagggggcaggggaraagatgagggagttaaatgatggagaagagaagggtaccagaagaaactcttctttgaagttaaaagcattggtttctagacatctgctagggatcatttaatatccaggctgattaattcagctgggaagcagtctatagaagctagtatggattccattccttggtgagtcaaatcacttatttcttagaagaa

SEQ ID NO: 367006 - DNA, 599 bp, Homo sapiens
tgttacttgtataactagaagtttgagggtttttttaagtaaaatattgaacacaaagtcagccaactggtggcatgactagccacggtcaaaagttggagctatttgtaagtcattttgacaataaagaaaaggatgaactaaaaatactatgtcaccaagatggctttttcctccagagatttctgtgtcagctggggctttgatgtctggccattatctgaatggggcgcctgctcagggatcagctatgaccaccctagggagagttccgtgatgagccatcttggggacagaaggatgagtgagcagctctgcttccttccagacatctctgctcttcaccattttgtcttagcttaggtaatcttccagggctacatgattgtagggggcaggggaaaagatgagggagttaaatgatggagaagagaagggtaccrgaagaaactcttctttgaagttaaaagcattggtttctagacatctgctagggatcatttaatatccaggctgattaattcagctgggaagcagtctatagaagctagtatggattccattccttggtgagtcaaatcacttatttcttagaagaa

SEQ ID NO: 367007 - DNA, 629 bp, Homo sapiens
aaagttcctttgagtagcccacagaggccatttacttattagagcaattaatttattggattcagatattcatttcaccattgttgcctttatggcaaaacatcttctcctgtgtggctctatctaccatttagttccattcaactcatctctcctgagtgcctactgggagaaagttacttaaatttagtcacattccctccatggccacatctagatctgtcacaccctctgtcatctccatatgactstaatggtcagcggaatctgcagaacagcagttttcatgttcctccaacagcttctagaattcttccaacttctgcaattattataatactatgtggcaataaatggtggaaactcagccctgtttgccaagattcaggaaaaatgccaggtaaatcagaaatgagtctgtccaaagctgagtccctaagcatagggatcggccatgttggtggtaatggggtagatttatcttctatacaagtctctttaatgtgataaaacataacatatgagatggttaagaaaaaaggaaatatcatccgtagctgcacaaggagaaaagaagccaaattatccacagtcttgtgaccttgatgggaagtcaaggccattgatga

SEQ ID NO: 367008 - DNA, 629 bp, Homo sapiens
aaagttcctttgagtagcccacagaggccatttacttattagagcaattaatttattggattcagatattcatttcaccattgttgcctttatggcaaaacatcttctcctgtgtggctctatctaccatttagttccattcaactcatctctcctgagtgcctactgggagaaagttacttaaatttagtcacattccctccatggccacatctagatctgtcacaccctctgtcatctccatatgactgtaatggtcagmggaatctgcagaacagcagttttcatgttcctccaacagcttctagaattcttccaacttctgcaattattataatactatgtggcaataaatggtggaaactcagccctgtttgccaagattcaggaaaaatgccaggtaaatcagaaatgagtctgtccaaagctgagtccctaagcatagggatcggccatgttggtggtaatggggtagatttatcttctatacaagtctctttaatgtgataaaacataacatatgagatggttaagaaaaaaggaaatatcatccgtagctgcacaaggagaaaagaagccaaattatccacagtcttgtgaccttgatgggaagtcaaggccattgatga

SEQ ID NO: 367009 - DNA, 629 bp, Homo sapiens
aaagttcctttgagtagcccacagaggccatttacttattagagcaattaatttattggattcagatattcatttcaccattgttgcctttatggcaaaacatcttctcctgtgtggctctatctaccatttagttccattcaactcatctctcctgagtgcctactgggagaaagttacttaaatttagtcacattccctccatggccacatctagatctgtcacaccctctgtcatctccatatgactgtaatggtcagcggaatctgcagaacagcagttttcatgttcctccaacagcttctagaattcttccaacttctgcaattattataatactatgtggcaayaaatggtggaaactcagccctgtttgccaagattcaggaaaaatgccaggtaaatcagaaatgagtctgtccaaagctgagtccctaagcatagggatcggccatgttggtggtaatggggtagatttatcttctatacaagtctctttaatgtgataaaacataacatatgagatggttaagaaaaaaggaaatatcatccgtagctgcacaaggagaaaagaagccaaattatccacagtcttgtgaccttgatgggaagtcaaggccattgatga

SEQ ID NO: 367010 - DNA, 592 bp, Homo sapiens
actatccagtccactttagcaattgtttagggtgttttctggaaactgtgggaaggaatggattagaaaaatctaggagttcatttatagcccatcattaagagctaatgatataacaggattctcagagtaaaacacttcagtggcatcactgtttaaagattttgttaaacgatgtatacctgtaaaaaagagtgaagaaactctgtgaggtgacaaggtcagggtgacacaagccagttaattatgcagcactgttaggaatccatatactggagtgtagcagccccagtctggattctgattccaccagtaatttgctctgagaccctgggtgagtgagtaatctttctgagcctcagtttcctcgcctataaaatggggatgaaaagagtacctccctcatagggctattgtgaaaactgcatgagatgatgcagtgaaggcacagggcacagtgccaggcatggtaaacgtcagctaatattcctggcacagccaacaaagtagccatgccactccatttacagagacccctgcactccacgccacattcttcacmagctatagaatattcaggtgtggaatgagt

SEQ ID NO: 367011 - DNA, 608 bp, Homo sapiens
gcatttaaccagggagcttgacctagtcatgaaaggccaaggaagccttttctggggaagtgaaagctgaaagaaggtaaggtgttaaccaggttaaagaggagagtgaaagagctgtgaccttgggaacagcatgtgcaagggccctgtggcaggatggaacatgctgctttgaaggcaaatgcagctggtaggtggtagatggtgagactggagtagttgacaggaaccagaccacacatagcttcaaaggctatgcccaagatttgcatctttatactaagaacagtatggagtcactaggaaggggatgtgttaggcaggggtgtcatttrtgctttcattcctctggttgattatgaaaccaagggtagatgtggatgatgagtagaaagctgccttagttttctgatgagagatggtggtgtcctggcttagctgtctgtagggcagacaagtttgagagacatatatggctatgtatctttactgcctggtcttgagtgggcacttagtaaatgtttcccttcttggcatgcgttagaagatgtgggttttattttaccttctgtcattgtatagctatcagaccttgtatgtattgcttc

SEQ ID NO: 367012 - DNA, 635 bp, Homo sapiens
ccagatgttgataatatggcaaaaacaacaaaataaaaattatattctactgtgaagagacaaatataataaatttaaaaaatacataatgtggcaggtgatgataaaggctatgaagaaaaaataaagtcagataagaagagaggggagtgccgaggagttaaaatgctatttatttatttatttatttatttatttttttgagacaaggtcttgctctgtcacccaagctggagtacagtggagaaatcatggctcactgcagccttaacctcctgggctcaagcagtcctcctgcttcagcctcccaagtagccaggaccacaggcacaccaccatgcctggataatttttatatttttcatagagasagggtttcgtcgtgttgcccaggttggtctcgagctcctgagctcaagcaatcctcccgcctcagcctcccaaagtgctggaattacaagtgtaagctaccgcgcctggcctggaaatgctatttcacatagtgggacagaggaagtctaagaatatttgagcagagaactgaaggaaaatgaggaagaccaggttggaggccctagacatccagccactgtggaaatgaagagggcatgaccatctggaggaagtgataatgg

SEQ ID NO: 367013 - DNA, 603 bp, Homo sapiens
agattttgtcaccttcttttaaaggacattgaattttgttcttgaaggcagttaagtgtttggaatataattttggtcctgttagagttgtttctttttctttgtgaaagtgggcgtatttttttttattccatttcccctctaatccctgcattgttgaagggatctatttttgtattgagcttaggtttagagctggcccttactatacagcatggttcttcatctcaaggcataacctttttagaatctcaactgaatcttcaaaatgttctgcttgggacagaagtccaacgtctctcagcaaagcaggacttctggtttctctgttcagctcccagtcctgcagcatgtgacccttgctaggccttgtgtatgggcagctgagttctcagccacagacccacagtccatccccatgcagacttcagtggcctgattttctgtgcagtatcttcttttctgatatcccaccccacaaatttcagccatgtctrtatcccaaagcttcaatctctgcctccttagctctttttattgcagcaggagaatttccttgggaaaaaaactggggtgaccatggaactcacgtcatatagttca

SEQ ID NO: 367014 - DNA, 571 bp, Homo sapiens
gaaccaggcaccttctttacaaggtggcaagagagagagaaagagagaaaggggggaaccgtcaaacacgttttttttttaagatggagtctcgctctgtcgccaggttggagtgcagtagcccgatctcagcccactgcaacatctgcctcccaggtccaagcgattctcctgcctcaggctcccaagtagctgggactagaggcacacgccaccacgcccagctaacaataataattttttgtgtttttagtagagacggggtttcaccatgttggccaggatggtcttgatctcttgacttcatgatctgcctgccttggccttccaaagtgctgggattacaggcatgagccaccgtgcccggcctgtcaaacacttttaaagcatcagattttgcccaccaggtccctcccttaacatggggattayaattccagatgagatttgggtggggacacagagccaaaccgtatctggcagctatggtcaaaccaggcttttgtgacacactagatttggactccccagtttgtatcctataatttctctcccaacagcagcacatact

SEQ ID NO: 367015 - DNA, 571 bp, Homo sapiens
gaaccaggcaccttctttacaaggtggcaagagagagagaaagagagaaaggggggaaccgtcaaacacgttttttttttaagatggagtctcgctctgtcgccaggttggagtgcagtagcccgatctcagcccactgcaacatctgcctcccaggtccaagcgattctcctgcctcaggctcccaagtagctgggactagaggcacacgccaccacgcccagctaacaataataattttttgtgtttttagtagagacggggtttcaccatgttggccaggatggtcttgatctcttgacttcatgatctgcctgccttggccttccaaagtgctgggattacaggcatgagccaccgtgcccggcctgtcaaacacttttaaagcatcagattttgcccaccaggtccctcccttaacatggggattacaattccagatgagatttgggtggggacacagagccaaaccgtatctggcagctatggtcaaaccaggcttttgtgacacactagatttggactccccagtttgtaycctataatttctctcccaacagcagcacatact

SEQ ID NO: 367016 - DNA, 661 bp, Homo sapiens
ctaggtcagtattatgatcacccacattttatagatgaaaaaattaaggcacagggaggtctagtaaattgccccaaattatacaactaataaatgactgggtcagaatttaagcccaggtttttctgactctgaaaccctcactcctaccttcaactaaactgcctccaaggaatcctagagcataacacaaatatttaggtgttccttaaattgattcttgtcattgatgttatatggaaatgccagatattcccacctatagaaataggctgcttatctggagaaattgcttatattgatcaaaaggtcaagggcttccataaaaaatttcaataatacatttttcaaagatgtgaatggtggcrgatgtgaatcgagatgtagtgtagttttctggagagatccctgggccatgtcaggagacccacatttccttcctgcctgtcaccaatttgccttgtgacccaatgagttatcagccttctccagggtcacttttcttatttgtggggttgagattcaatgcccttcaagaggttttctgactcaatgaactttttcattcattcatgcaacaagttttattgaccacctactatgtgccaggaactattttaggagctgcaaatgcaacagtaaacaacaatatggatgtgga

SEQ ID NO: 367017 - DNA, 562 bp, Homo sapiens
atcttcctttgcataaaatgccctcacagatccatcaatcattgaccctgtgatcatgcattgagaacctcccatacattaggggctgattgcatcctgtttcagatagtgacatggtctcctgtgtgcctttagggcaaggaccaaggattattcatcttcgtatattctgtaacctattaaatatatgttcgctcaatgaatcatagagaaagcactctgttttccttcctttctgctcygtcccagagacagaagatcttgtctggtcctatgtgaacattagaaggtgaagacgttggcctgggcgctttccaccccacagacagaaagaacaaagggcgctggctctggaggcgctctccatcatgttgaaaactgtgtccaatctcattgtaggaagcagcaggtagctgtgaaaggcggctcaggctctcattgttaccaccgtggctgcaggtgaaaggtcagtttgcaggcaaggctctgacccttcacttttttgttgagagtgtcacaaggtaaattaatcagatttatggcattaagctctgccaatatc

SEQ ID NO: 367018 - DNA, 595 bp, Homo sapiens
agcactttgccaaaggacagctgagacaggacgacaaacatccagagaataccccaaaaggcaagaggaaaactcaacaaaaatattctgtgacactccatatagctcagtaaattagcacctcacttcatggaaggaaaacaagcatgttcaagagatcctaggtcagttttgtgttttcactctgcagaaccatacaccacgtggcacaaacctaacctgcctagtcttcatcagtgagttcaaaatctaatttaattgaagtctagaattaaataagaactaaaagtgcacagtgatcctaaggtcacaagcaaagacccacaagaaagcagtaacagactgtagtcttaatactaaggttgttttctctgaagtatttgtgtgtgtgtgtgtgtgtgtgtgtgtgtgtgtgtgtgtgtgtgtgtgtaccatacatttcattctactgaatttcagtcaactccatggtasacaacaccatccgtcttatttcatctttttaacaaggacttgatgaggtgacacaggactgattcttaaaaacacattacctgctatgtgaggcattgtgtgacagaaagaactatcttag

SEQ ID NO: 367019 - DNA, 610 bp, Homo sapiens
atatatatttatataagaagtagagataggtatatattgtatacttacatatgtatatgcacttatttatatacttaaatatgtaatataaataaaaatatatmaatacatatacacacacatttatttagactatactctaagataaattttgtgcttcagaagctaacattgcggaattgttataaaagtgtgatgtcctttggggaagtcattgcatttcccattcttgaagctcacttttaacttaatctgaaattaaagaggcctaactggctaaaacaatgtaaaggatgagtttaaatgcacagtttccttcctttttatatatgatagcagtgaaaggatgtgttttaatttgtggacctcccacctaggaccatttcaacagctttgaatacctgagaaaaatatcaactgctaagccaaaattatccttcttgtaggagactaaaatagaataattcagattgaagagagagctcatatctaggttccaagtctcacaccataacccatcaatgagaatccttacctctaagccaaagatgattatgccattttagatatggttgccattttactgcttcaggaacttacatagatgaag

SEQ ID NO: 367020 - DNA, 619 bp, Homo sapiens
tagaagattttgtaaataaaactaatatagtaagacataattatgtaaaattatcaagtctttgaggtggcaggaccctttattctgtggtttctcatggttcctgttgtcttcattgccatacaattggccttgtctttgatgtttatttgctatggatttctttatttctcctttattgtatctcttttttttgcattcaaatgtaaccactcctctactggtttgcagatttgcttcatgtcactccatgaggaacttatcagtcagctatgatatgcctatcacttactgaacactgtgagaaagatgcccaaatatacttgacgtagcctctacctaagttcttaaggagcttaggaacttggagaagatgtttctgttttttccatgccagtctaggtcatggatactggaaaattgaaagctcatttgtatgtgtttaagctgaaggacgatgttgatattccctattgtaatattttctctgtgcgtttaccctccttgcttctctgagagagacagaggaggaaggcagtcctggaaaggscttttttgcctctctaattcacatcttctgtgccagctgtcattactgattcccttgaagtgaaaggtc

SEQ ID NO: 367021 - DNA, 519 bp, Homo sapiens
tctgtcaggctttagtgaaaatcctttaccatattaaagtttaatcgacacaacaccctcctaagttggtaccttgttgtcttcctcattttatagatgagaaagcagaggcatggagaagataaagatggatctatgtacttatctttcccaacacccaaatttagtaagtggcagagctgggatttgaactcaggtcagaataggtcttgaaccactatgaatcactctgttaatcacatgctcctttgagcaggaactaaacatargcatttagataaggaaatgtgcaaataaggtgacttgactttgaggggttaataattattgacctatatactatttagtagttttaggttcttggctcaaataattagttagggaaacaatgagaaaatgagaatacaagtcagggtgttaggaatgaattaagacaaagaggttccagctcacgagcatgacttcagatggcctctgatatacaaaacaatggctgccaatgccaaaaagctttatttg

SEQ ID NO: 367022 - DNA, 519 bp, Homo sapiens
tctgtcaggctttagtgaaaatcctttaccatattaaagtttaatcgacacaacaccctcctaagttggtaccttgttgtcttcctcattttatagatgagaaagcagaggcatggagaagataaagatggatctatgtacttatctttcccaacacccaaatttagtaagtggcagagctgggatttgaactcaggtcagaataggtcttgaaccactatgaatcactctgttaatcacatgctcctttgagcaggaactaaacataggcatttagataaggaaaygtgcaaataaggtgacttgactttgaggggttaataattattgacctatatactatttagtagttttaggttcttggctcaaataattagttagggaaacaatgagaaaatgagaatacaagtcagggtgttaggaatgaattaagacaaagaggttccagctcacgagcatgacttcagatggcctctgatatacaaaacaatggctgccaatgccaaaaagctttatttg

SEQ ID NO: 367023 - DNA, 519 bp, Homo sapiens
tctgtcaggctttagtgaaaatcctttaccatattaaagtttaatcgacacaacaccctcctaagttggtaccttgttgtcttcctcattttatagatgagaaagcagaggcatggagaagataaagatggatctatgtacttatctttcccaacacccaaatttagtaagtggcagagctgggatttgaactcaggtcagaataggtcttgaaccactatgaatcactctgttaatcacatgctcctttgagcaggaactaaacataggcatttagataaggaaatgtgcaaataaggtgacttgactttgaggggttaataattattgacctrtatactatttagtagttttaggttcttggctcaaataattagttagggaaacaatgagaaaatgagaatacaagtcagggtgttaggaatgaattaagacaaagaggttccagctcacgagcatgacttcagatggcctctgatatacaaaacaatggctgccaatgccaaaaagctttatttg

SEQ ID NO: 367024 - DNA, 594 bp, Homo sapiens
gacttattcccctaccaccctctccttcctagtatagcctcccagacatttccagaagacttggctcccagagactgagagtaatgcttgagagaaggatacagctgtaaacaattggcagccacactttcagcagctggggaatgagtgattgaccctataaaaggaaggggtagtagaaaggcaccccaacaccgtgtaccacaaaggacttccacaaaatactctgagagaatagaagaggaaagataaattccacctggtggtgatgatatttatagttattaacagtgtagtatgaataaggcatttgagttataaaggtgtgtgtgtgtaagagagagggagatggagggagagagggaagaagagagcattaagtggaaaagggagagatggaagggacttcctacttcaaaattctgctctagtatttaaaaagcttaattacataggtttttagaattcaccagaagaggaatgaggaccattgataaggtggctrgattacatgttttccctctggaagatcgtaattaaagaacagctttggttttcttttttgttttttaaaataactttgtggctttagcc

SEQ ID NO: 367025 - DNA, 646 bp, Homo sapiens
tttcaatggaaacaagaggacatgcgcttttgtttaataaagaaatatttgccctgagcagaagacaacattttaaagcttgtcatttcattcctgggaaagtatttgaggaaaatgacatggctcagccctgtttgctgaccattttgttgtctcctgctgagacttgccatttccatagccrgtgggctgtattgaatcagacagaagcaataggtcattaacagacatggagacttggggcagcctgcagagactgaaagaggggaaaatcatttggggccacatcaacaaaactgcatttaatagaatctcatgcagctatgtttgggaggggggcagttagcctgattttcagagaaacttaagaagctttagaaagcacaaagtcattttccccccaaagaatgtcatgcctaacatgaaaacagaggtgggggagggtactcacttctacatgctgcattttctcctgctgaaaaataactgcttacaattcattgcattgaaaaaaaaaatccaggttttattttcttactgacacctcccgttaaccttgagacctttaactcacaacattaatccaaaaagagattatattatttcaatcgatacctaaattattagattgggtttccatgatctt

SEQ ID NO: 367026 - DNA, 646 bp, Homo sapiens
tttcaatggaaacaagaggacatgcgcttttgtttaataaagaaatatttgccctgagcagaagacaacattttaaagcttgtcatttcattcctgggaaagtatttgaggaaaatgacatggctcagccctgtttgctgaccattttgttgtctcctgctgagacttgccatttccatagccagtgggctgtattgaatcagacagaagcaataggtcattaacagacatggagacttggggcagcctgcagagactgaaagaggggaaaatcatttggggccacatcaacaaaactgcatttaatagaatctcatgcagctatgtttgggaggggggcagttagcctgattttcagagaaacttaagaagctttagaaagcacaaagtcattttccccccaaagaatgtcatgcctaacatgaaaacagaggtsggggagggtactcacttctacatgctgcattttctcctgctgaaaaataactgcttacaattcattgcattgaaaaaaaaaatccaggttttattttcttactgacacctcccgttaaccttgagacctttaactcacaacattaatccaaaaagagattatattatttcaatcgatacctaaattattagattgggtttccatgatctt

SEQ ID NO: 367027 - DNA, 536 bp, Homo sapiens
gtaacatgtattcattaaacaaatataagccagaaggaaaggaaagaattaatatttattgagcatttatcacatgctttacaactgatttctttacattcacaacctcccaatgaaatagctattagtattcctactttatagataatagaaaaaagtcttaaggtcacctagctagtaaatgatgaatataggatctgtacctaggtctgtcggatgccagtgactatgcttttctaaaattgacatataaattttaatgtaatcaaaataatgcagtagtagcttaagaagaaaagtactgacgctcggagttcaagtaggaatttatcaacataagacttgaattaatattatgcttttttgaaaytagtgcatcattcttttgtgttcagttatgactatttccatatttccaaaagaagtctggaaatcccctgaaagctaacagatgaaatggtgttatggtgtggtgtttgagtagtgtctatcagaacaaatacagattttacacatcaccgctcgtgttaccctta

SEQ ID NO: 367028 - DNA, 637 bp, Homo sapiens
gatctcagcttattgcaacctccacctcccrggctcaagcaattcttctacatcagcctcccgagtagctgggactacaggtgtgaaccaccactcccggctaaatttttgtattttttgtagagacggggtttcaccatgttgcccaggctggtctcaaactctggagctcaagttacctgcccacctcagcttcccaaagtgttgggattacagatgtgagccactacacctggccggattttattttttgacaaaataactaatatcttgttgaatatctttgctctgtagcttttcccttcttcatctgcaatattccctttgacccaattccaaggaatgatccaaatggttgtcatatttttattgctagtgatatatattgccaaatttattccaaggtgatttaccagtttgaattgcctgtgactaaggcttagtgtctaaggaaaccatatacttgaaagagtcagaatatctaggttcaggtgacagctctactcctcactggttacatggttttaggcaagccacctaatctgtttgacattttcttacctgtagagtggggatgtaaaactatatcatacagtcatgagcattaaatcagataatgtctttgggagtaagttgt

SEQ ID NO: 367029 - DNA, 588 bp, Homo sapiens
cgctttaagtccaggactcatcagaatacccttaatctggtttcctgtcacagtttggagaaggggttagaattcagagctaataattcattttctatatgagaaaatggatactgagaccaaatacaaactagagcagggtgaaagaactagttaaggttgaaatatggactagaaccatcgttcctggaattcagtgcatgtacattccaccaaactggcatattatgttctattattttgtacttgtcaacttattgttttattatgtttgcaagtaactttgtgtatgcagtttttttcttccctcaaaatcagttttataagcacaccaaccatatctcttagttgcactatctagtatttattgattactatttatatgcaaatkactttgcaatcctttccaaattttgcattgcaaactttctatgaaatggatgttagtccagaagaggaaactgatttagaaaggttagatatctgtacagtttggcatgggtcgatgtgggagggccaggtctgccaagtccaggagtctcagcccttaatagccagttcatggtctgcattctttgtcaacactct

SEQ ID NO: 367030 - DNA, 591 bp, Homo sapiens
aactactcaaatttgcaataaaaattgtttgctatccaggctgatagtttaagacctgaggggaaactcagtggtttgttatttcacttctttcatgctctgagccagtgatctggagcaagaaagcaacactatgtacaagttttcccttcagggtccttgtttcccccagggaaactgaaattgcagttgagggtgtgtcacttttatacaaccatttactgaataaataatgattagaatcagaaacataacttaaaagcctggaattctttggattgtagggatttgagtggttttggtagatagatactcctagagacttcttattcagggaagtagaatatgaggttgctaatacctgggctgccaactattagaaatctgacctarccaaaaatgtatgctcattacactaagtccttttgaaaaattatcctcacaatagaggttattttattatggcatgaaagaaagagacaactgaggacaactatgctaaatctcccccagacaatgccccagaacaagtaatatatttatctatttttatcaccctatatatccaactaaatgaagaagcaattagtt

SEQ ID NO: 367031 - DNA, 607 bp, Homo sapiens
ccctgtgctaaatggctttgtaactaaacttctgttctgcttcagtgttatactgtggattatatctgatgttcatgtatgaacataaatatgaccagttaaagcaatttcttgccagctaaaagaggatgttttatgtctgattatttaattcaaaaagcaattcactrgtcttacctccttatttgccattgtacatgtggttaataagtaaaatctgaattcctaacaatgtcttttagattaatatgttttggttattgacacttcatacatttttgatatggtcaaagttagttcctagatagggaggagcaggatttttctcctcttgcttaactggtttctaatttcttgtgagattcctttatgtgagtttcaccatactaaaaatggaattattttaaaaaattataaaatagagtccccttctctattttaacaatcaatgtacctctgaatcaactggttattcccgtgatctgtgaagtagttaccgtgcttttcaaattgtatttcatgtgtgttcaaaatgaaggataatgactcacattataataaatagtatgacatttatgacccacaaggaggaggagtgtacaaatga

SEQ ID NO: 367032 - DNA, 577 bp, Homo sapiens
gacattctaaataaagacttgtctctacatgatgtgttaatgaagaatggcaggggcaagtaaaacaaaacaaaaagctatgtagtgacggttctttcaagccaaaccacagctgtttgaagaaatgacatatgatatcatgcaactgccactatccctcattaattgattttacagatttttaggtattcactgatgtgtcttgtacttatggctgaaaatgcacactaacaatctgtagcaatgttacaacacacatagcatattgtcaaatgctgccatggatgaaaacttctcatttgctgtggatctgttaarataaacctcttgagaattacagatacatttattattggcattttcaaaatggcaaagacatctgttgctaaaagtctctgactggaaaggatttgggaccaagggtaaggttagctaacacttcttaaactagacaagtatgaacagtgaacatctgaaactacctgtgaccacagagcccaagtaatgtttaatggaggcatacatctttaaccattcaatataaattcaacctttttttttttttgagatggagtct

SEQ ID NO: 367033 - DNA, 617 bp, Homo sapiens
aagaacagcaaaaaagcaatattcttattgttcaaacctgtgttttgcagtacgtgcttttattttttaagtcctattagattttgtataatgaagtaaatatttagtgctctgtaccacctattagacattataataaccrtggacaaatactaaacactattctttgtttaagatgcttaaaaatgagttaggccatggtcaggctttcctgactcatctctatgctcccaatgttggaagcaggctatgcccagggcttagatcctaggaaatgctaggccatccatcgccacaacctccagagcccagaaactagattgagaagggtctgatgtgtagaattgagttcaataagtgggaagtagagcagtatgatgattagggccttgtgttcaattcattatttagcccctgcattccctctatcactcaccttccataactgaaaaatcgagactgttggtagcacctaactctcagagttgttgaaaggataacatgatatactgtgttcagcatttagtaatcaataaattgccccctcaaacatcaccttatttgtgaagtatccctcaaaatatactgtaaaaccccttctgttaagaagaggcagc

SEQ ID NO: 367034 - DNA, 571 bp, Homo sapiens
ggtccgtgtttagtttcagagcctctgttccatttgtagtgccgccaacttctcaagtaccaggagaggaatggtgaaggtgttaattagggcgctgatatctgctgcttctaagtaaattataaacactctaaggttcatacagttaagacaaatgayggctcgctaagtacagcataagctagcgaatagaatctactcagtttggaagcaatacatatcattctagtgctcatgacaattaaaaccaaagtaggatgtcaaaatgaaaaacacttctttggatcctaaaggttttaagcaaatatgataatataaagaacagaattgtgttttgtaatattaagcatttttaaaaatttccttgatataagaattcataaattttaagagattcccatataaggcaaagcttctaggcatgtttcacatcccgtgcaatccaaaaacattaactaattcctgaattataagagaaatgaactgatataggaccaggtggtcatggggtgatctattcttgagcaatgtaagagctattatctctaatataatttcattcctacttgta

SEQ ID NO: 367035 - DNA, 545 bp, Homo sapiens
tgtagcttaacaatgagggaatatttttcttcatttcgcttaagcaattccgcatccaaagatgattgagaagctagcattttgcacatttcaccaacacattaatgttttgttttgagagtttgctatttctcagtctgaatcaaggatatttggaaaatcctgttttatttttcttgctagtatcatgaaacgtacagtggcatttaacacttaatttaatctttatgcaacagggatcccagaaggcctttaaaatacagcatggagkactttcacttccagaacagcagtatgatgagctctgtagtccaactcccaaggaaacaacaataattactgacaattattaaaaacaaacaaacaaacaataacaaccatttcaagtctccataaggttccctaagggcaagcagcaaatgaagaaactctaccaaatctcagtaagaacaaggagagtctgtggcgtttacacatggtctacatccttcctccccactctgcaccgcagaatggaagctccaatctggacaggtgtggccaaa

SEQ ID NO: 367036 - DNA, 567 bp, Homo sapiens
atgcctgtgtatattcattgcagcgctattcaccatagcaaagacatggaatcaatataaatgcccatcagtgatagactggataaagaaaatatggtacatatacaccatggaatactatgcagccatgaaaaggaatgagatcatgtcctttgctgggacatagagttggaaaccattatcctcagcaaactaatgcaggagcagaaaaccaaacaccacacgttcttacttgtaagtgggagctgaatgatgagaacacatggacacatggtggggaacgacacacactarggcctgttggaggtggatggtgggggagggagagcatcaagaagaatagctaatggatactgggcttaatacctaggtgatgggatgatctgtgcaacaaaccaccatggcacacagtttacctatgtaacaaacctgcacatcctgcacatgtacccctgaacttaaaagttgaaggaaaaaaaaaagcaaaagcagattagtcgagagaaaagggcatagcaacaatttttgggtatgctcaaggcattttgcttgttaactttctggagg

SEQ ID NO: 367037 - DNA, 588 bp, Homo sapiens
aactattatgtatggttactttcacttaggatgaaataaaaaatattggcttatttatatatttcagagtatgttctagattcctataatggggttctaatggggctaaatatgtcaaattcttataatatatattaaatgtgtgactacagcagtgccttttaatgtgggtcttcttttagtatctgaagaaagctaaccaaattttccattgtaaccaccaataycatatttttaatattagaatataatacttaacaaatacaatagttaaatgtttatttaatactaactaaacattgaacaataattcttaaagagattcacaaactataaaacactataccagactataaggtgcttttactaatcaatttggaaaccataacacctgtctgatgagcatgcttattttaaaatgaacagatgcagggtgtgataatataccagattaaagttatgagtgaatagatttccttgtaattacaagtcatatagtgaaggtatcgatgctatatatatttctgtcaatgaagaaactgtataatttgaagtgttttaattttggggggatgggggacggagttt

SEQ ID NO: 367038 - DNA, 597 bp, Homo sapiens
gcatgttaattgtattgtattagcaatttttgttaagtaagtagatttttgtggttcttgtcacatataracaagctacaccaagacaatagctttcctaatttgcttcactagagtaactgtctatatgtaacccaaaacattacgttgtaagcctcaaatatatacaataaaattgatttaaaaaaataggttgctgggctccaactcctgagtttctgattcactatgtcttgaacagggaccagaaatttgcatctctaggttcctgggtgatgctactagtgttcaaggaaccacacgttgagaaccaatgccataagcaatgaactgaaaaccacatatgtattctaggatcacacaattgctttcacgaacaaattcaattactgagatttagctatacctatagagtattaaaaaacctttaaattagaaaaacttcagttcacagctaacttaaccttttgaaaagaaaaatgtagtaattttcttgatgctgaaagaaactgcatgtgtgctactaagcagaatttggtcaagccagtttaatggttcaaaataccttgggttattaaagacatcttgaggttatta

SEQ ID NO: 367039 - DNA, 597 bp, Homo sapiens
gcatgttaattgtattgtattagcaatttttgttaagtaagtagatttttgtggttcttgtcacatatagacaagctacaccaagacaatagctttcctaatttgcttcactagagtaactgtctatatgtaacccaaaacattacgttgtaagcctcaaatatatacaataaaattgatttaaaaaaataggttgctgggctccaactcctgagtttctgattcactatgtcttgaacagggaccagaaatttgcatctctaggttcctgggtgatgctactagtgttcaaggaaccacacgttgagaaccaatgccataagcaatgaactgaaaaccacatatgtattctaggatcayacaattgctttcacgaacaaattcaattactgagatttagctatacctatagagtattaaaaaacctttaaattagaaaaacttcagttcacagctaacttaaccttttgaaaagaaaaatgtagtaattttcttgatgctgaaagaaactgcatgtgtgctactaagcagaatttggtcaagccagtttaatggttcaaaataccttgggttattaaagacatcttgaggttatta

SEQ ID NO: 367040 - DNA, 552 bp, Homo sapiens
ctgtgtcactgattacttgtgtaattatgcagtaatttcctaccttctatgcatcatatttatgtgccaagtaatctcccaaagacactttccagctctcrtattctaagactttttttctcattaagtgagggtgtcttttgtatcagagaaaactgaaaaattaatactgtatgtaagatttttcaaaaaaatattttgattacaataaaacttatgaatttgttctctcataggttatgttttattttgtagagcatgcaatgtatagtatgtcatgtgtgacactgttgttaaggagaaaaccttccagggtaaatgaagataaatgtgtatttctcacatgagaaaagtggaaagaaaggtgagagtaatagatgaatttaggaggccctgtgccaggcagaaactatgacaagtcaaagacaatatgaagaaaggatggaaaaagcatgaaaagatcacctgaagatcacactctgaaaaaaaaaaaagagcaataactatttatcacacatcatgctatgtccccaggatactgagaaatagtct

SEQ ID NO: 367041 - DNA, 578 bp, Homo sapiens
tattaaataaaaaggttatttttagcacagattttttatttgcaatggttgttcaaaaactatactacacatgtgcaaccatcaacctaaaaactacatacaatggaagaattttgggaacctattattttattttactttttttgaccatctttaagaaaatcaggggaaaatgcctcccaatttattgcccaacaaaatccttattgttttgtattttctcaatatttaaaaacaaaaagtttttggaactattgctttattaacttctagttccattttagggaaacaattttgatgtctttattgtttttaggttatggcacttctgagcctcttagtattaatattatttgaaataatatgtgtactccctgtatattttctaaatcacatgtaaatatcaggcatgtatttatttttaaatctatactctcatttcaaatgattgcacargtttcacaactgactcttataggacgtatcttttaatgaacttaaagggcaaacaaggaaactaagacagtcacaatcaaatgttttattctttcctcaaagcagccaaaaattctctatca

SEQ ID NO: 367042 - DNA, 599 bp, Homo sapiens
cactagcataagataaaaatttgatgacacatttaataggcttactctcaaacaacggattgactcaaatattatcaacaatgcaaggtgggctcttatgccaagatgtgttcggtttttcaaattttaatctaacgcctgaaatttgtgttgcataaatgtttgtcttattctgtgtataacatatttgcatatgtatatttgtgttctrtataagtacagaatagttaaaatgtgttctctctatgcttacataaatgtagcagtgagatattgataatagcaataatagctacatttattgattgttaagtgcgaagctctgataaaaatgttttataggtatcattgtacaaatcattcaaataaacttctgtggaacatacaatggttattcctattttacagaatggggtgaataaagggacacagagaagttaaaataatttactcgtggttacagagccaggaagttctagagctagatttctaacccatgcatgctcactctattgtgtacccagtaatcaactggatatactgtgattttatattaatcaaaatgcaaagatgcagaagttgtgagaaaattccctatc

SEQ ID NO: 367043 - DNA, 557 bp, Homo sapiens
aaaatgcaatccaatttctctcaagaacatagacgcaaaaatcctcaactaaatattacaaatgaatccaataatgtataaatagcatcatgcatcatggccaagtgggatttatcccagttatgcaaaactggctcaacactcaaaacttaattaatgtaatctaaaatatcaatggactgaagaagaataatcactttatcttatcaatagaggcagaaaaagcatgtgacacatcccaaaaccctttcatgataagaagtctcagcaagtagggataaaagaaaacttcctcaactcgataaagaacatctacaaaatacctacagctaaggtcatagttaatggtgagaaacaccaagctttcctgctaagatcaggaacaagacaaggatgactccactcaccactgcttttcaacatcatactggaagtcttagctaatgcaataaaacaacaaaaaaagaaaataaaaggtacagatgctccttgatttatgacarggttacatctgcaaaaacccctgatcagtagaaaatattgttaagtcaaaagtg

SEQ ID NO: 367044 - DNA, 579 bp, Homo sapiens
acttagttgaatgatgagctccatatccttctaatgtccctaaccactattagaatcaagtacaaatataatatccacactctatgacaaagagttccataagctaaatggtaattttctcaatgtggtcaatacaaataatttactttctaatcagctatgataatgacacaaatgacaagtttattttgaaaatgctagaagtaggctaatcgctggatctcaagtagcagaactattatgtgtacacatggaagtctaattttctaagtcaacttttctatttcaaaacgaaatatrcattatgagacacaagcctccatttgttaaaatcataattcaacatctagcatcaagaacatctgtactacatcttgaatattttacgagataagggtaaaccagtataggattgtcttattaaattaggagggaagagtgggacatatcaattgtggtaggcagaataatggcctcccaaagacatctgtgtcctaatctcctgaacctgtgaatatattaccttatacggcaaaggggagttaacgtagcagatataattaggactactagttagct

SEQ ID NO: 367045 - DNA, 579 bp, Homo sapiens
acttagttgaatgatgagctccatatccttctaatgtccctaaccactattagaatcaagtacaaatataatatccacactctatgacaaagagttccataagctaaatggtaattttctcaatgtggtcaatacaaataatttactttctaatcagctatgataatgacacaaatgacaagtttattttgaaaatgctagaagtaggctaatcgctggatctcaagtagcagaactattatgtgtacacatggaagtctaattttctaagtcaacttttctatttcaaaacgaaatatgcattatgagacacaagcctccatttgttaaaatcataattcaacatctagcatcaagaacatctgtactacatcttgaatattttacgagataagggtaaaccagtataggattgtcttattaaattaggagggaagagtgggacatatcaattgtggtaggcagaataatggcctcccaaagacatctgtgtcctaatctcctgaacctgygaatatattaccttatacggcaaaggggagttaacgtagcagatataattaggactactagttagct

SEQ ID NO: 367046 - DNA, 579 bp, Homo sapiens
acttagttgaatgatgagctccatatccttctaatgtccctaaccactattagaatcaagtacaaatataatatccacactctatgacaaagagttccataagctaaatggtaattttctcaatgtggtcaatacaaataatttactttctaatcagctatgataatgacacaaatgacaagtttattttgaaaatgctagaagtaggctaatcgctggatctcaagtagcagaactattatgtgtacacatggaagtctaattttctaagtcaacttttctatttcaaaacgaaatatgcattatgagacacaagcctccatttgttaaaatcataattcaacatctagcatcaagaacatctgtactacatcttgaatattttacgagataagggtaaaccagtataggattgtcttattaaattaggagggaagagtgggacatatcaattgtggtaggcagaataatggcctcccaaagacatctgtgtcctaatctcctgaacctgtgaatatattaccttatamggcaaaggggagttaacgtagcagatataattaggactactagttagct

SEQ ID NO: 367047 - DNA, 519 bp, Homo sapiens
gtcaacagggccatcagacgatgggacaatgagtgatagagtagttctttcttattttcatactctgtatttctttggaaaatattttcagtgtcaaatgtggtaggtcattggacacctgatgttatccactttatatcagttgtttcaaactattggttctcgtgcttcaagatacggatctttgagagggcaytctagttgaaaggattaggcaagtccaaatgcagactagataaataatatatattagtatttttaaacatatgtagctgatgtaataaagcagagtatatgcttagcacgactgaattaaaactagatttttgtcattatgcatttcttacccaatggctactacaattatcataattattttgtagggagtctacaaaatattttgatcataaagaagaaagaaagttggtctcttctggtctaaatagattatttgtgttgtccctaagtaaagcaatgataaagaaattacagagacaaatgattatcaagcagggcaag

SEQ ID NO: 367048 - DNA, 604 bp, Homo sapiens
caatttcatcataacatcttgaaaaactttcttcatacatatattaaaataaatatatatttaattttttwaaatttcttacatgtttttccagttcaaatcatttactttcttcaaggaagtctttatttctgggaagagatattgtgaatactaggacctaaatagattattttaaaacaagctgatcaaatttcattatgtaagcacaagtaataaccacattgggtgaataccctgggtttccatctaaacaatgttttttataattggcaactgaccttacattataggtattttcactcatgggactggccagtgtttgaaaaaataatcagataaaaattagattctgtacgagtaagcatttttataatgaaattatatttacattaatatacatagactaattgtatagctatattggctacagcaatatttctcttcagggagaagacttacacaattctgttgtaagaacaatggctgtatttgaagctgtttaattaaagcatttctgggggtattttttccccactcttaacaaatcccttaccaaggcacaattagataaagcaaccacaggactagtttttggtagggt

SEQ ID NO: 367049 - DNA, 604 bp, Homo sapiens
caatttcatcataacatcttgaaaaactttcttcatacatatattaaaataaatatatatttaatttttttaaatttcttacatgtttttccagttcaaatcatttactttcttcaaggaagtctttatttctgggaagagatattgtgaatactaggacctaaatagattattttaaaacaagctgatcaaatttcattatgtaagcacaagtaataaccacattgggtgaataccctgggtttcyatctaaacaatgttttttataattggcaactgaccttacattataggtattttcactcatgggactggccagtgtttgaaaaaataatcagataaaaattagattctgtacgagtaagcatttttataatgaaattatatttacattaatatacatagactaattgtatagctatattggctacagcaatatttctcttcagggagaagacttacacaattctgttgtaagaacaatggctgtatttgaagctgtttaattaaagcatttctgggggtattttttccccactcttaacaaatcccttaccaaggcacaattagataaagcaaccacaggactagtttttggtagggt

SEQ ID NO: 367050 - DNA, 573 bp, Homo sapiens
gatcaggcatctatacttcatttatagtttcttctagttcatgtgaaacttaccaatcaggactcatttttatcatagccagtatgaccttgtaacacatttgacataccacgtttatctgtcttcaggggatcagaactaaaaagttacccaaagatccaattttaacacaggttgaagggttatgtatagccttttacccaaaataattacagaatggatttcttgaaaagtagttktgaggattttgttctatttttaaggatgggaggatttggatatgacctcaacagttggtggctgagaaagagtggagaaaaagatccttggagttaaagagataagagaacagagaggctagaatgttagacagagcccctttgtatatgttgaaataagcaaaatgtggacatgtgggtaggtgaatgggacagtgatccaggctctaaaactcttactaaatgagagaaaatgacagggagatctgtagataactatagctttgagggaagatgggtgatggtggctgatggcacaacctcaaatgagttccttttattgaaagaagacaat

SEQ ID NO: 367051 - DNA, 468 bp, Homo sapiens
acagagggagactgcacgagatttcatcacactactcagaatcgtgcaccggttgtggttctggaattttctgtttaatgtttttgaactgtggctgaccacaggtaactgaaaccatagaaagcaaaactatggttaagggggaactactgtatctttgttccccctaaaccctaaattagaatcagattctcctcaacactttgtatggatcttctaaattctggaacactgtgtcccagattcaaataatctcttttcttatcatatcaaaaagtgtgattgtccatgtctttcattttgttacataattttagaagcttaataaatgtcatcataaaataataaaaaaaataaattgtctccatgtttccgtctcatacagcaccttgtagccttgcrtagcaggcactcagtttgcagatattaatatactccatgggaggtttaaataacctcaaataaaaa

SEQ ID NO: 367052 - DNA, 472 bp, Homo sapiens
tcccatgtgaggagagtgatcttattacattgtcaacatgattatgttattcacttttataacatcctttaggatttcctaccttcatgacaacctctaaacttcttactcgataaggcataaaagtccataaatgttcttgcactgggctcctgtttatcaccagcaatgccaacatgcaatcatcccaaattcctgcaactctccaaaggagrcttgttcttgcaccctttccgatacagtctagaatgcatttccctctttttctctacctggttaacttctgttctttcttttaggtaggatccaagcaccagctagcataaccctttctcaccccatcttcactgagatgcccttattcattcatccgttttactcatatttgctaagtgtgctctatttaccaggcttcatcatagtacaggtaataacagtgagcaagacaaaagagttcactgtcctcaaggag

SEQ ID NO: 367053 - DNA, 588 bp, Homo sapiens
aataagaccttgcacagccttactaaaggaaattcagcacaatccagttagcccgccttttatgaaattgtgaagccagatcattcccaatactaattagcactgaagagtggaggcctgtcactctttctaggtgaaatatcatacttgtattaaatcagctaatgtcacattaatttctttaactggcatgttacagtctgactcatactgtcagctgtaactcctaatatttttttcatagtattgctaatccacatagctccatgatgaattttttataactcttttctctactgaagcatagaaccttttactgagtcactaataaagtttgacttgttatattctgcccaccactgatagttttaaatgttatagaaaacacagtgtaaacaacrtatgaacgcttattatatagatttcttattgccaatatttatttttcttggggggcataatgttctctttacttattaagtgctgtcagtatgcatgattagtcactttgaagcagtactatttggtctgcacattgcacaattgacagtagcaggtaggataaaggaatctaagtaaggcaaagca

SEQ ID NO: 367054 - DNA, 623 bp, Homo sapiens
ctgtcacctccttgctatgtactcatatggcatagagagatgaagtgagcaatgtgtttgctttctcttcttctaagagaagtaatcccatgtgaaaatatttccaatcccatgttttcatttacaccagattacctcccaaagtggcccatcactaaatacatcacactgggagccttcggtttaacatgtgaattttgaaggaatgcagtccagtacatagtagtagttaagcttcattttcaaggattaatacaatttagaactttgactgatagaagagaccttcttgtaaaagattcaggtgtatagatagaaacaaatctgataaatcaatttatattccagaaataatatgccacataaaggcctcgttttcttattattgataccagtattaatatcaacaacacctagtattaacaatagtaacaatcataacratctacatttatcaggtgcctactaattacttgtgaacaagagagctttaacaattctcttggctaagaaaaatgttaaagatttagacaggcttctgccctgacctctctttcacttctgtttttatagctggtctaaccaatgaggtccctttgcttagagcatttactatagaaaac

SEQ ID NO: 367055 - DNA, 623 bp, Homo sapiens
ctgtcacctccttgctatgtactcatatggcatagagagatgaagtgagcaatgtgtttgctttctcttcttctaagagaagtaatcccatgtgaaaatatttccaatcccatgttttcatttacaccagattacctcccaaagtggcccatcactaaatacatcacactgggagccttcggtttaacatgtgaattttgaaggaatgcagtccagtacatagtagtagttaagcttcattttcaaggattaatacaatttagaactttgactgatagaagagaccttcttgtaaaagattcaggtgtatagatagaaacaaatctgataaatcaatttatattccagaaataatatgccacataaaggcctcgttttcttattattgataccagtattaatatcaacaacacctagtattaacaatagtaacaatcataacgatctacatttatcaggtgcctrctaattacttgtgaacaagagagctttaacaattctcttggctaagaaaaatgttaaagatttagacaggcttctgccctgacctctctttcacttctgtttttatagctggtctaaccaatgaggtccctttgcttagagcatttactatagaaaac

SEQ ID NO: 367056 - DNA, 623 bp, Homo sapiens
ctgtcacctccttgctatgtactcatatggcatagagagatgaagtgagcaatgtgtttgctttctcttcttctaagagaagtaatcccatgtgaaaatatttccaatcccatgttttcatttacaccagattacctcccaaagtggcccatcactaaatacatcacactgggagccttcggtttaacatgtgaattttgaaggaatgcagtccagtacatagtagtagttaagcttcattttcaaggattaatacaatttagaactttgactgatagaagagaccttcttgtaaaagattcaggtgtatagatagaaacaaatctgataaatcaatttatattccagaaataatatgccacataaaggcctcgttttcttattattgataccagtattaatatcaacaacacctagtattaacaatagtaacaatcataacgatctacatttatcaggtgcctactaattacttgtgarcaagagagctttaacaattctcttggctaagaaaaatgttaaagatttagacaggcttctgccctgacctctctttcacttctgtttttatagctggtctaaccaatgaggtccctttgcttagagcatttactatagaaaac

SEQ ID NO: 367057 - DNA, 606 bp, Homo sapiens
cagagggcataagagataatcatatcattcgatcagcaactataaaagtgtgtgtgtgtgtgtgtgtgtgtacgtatgtatatatttcatttgtatagcaactcataagggtaaagtgtatatacctaattgtaaagatacatgatatatttttgttattttataactgaggcctgctaagagcatttagagtgaagcaattactgacatggatttgtttgcaacataaaaaatgtttttttttaaaaaagggagaaattctcaaggctgtttgttggaaaaagtacatattcactcatgaatcaatggagttaaatgagttttagtaaaaaagactttgagaatatatggaawctcaatcacaatataaaaaataaatgttttcttcaaaaaatgaattaattttagttaagtgtcatacttatattcttacatactttaaggtcatataatttagaattcaaaatttcagacagttctattttgaaatggtgagagaagtcactaccttcaatgaaaactagaggaggacaaacttctctgagtgctgcgctttctcttccttcccccttaataaccagaatcagtttaataatatttaaactg

SEQ ID NO: 367058 - DNA, 619 bp, Homo sapiens
tcaacactactgatcattagagaaatgaaaattataaccacagtatgatagcatctcacaacagtcagaatggctatttttaaaaagccaaagaataacagatgttggcaagattgcagagaaaagggaatgcttatatactgctgttgggaatgtaaactaattggccattgtggaaagcagtttggatatttctcaaataacttaaaacagaattaccatttgacccagcaatcccacgactctttatatacccaaaagaaaataaatcatcgtaaaaaaatgcatgcaytcatatgttcactgcaatactatttgttatagcaaagatgtggaatcaatctagatccccatcaacagtgaagtggatgaagaaaatgtcatacgcatacaccatggaatactatgcagtcatacaaaatcatattctttgcagcaaaatggatgcagctggaggctattatcctcagtgaattaacacaaggacagaagcccacataccgcacgttctcacttgtaagtgggagctaaacattgagttcacatggacataacaatgggaacaatagacactaaggactactagacgggagaggatggaaagagggtgagggttgaa

SEQ ID NO: 367059 - DNA, 619 bp, Homo sapiens
tcaacactactgatcattagagaaatgaaaattataaccacagtatgatagcatctcacaacagtcagaatggctatttttaaaaagccaaagaataacagatgttggcaagattgcagagaaaagggaatgcttatatactgctgttgggaatgtaaactaattggccattgtggaaagcagtttggatatttctcaaataacttaaaacagaattaccatttgacccagcaatcccacgactctttatatacccaaaagaaaataaatcatcgtaaaaaaatgcatgcactcatatgttcactgcaatactatttgttatagsaaagatgtggaatcaatctagatccccatcaacagtgaagtggatgaagaaaatgtcatacgcatacaccatggaatactatgcagtcatacaaaatcatattctttgcagcaaaatggatgcagctggaggctattatcctcagtgaattaacacaaggacagaagcccacataccgcacgttctcacttgtaagtgggagctaaacattgagttcacatggacataacaatgggaacaatagacactaaggactactagacgggagaggatggaaagagggtgagggttgaa

SEQ ID NO: 367060 - DNA, 591 bp, Homo sapiens
actacactctcaattaatcttgttaacaatcactatcatttttagtcgtgctctctgtaattctgaggggagagtgccctacctgaggctggagtagggtctttactgraaaacaactctgtcgcaaaatagccatctgagaagttgtaggacagaagttattgacagaagagcaaagacttgggcaacaagacaggctaaagtagacttgctccagaatgtacctgaaatactacattggagaatactcaatattagatgggggtgtggtaaagcaaagggaaaattctccacaattaatgatgtaaaaccataataaagaaaattttgcaatatttgtaatctcaggtcagtaatttggtagactgggaatacatagttgatggatatacctaaagtatcaaatatgtacctatgggcatgtgcaaagtaccccctctacaatgtcagtcattatcagagggcatgcatttttagggccacctcagactccaggattcccttcccccgatgttgtttggcatcatgttgacattattttgaatgttagcctgcttttcattttcaataagattaacattaaaatattac

SEQ ID NO: 367061 - DNA, 591 bp, Homo sapiens
actacactctcaattaatcttgttaacaatcactatcatttttagtcgtgctctctgtaattctgaggggagagtgccctacctgaggctggagtagggtctttactgaaaaacaactctgtcgcaaaatagccatctgagaagttgtaggacagaagttattgacagaagagcaaagacttgggcaacaagacaggctaaagtagacttgctccagaatgtacctgaaatactacattggagaatactcaatattagatgggggtgtggtaaagcaaagggaaaattctccacaattaatgatgtaaaaccataataaagaaaattttgcaatatttrtaatctcaggtcagtaatttggtagactgggaatacatagttgatggatatacctaaagtatcaaatatgtacctatgggcatgtgcaaagtaccccctctacaatgtcagtcattatcagagggcatgcatttttagggccacctcagactccaggattcccttcccccgatgttgtttggcatcatgttgacattattttgaatgttagcctgcttttcattttcaataagattaacattaaaatattac

SEQ ID NO: 367062 - DNA, 591 bp, Homo sapiens
actacactctcaattaatcttgttaacaatcactatcatttttagtcgtgctctctgtaattctgaggggagagtgccctacctgaggctggagtagggtctttactgaaaaacaactctgtcgcaaaatagccatctgagaagttgtaggacagaagttattgacagaagagcaaagacttgggcaacaagacaggctaaagtagacttgctccagaatgtacctgaaatactacattggagaatactcaatattagatgggggtgtggtaaagcaaagggaaaattctccacaattaatgatgtaaaaccataataaagaaaattttgcaatatttgtaatcycaggtcagtaatttggtagactgggaatacatagttgatggatatacctaaagtatcaaatatgtacctatgggcatgtgcaaagtaccccctctacaatgtcagtcattatcagagggcatgcatttttagggccacctcagactccaggattcccttcccccgatgttgtttggcatcatgttgacattattttgaatgttagcctgcttttcattttcaataagattaacattaaaatattac

SEQ ID NO: 367063 - DNA, 619 bp, Homo sapiens
tcaacactactgatcattagagaaatgaaaattataaccacagtatgatagcatctcacaacagtcagaatggctatttttaaaaagccaaagaataacagatgttggcaagattgcagagaaaagggaatgcttatatactgctgttgggaatgtaaactaattggccattgtggaaagcagtttggatatttctcaaataacttaaaacagaattaccatttgacccagcaatcccacgactctttatatacccaaaagaaaataaatcatcgtaaaaaaatgcatgcactcatatgttcactgcaatactatttgttatagcaaagatgtggaatcaatctagatccccatcaacagtgaagtggatgaagaaaatgtcatacgcatacaccatggaatactatgcagtcatacaaaatcatattctttgcagcaaaatggatgcagctggaggctattatcctcagtgaattaacacaaggacagaagcccacataccgcaygttctcacttgtaagtgggagctaaacattgagttcacatggacataacaatgggaacaatagacactaaggactactagacgggagaggatggaaagagggtgagggttgaa

SEQ ID NO: 367064 - DNA, 620 bp, Homo sapiens
cagcaatcccacgactctttatatacccaaaagaaaataaatcatcgtaaaaaaatgcatgcactcatatgttcactgcaatactatttgttatagcaaagatgtggaatcaatctagatccccatcaacagtgaagtggatgaagaaaatgtcatacgcatacaccatggaatactatgcagtcatacaaaatcatattctttgcagcaaaatggatgcagctggaggctattatcctcagtgaattaacacaaggacagaagcccacataccgcacgttctcacttgtaagtgggagctaaacattgagttcacatggacataacaatgggaacaatagacactaaggactactagacgggagaggatggaaagagggtgagggttgaaaagctacctactgagcactgtgctcactacctgggtgatggaatcattcataccccaaatctcagtgacctgcaatttatctrtgtaacaaacctacatatatacccctgaacctaaaataaagttgaaaagaaaaacaataaagtggaaccaaaagtcttttattacatattcgactatacagttcactttttgacctactttccaaagaaaaattatgttctattcc

SEQ ID NO: 367065 - DNA, 620 bp, Homo sapiens
cagcaatcccacgactctttatatacccaaaagaaaataaatcatcgtaaaaaaatgcatgcactcatatgttcactgcaatactatttgttatagcaaagatgtggaatcaatctagatccccatcaacagtgaagtggatgaagaaaatgtcatacgcatacaccatggaatactatgcagtcatacaaaatcatattctttgcagcaaaatggatgcagctggaggctattatcctcagtgaattaacacaaggacagaagcccacataccgcacgttctcacttgtaagtgggagctaaacattgagttcacatggacataacaatgggaacaatagacactaaggactactagacgggagaggatggaaagagggtgagggttgaaaagctacctactgagcactgtgctcactacctgggtgatggaatcattcataccccaaatctcagtgacctgcaatttatctatgtaacaaacctrcatatatacccctgaacctaaaataaagttgaaaagaaaaacaataaagtggaaccaaaagtcttttattacatattcgactatacagttcactttttgacctactttccaaagaaaaattatgttctattcc

SEQ ID NO: 367066 - DNA, 582 bp, Homo sapiens
  misc_feature (1)...(582): n = A,T,C or G
accattgaaactcatatttcctcctaaaaatgctaattaattccaatgtgagaacacctgaaatgttcaataaataaatctctgctgtttgcattatgtgtgtttstgtgtgtgtgtgtgtgtgtgtgtgtgtgtgtnagatattgatattgaggtatgagacggattaattagattatctaccaatagctctactgtgtattcatacaagaccaaaaaggcacagcagccaaaaaaaatctaaagtcataattttgaattttcaccatatatacaaatgtatgtcttaatcaataaccattaaaatagataaactctttggtacttggcctaatcactgaataagatcctttgattagtccataattatcacagttcagttaccaaatttaaaatcaataatactaatgaacaacattataatagagtgtgtataaattactctttcttggctgtttgagaaaaatcataagttttttttccaataaattttattgtgtatatttaaggtatacaacatgatgttatgggatacatatcgacagtaagaaggttaatagagtgaagctaattaacatatcc

SEQ ID NO: 367067 - DNA, 635 bp, Homo sapiens
taccccaaatctcagtgacctgcaatttatctatgtaacaaacctacatatatacccctgaacctaaaataaagttgaaaagaaaaacaataaagtggaaccaaaagtcttttattacatattcgactatacagttcactttttgacctactttccaaagaaaaattatgttctattccacatcagttttccagtttagtttcttgacttctctcaccttgtcttcagggtatcatcattgcaagcagtaatgcaaacttcttacaattcaattaagattatataatcacctttttaaaaaacctgcaaaacctcctcaaataaaatctgtatcttttatcttcacatccacagtctttcataattttgctaaaaccatcttccattctcataattttcccattccatagcctrtggcacagttacgattctgttctttcaacacgccactcattgttctagccctacaactttccacttgctatttttaccgttagaaaatgtatgctttatcttttctacctgtgaatgccttttttatttttggaaagccaagttaaaattatcttatctgtacaagttactctgactcttcacagtaaaaacatagacacaaatactgcttcctcaacaat

SEQ ID NO: 367068 - DNA, 635 bp, Homo sapiens
taccccaaatctcagtgacctgcaatttatctatgtaacaaacctacatatatacccctgaacctaaaataaagttgaaaagaaaaacaataaagtggaaccaaaagtcttttattacatattcgactatacagttcactttttgacctactttccaaagaaaaattatgttctattccacatcagttttccagtttagtttcttgacttctctcaccttgtcttcagggtatcatcattgcaagcagtaatgcaaacttcttacaattcaattaagattatataatcacctttttaaaaaacctgcaaaacctcctcaaataaaatctgtatcttttatcttcacatccacagtctttcataattttgctaaaaccatcttccattctcataattttcccattccatagcctatggcacagttacgattctgttctttcaacacgccrctcattgttctagccctacaactttccacttgctatttttaccgttagaaaatgtatgctttatcttttctacctgtgaatgccttttttatttttggaaagccaagttaaaattatcttatctgtacaagttactctgactcttcacagtaaaaacatagacacaaatactgcttcctcaacaat

SEQ ID NO: 367069 - DNA, 635 bp, Homo sapiens
taccccaaatctcagtgacctgcaatttatctatgtaacaaacctacatatatacccctgaacctaaaataaagttgaaaagaaaaacaataaagtggaaccaaaagtcttttattacatattcgactatacagttcactttttgacctactttccaaagaaaaattatgttctattccacatcagttttccagtttagtttcttgacttctctcaccttgtcttcagggtatcatcattgcaagcagtaatgcaaacttcttacaattcaattaagattatataatcacctttttaaaaaacctgcaaaacctcctcaaataaaatctgtatcttttatcttcacatccacagtctttcataattttgctaaaaccatcttccattctcataattttcccattccatagcctatggcacagttacgattctgttctttcaacacgccactcattgttctagccctacaactttccacttgctatttttaccgttagaaaatgtatgctttatcttttctacctgtgaatgccttttttatttttggaaagccaagttaaaattatcttatytgtacaagttactctgactcttcacagtaaaaacatagacacaaatactgcttcctcaacaat

SEQ ID NO: 367070 - DNA, 606 bp, Homo sapiens
taaaaattaaaacataatgtagaccgcaagatgtaatatctttcttaaggggaaaattttgaattatacatacaatattttacagaatctgaataatacattttaattgaaatttatcattttaaaatcattaattgtttaaaactaaaaaaatcaagaaactactattactgaactattatataattattatttaaaatgcttttattcaataacaaagggtttttaaaaaattaccctctcctggtgccaaatatcttgttacatcactggaagacaatataatcatttgcaatgcatacaagagtgtgtaggaaatagttataaccccacatggaccaactgtacatggcatatttggtttaatatttattgattactaataactttctgaacaggaatgaccaggaactatkcagcgacaggtgagcaaaatggggatgctgttcttgccttacttaaatcttggcatgtattttcaaccatgctatatttgcctgcaaaatctttggtcccttacatgcattttccagctttgctgagggtcaaaactacgtcacaatgagggtagcagataatcagcgtctaaagatactactatagcat

SEQ ID NO: 367071 - DNA, 517 bp, Homo sapiens
tttttccttctccttcaagaatgctaataattaataggtttgattgctttacataatcccatatttctcgcagatttgttcatttttataattctcttttaaaatttttgtctgaatggcttagttcaacagactggccatctagttctgaaattygttttctgcttgttctagtctattgacaaagcttttagttgtattttgaaattctgcaagtgagtttttcagttccagtagctctgattgatttctttttaaaatgtttaccttttcctttatttcttggattgctttacaggtttctttgtcttaattttcaaccttatcttggagctcattgagttctgtgatccatgctttgaattatccgtcttttatctctatacctacattttggcttggcatcattgccagagagttagagtgaggcttcggttgtcacacattctgattttttttagtggcagaaatcttacgctgcttctttctcatctggagagtgttgcattgggtaggg

SEQ ID NO: 367072 - DNA, 465 bp, Homo sapiens
tgcaccttcactctattggttgtggccattgctgtgcagatacgttttagcttgatagagtttaatctgtctgtttttgcttttggtgcctgtgctttcaaggtcttacccaaataatctttgcctggactaatagcatgaagcatttcccctatgttktattctagcagttttatagttttgggtcttacatttcaatttttaatctattttgagttgatttttatatggtaaaagataggaatccagtttcattctgttgcatgtgaatatccagtttttcagccccatttattcaagatactttactttctccaatgtatgtttttggtgcctttgttgaaagtgagttggttgtgaatatatggatttgcttctgaattctccattgtcttccactggtatacatatctgtttttatcacagcaccttgctattttggatagctttgtagtatattttaaa

SEQ ID NO: 367073 - DNA, 465 bp, Homo sapiens
tgcaccttcactctattggttgtggccattgctgtgcagatacgttttagcttgatagagtttaatctgtctgtttttgcttttggtgcctgtgctttcaaggtcttacccaaataatctttgcctggactaatagcatgaagcatttcccctatgttgtattctagcagttttatagttttgggtcttacatttcaatttttaatctattttgagttgatttttatatggtaaaagataggaatccagtttcattctgttgcatgtgaatatccagtttttcagccccatttattcaagatactttactttctccaatgtatgtttttggtgcctttgttgaaagtgagttggttgtgaatatatggatttgcttctgaattctccattrtcttccactggtatacatatctgtttttatcacagcaccttgctattttggatagctttgtagtatattttaaa

SEQ ID NO: 367074 - DNA, 465 bp, Homo sapiens
tgcaccttcactctattggttgtggccattgctgtgcagatacgttttagcttgatagagtttaatctgtctgtttttgcttttggtgcctgtgctttcaaggtcttacccaaataatctttgcctggactaatagcatgaagcatttcccctatgttgtattctagcagttttatagttttgggtcttacatttcaatttttaatctattttgagttgatttttatatggtaaaagataggaatccagtttcattctgttgcatgtgaatatccagtttttcagccccatttattcaagatactttactttctccaatgtatgtttttggtgcctttgttgaaagtgagttggttgtgaatatatggatttgcttctgaattctccattgtcttccactggtatacatatctgtttttatcacagcacyttgctattttggatagctttgtagtatattttaaa

SEQ ID NO: 367075 - DNA, 517 bp, Homo sapiens
tttttccttctccttcaagaatgctaataattaataggtttgattgctttacataatcccatatttctcgcagatttgttcatttttataattctcttttaaaatttttgtctgaatggcttagttcaacagactggccatctagttctgaaatttgttttctgcttgttctagtctattgacaaagcttttagttgtattttgaaattctgcaagtgagtttttcagttccagtagctctgattgatttctttttaaaatgtttaccttttcctttatttcttggattgctttacaggtttctttgtcttaattttcaaccttatcttggagctcattgagttctgtgatccatgctttgaattatccgtcttttatctctatacctacattttggcttggcatcattgccagagagttagagtgaggcttcggttgtcacacattctgattttttwtagtggcagaaatcttacgctgcttctttctcatctggagagtgttgcattgggtaggg

SEQ ID NO: 367076 - DNA, 466 bp, Homo sapiens
cttcggttgtcacacattctgattttttttagtggcagaaatcttacgctgcttctttctcatctggagagtgttgcattgggtagggtattttggctttgcttctgtagtcctctgcacttctggcagcaggttttgtattgggctgtgtggtccaacctataggccagtaggtgatatttgcaataagagccaactgctgcataagcaggtatgtatgaacttgatcattgtttactgtgaggtaatttctttagtttcaggtgaagggctgaacagtggggtgttcaatatcctgtactgttgagatggcaggacacagctaggcagagctggagcccctcacttgcccatgmatatcccagtggtgagtgtaggcacctgccatgatgagggtggctgggtgaaattcctggtgaagtgcgctgaggaggctgccacagctccctgtcctagaaaggcaaga

SEQ ID NO: 367077 - DNA, 586 bp, Homo sapiens
gcacctgccatgatgagggtggctgggtgaaattcctggtgaagtgcgctgaggaggctgccacagctccctgtcctagaaaggcargaatgaaatctgtttccctatggcacccctgttccaggtcccttgactcctagttcagatgcataccagagtctatctctgggctataatatggttgaaaccaacagggaatgcctgttttgtgactctttatgggagtggtttcatggcataaccccatcactcaacccgatatagatacctttaaagcttgcctgttcttcgatgtggcaggatcaccgcttctcgtaaagggaaggagggctccatctttgcactcatgtgagcttgccagtgagtgttggttgtcatggtgtcagctgagtgggttggcccaacctcagaccctgagggaacaggacaggtgctaacagagtaggttgttctccagttcccaggcttccaaatggcctactggacagtgtgtatgagtcctgagggggctggactcgggttgggttagcacagagttcaggtgttggctgttgtgaagttaggaggggtggactgttccctgggt

SEQ ID NO: 367078 - DNA, 586 bp, Homo sapiens
gcacctgccatgatgagggtggctgggtgaaattcctggtgaagtgcgctgaggaggctgccacagctccctgtcctagaaaggcaagaatgaaatctgtttccctatggcacccctgttccaggtcccttgactcctagttcagatgcataccagagtctatctctgggctataatatggttgaaaccaacagggaatgcctgttttgtgactctttatgggagtggtttcatggcataaccycatcactcaacccgatatagatacctttaaagcttgcctgttcttcgatgtggcaggatcaccgcttctcgtaaagggaaggagggctccatctttgcactcatgtgagcttgccagtgagtgttggttgtcatggtgtcagctgagtgggttggcccaacctcagaccctgagggaacaggacaggtgctaacagagtaggttgttctccagttcccaggcttccaaatggcctactggacagtgtgtatgagtcctgagggggctggactcgggttgggttagcacagagttcaggtgttggctgttgtgaagttaggaggggtggactgttccctgggt

SEQ ID NO: 367079 - DNA, 310 bp, Homo sapiens
gtcatgtgctaatgtgtccataattggttccttccggtgggttcttggtctcgctgacttcaagaatgaagccayggaccctcacggtgagtgttgcagttcttaaaggtggcacgtccggtgttgtttgttcctcccagtgggtttgtggtctcactggcttcaggaatgaagctgcagaccctcgcggtgactgttaccgctcataaaggtagtgtggacccaaagagtgagcagcagcaagatttattgtgaagagcaaaagaacaaagcttccacacagtagaaggttactggagcaggttgctgc

SEQ ID NO: 367080 - DNA, 535 bp, Homo sapiens
aaatttacctatagcctggaagcccctgcttcaagttgttctgcctttcaggaacaaaccratgtacggtaaatgtatttggttgatgtctcatgtctctctaaaatgtataaaaccaagctgcaccccaaccaccttgggcacatgttttcaggacctcctgagggatgtgtcacaggtcatggtcactgctaattggctcagaataaagttctttaatattttacagagtttgagtcttttcatcgacagtatacttgaaaattgctgagagtagattttaagtgttctcactccaaaaagtaagtatgtgaaataacgaatatgttattgagttgatttagccattccacaatatatgcatacttcaaaacaacatactgtacacaaaaagttgtataaattttgttttctgtttaaaaattttaaaaataaaagtaaataaatgaattaatgtaagtaagaactgtaagagttacataaagaggaaagaaacacaaaaagtgactcaacagtcaaagacaggtttactttg

SEQ ID NO: 367081 - DNA, 535 bp, Homo sapiens
aaatttacctatagcctggaagcccctgcttcaagttgttctgcctttcaggaacaaaccaatgtayggtaaatgtatttggttgatgtctcatgtctctctaaaatgtataaaaccaagctgcaccccaaccaccttgggcacatgttttcaggacctcctgagggatgtgtcacaggtcatggtcactgctaattggctcagaataaagttctttaatattttacagagtttgagtcttttcatcgacagtatacttgaaaattgctgagagtagattttaagtgttctcactccaaaaagtaagtatgtgaaataacgaatatgttattgagttgatttagccattccacaatatatgcatacttcaaaacaacatactgtacacaaaaagttgtataaattttgttttctgtttaaaaattttaaaaataaaagtaaataaatgaattaatgtaagtaagaactgtaagagttacataaagaggaaagaaacacaaaaagtgactcaacagtcaaagacaggtttactttg

SEQ ID NO: 367082 - DNA, 535 bp, Homo sapiens
aaatttacctatagcctggaagcccctgcttcaagttgttctgcctttcaggaacaaaccaatgtacggtaaatgtatttggttgatgtctcatgtctctctaaaatgtataaaaccaagctgcaccccaaccaccttgggcacatgttttcaggacctcctgagggatstgtcacaggtcatggtcactgctaattggctcagaataaagttctttaatattttacagagtttgagtcttttcatcgacagtatacttgaaaattgctgagagtagattttaagtgttctcactccaaaaagtaagtatgtgaaataacgaatatgttattgagttgatttagccattccacaatatatgcatacttcaaaacaacatactgtacacaaaaagttgtataaattttgttttctgtttaaaaattttaaaaataaaagtaaataaatgaattaatgtaagtaagaactgtaagagttacataaagaggaaagaaacacaaaaagtgactcaacagtcaaagacaggtttactttg

SEQ ID NO: 367083 - DNA, 535 bp, Homo sapiens
aaatttacctatagcctggaagcccctgcttcaagttgttctgcctttcaggaacaaaccaatgtacggtaaatgtatttggttgatgtctcatgtctctctaaaatgtataaaaccaagctgcaccccaaccaccttgggcacatgttttcaggacctcctgagggatgtgtcacaggtcatggtcactgctaattggctcagaataaagttctttaatattttacagagtttgagtcttttcatcgacagtatacttgaaaattgctgagagtagattttaagtgttctcactccaaaaagtaagtatgtgaaataacgaatatgttattgagttgatttagccattccacaatatatgcatacttcaaaacaacatactgtacacaawaagttgtataaattttgttttctgtttaaaaattttaaaaataaaagtaaataaatgaattaatgtaagtaagaactgtaagagttacataaagaggaaagaaacacaaaaagtgactcaacagtcaaagacaggtttactttg

SEQ ID NO: 367084 - DNA, 533 bp, Homo sapiens
ctggcatgtttatggtcaaggagaggtttatcttagggttggaatgtttctgttcagagatgtcatttgtggtttatggtcatgttgacattaaccattaggctgatgccctttggtttggatttaggcagtttttgatcaacgagaactttaaaattgtggtgcttgtccaagatggcaatgctcctgctctgtcaagaacaaaaattaatgaaatgaaaagcaaaaaaataaaaaatacatattttttgtatataaaatatatatttttatgtatgaattttatatatatgtatgtgtgtgtacacacacacgtataaattcagtgaggctgatggggctggaattaggtcacacctggagataaggtaatatgcactaaaatattctaaacatcagaataggagtcaycttgaattttttttgaatttctaatccatgcatgcactctaagctaatagtaagctttgtgtgcataggttgtaactccattatgccagaaaaaaaagcaactggggacttcaaaatatttg

SEQ ID NO: 367085 - DNA, 533 bp, Homo sapiens
ctggcatgtttatggtcaaggagaggtttatcttagggttggaatgtttctgttcagagatgtcatttgtggtttatggtcatgttgacattaaccattaggctgatgccctttggtttggatttaggcagtttttgatcaacgagaactttaaaattgtggtgcttgtccaagatggcaatgctcctgctctgtcaagaacaaaaattaatgaaatgaaaagcaaaaaaataaaaaatacatattttttgtatataaaatatatatttttatgtatgaattttatatatatgtatgtgtgtgtacacacacacgtataaattcagtgaggctgatggggctggaattaggtcacacctggagataaggtaatatgcactaaaatattctaaacatcagaataggagtcaccttgaattttttttgaatttctaatccatgcatgcactctaagctaatagtaagctttgtgtgcataggttgtaactccatkatgccagaaaaaaaagcaactggggacttcaaaatatttg

SEQ ID NO: 367086 - DNA, 619 bp, Homo sapiens
atcagggtgccaatatggttgtgttctgataagatccctcttccagggtgcagactgctgttttcttctgtatcctcatattatggaataagaataagagagctctctttcataagggcactaatctcattcatgagggcttcatcctcaagacctaattacctccccaaagcatcctctactataacattggaagttaggagtttaacatataaattttggtgggacacaaaaatccagttcattgcaattagaaccccaaactactatatatcttcacacctttcattattctttatttgtattacactacctaaagtttttttcccatcgccaaatccaatacattttgtagctttcatttttcaagaagaagctccagtaacttgttcccaattkcagtaactcagtgacttttcctccttctgaatacctgtcatattttctaccactcacttcattaacccaggtcggaacagagctttagatgaaacattgcatttcctcaatcattacaatttttttgtttccattctaactctgcaagcttgtttaagctaacccttcaacttacggacactagaaagtggatgccaatttactggggtgcagtgattca

SEQ ID NO: 367087 - DNA, 619 bp, Homo sapiens
atcagggtgccaatatggttgtgttctgataagatccctcttccagggtgcagactgctgttttcttctgtatcctcatattatggaataagaataagagagctctctttcataagggcactaatctcattcatgagggcttcatcctcaagacctaattacctccccaaagcatcctctactataacattggaagttaggagtttaacatataaattttggtgggacacaaaaatccagttcattgcaattagaaccccaaactactatatatcttcacacctttcattattctttatttgtattacactacctaaagtttttttcccatcgccaaatccaatacattttgtagctttcatttttcaagaagaagctccagtaacttgttcccaatttcagtaactcagtgactyttcctccttctgaatacctgtcatattttctaccactcacttcattaacccaggtcggaacagagctttagatgaaacattgcatttcctcaatcattacaatttttttgtttccattctaactctgcaagcttgtttaagctaacccttcaacttacggacactagaaagtggatgccaatttactggggtgcagtgattca

SEQ ID NO: 367088 - DNA, 619 bp, Homo sapiens
atcagggtgccaatatggttgtgttctgataagatccctcttccagggtgcagactgctgttttcttctgtatcctcatattatggaataagaataagagagctctctttcataagggcactaatctcattcatgagggcttcatcctcaagacctaattacctccccaaagcatcctctactataacattggaagttaggagtttaacatataaattttggtgggacacaaaaatccagttcattgcaattagaaccccaaactactatatatcttcacacctttcattattctttatttgtattacactacctaaagtttttttcccatcgccaaatccaatacattttgtagctttcatttttcaagaagaagctccagtaacttgttcccaatttcagtaactcagtgacttttcctccttctgaatacctgtcatattttctaccactcacttcattaacccaggtyggaacagagctttagatgaaacattgcatttcctcaatcattacaatttttttgtttccattctaactctgcaagcttgtttaagctaacccttcaacttacggacactagaaagtggatgccaatttactggggtgcagtgattca

SEQ ID NO: 367089 - DNA, 619 bp, Homo sapiens
atcagggtgccaatatggttgtgttctgataagatccctcttccagggtgcagactgctgttttcttctgtatcctcatattatggaataagaataagagagctctctttcataagggcactaatctcattcatgagggcttcatcctcaagacctaattacctccccaaagcatcctctactataacattggaagttaggagtttaacatataaattttggtgggacacaaaaatccagttcattgcaattagaaccccaaactactatatatcttcacacctttcattattctttatttgtattacactacctaaagtttttttcccatcgccaaatccaatacattttgtagctttcatttttcaagaagaagctccagtaacttgttcccaatttcagtaactcagtgacttttcctccttctgaatacctgtcatattttctaccactcacttcattaacccaggtcggaacagagctttagatgaaacattgcatttcctcaatyattacaatttttttgtttccattctaactctgcaagcttgtttaagctaacccttcaacttacggacactagaaagtggatgccaatttactggggtgcagtgattca

SEQ ID NO: 367090 - DNA, 566 bp, Homo sapiens
caccccccgacaggccccagtgtgtgaatgtccccctccctgtgtccatgtgttctctttgataaactcccacctacgattgagaacatgcggtgtttggttttctgctcctgtgttagtttcctgagaattatgggatccagcttcatccatgtccctgcaaaggacatgaactcatcctattttatrgctgcatagtatttcttggtgtatatgtgccacattttctttatctagtctatcattgatgggcatttgggttggttccaagtctttgctattgtgaatagtgctggaataaacatatgtgtgcatgtgtctttatagtagaatgttttataatcctttgggtatatacccacgcattctttaaagtaaaaaaggtatcctattttaaaaaatggactagtttaagtcactacaattgcatatctctcctgaaggcaataatcagacttcagagtgccacagaaatgctttctgcataatacctccaattttttcataagaatattaaactacatgtatctgagggttatcatttaataaaagtgaaatgctttatc

SEQ ID NO: 367091 - DNA, 549 bp, Homo sapiens
ttattacatgagaaagaaagaaactaacttgtttgagcttttgtattttgatgtatttggggttataaagtttaagactcagccctgatttagtataatgaaatgatactgctaaagtttgaatactctttggcctcgataaatatttatacttcctatgattcatgcttattttcaaagttcatgtgcttaggtgtttgaacattgtaaattatgtttctcatagaacaaagccctactcgatgggttctagttatttagtcctattttggaaaaagccaatattcttgccattccactgctctaaataattgaaataaattgtggcacaattaatttgcccttagcaaaaggttttaaagactacaattggtcactaagacagccaaatcatctgcctagttatgcyacaacatgttttggtggttgcatgaagataatggtctcagctaaatcaatttcaagtgcagacataaaaattattggcactttgaaaattgatgccatattgaaatttcttttgcatcctctccttaaagttctaaatgt

SEQ ID NO: 367092 - DNA, 549 bp, Homo sapiens
ttattacatgagaaagaaagaaactaacttgtttgagcttttgtattttgatgtatttggggttataaagtttaagactcagccctgatttagtataatgaaatgatactgctaaagtttgaatactctttggcctcgataaatatttatacttcctatgattcatgcttattttcaaagttcatgtgcttaggtgtttgaacattgtaaattatgtttctcatagaacaaagccctactcgatgggttctagttatttagtcctattttggaaaaagccaatattcttgccattccactgctctaaataattgaaataaattgtggcacaattaatttgcccttagcaaaaggttttaaagactacaattggtcactaagacagccaaatcatctgcctagttatgctrcaacatgttttggtggttgcatgaagataatggtctcagctaaatcaatttcaagtgcagacataaaaattattggcactttgaaaattgatgccatattgaaatttcttttgcatcctctccttaaagttctaaatgt

SEQ ID NO: 367093 - DNA, 604 bp, Homo sapiens
  misc_feature (1)...(604): n = A,T,C or G
aatttcttttgcatcctctccttaaagttctaaatgttttctaaataaaatatgttttgtgtaacatagtacatactgcttatgatcaataacctattgttctattgaaatttatatatatataacattttctcttttttactyccatattcataattctgcttacattacccattcatttattcacttagaaaatatgtattatattactacagtcagtctgccatttcatgagattcttggagatattatatttaataagatacatactaaaaatgctacattcaaacttgtgttactagctaaaaccatctctgatgttataagtcccaactttctctccaccaatcccttaaagttcattttatggtataataagaagcaataagctgcagtgataacaacataggccttggaggaaanaccaaaaacaaaaccaaacaaacaaatgaaaaaccttgggttaatatgatacctaccatgtaaaagcattgactggaactggaattattatttaaaccttgtgatatttggtttcctattggtcaaataaagatgatgatacttagattatacagttgttctagggatttaagtacaacac

SEQ ID NO: 367094 - DNA, 645 bp, Homo sapiens
agttttcctgcaatgatatacagactctccctcacctgccaccatgtaagacatgcctgcttctgcttctgccatgattgtaagtttcctgaggctttcccagacatttcgtactgtgaatcaattaaatctctttcctttataaattacccagtctcaggtatttctttatagcagtgtraaaacagactaatatgctctatatgaaaagcaaagtgattttatctatatagtatttgctcaataattatcttgcaatatattttggcaggcataatctcttgaaagtaattgagttgcaagaaaaataatacctctgtatttttccgtgttctttttgttatgatgtattgagggctgtgtttaattcttctttttaaagaatacaaatctttttagaaaaccaaataaagttatgtttttaagtaatggtagttactcttgtttattaaaaggcacaatatctgtaaattttgataatttactgtagatcatacattccttttgacatttcaaaaataaactagacaatttaatgtcttaaagtatcaaaatattgaaattgaaaatccctgcaacatataaaacagttttggtaattttattctttctttttcttaatttgaaagttctatttaaataatg

SEQ ID NO: 367095 - DNA, 590 bp, Homo sapiens
ggatactggacattttgtgtttcttgggggaaatgaagcactttgggtagcaaggaggcaactcaagaatcatgaatttattcatttatcagccagtgtgggtatattcaatactttagcaattggtgcagttgtttcaaatgygtgggatcaatgtaagtcatgggtggaactgaccttgtgcttctaccgaaggccctcttcccatttatattttataaccaaatcttgttgtcattttattaactgccatttgtgcttccctgtcaggttaggccttgcatctttaatcagtaaatccccagtacttcattattagaaatcacaattttcttttctgatttagtgtagtttaatttgaaatttcttactttgccactgaagtaaactagtgtatctaagtatgtcttcagtacattattgcttcatctatgcatatatatcttatcatttatatctttaatctctgtatattcattgatttcttcttttatactcacaaaaagaatcaagttttcccatcctaaagtggcatttcttctagcctgtctctcttgatcaaaaagttcttttaaacaccaaagtttttg

SEQ ID NO: 367096 - DNA, 590 bp, Homo sapiens
ggatactggacattttgtgtttcttgggggaaatgaagcactttgggtagcaaggaggcaactcaagaatcatgaatttattcatttatcagccagtgtgggtatattcaatactttagcaattggtgcagttgtttcaaatgcgtgggatcaatgtaagtcatgggtggaactgaccttgtgcttctaccgaaggccctcttcccatttatattttataaccaaatcttgttgtcattttattaactgccatttgtgcttccctgtcaggttaggccttgcatctttaatcagtaaatccccagtacttcattattagaaatcacaattttcttttctgatttagtgtagtttaatttgaaatttcttactttgccactgaagtaaactagtgtatctaagtatgtcttcagtacattattgcttcatctatgcatatatatcttatcatttatatctttaatctctgtatattcattgatttcttcttttatactcacaaaaagaatcaagytttcccatcctaaagtggcatttcttctagcctgtctctcttgatcaaaaagttcttttaaacaccaaagtttttg

SEQ ID NO: 367097 - DNA, 556 bp, Homo sapiens
aagaccattatcatggcccatttccacttaataatagtaaatacactttctcttcctcatgattttcttaataccattttctttytaaattcattattcactgttttttttcaacttttagaatcagtgcatacatgtgcaggtttgctacaaaggcatattgcatgatgctgaagtttggagtacaaatgaatccatcacccagatagtaagcataataatcagtaggtagttttttcaactcttactcccctctcccacttcttgtattccctagtgtctactgttcccatttttatgaccatgtgtactcaatatttagcttccacttataagtgagaacatgcagtatttggttttctgtctctgaattagtttgcttaggctaatggtttctagctttatacatgttgctacaaagaacatgattttattattttttatggctgtgtagtatttaatggtgtatatatactacattttctttatccaattcactgctgatgggcacctgtattgattccatgcctctgccactgtgaatagtgctgcaaaa

SEQ ID NO: 367098 - DNA, 556 bp, Homo sapiens
aagaccattatcatggcccatttccacttaataatagtaaatacactttctcttcctcatgattttcttaataccattttctttctaaattcattattcactgttttttttcaacttttagaatcagtgcatacatgtgcaggtttgctacaaaggcatattgcatgatgctgaagtttggagtacaaatgaatccatcacccagatagtaagcataataatcagtargtagttttttcaactcttactcccctctcccacttcttgtattccctagtgtctactgttcccatttttatgaccatgtgtactcaatatttagcttccacttataagtgagaacatgcagtatttggttttctgtctctgaattagtttgcttaggctaatggtttctagctttatacatgttgctacaaagaacatgattttattattttttatggctgtgtagtatttaatggtgtatatatactacattttctttatccaattcactgctgatgggcacctgtattgattccatgcctctgccactgtgaatagtgctgcaaaa

SEQ ID NO: 367099 - DNA, 556 bp, Homo sapiens
aagaccattatcatggcccatttccacttaataatagtaaatacactttctcttcctcatgattttcttaataccattttctttctaaattcattattcactgttttttttcaacttttagaatcagtgcatacatgtgcaggtttgctacaaaggcatattgcatgatgctgaagtttggagtacaaatgaatccatcacccagatagtaagcataataatcagtaggtagttttttcaactcttactcccctctcccacttcttgtattccctagtgtctactgttcccatttttatgaccatgtgtactcaatatttagcttccacttataagtgagaacatgcagtatttggttttctgtctctgaattagtttgcttaggctaatggtttctagctttatacatgttgctacaaagaacatgattttattattttttatggctgtgtagtatttmatggtgtatatatactacattttctttatccaattcactgctgatgggcacctgtattgattccatgcctctgccactgtgaatagtgctgcaaaa

SEQ ID NO: 367100 - DNA, 578 bp, Homo sapiens
ttaaataaaaattcatacaaacaaatggaaacttttttatgttataaactgagtttagaaaaggggattattttgcattttcaaattaaattgacacaaatcagaaataaattcttaataattatttcaaggattaagacaactttctgctcagatgaagcagagagagagctgaaccattgagaggactccctagttcctttwtttttcctgcatttgacatgtgcttgctggtcaagaataaaagataaatctgtaagtgaggctatagggttattacctcacaggccaagtgatacatttaggctctgaagcatctcaaatttttcagccccagagacttgtatagcttacttgacattctccagggagaaatgcctcatagatccatggattcttagtttatttactgtaagtaatcctttgccagggatatagtgataggagaattttatagataaaggttcttcctgctaagaaatatcattagtatgtttacctagaggaccatttggtaagaggattggaacagttcctactctttttctttcccccaagacatcctcccagtaaagaca

SEQ ID NO: 367101 - DNA, 578 bp, Homo sapiens
ttaaataaaaattcatacaaacaaatggaaacttttttatgttataaactgagtttagaaaaggggattattttgcattttcaaattaaattgacacaaatcagaaataaattcttaataattatttcaaggattaagacaactttctgctcagatgaagcagagagagagctgaaccattgagaggactccctagttcctttttttttcctgcatttgacatgtgcttgctggtcaagaataaaagataaatctgtaagtgaggctatagggttattacctcacaggccaagtgatacatttaggctctgaagcatctcaawtttttcagccccagagacttgtatagcttacttgacattctccagggagaaatgcctcatagatccatggattcttagtttatttactgtaagtaatcctttgccagggatatagtgataggagaattttatagataaaggttcttcctgctaagaaatatcattagtatgtttacctagaggaccatttggtaagaggattggaacagttcctactctttttctttcccccaagacatcctcccagtaaagaca

SEQ ID NO: 367102 - DNA, 578 bp, Homo sapiens
ttaaataaaaattcatacaaacaaatggaaacttttttatgttataaactgagtttagaaaaggggattattttgcattttcaaattaaattgacacaaatcagaaataaattcttaataattatttcaaggattaagacaactttctgctcagatgaagcagagagagagctgaaccattgagaggactccctagttcctttttttttcctgcatttgacatgtgcttgctggtcaagaataaaagataaatctgtaagtgaggctatagggttattacctcacaggccaagtgatacatttaggctctgaagcatctcaaatttttcagccccagagacttgtatagcttacttgacattctycagggagaaatgcctcatagatccatggattcttagtttatttactgtaagtaatcctttgccagggatatagtgataggagaattttatagataaaggttcttcctgctaagaaatatcattagtatgtttacctagaggaccatttggtaagaggattggaacagttcctactctttttctttcccccaagacatcctcccagtaaagaca

SEQ ID NO: 367103 - DNA, 578 bp, Homo sapiens
ttaaataaaaattcatacaaacaaatggaaacttttttatgttataaactgagtttagaaaaggggattattttgcattttcaaattaaattgacacaaatcagaaataaattcttaataattatttcaaggattaagacaactttctgctcagatgaagcagagagagagctgaaccattgagaggactccctagttcctttttttttcctgcatttgacatgtgcttgctggtcaagaataaaagataaatctgtaagtgaggctatagggttattacctcacaggccaagtgatacatttaggctctgaagcatctcaaatttttcagccccagagacttgtatagcttacttgacattctccagggagaaatgcctcatagatcsatggattcttagtttatttactgtaagtaatcctttgccagggatatagtgataggagaattttatagataaaggttcttcctgctaagaaatatcattagtatgtttacctagaggaccatttggtaagaggattggaacagttcctactctttttctttcccccaagacatcctcccagtaaagaca

SEQ ID NO: 367104 - DNA, 539 bp, Homo sapiens
ggaaaaatacataaaacaattatcataaagcattagactgtaggaagcataggactatggtttttaagcaaagagaaacacatggtacgagttttatgaccatcccagggagcttcctagagccacatcaggwtaataacaaaaggagagggataccaagaagagcacagtggtctgtctgggttaagaagagaaattaaattccatgaggtttatggttaagtctttaatccatttggagttgtttagtatacagtgtgagataaggtccaatgttattcttctgaatgggaatatccatttttagcaacatgatttattgaagagactgccctttccccatgtaaaaaataatttctgagatttctattctcttctatttctatttctatctattctatctctattctgttctgttctatctgggattctgttctgttagcctgcatgtctggttgtataccaataccatgttgttttgactacaatagctttgtagtatactctgaaatcaggtagtgtgatgtcttcagctttgt

SEQ ID NO: 367105 - DNA, 555 bp, Homo sapiens
ttcatccatctatgtagtctttaccaggcttcccttaggaaacatattgctgatggtactatatgagataaaaagttcagtaggtcagctaaaactcatgaattaatgtctaaaactttatgacttgcctctaaatccctctgctsatgttttgcatcagactttaaattttcatcctataaatagtggtcataaaatgtacattaaatggaattttgacctgtgtctaaaatattttatttcatggtatactggaaagggaatgaaagcaacactggtaagatgtcacaggaattttgggatgtagaattatttagccagggatgcagcttttgggaggttaaagccctggggcaacttccctggataaactatgtaaggttgattctgaggcaatgtaagaaatcaggatatagttcccttaatctcaaggaatgcggtaaagtggtgtctctgtcttgtggattctgcttatcctttttaaaatcaatgtttgcatctcaatcactacaagctcttccttctctacacatccacatccctatcatggataca

SEQ ID NO: 367106 - DNA, 555 bp, Homo sapiens
ttcatccatctatgtagtctttaccaggcttcccttaggaaacatattgctgatggtactatatgagataaaaagttcagtaggtcagctaaaactcatgaattaatgtctaaaactttatgacttgcctctaaatccctctgctcatgttttgcatcagactttaaattttcatcctataaatagtggtcataaaatgtacattaaatggaattttgacctgtgtctaaaatattttatttcatgktatactggaaagggaatgaaagcaacactggtaagatgtcacaggaattttgggatgtagaattatttagccagggatgcagcttttgggaggttaaagccctggggcaacttccctggataaactatgtaaggttgattctgaggcaatgtaagaaatcaggatatagttcccttaatctcaaggaatgcggtaaagtggtgtctctgtcttgtggattctgcttatcctttttaaaatcaatgtttgcatctcaatcactacaagctcttccttctctacacatccacatccctatcatggataca

SEQ ID NO: 367107 - DNA, 556 bp, Homo sapiens
gggtgattttaaatacgttgaatgattaggaaatatgtagttaaacttaacatacaaacaaaatcacatccagagaacattaayggtaatataaagtcttgaatttaggttaaacatgaagttgtataatagaagttggagaaacacagttaaagaaatgtttgcatttaagaatttgggtaaatttactgccatcaaagctcaatgaaagttggtctagatgaggaaaacaatttctatagccagggtattcactgataatcttgctgtattttatttctgctcaactttctgatgcttggaccccaactgaaggaatatattcaattttggaacccaagaattaaaagaggtattcacaaattataacacgtaaataacaatgtggtcagaatgatgactatgtagtcagtattcaaattcatcttatttgaagaccagtggaaaggactggagttggtaagtccaactggaagggcccaggggaaactagaatagtttgtttaaaatgtctggtatgcttcacgaaaaaagataaattagacgtgatcagaag

SEQ ID NO: 367108 - DNA, 582 bp, Homo sapiens
tagaaaatattttcttaataatgacattccatcagtagtaacacactattcataggaattttcaaaattctcaagtactaggttaattttctttttacttgctatgtttctgagcttctaaaagacctcattgtcaaaagtggaatcagcaagatggtcgagtrgtagctcccagcactcttccctgccacacacaaaaaaacaaaacaaataaacaaccgtatttaaactaaattaactaataaaaagtaccagggaacagcaaagaagaagcagaaattctgtagagcacagaaacccagcacagcctcatatagaaggaaaaatttaaaaaacaaacacctagcctctgccatcctattccccgtagttgggatcagcttgaaaccaggagggacttctccctaaagggaaaagggagacaagaagaacccagaagcctccattatcgctgtggaccccttcagtcgctgctactggagtcccctactgtcctcaaaggttcttagcccagctgagggagctctccaaagccaaaacactgagccatccccagagaagaggtcaatgctgtgccccacc

SEQ ID NO: 367109 - DNA, 539 bp, Homo sapiens
atgtatccatagttcattcctttatgtggctgagtagtattccattgcttgggtttgccagagtttgcttaaccattcaccctttgaaagacattcagattgtttacaggtttttgtcattacaaataaagctattatcagaattcatgtacagattaaaaaattwaacaaacaaaaacaagaatgaaatatgcccagagcacactccataacaaatgcttactcaactgaggaaagtacttttccagtcttattcctcccagaagaatgtgtttttgcctcaccagacccctgtgaaattcctgtgtcatcttcagggatggagaggctaaaaaacactgatgaaggtcgcagtctatatggcacaagctcactaaaacattgacataaaattttaagattatagaattttaaaattctataatcccccaaaccttaccatcataacaacagcactccagtgtaataacagtagattacagctaaaataattgcaagacacagcttatctttgggcatgagtacttagggaagccaaa

SEQ ID NO: 367110 - DNA, 569 bp, Homo sapiens
aataaatactacttgaaattattaaaataataaaaataaagtagtttatgaaatcacaatggaattaaaatagaaataaatatcagaaaaaaatagctagaaaatccccagatacttggaaatcaaacaacacactttaaataacacacagatttttcttaaagaaaagccctaaaatatatttttaaaatgtttttaactatacagacatgaaacacaagttttcagaatttgtgggatgcagcaaaagcagtgcttaaaaggaaatttatagcattgaagacatakttttaaaaagaaacaaaatcagtattatgttattttaggaaactagagaaaaaagagcaaggtaagcctaaagtaagcataataaaaatatatatataacagacatcagtgaaattgaagacataaaatcagtagagaaaattgagaaatcccaaagctgtttttatgtaagggtaagtcgataagcttctaaccaagttaaacaaaacaaaaagcatcaacatgtaagttattaatatcagaaatgagatcggggccattactagtgataccatgggcat

SEQ ID NO: 367111 - DNA, 606 bp, Homo sapiens
cagagggcataagagataatcatatcattcgatcagcaactataaaagtgtgtgtgtgtgtgtgtgtgtgtaygtatgtatatatttcatttgtatagcaactcataagggtaaagtgtatatacctaattgtaaagatacatgatatatttttgttattttataactgaggcctgctaagagcatttagagtgaagcaattactgacatggatttgtttgcaacataaaaaatgtttttttttaaaaaagggagaaattctcaaggctgtttgttggaaaaagtacatattcactcatgaatcaatggagttaaatgagttttagtaaaaaagactttgagaatatatggaatctcaatcacaatataaaaaataaatgttttcttcaaaaaatgaattaattttagttaagtgtcatacttatattcttacatactttaaggtcatataatttagaattcaaaatttcagacagttctattttgaaatggtgagagaagtcactaccttcaatgaaaactagaggaggacaaacttctctgagtgctgcgctttctcttccttcccccttaataaccagaatcagtttaataatatttaaactg

SEQ ID NO: 367112 - DNA, 469 bp, Homo sapiens
caaagctagctgtattagtctgttttcatgctgctgataaagacatacctgagactgggaagaaaaagagatttaatggactcacaatttcacatggcttgggaggcctcaaaatcatggaagaaggcaaggaggagtaattcacattttaaatggatagcagtaggcagaaagaaagcttctatagggaaactccttcttataagtggttaccaggtctcatgaaagttattcactatcacgagaacagcatggaaaagacctgcccccatgattcaattacctcccaccagatccctcccacaacacatgggaattcaagacaagatttgggtggggacacacccraatcatatcactagcagaagcaaagaaataacaaaagtcagagaagaactgaatgatattaagacccaaaaatccatacagaggatcaacaaaatcaaaagctggttctttgaaggaaaca

SEQ ID NO: 367113 - DNA, 469 bp, Homo sapiens
caaagctagctgtattagtctgttttcatgctgctgataaagacatacctgagactgggaagaaaaagagatttaatggactcacaatttcacatggcttgggaggcctcaaaatcatggaagaaggcaaggaggagtaattcacattttaaatggatagcagtaggcagaaagaaagcttctatagggaaactccttcttataagtggttaccaggtctcatgaaagttattcactatcacgagaacagcatggaaaagacctgcccccatgattcaattacctcccaccagatccctcccacaacacatgggaattcaagacaagatttgggtggggacacacccaaaycatatcactagcagaagcaaagaaataacaaaagtcagagaagaactgaatgatattaagacccaaaaatccatacagaggatcaacaaaatcaaaagctggttctttgaaggaaaca

SEQ ID NO: 367114 - DNA, 606 bp, Homo sapiens
cagagggcataagagataatcatatcattcgatcagcaactataaaagtgtgtgtgtgtgtgtgtgtgtgtacgtatgtatatatttcatttgtatagcaactcataagggtaaagtgtatatacctaattgtaaagatacatgatatatttttgttattttataactgaggcctgytaagagcatttagagtgaagcaattactgacatggatttgtttgcaacataaaaaatgtttttttttaaaaaagggagaaattctcaaggctgtttgttggaaaaagtacatattcactcatgaatcaatggagttaaatgagttttagtaaaaaagactttgagaatatatggaatctcaatcacaatataaaaaataaatgttttcttcaaaaaatgaattaattttagttaagtgtcatacttatattcttacatactttaaggtcatataatttagaattcaaaatttcagacagttctattttgaaatggtgagagaagtcactaccttcaatgaaaactagaggaggacaaacttctctgagtgctgcgctttctcttccttcccccttaataaccagaatcagtttaataatatttaaactg

SEQ ID NO: 367115 - DNA, 623 bp, Homo sapiens
ctgtcacctccttgctatgtactcatatggcatagagagatgaagtgagcaatgtgtttgctttctcttcttctaagagaagtaatcccatgtgaaaatatttccaatcccatgttttcatttacaccagattacctcccaaagtggcccatcactaaatacatcacactgggagccttcggtttaacatgtgaattttgaaggaatgcagtccagtacatagtagtagttaagcttcattttcaaggattaatacaatttagaactttgactgatagaagagaccttcwtgtaaaagattcaggtgtatagatagaaacaaatctgataaatcaatttatattccagaaataatatgccacataaaggcctcgttttcttattattgataccagtattaatatcaacaacacctagtattaacaatagtaacaatcataacgatctacatttatcaggtgcctactaattacttgtgaacaagagagctttaacaattctcttggctaagaaaaatgttaaagatttagacaggcttctgccctgacctctctttcacttctgtttttatagctggtctaaccaatgaggtccctttgcttagagcatttactatagaaaac

SEQ ID NO: 367116 - DNA, 476 bp, Homo sapiens
tttagtcagcaagggatgaatcctgcctggaatggttttttccttcaagacagtgggttctattttggcccaaggtgtgtctagaaatgccatccatgagctaaggcctataatgcagacttaacaactctgcctagtgtcctatactactgtggctgtgctggtatccaagatgtaagatgaagtcctctttagtctttagtttcttctcctcaagcagaaggaagcagtcacttttgttgctgtcagctgtgcagcctgagtttggaaaaggggtgtggyacaagcactcccttagctgccctttctggtctctctctaggtcatgtgccagcctaatccattgtctcaaagccaagcccaccattaggagtttcttaggcatttcagtccttatatcttagactgcctttcaagcttacctaggatcctagatcacattggctcatgttggcaaggcctgccaaggaattcaa

SEQ ID NO: 367117 - DNA, 443 bp, Homo sapiens
cactggggaaactgctcccatgatccaatcacctacaaccagatccttcccccaacacctggggataacaattcaagatgagatttgggcagggacaaagtcaaaccatatcattctgcccctggtcccactcaaatctcacttcctcacatttcaaaaccaatcgtgccttttgaacagtctcccaaaatcttcactcattccagcattatctcaaaagttcaagttcaaagtgtcatctgagacaaactttcttctgcctatgagcctgtaaaatcaaaaacaagttagttacatccaagataggcaaggggtacagacattgggtaamtgcttttactccactgagagaaactggcaaaaacaaagaggcaacagaccccatgcatgttcgaagaccagcgaggctgttgttaaatcttaaagccctggccggacatggt

SEQ ID NO: 367118 - DNA, 493 bp, Homo sapiens
ttttctccattgtcttggtgattaacattcagcttcttcttacttatgcaaatttctgcagcctgcttgaattccttctcagaaaaatgggttctgcttttcaaccacatggttargctgcaaatttttcaaaactttatgctctgcttcccttttaaatataaatttctacttaaaactgtctctttctcagtgcatataactgaacacttttaagagcacccaggtcacattttgaatgttttgctgcttagaaatttttttttgccagaaatcctaaattgtctctctcaaattcaaagttgcacagatctttagggcaggggtaaaatgttgccagtctttttactaaagtgtaggaagaatgacttttgctccagttcccaataagttcttcatctccatctcaaaccacctcagtctggacttcattatctatgtcactatcagcattttggtcaaaacaattcaacaagtcactaggaagttccaa

SEQ ID NO: 367119 - DNA, 585 bp, Homo sapiens
catgaacttgactacataaatttaccaacatattaaggaaaataaatctatccatattatatattcctctaagtgtcttgaggcagacatctattttattattatgtgtcatagttgtattttgaattctttttctctgtccacaacagtattcaataagtattaagataatcaagttgagatataatttgataccttaattatttgcaatttgattctttccccctaactcagcattctggggattggtgcatgcatttataaagtgtatggtgctatctgtacatrgatttttgtgacaatgtttatattgtttcttccttgaggaattatgtttatcttattccatagaatttcctaaaagtagcatacacatacatatacacatagaaaaaggaagagttggggtgagagagaaaggcatagagatctgtttgaaaaaggaaggcatatgacatttaaaaatctggctacattagaatgtatgtgacagtgaagcaagttttcttttaagaaacctatcactttgtcttctcttaaaatatcaatttggcagttccaacatattttaaattagaattcact

SEQ ID NO: 367120 - DNA, 516 bp, Homo sapiens
gaaaccacccagattttgctactttcttacagccacagtagaaaactaatatatgttccttacttmagaagataagtttaaaatatcaagagagtcttctggctgtatcttttttaaccgtcatctcttaattttggactttttataaactttggacaaaaacatatttagtagtgtaagataagactatataagtttaggaaagggagaaaatttaaacatctttagaatgatgtttcctcaactgattaaagtttaacttattcacattatctcaattcctgaggttatcttgcagaaaaagagacactgaaaatgactaactttattgcaatagaacattttttaggacagctgctttctagagaggatttttttcacagataaaactccaaacaatcctacaatagagacatattcttctaattaaatgtattttttctgtcaatctcacttatactaaaattattatagagaaatattaaaatatattatagccacttattaatttaaatt

SEQ ID NO: 367121 - DNA, 516 bp, Homo sapiens
gaaaccacccagattttgctactttcttacagccacagtagaaaactaatatatgttccttacttcrgaagataagtttaaaatatcaagagagtcttctggctgtatcttttttaaccgtcatctcttaattttggactttttataaactttggacaaaaacatatttagtagtgtaagataagactatataagtttaggaaagggagaaaatttaaacatctttagaatgatgtttcctcaactgattaaagtttaacttattcacattatctcaattcctgaggttatcttgcagaaaaagagacactgaaaatgactaactttattgcaatagaacattttttaggacagctgctttctagagaggatttttttcacagataaaactccaaacaatcctacaatagagacatattcttctaattaaatgtattttttctgtcaatctcacttatactaaaattattatagagaaatattaaaatatattatagccacttattaatttaaatt

SEQ ID NO: 367122 - DNA, 618 bp, Homo sapiens
ggggcttgtacaacaggaggacaacaaaattttgaatcttggaaattgtctaagacagttggcaaagcagtcagtccatcttccctgccttagagaggaagggagggagattaaactttgctctggaatatagatgaaacctatctgaggggaggggaaggtttctattttggccacctctaaaatttaaasaaattgcttaggggaagatgtttctatgtcttcaagggtggcaattcaattatactttaactcaggttgtcattttttcatttaagagaaaactgactaagcagacatgaggatattttcatgagcattatttcctaacaggtctactcctcaattctgtgtggtctaaattccggcatattttccatcagtgtaccactgaattggccattctgatgaatatgaaagaatgacagggctagaaacacatctattcagtttgtcttatatggcacttaacacgattatcagtaggactcagggaagcagggtgaaaccaacctgcagtatttatttcagctccaaaattcagccagctgaataaatcttgtaaaccatcaatgaatcttaggaaaccaggtagctttctctttaaatttctgtata

SEQ ID NO: 367123 - DNA, 531 bp, Homo sapiens
tacatgatgatgatcttttcaaaactaagtaagttaagtacattatttaaaagattttagtcctgttttacctgttatttcactactaaaggatttttctactctgagttcactttatcattcttttttcagaattttatctgtgcttattttaaataaacatgaaaatcactaccatttaagataaaygtccttttatctttcaattatttttccagagcagtgctttaagtattcatataattatgagagtttctaaaattttacatattttataacagttcattctgtgtgagttttcttttaatttttataagaaatatcttgagagcagtgatacataatatattatgcaaaacctgaaaaaaatagtgatttccagcatcaaatgtcatttattcttctgagagcctagtggcctttaagttaatttcctattttatggatttttataaattacttagtatgtgggttatgtgtacagaaaacacaccacgtaactttaaattgttctcaaatcattttgtaagt

SEQ ID NO: 367124 - DNA, 531 bp, Homo sapiens
tacatgatgatgatcttttcaaaactaagtaagttaagtacattatttaaaagattttagtcctgttttacctgttatttcactactaaaggatttttctactctgagttcactttatcattcttttttcagaattttatctgtgcttattttaaataaacatgaaaatcactaccatttaagataaacgtccttttatctttcaattatttttccagagcagtgctttaagtattcatataattatgagagtttctaaaattttacatattttataacagttcattctgtgtgagttttcttttaatttttataagaaatatcttgagagcagtgatacataatatattatgcaaaacctgaaaaaaatagtgatttccagcatcaaakgtcatttattcttctgagagcctagtggcctttaagttaatttcctattttatggatttttataaattacttagtatgtgggttatgtgtacagaaaacacaccacgtaactttaaattgttctcaaatcattttgtaagt

SEQ ID NO: 367125 - DNA, 603 bp, Homo sapiens
tttataaattacttagtatgtgggttmtgtgtacagaaaacacaccacgtaactttaaattgttctcaaatcattttgtaagtcatcagataagtatctacttaagtaatctatatatttgtaataaatatttgtgtagaaataatagaatgagcaagtcctttttcataactttgaataaaacactatttctccagttaacctggagggcaaataaaccttttaaaaatataacagaaaagttcaataagaacacaaagtgtgtattaagtaaatgttacaaaggataaatggaagtgaagtacctggattatccttactgagaattcaacacctataagtgaattataagtgcaatcacaactatcacaaactttgctcgatctcattttggaattgtaacagcctcaagggcataataactttcaaaagacagtcactgagtgccaactatatgccagcccatatgctaggtatggactactatgtttttttcttactaattagaatcacttaactgcttgaaaatgtgcattggtggtaaacctattatcagcccttactctatctttaaaaatttaagttaaatttttgatttaatgt

SEQ ID NO: 367126 - DNA, 568 bp, Homo sapiens
catttctcaccagcagtatttctactgtgaaatggctcattactggatctctggaactttagtttctcccattgaccttactatcatgaggaaaggattagttctctgctagtgctaatactttcatcactattccttgctttgtttcttagttattttcaccctgatgttacctgctccacataataaaatcagattgtttgttaagtcctagactagtttctgccttgctggctatatcctcaatgaagagyaaatatttacctcatgggagaaatagacctaatggatttaggagtttagcagtttacagggcacaaattaaatctcaataaatatttactctgagtaaaaaagtacaaaatagaagtacaattcttttttattgtcattgatttcagagcaaaatgaatcaacagttgacaaattaaggattaacttaggcaagattattcaacaaatatttattattcatttgctctatgccagaaatgtgtcttcatgccaggttaagaaaaagagaaaacagaaaaaaaaatagctgtccctgactaaaagagcttatgtt

SEQ ID NO: 367127 - DNA, 551 bp, Homo sapiens
ccctggtcccatttctcaccagcagtatttctactgtgaaatggctcattactggatctctggaactttagtttctcccattgaccttactatcatgaggaaaggattagttctctgctagtgctaatactttcatcactattccttgctttgtttcttagttattttcaccctgatgttacctgctccacataataaaatcagattgtttgttaagtcctagactagtttctgccttgctggctatatcctcaatgaagagtaaatatttacctcatgggagaaatagacctaatggatttaggagtttagcagtttacagggcacaaattaaatctcaataaatatttactctgagtaaaaaagtacaaaatagaagtacaattcttttttattgtcattgatttcagagcaaaatgaatcaacagttgacaaattaaggattaacttakgcaagattattcaacaaatatttattattcatttgctctatgccagaaatgtgtcttcatgccaggttaagaaaaagagaaaacagaaaaaaaaatagc

SEQ ID NO: 367128 - DNA, 434 bp, Homo sapiens
aagtttatgctaaatttaattgaaatgaaataacaaagcagtttgaaacgaacattccattgattatttttaaaattttatttattaacaaartagcttatactaactgcccactctctatcccaatagtcacagcaataacatatagttaacatttgtaattaaatatttcatttcatacaaatagtattttaaaattcaagtgttgatttttaagcctttgaatgtttggctgtttaaaatttaagtgcatataaaaaattgtagaaaagggtcattattaataaaatattcaaaatatggtaaattatgcatgatgatttaatatatgcaaattgacaagtgatgtgaatagtacatttgaatagagaaaatatgtacataaatgaatggtatttcagaatctaagcaaattgatgactccattatgtact

SEQ ID NO: 367129 - DNA, 434 bp, Homo sapiens
aagtttatgctaaatttaattgaaatgaaataacaaagcagtttgaaacgaacattccattgattatttttaaaattttatttattaacaaaatagcttatactaactgcccactstctatcccaatagtcacagcaataacatatagttaacatttgtaattaaatatttcatttcatacaaatagtattttaaaattcaagtgttgatttttaagcctttgaatgtttggctgtttaaaatttaagtgcatataaaaaattgtagaaaagggtcattattaataaaatattcaaaatatggtaaattatgcatgatgatttaatatatgcaaattgacaagtgatgtgaatagtacatttgaatagagaaaatatgtacataaatgaatggtatttcagaatctaagcaaattgatgactccattatgtact

SEQ ID NO: 367130 - DNA, 434 bp, Homo sapiens
aagtttatgctaaatttaattgaaatgaaataacaaagcagtttgaaacgaacattccattgattatttttaaaattttatttattaacaaaatagcttatactaactgcccactctctatcccaatagtyacagcaataacatatagttaacatttgtaattaaatatttcatttcatacaaatagtattttaaaattcaagtgttgatttttaagcctttgaatgtttggctgtttaaaatttaagtgcatataaaaaattgtagaaaagggtcattattaataaaatattcaaaatatggtaaattatgcatgatgatttaatatatgcaaattgacaagtgatgtgaatagtacatttgaatagagaaaatatgtacataaatgaatggtatttcagaatctaagcaaattgatgactccattatgtact

SEQ ID NO: 367131 - DNA, 434 bp, Homo sapiens
aagtttatgctaaatttaattgaaatgaaataacaaagcagtttgaaacgaacattccattgattatttttaaaattttatttattaacaaaatagcttatactaactgcccactctctatcccaatagtcacagcaataacatatagttaacatttgtaattaaatatttcatttcatacaaatagtattttaaaattcaagtgttgatttttaagcctttgaatgtttggctgtttaaaatttaagtgcatataaaaaattgtagaaaagggtcattattaataaaatattcaaaatatggtaaattwtgcatgatgatttaatatatgcaaattgacaagtgatgtgaatagtacatttgaatagagaaaatatgtacataaatgaatggtatttcagaatctaagcaaattgatgactccattatgtact

SEQ ID NO: 367132 - DNA, 433 bp, Homo sapiens
tcttttagttctttagttagctttttttaaaaaataaaacactttacaaatattctctctcaaatatatgtacraactaaatgtggtttgctttcagctacagttgacccttgaacacatgtgtggactacgcaggtccacttatatgcatattttttttcaaccaaactcaataagaaatgcggtgttttctgtagggttgccttttcctataaacaggttccacagggccaactgggaaacttgagtatatgtggattttggtacatgaaggtgcccctggaattgatccccacctatatggagagataactatatgttgtgtttgctagattcaccagccagagataatatactattatggaatgctttagatttatacaattaactaatatatttggcacatttttatttatggttcacatcaagttac

SEQ ID NO: 367133 - DNA, 433 bp, Homo sapiens
tcttttagttctttagttagctttttttaaaaaataaaacactttacaaatattctctctcaaatatatgtacgaactaaatgtggtttgctttcagctacagttgacccttgaacacatgtgtggactacgcaggtccacttatatgcatattttttttcaaccaaactcaataagaaatgyggtgttttctgtagggttgccttttcctataaacaggttccacagggccaactgggaaacttgagtatatgtggattttggtacatgaaggtgcccctggaattgatccccacctatatggagagataactatatgttgtgtttgctagattcaccagccagagataatatactattatggaatgctttagatttatacaattaactaatatatttggcacatttttatttatggttcacatcaagttac

SEQ ID NO: 367134 - DNA, 480 bp, Homo sapiens
aaactcaggcaactactgccatcaatgagacttagctagtgagtgccaataccttcatcctcataaataatactagcacagggggtctgtgtgtgccagagggctacatctttatctgtgggcaatctggggtgactcaaatgcggggtgggcaaagtcatgcctggaaaacttacagrtcctgccccattgagtgtgctagggatgctcctagaattcacccccaaaatgaagtgctccattgactcaggagcctaatgctgtataccagacttaccaaagacctgactggatgtgtaactgactttgggtttatgtcttttatgagatctttggtaccattcataggagttattgctcataaaaaaatgaaaagaaacctgtcccaaaccatggcaaatattgcctcctccattgccactgtcttagaagccaaggaaacatctcccagatccacccagaaagttattttaaacaaca

SEQ ID NO: 367135 - DNA, 480 bp, Homo sapiens
aaactcaggcaactactgccatcaatgagacttagctagtgagtgccaataccttcatcctcataaataatactagcacagggggtctgtgtgtgccagagggctacatctttatctgtgggcaatctggggtgactcaaatgcggggtgggcaaagtcatgcctggaaaacttacagatcctgccccattgagtgtgctagggatgctcctagaattcacccccaaaatgaagtgctccattgactcaggagcctaatgctgtataccagacttaccaaagacctgactggatgtgtaactgactttgggtttatgtcttttatgagatctttggtaccattcataggagttattgctcataaaaaaatgaaaagaaacctgycccaaaccatggcaaatattgcctcctccattgccactgtcttagaagccaaggaaacatctcccagatccacccagaaagttattttaaacaaca

SEQ ID NO: 367136 - DNA, 196 bp, Homo sapiens
actaaatgtccttaacttgacccagagctaattgtaatatcattagcattgcagttttggtgctcccatgaattttgcttaggcacttatgmctaataaccaagatggagtcactactgccaaccccaggtatgcacagacagaacactcccagcagggaattttaccccttccattaaggcaggacccacaaagg

SEQ ID NO: 367137 - DNA, 196 bp, Homo sapiens
actaaatgtccttaacttgacccagagctaattgtaatatcattagcattgcagttttggtgctcccatgaattttgcttaggcacttatgcctaataaycaagatggagtcactactgccaaccccaggtatgcacagacagaacactcccagcagggaattttaccccttccattaaggcaggacccacaaagg

SEQ ID NO: 367138 - DNA, 196 bp, Homo sapiens
actaaatgtccttaacttgacccagagctaattgtaatatcattagcattgcagttttggtgctcccatgaattttgcttaggcacttatgcctaataaccaagatggagtcactactgccaamcccaggtatgcacagacagaacactcccagcagggaattttaccccttccattaaggcaggacccacaaagg

SEQ ID NO: 367139 - DNA, 515 bp, Homo sapiens
tctgaccatagtggaattaaaataaaagtcagtaacagaaagacagcaggaaaatgtttaaatgcatttcaattatacaacacagttccaaatgatctatggattaaacataaagtcttaaataaaaatctaaaaatatatttaaacaaatgaaagaaaaatacaacatatcaaaatataggaartacagctaaggctgtggtgggaaagaaatttatagtactaaatgcttcattaaaaatgagaaaagatctcaaatcaataacttaacacttgtatctcaagaaactagaaaaagaacagagtaaactgaaagcagacagaagaagaaaaataatcatgacagtaacaaaaattcatgaaattgaaaacagaaaaaaatgaagcaaaaagctggtttattgaaaaaaatcaatcaattgataaacatctatcaaaactgacaaaaataaatagagatgacacaaaactcaacagcaactttttaaaaaaaacgcaaatgatccaattaggta

SEQ ID NO: 367140 - DNA, 515 bp, Homo sapiens
tctgaccatagtggaattaaaataaaagtcagtaacagaaagacagcaggaaaatgtttaaatgcatttcaattatacaacacagttccaaatgatctatggattaaacataaagtcttaaataaaaatctaaaaatatatttaaacaaatgaaagaaaaatacaacatatcaaaatataggaaatacagctaaggctgtggtgggaaagaaatttatagtactaaatgcttcattaaaaatgagaaaagatctcaaatcaataacttaacacttgtatctcaagaaactagaaaaagaacagagtaaactgaaagcagrcagaagaagaaaaataatcatgacagtaacaaaaattcatgaaattgaaaacagaaaaaaatgaagcaaaaagctggtttattgaaaaaaatcaatcaattgataaacatctatcaaaactgacaaaaataaatagagatgacacaaaactcaacagcaactttttaaaaaaaacgcaaatgatccaattaggta

SEQ ID NO: 367141 - DNA, 616 bp, Homo sapiens
attcactgcaaactgggcccccaaggctcaggaagctatctggggtggatgatgtctcatctgtgtgtgccccacttacaccacagctaaagaatcctgaaaagtaggcatccgtgaatttgataccacaaggctatggacatccctgagctaaagtgttcaatggcatcctgtttctacatagggactataacagagcttgagctatttcatccaactctttcttatcttaagatgttgcattcccagcacattctagttatttttgagaactgtaagtgagaaaagtgagaaaactgggttgcccaaggccactcagagaactgccctgcaaggggtaagaagagaacagtaactttaaatcaaaataataataatcccaaagtgattgaaagaaacaacagtaataatactacaactattaatagtagtaacaatgaaactctggttaarttatatgtcagatacaggtttaagtgatttaatttttcaaaaaaaaaacttttttcctatgctatccttaaattaacttatttactccacagagaagcccaggatgtatgctattgtattttctttaatttctaaatgagaaaactgtagagaagagaggtta

SEQ ID NO: 367142 - DNA, 603 bp, Homo sapiens
tgtcctcaactttaaaatatatatctacatataatttacattatattactgaccacatggctaaatatgatcgtttggcagaaatcaattcatattaattatgaaagacctacttttggcaaaaatattcctcaagtttgatatcaattctgacgctattattgacattgatgttaaatgtaaacctctgtttttgtctaaaatttgatgctacaaaatatttctgttgtccatattcttccagggaaagaatatctcatgaattagcatttttttttacttatatatcacaatatcacatactcagaaagctgttttgataaaatacaactttatcagtcattacccaatactgcaattatatgtcacaaatgaatctgtataaccaaatgtaacatatgcaaattttttttgctrattataattattaatgaatcaaccaaatgagaaaaaaactctcaattcgatattaacttaaactttccaatttaccaaaagtgttggtaatatttgttttaaatatttaaacgtttgaatcatatgttaaatgaataaatattaatggtatctttgacaagtggacacttcaacgttttggagagg

SEQ ID NO: 367143 - DNA, 485 bp, Homo sapiens
ctccactgaaagagctgactatcaagaaaaccagcacactctgagcagatcttcaaaaggaaagcattgagagtggaaggagagaggatggagacactgggctaaaggatcagaaagctgggaacccagcatggggttgtggagcaccaggactcattcctggccctgaraggtgagggaaggggtgagttaaatatgatggagtggcttactctttccaaagagctccagaatcctagctttaggagacttcacaatccccatggacattcgagctagcaaggagagttgcttggagaagtagcaaagacaggattccagtatgtgtagagcccagatagtttgacataagaatggttccagtgaagcacagccagggacacccatttcctaaggcttaccgcatgcctctgagtgactttggtcattattgattgtcagacctgcacagagaagggctgtcttgcccgtgggacatgccagtg

SEQ ID NO: 367144 - DNA, 485 bp, Homo sapiens
ctccactgaaagagctgactatcaagaaaaccagcacactctgagcagatcttcaaaaggaaagcattgagagtggaaggagagaggatggagacactgggctaaaggatcagaaagctgggaacccagcatggggttgtggagcaccaggactcattcctggccctgagaggtgagggarggggtgagttaaatatgatggagtggcttactctttccaaagagctccagaatcctagctttaggagacttcacaatccccatggacattcgagctagcaaggagagttgcttggagaagtagcaaagacaggattccagtatgtgtagagcccagatagtttgacataagaatggttccagtgaagcacagccagggacacccatttcctaaggcttaccgcatgcctctgagtgactttggtcattattgattgtcagacctgcacagagaagggctgtcttgcccgtgggacatgccagtg

SEQ ID NO: 367145 - DNA, 485 bp, Homo sapiens
ctccactgaaagagctgactatcaagaaaaccagcacactctgagcagatcttcaaaaggaaagcattgagagtggaaggagagaggatggagacactgggctaaaggatcagaaagctgggaacccagcatggggttgtggagcaccaggactcattcctggccctgagaggtgagggaaggggtgagttaaatatgatggagtggcttactctttccaaagagctccagaatcctagctttaggagacttcacaatccccatggacattcgagctagcaaggagagttgcttggagaagtagcaaagacaggattccagtatgtgtagagcccagatagtttgacataagaatggttccagtgaagcacagccagggacacccatttcctaaggcttaccrcatgcctctgagtgactttggtcattattgattgtcagacctgcacagagaagggctgtcttgcccgtgggacatgccagtg

SEQ ID NO: 367146 - DNA, 485 bp, Homo sapiens
ctccactgaaagagctgactatcaagaaaaccagcacactctgagcagatcttcaaaaggaaagcattgagagtggaaggagagaggatggagacactgggctaaaggatcagaaagctgggaacccagcatggggttgtggagcaccaggactcattcctggccctgagaggtgagggaaggggtgagttaaatatgatggagtggcttactctttccaaagagctccagaatcctagctttaggagacttcacaatccccatggacattcgagctagcaaggagagttgcttggagaagtagcaaagacaggattccagtatgtgtagagcccagatagtttgacataagaatggttccagtgaagcacagccagggacacccatttcctaaggcttaccgcaygcctctgagtgactttggtcattattgattgtcagacctgcacagagaagggctgtcttgcccgtgggacatgccagtg

SEQ ID NO: 367147 - DNA, 460 bp, Homo sapiens
ggcatgcactgtgcacagtctttactcactgttttgtcagtgtgcacatatgcagaggcctcactgcaactgcatgggccccactggtgtgtgtgtgtaaaccctgacaacctgccactgccagggtgagtatgagtataacatgccacactgcacccctgctgcagctggtgcacatgtgcgtaarcatggacccctcagcaaatgctccaattaagcacttttgttggcatcccccattggactattgttgccagtggactgagaatgctgtggccctgtcagtgcagcaggtacttcatcttgagggggcatataacaaagctgtgggccaggtcccaatccccccagtgttagagcacacatcccaggagagctgagctgagccttggccacctgaaatcatccagaaatgaagccagtcaattaaatgcaacttatagcatagtaaaccctcaac

SEQ ID NO: 367148 - DNA, 575 bp, Homo sapiens
aagctgaggaaaaaatcttagagctgggagatgggttcattgaatcaactcagttagacaaatataaaggggtgggtcactgtattagtctgttctcatgctgctataaagaactgactgagactgggtaatttagaatcaaaatagttttaattgactcacagttctgcatggctggggaggctccaggaaacatacacttatggtggaaggggcagcaaacatgtccttcttgatatggctgcaggagagagaagtgcaaagcaaagtgggggaaagcccctataaaaccttcagctgtcataagaactcactcattatcatgagaacagtatgatccccatgtctaatcacctcccacgatgtccttcccccagcatgtggggattacaatttgcattacaattcaagatgagattttgggtagggacacaaagccaaactatattattcttcccatggcccctcgcaaatctcacgtcctcacatttcaaarcacaattatgcccttccaagaatcccccacagtcttaactcatttcagcattaacctgaaagttcaagttcaaaatctc

SEQ ID NO: 367149 - DNA, 670 bp, Homo sapiens
ttgggggtttgcagtactattaaaatgctcattctgcccaacccaagttacagattcaatgctattcctatcatactaccaacaacgtttttcactgaactagaaaaaaaattctagaattaatttggaaccaaaaaagtgcctgaatagccaaagtaattctaagcaaaaagaacaaagctggggacatcacactccctggcttcaaaccatactacaaggctacagtaactgaaacagacacatagtgtaatggaacagttttgagagcacagaaataaagccatgcatgaacaatcatctgatttttaacaaagctgacaaagacaaacaatggggaaaggacatcttattcaacaaatagtgccaggataacctgctgaccatacacagaagatttaaactggacccctacctttcaccatacacaaaaatcaacccaggatgggttaaagacataaatgtaaaacctcaaactmtaaaatctctagaagaaaaccttggaaataccattctggaaatattatgcaagaaataaaacctacttgattgtggtggattagctttttgatgtaccgctagatttggtttgctagtattttgttgaatatttctgtatctatgttcattagaaatattggtctgaagttttttgtttcattgcatctct

SEQ ID NO: 367150 - DNA, 670 bp, Homo sapiens
ttgggggtttgcagtactattaaaatgctcattctgcccaacccaagttacagattcaatgctattcctatcatactaccaacaacgtttttcactgaactagaaaaaaaattctagaattaatttggaaccaaaaaagtgcctgaatagccaaagtaattctaagcaaaaagaacaaagctggggacatcacactccctggcttcaaaccatactacaaggctacagtaactgaaacagacacatagtgtaatggaacagttttgagagcacagaaataaagccatgcatgaacaatcatctgatttttaacaaagctgacaaagacaaacaatggggaaaggacatcttattcaacaaatagtgccaggataacctgctgaccatacacagaagatttaaactggacccctacctttcaccatacacaaaaatcaacccaggatgggttaaagacataaatgtaaaacctcaaactctaaaatctctagaagaaaaccttggaaataccattctggaaatattatgcaagaaataaaacctacttgattgtggtggattagctttttgatgtacygctagatttggtttgctagtattttgttgaatatttctgtatctatgttcattagaaatattggtctgaagttttttgtttcattgcatctct

SEQ ID NO: 367151 - DNA, 566 bp, Homo sapiens
ttgtttggtacttctttctccatccctttactttgaacctatgggtgttctcacatgtgagatgggtctcttgaagacagcatacagttgggtcttgattctttatccactttgccactccgtgccttttaagtgggtgtttagcttgtttatcttcaatactgacatatgcacattcgatyctcccagcatgttgttagctggttgttatgtaaacttgattgtgtaattactttatagtgttgatggtctatatacttgagtgtgtttttctggtgctaggtaacagtccttcattttcacgtttagcactttcttaaggatctcttgtggtctctaaaggcctggtggtaataaattcccctagcttttgcttatctgaaatggattttatttctcccttgtttatgaagcttagtttggtgggacataaaattcttggtacaaaattttattttttcaaaaatgctgaatatggattcttaatgtcttttgactgtggggtattgctgagagttcccctgtgagtttgatgtagtttccactttatgtgacctgccccttgt

SEQ ID NO: 367152 - DNA, 569 bp, Homo sapiens
atgtcacataatatatcagtattttatgcttcataaataaatttaaatatcttagttatatttccattagtaatgaattttcatgaaagtatcttgaaatctcttttcttgtgtattttatcctccatgcatccatatccaatcacgccaataagttatatcagttggatctgatcattcagatgtctttacttctgaaacagaaaaaaagctttaactcaaacttataaagttatttctctgtacatttccaaatgtcagtcatccctttagcaaaaacgaacacttgaagtattagcaactatgaaatttagttcaatagatgacgatcaggattgtcaagcagaacactttctaaaatgggagaaggaatttaaaaaaaaaaagagggtcactagaaaagggaaggttaaaaagaaaaaattgagatagaaattgttgcgtgtgcagtctktaaatccaatctactacagaatctattaatgccaatgttattcttcatatggggcagatggtgagtacaggctctaaacttatgcaaatcagtaaactcatgaaaatttctggat

SEQ ID NO: 367153 - DNA, 556 bp, Homo sapiens
atctgaagatataaaactcactggtaatagcacacaaaaaaacacagaatattctaacctgcaaatgtgatgtgtaaactactcttatattgagtagaaagacaaaatgatkaaccaatcaaaaataataactaaaataactcttcaagacatagacagtataatacaacaagaaaaacaacagaaagttaagaaaaggaagtgaagttaaggtgtacagtttttattagtttttttgcttgtttgtttatttgattgtttatgcagtgttgtcattaatttaaaataatgtgttataagagagtatttgcaaacctcatgataacatcaaattgaaaaacatataatgaatacacaaaaattaaacagcaaaaaattaaataatggagaaaatcaacttcactaaaaggaagacagaagagaaaggaaagaagaaagataacaccataaagcaatcataaaataagtaacaatgagtaagttcttacttatcaataataacattgaatgtaaatggactaatctctttaatcaaaagacatagagtgactgaatg

SEQ ID NO: 367154 - DNA, 500 bp, Homo sapiens
gttcttacttatcaataataacattgaatgtaaatggactaatctctttaatcaaaagacatagagtgactgaatggataaaaaagcaagacccagtgatctgttacctacaaaaaacacacttcacctataaagatgcatataaattgaaaatgaaaacatggaaatatatatcccatgccaatggaaaccaaaagagagcaagggtagctattcttacatcagacaaaatagatttcaagacaaaaactgtaaaaaaaaaaccaaaaatatcattatataatgataaagaggtcaattcagcaagataatataaaaattgtaaatatatgtgcacccaatactggagcacccacataaaacaaataytattagagctaaagagagagatagaccttgacacaacaatagctgaagtctttaacatcccactttcagttttagacagataatccagacagaaaatcaacaaagaaactttagacttaatctgtactgta

SEQ ID NO: 367155 - DNA, 608 bp, Homo sapiens
atttattcctgggatgaaagagtcgttcaacatggaaaagcaattaatgtggtacatgacattaacaaaatgaaggatatagccacatgatcaacttaacagacttagaaaaagcatttgacaaaattcaatatatgataaaaaaaaaaagactttcaacaatttaggtatagaaggaagttacctcaacataatgaagttcatgtataacatcatactcagtggtgaaaaactgaaagctttttcaccaaggcaaggatgctcacctggccacctctattaaacgcagtacttgaattcctagccagagcaatttcctagagaggattaacagtgtattaggccctgcagaataaatatgagcaaatatgaaaacctagtagttgaaaccacttgtggtgaatcatagaaaataaaaatagaaagagaacygaaaaagtaaactcaacctcagcaacatatgggaaatactaactaatctgcacagaggaagggaaagaaaggtaagaatagaaaaatatatatttgagggcaaaaatgcctgggtattttctaaatttgataaaaatggcatacctacagataaaaggcacttgatgggtgtattt

SEQ ID NO: 367156 - DNA, 521 bp, Homo sapiens
taaactacaaagttttcattttatgtacaaagttactggtcttcggtatcttcatagttataataaaactggttkaatgattaaaaaaagctgagactcatatatgtattgtaattaaggaagtgaaattccgatatccatgcttttctgaaaaagtatatcatagcaactatttatatttgattatttatttataaccatggtcccaaccatagtagctgcaaatgatgacttattctgctgacttcaagaatggtagagtttattacagtttgattaatattaaaaggagtgctatggctgtccttaggatatgatatgttttccaaaatttttacctttggaaatataacaaataatatatagtccacggcaacatctataatgaagctctataaattcatgttttcatttcttagagactataacaccccccaaatttaaacattttcaataatttatctataagaactactaactatagaaatcataaatataatattaaaatcacaaagaatgta

SEQ ID NO: 367157 - DNA, 604 bp, Homo sapiens
aactatagaaatcataaatataatattaaaatcacaaagaatgtagtatattacaggttttgttatagctttatttttgtcatgaatatattaattgggtgtttttatacagatgctgttatctcttggagcagcaaagaaacatattagkacatattttaaaggtaccttttcaatcattactgtcattagactgagatatatctatatctatatatctatatctatggttcttcatatatatgaagaacaattcatatattatatatataattctataaacagaaaagaaataaaacattgggctaatttgcaatatttttcctctcagtaaacaatcagaattattcatgatagcttcaatttaaaatatttttgaaaaactcttaagaagcagtagtgtgttctcattggattgcaaaatttcactcctttgaactagactagccatatctctccagaagttatattataagctttgtgatcttttgaaagatgtgtgatagaaaactgttgttctgttgagatgtagataaagtataaacaaataattgagttttggacagctgggtgtctgtagcaattgaagcaaaagaagtcacac

SEQ ID NO: 367158 - DNA, 381 bp, Homo sapiens
  misc_feature (1)...(381): n = A,T,C or G
ccaagttttcaccttttcaaataaacaaaatgcagttggttcagatctaatcaatgtgttataatgcttgaaattttagactaaactcatttaactgcattaagcaaaagagcacctcaatattgctcctgaagaacatttgattgctactgcaatagagctaaaaacattgcttttcagtaaataaattaatgggcatgctggatagatttatttgacactttcatcttaagcaatgaagaggatttctgaagmgcagaaattttgtgcaagagtcatttaatcagtcttaattacactaaatggttgacataactcagttacttttctttttactgatttttaatagctaagtaatatcaagtaaatnnnnnnnnnnnn

SEQ ID NO: 367159 - DNA, 577 bp, Homo sapiens
attttaatatgacttaactacaaactgataagttaaggaaaaaataattgcaaatacttggaacctttgaggaaaayaatttagtaaatgtaatctgtgttcaatagagaaagtatataaattattttcaagttcatatgagaaaattagcccccaaaatgcacatttggccaaaaataatttgttaaataaaggccatgtaattgatatcatataagtcctattctcagatcacaaaacaatgcaattaaaaccctacattaatcaccattagagcaccagagtaataattactgctgcaaaatccactgatgaatactcaaattagtgggcaaaacattaaggagaaacagaatatttgcataaacttaaagtatcttcctccaaatttataaaatacagcgatggatttaacatttgaatataaattatttcatacccctcccctcaggaggtggagtgcaatatccttctcattattatgaatgtgggctggacttagttactccattcgaacagagaatagaaagaaaatattaactttagagaaaaaatttaaacaccactttaattaagt

SEQ ID NO: 367160 - DNA, 584 bp, Homo sapiens
tacatctgttggctagtaatatatttttgtattgccctgccatttccaaaatgttttcttctaacttattcatgtgatacctatagtaattctgtaaagagggtttcattatccccatttagaatggttttctatttctgcataacaaattactgctaacatagttactccaataacgtgtttkctaacccacattctgttgggcaggaattcagaaatcattcagctgggtccttggcagagttgcaatccaggggttagaagaagatagattatcttcttcatgatgctcaattagagaaggttccaactctgttcattcaagttgttggaagaattcattttccttgaagttgtaggactgaaagtagcaatttcttgccagttgtcatcctgaggctgccctcatttcctagaggatactcatagttccttgacgtgaagtaccctcaaatatatgcttgcttcctcaaagtcagcaaggcagaaagataattcagaaggatcgttgctacaaacttacatgtaatcatgtacatcttgtcatagttgctattactttattggttatagtcaaatcaaat

SEQ ID NO: 367161 - DNA, 599 bp, Homo sapiens
tttcttaaaaattaatggagacattttgatcatatctgcaggtactatctaaatgcaccatattaaagttggaaatctaaaactttctacttcacatttgcaaacttttaagtccattcctgttatttctaaaatctgaaactcttcatttaatttgagaagttaaggtgaactctcacaaaataaactattttgagttccacgagatggaagatgtgggcagaaaaatatagtattagaaaattactttttagtgtgcagtaagaagtttcacagcagctgtgaatcaggcattttctaactcactgcatcataaagagctgaatwttctttttgccttaaccaggttctgggccacacctttcttctccacaccacatctatttacatacccaaagtgccatttctctgagatgggccaaatacattatttttgtccaaaatgtaatacactttacttattcatatatatttattaataaaacagattattatccttcagaattaaattgctacactaaatttatctgtatttttgttaagtagttcacaaacacaaagacaatgttgattatatttttatctgacagttttctaaa

SEQ ID NO: 367162 - DNA, 499 bp, Homo sapiens
ggacagcatctagtgagccaaaggcactcgggcacagaacccaacacaagattcctcgtgtgggaggtgaaatgttcatcatctggcctcctggtgttcagatcaatcatagcctgcctcatacccatctcccggatggcttgcaccaaatctgcataraactgccatttactcatggttgcgggtgtttcaccagcgttgttccacacaatccatatggctgcccatagccactcattcagggtgtggtcacctttcctttgtgtcaaccgcctgctcacctgcaattgctgatggagagaggggtgagttgtgatagaggccagcttttccatttcagaggcaggacaagagatatttatccgctccctcatcccacaaaagaagcatccaggtgggcagaagttcccctgtatgctggcagcactgcttgcctaattcctgcaactcagttggggcataggaagtatatgaagtatgttgtattacagtgtggggg

SEQ ID NO: 367163 - DNA, 499 bp, Homo sapiens
ggacagcatctagtgagccaaaggcactcgggcacagaacccaacacaagattcctcgtgtgggaggtgaaatgttcatcatctggcctcctggtgttcagatcaatcatagcctgcctcatacccatctcccggatggcttgcaccaaatctgcataaaactgccatttactcatggttgcgggtgtttcaccagcgttgttccacacaatccatatggctgcccatagccactcattcagggtgtggtcacctttcctttgtgtcaaccgcctgctcacctgcaattgctgatggagagaggggtgagttgtgatagaggccagcttttccatttcagaggcaggacaagagatatttatccgctccctcatcccacaaaagaagcatccaggtgggcagaagttcccctgtatgctggcagcactgcttgcctaattcctgcaactcagttggggcataggmagtatatgaagtatgttgtattacagtgtggggg

SEQ ID NO: 367164 - DNA, 522 bp, Homo sapiens
tgtcacacagttatatataaaaatgaagtttcctgtacatttctcatcttcaaatgataactacaaactccactctcaaacagaaatctgagcccttcaacaggaaatcattggtttctttggacttgagaccgagaatcttctggttatcctcccaagtccagcaccacccctatccaggcccctatgatgggttctcctcagtttcataatttctttctgagacaggatcttactctgttacccaggctggagtgcagtgttgctatcatagctcactgaagcttcaaactcctgagctcaagcaatccttccacctcaacctcccaagtataaaaactgggattacaaacccatgtcaccatactcagctactattttttttgtgtgtgtgggtgggagtctacaaggatcatttaaggccagaagtttgagaccagcctgggcaatagaacaagacctcatctccacaaacaataawaaattagccaggtgtggtggcacacacctgtagtcctacct

SEQ ID NO: 367165 - DNA, 602 bp, Homo sapiens
aacactgaaaagaacagaagatgatatccaagactgtgggacaactacaaaaggtgaaacagagtartgagaataccaggaggagaagaaatagaagaaagttctgcaactaccatgtctgagaacttccagtattaatgtcagacaccaaaccaaaaatccaggaagctccgagaacaccatgcagaataaatgccaacaacctacacttggacatataattttcaaactatatgaaataaaagataaaggaaaactctgaaagaaaccagaggtggggcagaaaacaccttacctacagagacacaaagataagaacggcattcaacattgcagaaattgtgaaagcaagaagacagtgaaatgaaaaattgaaaatattgacagaaaaaaccccaccaacctaagtttctgtacacactgaaaccacccttcaaaagtgaaggagaattaaggccttcctcagaaaaataaaaattcaagaaacttgttgccaggagacctgtcttgcaagaaatgttaaatgaaattctttagagggaaacaaaagatatttaactgaaacttggatcaacaattttttaaaaagatcattaaagaaa

SEQ ID NO: 367166 - DNA, 602 bp, Homo sapiens
aacactgaaaagaacagaagatgatatccaagactgtgggacaactacaaaaggtgaaacagagtagtgagaataccaggaggagaagaaatagaagaaagttctgcaactaccatgtctgagaacttccagtattaatgtcagacaccaaaccaaaratccaggaagctccgagaacaccatgcagaataaatgccaacaacctacacttggacatataattttcaaactatatgaaataaaagataaaggaaaactctgaaagaaaccagaggtggggcagaaaacaccttacctacagagacacaaagataagaacggcattcaacattgcagaaattgtgaaagcaagaagacagtgaaatgaaaaattgaaaatattgacagaaaaaaccccaccaacctaagtttctgtacacactgaaaccacccttcaaaagtgaaggagaattaaggccttcctcagaaaaataaaaattcaagaaacttgttgccaggagacctgtcttgcaagaaatgttaaatgaaattctttagagggaaacaaaagatatttaactgaaacttggatcaacaattttttaaaaagatcattaaagaaa

SEQ ID NO: 367167 - DNA, 602 bp, Homo sapiens
aacactgaaaagaacagaagatgatatccaagactgtgggacaactacaaaaggtgaaacagagtagtgagaataccaggaggagaagaaatagaagaaagttctgcaactaccatgtctgagaacttccagtattaatgtcagacaccaaaccaaaaatccaggaagctccgagaacaccatgcagaataaatgccaacaacctacacttggacatataattttcaaactatatgaaataaaagataaaggaaaactctgaaagaaaccagaggtggggcagaaaacaccttacctacagagacacaaagataagaacggcattcaacattgcagaaattgtgaaagcaagaagacagtgaaatgaaaaattgaaaayattgacagaaaaaaccccaccaacctaagtttctgtacacactgaaaccacccttcaaaagtgaaggagaattaaggccttcctcagaaaaataaaaattcaagaaacttgttgccaggagacctgtcttgcaagaaatgttaaatgaaattctttagagggaaacaaaagatatttaactgaaacttggatcaacaattttttaaaaagatcattaaagaaa

SEQ ID NO: 367168 - DNA, 508 bp, Homo sapiens
aatctgttgtcatctcaacaatgtttacactgtcttcaccacgagtagatttcatctcaagaaaccactttctttgctcatccgtggaagcaactcatccactcacgttttctcyggaggctgctgcagtctcgccacatcttcaggctctgtctctgtttctagtgctcttgttatttccaccatatctgcagttacttcctacagagaagtcgtgaacccctcagtgtcatctgtgagggttggaataatcttcccaacttctctctctcttttttttttctttttttgagatgaaatcttgcctggactggagtgcagtgatgcgatctcagctcactgcaacctccacctcccgggttcaagcaattctcctgcctcagcctcccaagtatttgggattacagtcacccccgaccaggcccagctaattttttgtgtgtttttagtacagagaggatttcactttgttggccagtctggtctcaaattcctgacctcgtgatcc

SEQ ID NO: 367169 - DNA, 508 bp, Homo sapiens
aatctgttgtcatctcaacaatgtttacactgtcttcaccacgagtagatttcatctcaagaaaccactttctttgctcatccgtggaagcaactcatccactcacgttttctccggaggctgctgcagtctcgccacatcttcaggctctgtctctgtttctagtgctcttgttatttccaccatatctgcagttacttcctacagagaagtcgtgaacccctcagtgtcatctgtgagggttggaataatcttcccaacttctctctctcttttttttttctttttttgagatgaaatcttgcctggrctggagtgcagtgatgcgatctcagctcactgcaacctccacctcccgggttcaagcaattctcctgcctcagcctcccaagtatttgggattacagtcacccccgaccaggcccagctaattttttgtgtgtttttagtacagagaggatttcactttgttggccagtctggtctcaaattcctgacctcgtgatcc

SEQ ID NO: 367170 - DNA, 594 bp, Homo sapiens
ggaagccaggcactttatgcaccttcttaaatatgagatttcagtcaaagccttaataatataaccaatgttttcaatgacattctgtttatgaagagaaacagatatttattgagtaaaaataaaagaatactcacaaatgttttccaaattttggaggaatcaagtagggagacaaaatgaatgcttccatctttgttcaaaaaattatactttagtgaatttttgtaaactgtaggtagcttacgagataaagttttcttaaatctggaaaacaaaatatttcacagccaataatgtttcaaataaaagtcataaaaacatcatcttcgtgaaccacttaatttcatgtagttgttttgtttaatcttgattaacagttttataaacccatcagtttattcatttaagctctggagatttttttttagtctactgatcttaaattaccaaaaatttggccaggtrcagtggctcacatctgtaatcccagcactttgggaggctgaggcaggtagatcacttcaacttgggagtttgagaccagcctgggcaatatggagaaatcccatctgtacaaaaaaatacaaaaat

SEQ ID NO: 367171 - DNA, 593 bp, Homo sapiens
tctcctgcctcagcctcctgagtacctgggactacaggcacccgccaccatgcccagctaatttttgtatttttagtagagacggggtttcaccatgttgaccaggatgctcttgatctcttgacctcatgatccacccgccttggcctcccaaagtgctgggattgcaggcatgagccaccrcgcccagcaacagtgaatattttctaaaatgacaattacatttctttaatgattttaatactctgtttttggcttattatcctagtcagcgttcttgggattacactgtaaatcttaacctatcagaatcagcttcagattcatgctaattcagaatagtttcagttagacacaaaaacattaccgctaccttgctccacacccttctgcacatagctttgtaccctacgtagttctacacccttcttattgtaactttttaaggtattattcttatttgtattacatctataaatactaaaaactcaacaatacatcgttataattattacatcatataaccatgtcttttaagaagctaagaggaaaaagtaaagcacagaaatatttaaaattttaagttacttctt

SEQ ID NO: 367172 - DNA, 616 bp, Homo sapiens
tctctcttcattcaaagcatagtttgcttcaactttgtaaacactgtatgcaaacatgttctcaatcattttcaaagagaaaccttgtgcttggagtcatctcatttgctgaactggatttggtcaatttgtttagagcaagtgaaaacaattgcataccttgcaaagtgtaaatcaggcacagggtcacttcctgcaggggaaggtccctcagctgcctttgtgagccagcatctcrgcctgatggctgggctgattagcccacaggtgatttcagtcaatcataacacataaatgcccagtttagatgtaaatcactgagtgatatgtagtttcacctcacaggaagtggctcgttatactcctcttcaactctacaaatcctaccctttcttcaagccgcaaatccagtcccagcttcttctgaaagccttcttcaatgactctagttgtgtagacagggcttgctacccaggacagcctctgtgctggctttgtgcctgcatttctaagtctctttatcccagctccctcctctctgtgcctcatctcccactgggctccctttcagcccacagcttgccttaactttgtccccagatggctgcaaccctca

SEQ ID NO: 367173 - DNA, 616 bp, Homo sapiens
tctctcttcattcaaagcatagtttgcttcaactttgtaaacactgtatgcaaacatgttctcaatcattttcaaagagaaaccttgtgcttggagtcatctcatttgctgaactggatttggtcaatttgtttagagcaagtgaaaacaattgcataccttgcaaagtgtaaatcaggcacagggtcacttcctgcaggggaaggtccctcagctgcctttgtgagccagcatctcagcctgatggctgggctgattagcccacaggtgatttcagtcaatcataacacataaatgcccagtttagatgtaaatcactgagtgatatgtagtttcacctcacaggaagtggctcgttatactcctcttcaactctacaaatcctaccctttcttcaagccgcaaatccagtcccagcttcttctgaaagccttcttcaatgactctagttgtgtagacagggcttgctacccaggacagcctctgtgctggctttgtgcctgcrtttctaagtctctttatcccagctccctcctctctgtgcctcatctcccactgggctccctttcagcccacagcttgccttaactttgtccccagatggctgcaaccctca

SEQ ID NO: 367174 - DNA, 464 bp, Homo sapiens
aaatgacgatgtaatgggtggaggggaaattagggacagggcatggcttcttgaagaatacagacacctgagacactgaagggcagagaaaattgagaaagggagaaggggagaaggacaacaggtgagatggaggacgatggggaagtgatccaggtgagaagatctggaaggcattattcctatcccattgcaatctgaggactgactcagctcccacacagattctcctgagcaaacagatctctcttgatacctcctcctcctttttttttttttttttgttgttgttgttgtttttgttttgagatggagtctcactctgtcacccaggctgtagtgcaatggcgcaatctcggctcactgcaacctacacctcccaggttcaagcgattctyctgcgtcagcctcctgagtagctgggattacgggcgcaaccaccatgcccagctaatttttatatt

SEQ ID NO: 367175 - DNA, 581 bp, Homo sapiens
atgacaaaattcaaaattacatccatgtagcatgacatttaaaagttttatactgtgcacatgctcataaaatttccattaacctgctttacactaccacaagaaaatggcttttcactgaatttggaargtgcatgttgggtggtctgacctaaaattcaggctatgtggcacaaaaaaaatttgctgtgtggctgctaataaattagacagtcattctccagaagaggtttaggtttgtgatagaatcatttcacacttgaggaatcacaggcagcttgttcaaaagaagtactagcaggaatttatttaatagtcattactgactcccctgagcaacaaaggactggcagcaaatgtatgtgcatgaatgtacatgggtgtgcacacacattaatatccatttaggatatgatatggcttggatgttttgtcccctctaaaactcacattgatatgtgactctcaatgttggagcgtccacctagtgtgaggtgtttgggtcatgcaggcagatgtttcatgaatggcttggtgctgtcctggcagtaatgagtgagctctcactctgagttcacaaa

SEQ ID NO: 367176 - DNA, 581 bp, Homo sapiens
atgacaaaattcaaaattacatccatgtagcatgacatttaaaagttttatactgtgcacatgctcataaaatttccattaacctgctttacactaccacaagaaaatggcttttcactgaatttggaaggtgcatgttgggtggtctgacctaaaattcargctatgtggcacaaaaaaaatttgctgtgtggctgctaataaattagacagtcattctccagaagaggtttaggtttgtgatagaatcatttcacacttgaggaatcacaggcagcttgttcaaaagaagtactagcaggaatttatttaatagtcattactgactcccctgagcaacaaaggactggcagcaaatgtatgtgcatgaatgtacatgggtgtgcacacacattaatatccatttaggatatgatatggcttggatgttttgtcccctctaaaactcacattgatatgtgactctcaatgttggagcgtccacctagtgtgaggtgtttgggtcatgcaggcagatgtttcatgaatggcttggtgctgtcctggcagtaatgagtgagctctcactctgagttcacaaa

SEQ ID NO: 367177 - DNA, 581 bp, Homo sapiens
atgacaaaattcaaaattacatccatgtagcatgacatttaaaagttttatactgtgcacatgctcataaaatttccattaacctgctttacactaccacaagaaaatggcttttcactgaatttggaaggtgcatgttgggtggtctgacctaaaattcaggctatgtggcacaaaaaaaatttgctgtgtggctgctaataaattagacagtcattctccagaagaggtttaggtttgtgatagaatcatttcacacttgaggaatcacaggcagcttgttcaaaagaagtactagcaggaatttatttaatagtcattactgactcccctgagcaacaaaggactggcagcaaatgtatgtgcatgaatgtacatgggtgtgcacacacattaatatccatttargatatgatatggcttggatgttttgtcccctctaaaactcacattgatatgtgactctcaatgttggagcgtccacctagtgtgaggtgtttgggtcatgcaggcagatgtttcatgaatggcttggtgctgtcctggcagtaatgagtgagctctcactctgagttcacaaa

SEQ ID NO: 367178 - DNA, 594 bp, Homo sapiens
tatatggcattatgtggaaaaaaagaacaaagaattagagtaagggacattgggagtgcatgggtgaggtgtattataattttatcttattttattttaactttttgagatgtagtctcactgtgttgcccaggctggagtgctgtggcgtgatcttggctcactgcaacctctgcctcctgggctcaaatgatcctcccacctcagcctcctgagtagctgggaccacaggtgcctggctaatttttgtatttttagcagagatagggtttcgctatgttggccaggctagtctcgaattcctgacctcagatgatcygcccacctgggcctccaaaagtgctgggattataggcatgagccaccacagctggcctataagtttatttatttttatttatttattttgcaatggagtattgctctgtcacccaggctagagggcagtggcatgatcttggctcactgcaacctctgcctcctgggttcaagcgattctcctgcctcagcctaccgagtagctaggactacaggcacctgccaccacgcccagctaatttttgtattttttagtagagttggggtttcaccata

SEQ ID NO: 367179 - DNA, 616 bp, Homo sapiens
gattggttctttgggcctaaatgagtgtcaaatctccaaagagtcaagtacattaaattcatcccagctyggtgaggtaggtgctaagtttttctaacaaagtagatgtttgaataattggggccttagatgagtcactatagtggactgggtatggagaggggcagcattattgatctccttttcctcattctccatgtagaattgctactagagtcttacctctattttctcatggctatttggccttcaacttgaaatagtatctagtatgatgcatgggttggataaagatgtcagcccttgtaaaatattgcagttactttgaaaaaaggctggagttctcaactgggatcccttcttaccagctacgtggccttgagcaagttgatgcacgtctctcaggctgttttcttgtctgtacaattggctagtgtaaacttcatgaggttattgtaaggatcaaattagataatgcatgtagagtatagcaccaataattgtttattgttattacttttattatctaaccaattggagatgaggaaaagtaattattaggggacaaatattgtataacgagccgacacaagagtgagtggaaactgtaacttgc

SEQ ID NO: 367180 - DNA, 616 bp, Homo sapiens
gattggttctttgggcctaaatgagtgtcaaatctccaaagagtcaagtacattaaattcatcccagcttggtgaggtaggtgctaagtttttctaacaaagtagatgtttgaataattggggccttagatgagtcactatagtggactgggtatggagaggggcagcattattgatctccttttcctcattctccatgtagaattgctactagagtcttacctctattttctcatggctakttggccttcaacttgaaatagtatctagtatgatgcatgggttggataaagatgtcagcccttgtaaaatattgcagttactttgaaaaaaggctggagttctcaactgggatcccttcttaccagctacgtggccttgagcaagttgatgcacgtctctcaggctgttttcttgtctgtacaattggctagtgtaaacttcatgaggttattgtaaggatcaaattagataatgcatgtagagtatagcaccaataattgtttattgttattacttttattatctaaccaattggagatgaggaaaagtaattattaggggacaaatattgtataacgagccgacacaagagtgagtggaaactgtaacttgc

SEQ ID NO: 367181 - DNA, 616 bp, Homo sapiens
gattggttctttgggcctaaatgagtgtcaaatctccaaagagtcaagtacattaaattcatcccagcttggtgaggtaggtgctaagtttttctaacaaagtagatgtttgaataattggggccttagatgagtcactatagtggactgggtatggagaggggcagcattattgatctccttttcctcattctccatgtagaattgctactagagtcttacctctattttctcatggctatttggccttcaacttgaaatagtatctagtatgaygcatgggttggataaagatgtcagcccttgtaaaatattgcagttactttgaaaaaaggctggagttctcaactgggatcccttcttaccagctacgtggccttgagcaagttgatgcacgtctctcaggctgttttcttgtctgtacaattggctagtgtaaacttcatgaggttattgtaaggatcaaattagataatgcatgtagagtatagcaccaataattgtttattgttattacttttattatctaaccaattggagatgaggaaaagtaattattaggggacaaatattgtataacgagccgacacaagagtgagtggaaactgtaacttgc

SEQ ID NO: 367182 - DNA, 616 bp, Homo sapiens
gattggttctttgggcctaaatgagtgtcaaatctccaaagagtcaagtacattaaattcatcccagcttggtgaggtaggtgctaagtttttctaacaaagtagatgtttgaataattggggccttagatgagtcactatagtggactgggtatggagaggggcagcattattgatctccttttcctcattctccatgtagaattgctactagagtcttacctctattttctcatggctatttggccttcaacttgaaatagtatctagtatgatgcatgggttggataaagatgtcagcccttgtaaaatattgcagttactttgaaaaaaggctggagttctcaactgggatcccttcttaccagctacgtggccttgagcaagttgatgcacgtctctcaggctgttttcttgtctgtacaattggctagtgtaaacttcatgaggttattgtaaggatcaaattagataatgcatgtagagtatagcmccaataattgtttattgttattacttttattatctaaccaattggagatgaggaaaagtaattattaggggacaaatattgtataacgagccgacacaagagtgagtggaaactgtaacttgc

SEQ ID NO: 367183 - DNA, 553 bp, Homo sapiens
cctaccccccgcacctgttgttgtwtccagctcccaattcttcatcttttctacaataacatcatgagatagttaaattctcttataaaatcccagatctactgaatttacctcaccttctcatcccaatgttccatcagaaaaaaaaaaaatgaggttaaagtctgacattccatttgttcgcacattcacttaacagcccctagcatgccagactcacttggcagaggatggaatagacaaagtccctgacctcatgaagcttacatccccgtgggaggagaagaaaataaacaagtacgtgtgtgagtgctggatggtgttaactgctttaataaagccggggagtaaataaagctggagaatgggaatggggtgggtcaggggcaggacagacagtgctattttatgtagcaagatcaggaaagcattcatcagccgaggtgccctttcagcaaatatctggcttctggcaaactcatactggctctaactcatcactccctgctttcctaagatcttgcaaactataacctttcaagaattgaacctg

SEQ ID NO: 367184 - DNA, 594 bp, Homo sapiens
ttcttgggactggactgaggaatcactgtgatctcagggatcataagaaaatggtcctgatgaccactggccaatgactaccaaaatcatcatgcagtgaccttgggagttagtgaacaatgaccttgaaaattagtgaggcgttgatctagagcatcaaccttggaaatcagtgagtagaaatctggtgaattagtgagtgatgactttcagggaagagcactcaggcttggggcctacaggtcaggcccaggtccccaagtggaccaggccagtggggaccaagataattggtaatgttcaaggttccttagccaygctcccactacaccagcactgagcacccttgcctccccaaggatgcagggacccagacattccaaatggccttttgctgctcagagctctggagaaatctggacctcagagctgagctttctttttctgttgccaggctcttgtgccatgctcggcctgtggcagtggccacactggctgcactaccagcagagccccaggccctgggagggccacactgcaaggccaggccagagacaagttcttggtttcagcaggcttgtctgtttctacaca

SEQ ID NO: 367185 - DNA, 550 bp, Homo sapiens
ctgtggggccctgatgagcagcataaaagcaaaacaaatgcctctctaagggctcccagcattcctgtctgggagaacattgagagctcactcctggggaaaggagagaggtgggagggaakgagccactggaccccaggtgacccgagggatttgtcctacaataggagcagggcaggtgagacaccctcaggacaaagcagggccaggtcctcagtggaaactccttctcctgccttggtctgctttgatttcataaaatctaagacacatcgacagtaatatacataattttatgtacttccctaagaaagaaaaaaaatgccacccattatactatgacacagtgctttcttatcatctactgcaagacccatctcaatttcagggatgttaaaatgtgaaaaaaaaagtgtgatttgaaatcaatgaaatatggtaataaaaatagcactagctgccatttatcaagagctctttacgtaccccgctatctctgagggctgtgtgtgcagcatctcacccgatcctcatggaaccctgtgaatcg

SEQ ID NO: 367186 - DNA, 566 bp, Homo sapiens
ggtcttgttctaggcactggagagaaagagatgaacaagctgataagatctgcaggcccaaggaacttctaagtgctgagggtggggagaagaggtggactgtacactagacagcaaatagatatttaagacagcaaatagatattaagctgcatgaagaactttgagaaagcaagcaaggtgtcacagtggcagaggtctcccctactgtttatctgctgtatgcccagtacttgacacatggtgggtgctccctgagtgtttgttgagtgaaggaagggctgaatggaggaacatctttttctggggtgttgataaaggacaaggtcgctcagaattcctttgcacgaacttatgaagatccaagcagcctcatgtgctaatgataataattaagtcagaatcccttatttgaaacaaytacctcagggagaggcacaaagcaccaggctgatgaattggttccccagccttccctcctgttgtgccctgcccaggtgagatgtgtgctcacacctgcccaggtgcatacacatgcataaatgagagtctagtggagtaatcac

SEQ ID NO: 367187 - DNA, 500 bp, Homo sapiens
agcctgtgagtggaaccaaaattcaaatcgaggtctgcctgtgcctagaacccactctctgaacctctgtggtgcccctcaatatttgctgcttggatgtcccatgatattcagcctttgcagccacctagcccttacacactcattagaacacctcccacccttgtactgagtttgggggtggargggcagcctctcacccaccatgtctctgaggatgctctagggcttcctgtttctcctgatgacctcatgctccagtgtcttctgctgagtcttctgtctcctctcatctcgcctcttgtcctttctctgccctgactcactctgttttggaccatgcccatcttctgtcgccttcctccaaacagcaggagctggtgtcagtattctgtagctgacttttctaacgatgggcctcctggaaggaagggaggctcaacttaaaacccagcatcggacatcactgtatgaaaaatgcatggccccctcctgctgtg

SEQ ID NO: 367188 - DNA, 611 bp, Homo sapiens
aaataattttggaaaaatcaagaaaacacaaagaacaagataaaaattatccataaacttctatccagagatattcactggtaacattttggtacaaatccttccagtctttcttctgtaaatatgctttttgtttgataaataattatcatactgtaatattattttgtagcattggggagcagggagaggatgaaaattttctatgccattaagtattctttaagaacatttcgctaaagctttgtttttttttttcttattaccaaagctctatctcaatgcagagggcttggaaaacaaaaaaaaaagcaccaagcaagagcaatccattatctttttactttcyagaaagaacttctgttaacattttagtgtgtgtccttctggtgtgtcctttttgattttaattggaattgcattaaatttataaattaatttgaggagaaatgacatctttacaatattgagccatcccttccaaggagtaagttatgtctctccatttattcaagtcttcttttatgtcctctagtaaagttttgtagttttcttgatataggaattgcacatttatggtaaggtattttatttttttgttgttgtttttg

SEQ ID NO: 367189 - DNA, 611 bp, Homo sapiens
aaataattttggaaaaatcaagaaaacacaaagaacaagataaaaattatccataaacttctatccagagatattcactggtaacattttggtacaaatccttccagtctttcttctgtaaatatgctttttgtttgataaataattatcatactgtaatattattttgtagcattggggagcagggagaggatgaaaattttctatgccattaagtattctttaagaacatttcgctaaagctttgtttttttttttcttattaccaaagctctatctcaatgcagagggcttggaaaacaaaaaaaaaagcaccaagcaagagcaatccattatctttttactttccagaaagaacttctgttaacattttagtgtgtgtccttctggtgtgtcctttttgattttaattggaattgcattaaatttataaattaatytgaggagaaatgacatctttacaatattgagccatcccttccaaggagtaagttatgtctctccatttattcaagtcttcttttatgtcctctagtaaagttttgtagttttcttgatataggaattgcacatttatggtaaggtattttatttttttgttgttgtttttg

SEQ ID NO: 367190 - DNA, 611 bp, Homo sapiens
aaataattttggaaaaatcaagaaaacacaaagaacaagataaaaattatccataaacttctatccagagatattcactggtaacattttggtacaaatccttccagtctttcttctgtaaatatgctttttgtttgataaataattatcatactgtaatattattttgtagcattggggagcagggagaggatgaaaattttctatgccattaagtattctttaagaacatttcgctaaagctttgtttttttttttcttattaccaaagctctatctcaatgcagagggcttggaaaacaaaaaaaaaagcaccaagcaagagcaatccattatctttttactttccagaaagaacttctgttaacattttagtgtgtgtccttctggtgtgtcctttttgattttaattggaattgcattaaatttataaattaatttgaggagaaatgacatctttacaatattgagccatcccttccaaggagtaagttatgtctctccatttattcaagwcttcttttatgtcctctagtaaagttttgtagttttcttgatataggaattgcacatttatggtaaggtattttatttttttgttgttgtttttg

SEQ ID NO: 367191 - DNA, 592 bp, Homo sapiens
caactttctctaaatttatattcctagaaatggaattactgggtcatatggtattttgatcatttatttccctttaaacacatacacacaatcacgatggcttttctgatgagaaatgtaacacatgttcactgcagaactttttaaaaatacagaaaaacacaaagaaggaaattaaatttacccatgagcctacyactcagagaaaaccacccttaacttttggtacgaattcttcttgtcttgttttatgcacgtgctcggcatgtcgatgcacacctgtgtggatgcacacgcgtacacacttaagtgttacaaactgtaagcatgctggagtactctggaagggacacagttgtgtgttcacgtgttaaaacattacccttttttctttttaatagattttattttttggagcagttttaagttcacagcaaaaactgagtggaaggcacggagatttcccatataccccctgcccacacacatgcatagcctcctccattatcaacatctgccaccagagaggtacatttgttacaatgaatggacttatactgatacatcatcatcatccaaagtccatagttta

SEQ ID NO: 367192 - DNA, 595 bp, Homo sapiens
tattctgttaaggtctttggcccactttttaataaggttgtttgttttcttattgttgaattttaaaagtggtttgcatatgttggataatagtccatcatcaggccgggcgtggtggctcacggtaatcccagcactttgggaggccgaggcagacagatcactcgaggtcaggagttcaagaccagcctggccaagatggggaaaccctgtctctactaaaaatacaaaaattagccggatgtggtggtggacgcctcttatcccagctactcaggaggctgagacaggagaatcactcgaacccaggaggcaggggttgcagtgagccaaggttgtaccactgcacaccagcctgggcaacagagcaagaccctgtttcaaaaaaaaaaagtagtccatcatcagatatgtcccagtcagtggcttcatttttcattctctttactgtgtcttttgcagagcagaaaattttaattttaatgtagtccagcttatcaattatttctttcatgggtcrtgcctttggtattatatctaaaaagccattgccaaacccaagtttggcaatttatagttttgcattgtacattga

SEQ ID NO: 367193 - DNA, 575 bp, Homo sapiens
caagtcaattgaaactgcctcatcaggagaaatatgttccacttagatcattaaattagctcgacaccggcctttgatgaggcctgcttgagaaaggcrtccgcccttgtgctccagtgatcattggccactgtgggccatttgcttaatgaacagtgtggccgacggccaggggtggagccagctgggcacacctgctgcccacaggccagcatggctggggcagcctctctaggtcttgccttgctaccaccaggctcagcagctggcccttctgagagggcaccagggtcagctcagccactgctagagaccataatataaagatggcacaagccactgttcgctagactcttcctgtgtcctctgccaggtgtggactgagagctctgcagacattacctcgctgaaaataccagcagccttgagacgtcaaggtggttgttctcccattttaaagatgaggaaattgacatagacccacatctctctgaccccaaagcacaaacccctaaccaccacactcagtggccttgggagatcacagggaagggggtgcggtggaggactgaggt

SEQ ID NO: 367194 - DNA, 572 bp, Homo sapiens
ttcatatgcctgcttgccatttrtatgtcttcttttgaaaaatgcctatttaaataatttccccattttattttgtagttttcattgagcaggtacaagtctttcatctccttggttaagtcctaggtagtttgtcctttgtgagattattagaaatggaattattttgtgatatccttttcagattgttaattgttaggtatagaaatgcaactgattttgtgtattgactttgtattctgttactttgccaaattttattagctctaactgattttttgtgaaatatttggggttttctacatataagaccatattatctgcagacagacacttttacttcttcctttctgacttggatgccttctttttcattttcttgcctaactgctctggatagaacttccagtagaatgtttaatagaagtggtgaaagtgaacatcctagccttgtcactgatcttagaggaaaagctttcagtctcttaccattgagtatgacatttgctgtgggctattcataaatggcttttattatgttgagatagttcccttctgttcctagttgttga

SEQ ID NO: 367195 - DNA, 537 bp, Homo sapiens
accctcttcttgcttgcatggtttctgaagagaagtcagatgtaattcttatcttttttcctccatagataagatgcatttttcttcgggcttgttgggattttttttcttgatctttgattttctattgtttgaaaatgatatgcctcagtgtcattttggggacatatttcctgctttgtgcttggtgtgctctaaggatcctagatcagtggtttggtgtctgacattaatttgaggaaagtcawtactgtttcaaatatttctcctgatcatttctctcttccttctccttcttgcatttccattaggcatttttacagccacagtttttggatattctgttttcttcttccagtctttctgctctttgcttttcagttttggaagtttctattgagatatcctcaagctcagagacccacttctcagctgtgttcagtctacttacaagcccatcaaaggcactcttcatttctgttacagtatttcgttttgttttgctttttatctctaacatttctttttttttttctt

SEQ ID NO: 367196 - DNA, 604 bp, Homo sapiens
tatgactggcaacaccactgtcacaccttggcacattcctgctgttggatcacactcccctttgggtaccctctatacctcagggagagccccatgttccatgatctttattttttcttytcatctttggttttttaaacagcattctcctgaggcatctttaggactcttccaaggaacctggggcttggggcaaattctaattaatccagaaataattcattttccctagacagaagtcctcgtcattgctttcttcccctccagctggatccagccacctcgggccctgtggggggaggggacacagaggcataaagcctggcaccacctgccctgccagctctgcttgaattagtccttccctccacatgaggccgggggcctttccctgttaaaatggactttctcttattgtctttatcttttcatgttttgtggaaattaaaagatgagtgacttccaggcagcgccagaggcagcggcagcgcagagagtgtctgtgttttcttccaaggctgaccggagtgggcctggaattgacccagggctccccaggctcctccgccttcacttattctctgggctgctcaattccttttaa

SEQ ID NO: 367197 - DNA, 469 bp, Homo sapiens
acacacctgctcacaccaagggctacccaaggcatgttgactcaaaggtgacaagagcaggaacaagatggtgcttccccgacttggctcccagtcccagaactacagaagcaccaggaggatgccatgcccccgttgtatgtgctctcctgcacctggccttggccacaatgaatcctgggttgcccaggagataccctctgtactggcactgctgctgttctgccccgtgttacagggggctccagcagacccctaacaaaaactagccagctcatcacattgctatatctttcaccttgcccttaagtggcaatctctggtgttcctggtagaagtacagatttcaggaaaaataacttctttatataaaatctcccatttccaggaggcagtgggagtggtggatgtgagtcaacaggaaacacamcccaagaccacatattctgatggattcaaaactaccctg

SEQ ID NO: 367198 - DNA, 636 bp, Homo sapiens
cccacagccccaatgctgacccctgtgctgccctaccctctgttgcagcctgtgaccagctggcactgggcgtggtggcgatcttcggcccatcacagggctcctgcaccaaygccgtccagtccatctgcaatgccctggaggtgccccacatccagctgcgttggaagcaccacccgctggacaacaaggacaccttctacgtgaacctctaccccgactacgcctcgctcagccatgccatcctcgacctggtccagtacctcaagtggcggtcagccaccgtggtctatgacgacagtacaggtgggtggccaggcctggctaggctgggggcaacggttgaggggggcagaggcccaggatcaagctcttgtctgtttgttcagcacagctgccctgggggaagaggctgtgttccataccccagttccactcggttatgctgatgttcacccctgcacccactcacaccctgtgcaccccagcggcactcatatctcactcagccccagcgcacctcacccctgcctcacactcagctcctcctctagcagcacaagtgttcaaatctgcactgaacacccaccctagcagcagcacacacatctgcaagccacaccgacacctgcccat

SEQ ID NO: 367199 - DNA, 561 bp, Homo sapiens
aagtgttaaataaactaaacatcctgcttttgttttctgtgtgctcaacataccccatcccatccaaaattcagaacaactttccaagggagatagactctcccagttttatagaaacgtggaaactgaggctcaaagtcactctgcaagaaaggagcagagcaaggattttttcgcagcagggagctgtccagctccaaagccctctgctgaaacctatcatgctgaaagtccacaccaagtgttccctggcctcctctggctgrctcagattccacacaatgcctgaccatgttggttcaggtgtggtaattgaggtcaatggggaaacggagcctcctgaaatcccagcagctcccatgctacaccagttccaaaaccctctgattttagggctggacattgtggctcacaccagtaatcccaactctttgggaggccaaggcaaggggatcacttgaggccagtacaagaccagcctaggcaacatagtgagaccctatctctacaaaaataaaaatattagccaggcatagtcgggcaggcctgtagtcccagcta

SEQ ID NO: 367200 - DNA, 480 bp, Homo sapiens
gccttctgctgacacactcgcctgccgcaagtcaccttgaactatagggrcaacaataaacacgatcagacagagcagtgattataccctccatcccccatctctcatctaaatttccctctctctatatttactgcctacttgtctgtttcctctttcaaaaatcttctactcacatccgtgccttaaattattcccatgtgttttgatgactctggaatctaaccgaaatgggttcaaattctgagtctagcacatttcagctgacagtgggaaagttattccatttctccggcctccatttccatgtctacaaaatggggataacaaaagagcctcctgcctggcattggtaggaagatttaatgagatatggcaccaaaatgcttcgccaagttcccggtgctcagtaaatgctcagtacacagaagctgtccctctcatcactgttccttccagggacagcctccctgtctaaag

SEQ ID NO: 367201 - DNA, 480 bp, Homo sapiens
gccttctgctgacacactcgcctgccgcaagtcaccttgaactataggggcaacaataaacacgatcagacagagcagtgattataccctccatcccccatctctcatctaaatttccctctstctatatttactgcctacttgtctgtttcctctttcaaaaatcttctactcacatccgtgccttaaattattcccatgtgttttgatgactctggaatctaaccgaaatgggttcaaattctgagtctagcacatttcagctgacagtgggaaagttattccatttctccggcctccatttccatgtctacaaaatggggataacaaaagagcctcctgcctggcattggtaggaagatttaatgagatatggcaccaaaatgcttcgccaagttcccggtgctcagtaaatgctcagtacacagaagctgtccctctcatcactgttccttccagggacagcctccctgtctaaag

SEQ ID NO: 367202 - DNA, 480 bp, Homo sapiens
gccttctgctgacacactcgcctgccgcaagtcaccttgaactataggggcaacaataaacacgatcagacagagcagtgattataccctccatcccccatctctcatctaaatttccctctctctatatttactgcctacttgtctgtttcctctttcaaaaatcttctactcacatccgtrccttaaattattcccatgtgttttgatgactctggaatctaaccgaaatgggttcaaattctgagtctagcacatttcagctgacagtgggaaagttattccatttctccggcctccatttccatgtctacaaaatggggataacaaaagagcctcctgcctggcattggtaggaagatttaatgagatatggcaccaaaatgcttcgccaagttcccggtgctcagtaaatgctcagtacacagaagctgtccctctcatcactgttccttccagggacagcctccctgtctaaag

SEQ ID NO: 367203 - DNA, 480 bp, Homo sapiens
gccttctgctgacacactcgcctgccgcaagtcaccttgaactataggggcaacaataaacacgatcagacagagcagtgattataccctccatcccccatctctcatctaaatttccctctctctatatttactgcctacttgtctgtttcctctttcaaaaatcttctactcacatccgtgccttaaattattcccatgtgttttgatgactctggaatctaaccgaaatgggttcaaattctgagtctagcacatttcagctgacagtgggaaagttattccatttctccggcctccatttccatgtctacaaaatggggataacaaaagagcctcctgcctggcattggtaggaagatttaatgagatatggcaccaaaatgcttcgccaagttcccrgtgctcagtaaatgctcagtacacagaagctgtccctctcatcactgttccttccagggacagcctccctgtctaaag

SEQ ID NO: 367204 - DNA, 512 bp, Homo sapiens
atggaagccatcgctgggacccaaacagggcgagtgctgctctaggaaaggagggaagtagatgcacagccagcagacaagcaggagaactgatgaggctsgcgattggttggatagaggaggtaggggaaagcgaggagttgcggacagggcatggaattctactctggacagttaaggaggtgatggtgtcctgctcacatcaaaagccccctggagaaattgaggatttgggaaacatagtgaggtccatttgggatgtgttgggattggggtccctgtagatggtggccctgtggctgggcacttggaggaaggagcagggctggaggctgagctctaggagtcatcagcacatcctgcagggagcctgggaggtggagacgacagctgctcagggagagcagagatgaggacctggggtgggaccctgaatggcacagatgaaagggtggaagccacaggatgcctgggctggcaaggctggaggggaaggaagagaatcaggagag

SEQ ID NO: 367205 - DNA, 467 bp, Homo sapiens
tctgtcctggctgctctcccagccccctgcatcagagcaagagggaggctaacggggatgcataaaatctctgcaggccacgggaaatrgattcttttctctctaagttgtcacatctcactgcagtatggatggccagataagaagttttccctgcctcatagatggggctggaccaagatgaagtatggaacacaatggagacaaagagtcatcactggtagccttagcatattgtatactttcctatggagaagttgcaccacccacacatccgctctgcttcccagtaacactgagtgcagaccagggagggtggcacagctagaagtgccaatttccctgtgtgactcttcttaccgacggggagcacttgatgggctaaacttggctgctgccccaacacctggcatgggctggacgcacacagagcagcctcgctgaatgagggacacgtgggtgaacac

SEQ ID NO: 367206 - DNA, 467 bp, Homo sapiens
tctgtcctggctgctctcccagccccctgcatcagagcaagagggaggctaacggggatgcataaaatctctgcaggccacgggaaatagattcttttctctctaagttgtcacatctcactgcagtatggatggccagataagaagttttccctgcctcatagatggggctggaccaagatgaagtatggaacacaatggagacaaagagtcatcactggtagccttagcatattgtatactttcctatggagaagttgcaccacccacacatccgctctgcttcccagtaacactgagtgcagaccagggagggtggcacagctagaagtgccaatttccctgtgtgactcttcttaccgacggggagcacttgatgggctaaacttggctgctgycccaacacctggcatgggctggacgcacacagagcagcctcgctgaatgagggacacgtgggtgaacac

SEQ ID NO: 367207 - DNA, 567 bp, Homo sapiens
gggtcaccatgcattacatggggcgatgtgcttggctgacaagaaggccctggtggcctctgctccagcatccagcctgtcccagtcctcatagcctgggtccccaaagcccacatgcctgctgatgctgcacataagtctcaaaaccaaacagggaggagcaaactgtgcaccctggacctcacggggtaacagatatgaaagggaagcatcattcaacctaatcaagaatttctgggatacattgggagggggatagcctgtgtgtgtgtcttgtgatagcttgtggcctctcccttctatgtgaaggtcaactgatagcctcttcctcctccccatcaagtctggtattaggaagcacagggcacctgtttgatccagaccactctgggactacatagccgtctcccaactccagcacatgggtttgagtcttcagtgggctgggggttcctgatgcccagtcatggcaaagcttgtgtggaagctctttaggaggcttaggctacgagcatacatktctgtccctgaagcaaagtgagatgatggacaccaatcagattgctt

SEQ ID NO: 367208 - DNA, 567 bp, Homo sapiens
gggtcaccatgcattacatggggcgatgtgcttggctgacaagaaggccctggtggcctctgctccagcatccagcctgtcccagtcctcatagcctgggtccccaaagcccacatgcctgctgatgctgcacataagtctcaaaaccaaacagggaggagcaaactgtgcaccctggacctcacggggtaacagatatgaaagggaagcatcattcaacctaatcaagaatttctgggatacattgggagggggatagcctgtgtgtgtgtcttgtgatagcttgtggcctctcccttctatgtgaaggtcaactgatagcctcttcctcctccccatcaagtctggtattaggaagcacagggcacctgtttgatccagaccactctgggactacatagccgtctcccaactccagcacatgggtttgagtcttcagtgggctgggggttcctgatgcccagtcatggcaaagcttgtgtggaagctctttaggaggcttaggctacgagcatacatttctgtcccygaagcaaagtgagatgatggacaccaatcagattgctt

SEQ ID NO: 367209 - DNA, 596 bp, Homo sapiens
cacaacatttgataatcatacatagaatacatcttccacatattcacataaaataatcaatgatcattttttctcgcagactacaatccaatcattctctctcccttgctctctccytcactctcttttgttacttgcaaaccatccaagcaatcaatgccttgacctctccttctgatagacacaattacaaaaagacagagcaatgcaattcatctattcaagacggattgtttgaacactctgtcacactgctgagctatccatctccttgtctaagaggaaatttcagcccccaaaagaggcacaaagagagggggcaggtacgatgctcctcagcccagagagcccctctggcacctgcaagaaagccctctccgggctggtgctcggcgatgcctggctgctggagaagcattcagctccaagctcagccggctcaggtgccagtcttgagaatcagaagcacctagcacactccagagggcctaaattcttaaagccccagccagaaccctgagatcccagggatgggggggatgggaaaagggagagggcactgggcccagccaaggtggtgtgtttggattttagca

SEQ ID NO: 367210 - DNA, 400 bp, Homo sapiens
tttttgaggctgataccatggaggctgaagaaagatatgcatgtccaaggccaactgagctaaatatgggattgacctgggagggcattgataatgtttcatagtagtgtctgaaagtataatttgggccattggctgggcttaatttttaatgaatgaaatagtaactattccatttcatttcacaaaaatgatttaaagttgtttacatgaattacatttaatatgatagctcacttttcattcaaataatttaatactaggaaaaatataaactagaaagtttatatttyttagcagcaaaactaaaatgctatagttaagtcatgatgtccaatagttgctataatcgggccaaacatttgactttacgctccctggtggccaaagggaaaaggga

SEQ ID NO: 367211 - DNA, 521 bp, Homo sapiens
tgacaactctaactgcaattagcccttcccagctgcggtgatttaaaggccttttcagttaagctgaatgaaacacccgcgctttataaataaaggctttaccagggctgacaatgaagtatttgaaacgtacaggcccgagctggtggagagggggcggcggggaaaggactgtcactacatcctaaaactgaagccctacacacccttcaacccaccacctccccagcctcacactcaygtgatgctcagacacacctccctccctgcacaaacacaggctcacgccccactcccctccccatagacacaccctcactcccccttcacattcccgtacacatgctccatggtcccgcaaccaagtacacgcatcctctctccacacacacacgcatgcacataactgaagaggttgtgcgtctccaagaaaggtggctggggtcatgagaaatattccagcacgtaaaggccaaatgaggtcagttgtcttgagtgggacacccaagtgccagtgcttg

SEQ ID NO: 367212 - DNA, 446 bp, Homo sapiens
tgctgacggacaagtgggaaggagagaggggtgaggtcagaaaaggcaggaggactgtgatctctcctccagtctcttctttaagaagacagtttgtctctctcaagaaattcatcatgataggaacaagacaatgaatgtaaagtccaatcctaggcttgagaaagaagggctcactcccacaaatattccagctctgcccaaaagactaaatctaaaaggtcctggcacagaaaaagttgcagaactggtgtgtcagaagaccaccatagacagcatgagcatcttgacttcgtggaagaatctaacaacatccttcataaaatcctcattgacaaaatggaaaaagtgttgagctgcatgccrgggcagttaggtggacttatattcaaatgaccatattcaccattgcattcatttattcaacaaatatttattaattatct

SEQ ID NO: 367213 - DNA, 446 bp, Homo sapiens
tgctgacggacaagtgggaaggagagaggggtgaggtcagaaaaggcaggaggactgtgatctctcctccagtctcttctttaagaagacagtttgtctctctcaagaaattcatcatgataggaacaagacaatgaatgtaaagtccaatcctaggcttgagaaagaagggctcactcccacaaatattccagctctgcccaaaagactaaatctaaaaggtcctggcacagaaaaagttgcagaactggtgtgtcagaagaccaccatagacagcatgagcatcttgacttcgtggaagaatctaacaacatccttcataaaatcctcattgacaaaatggaaaaagtgttgagctgcatgccagggcagttaggtggacttayattcaaatgaccatattcaccattgcattcatttattcaacaaatatttattaattatct

SEQ ID NO: 367214 - DNA, 590 bp, Homo sapiens
gatttgctttaacagcaaagaagcaaaagaagcagaagagcatcccaaggagcaacccaaagtaggaagacctgtgatgtgttctggaagcactgggttctcctgcttggctacagcaggggatggacacatgggagggtgtgtgtmgtggggtagtcagagaggaagctggatgtgcgatgggcccttgaatgccaacctcaggcatttgagtgaatccttgtaagccaacaggacagtgacaggggaggctctcgactccttcccttttgccagagttttaaatctcagctacattccccccaagacaggaggtcctacagggcatctacgacttcttacattctatgcaacttattatatgaatgtgcattttttttcgggggaaaagcgtttatcattttcatcaggtctgaaaaacctttgtgacctcttaagcagtaagatgctcctggctctggggaataagccaattgggcagggtcccactcaaattgtccccatccccatgggccatggaccttggcagacaagaatgccaaggtggacaaggtctacccagtgatctcagtcactatccggcttcacaa

SEQ ID NO: 367215 - DNA, 568 bp, Homo sapiens
acccagcagggtgactttgacacagagcagcaccyaataagaatccaaagagtgaattagtgagggcattcataaaacagactagactgcaacagcatgttcttccacactcgcacacacaggcgaagagccttgggatccaaaccttgcatgcctgcaatgtcccactcagcctcggcaaccacataccaccactcatgggccacacacatgcttatgctctaacacactcacacgtttgcacacacattcactctctctcatgacatcatacccaggcacactcacacccacacacgtgcacacttgctctaatctaatgctcacaccatactcaaagctacccatcctcacacatgcacactatctcctaccacattcacatccctcatcccacacttgtgaggacaggggcctgagtcaggagctccagtgggagacagggctagtgtaaagacgaaagctgtcactcagggcacctggccccagaaagtgaccatcttaggcagccagagatcctcctccaaatccacaaatggctccttcctgcttacccaaactccagaac

SEQ ID NO: 367216 - DNA, 607 bp, Homo sapiens
ttcatacatggctctgaaaattgtgcatttagcaggagaccccagggagccacagtccccaaggatgcagacagccttcaaaaggagaaggcttcccagcaccaggcctccttgagtcagtatcatctcactcccacagattcaaatgcaccgccttctcccggtggctacagcatcctccttaactccgggccttatcscctttcatgctagcgattctgacagtctccagtatgtctctgcaggtcacctcaccctccctgagaaaccctcaagggctccccactgcctataagatgaagtccagccttctcagcattcaaggccttccacaatctggcccccatctacctctgtgtccccagaagcagccctaaatccccttgagagttaactccacggggacagaggattttgtcagctttatttattccaggttgcccagtgccttgaagagtaactagaacattgtaggtgctcaattaatatttgctgaacaaatgaatgactgacaagtgaacaaacgatgccatgatctgcagtttccccactgtcacgtctttgctctgacagccacttgcagccaggccagccctcccgtctttat

SEQ ID NO: 367217 - DNA, 607 bp, Homo sapiens
ttcatacatggctctgaaaattgtgcatttagcaggagaccccagggagccacagtccccaaggatgcagacagccttcaaaaggagaaggcttcccagcaccaggcctccttgagtcagtatcatctcactcccacagattcaaatgcaccgccttctcccggtggctacagcatcctccttaactccgggccttatcgcctttcakgctagcgattctgacagtctccagtatgtctctgcaggtcacctcaccctccctgagaaaccctcaagggctccccactgcctataagatgaagtccagccttctcagcattcaaggccttccacaatctggcccccatctacctctgtgtccccagaagcagccctaaatccccttgagagttaactccacggggacagaggattttgtcagctttatttattccaggttgcccagtgccttgaagagtaactagaacattgtaggtgctcaattaatatttgctgaacaaatgaatgactgacaagtgaacaaacgatgccatgatctgcagtttccccactgtcacgtctttgctctgacagccacttgcagccaggccagccctcccgtctttat

SEQ ID NO: 367218 - DNA, 608 bp, Homo sapiens
tccctttctttatcaaccacgaaagttttgggggcatgtgtgttagcctagaagggcaggtacagcttagtaagtggtaatcagttctaggctacttagtttggttagttcaaaaagcctttactataaggtgagttaactcaacatgcctcttccaatattatttgaggtactagggtaaatacggtttaatgtctaatcttccctttattctagccttttttccattccatctatcacacagagcattttcaaaaatctcacctaaagagcatatcccattaaagatgcagcaaagacagatgaagtcatactttcaattatgccccttatattaataaaaacaattataaattaaaataccttattaagtattgatacatagtacctctatatttaaacagcttttcttgctccatttgaaaaattggcctaaaaagacttctgaaaactacagaataaaatataaacccccatacaggtcagttaatttggacaragagtatagtttattccacagtcacaaactataccttaaataagcactgtccaatacaactttctctgaccatggaaatattctatatttgtgctaatgtagtacccac

SEQ ID NO: 367219 - DNA, 500 bp, Homo sapiens
aataacggggtttacaaagtttaacagattctaaaacatactctccctagaaaagtagtactatctggcaaaacgtggcctgatgacttgttgatcttcctctggatcttcctctggagttacaagagtaagaattatatgagaaaatggatgtgagtataaagtatataacagtgcataaagaactaactgtacttcagcatttgtcccaggtgcctggttccttaatgggctatcctcacttcaagatataaagggatttaggttccttcaaaccaaacttgagctgattaattgcaatagccataagaaatctgagtcagctttctaagctgttaaccaaaaaacctgacagctacatccagacccacaattaatattttattgcccactrcctaattattaactgaccacagttatactcaatttcagtgtaagaaaaaccattttagctgtgcacagtggctcatgcctgtaatcccaacactttgagaggccaa

SEQ ID NO: 367220 - DNA, 615 bp, Homo sapiens
acccagtatgttgttgctgtgtggtcttctgacctcctggcttttccattttatcacctccatgggaaaggacttaggcagcagatgtggctgtgccacaactgccacagctgtgggcttgggtggaggagctgtgagctagaggacggccacacccatagcacagctgacatcagccacacatgaagctgggaagctgctctctactctcagcaccctcagggccaagagaagccccaaaagagagtggttactgcccttattccaggccccagaattctctgctttgcaaatcccaggctgagccccatggttaaccctctctggttcttygctctaccctttggagagaagacaaagcaatgagaagtggaccaagaacagccctcctaatagaatatcctatccaacctgtgatttcagccaagggtaaaataactactctgggtctatcaaaaggagaaaaaaaaaagattcaaagaacccagagcatcacagtaaacagaccagtttctaacactacctattatagtattccaaccaactccaaagatcagttgacactcccagcatcttaaggggtagggctaagagtcttctttacctaaataaccc

SEQ ID NO: 367221 - DNA, 564 bp, Homo sapiens
atctgctcatacttctgtcctttcattgcrtttaccacctcctgatatgtcttgccttccattcttttctcttatctctttctgccatatccaccataaaaatacaatttttctaactattgtgacctagttcaacattgtatttctagcacctagaacagagttgaacactgagaaggcaatcagtaagggttatttgcacattcttgtaaattctggtcaagaattcttggcatctttttaaactccttcccctcttccattctgtttatctcagccaatcttgtctctgtgacttacttccatgctgaatattttctgtttgccacttcagatccactcttactacaccaggcgctgttctaagtgtttagtacacattagttcatgtagtttacccagtgatcgcatcagatacgagctgttaatacccacattttacaaaggaggaaactgagacatatggtcattaggtcactagcccaaaccacacagcttttaagtggttaaaacaaaacaaacaaacaaaaaaacaggttatcacggtctgtttctttattcacg

SEQ ID NO: 367222 - DNA, 546 bp, Homo sapiens
tatttaacttcattttcaatttaaccatgtattatttcagtttccttttcctccgtattgtatagccctgggaataagagttggaaatgtgcctatcataagctgagtcacattttatgtgtcccctcctctcaagccactgttttctctctctttttttttttttgcgattaaaaaawatatatatatcctgtgtaaaataaaacagattcagaaaactgcgtaaaacaattcattatataatttgtatatataatgaatgaaagaaatagaactttctccttgtacttgcctcagaagccatgtgacccaagccagtcacagcccctgccaccttcaaagtcagcattgtattaacttatagtacttacatccttgtggatttttttcattgcagataatttttaacatttttgaggtataattgctatatataagaaagagcacatatttaacgtatgcaatgtaataagttttgacatatgtacatgcccttggaagcattatcacaattaagatagcaaatactggctgagtgcgggggct

SEQ ID NO: 367223 - DNA, 546 bp, Homo sapiens
tatttaacttcattttcaatttaaccatgtattatttcagtttccttttcctccgtattgtatagccctgggaataagagttggaaatgtgcctatcataagctgagtcacattttatgtgtcccctcctctcaagccactgttttctctctctttttttttttttgcgattaaaaaaaatatatatatcctgtgtaaaataaaacagattcagaaaactgcgtaaaacaattcattatataatttgtatatataatgaatgaaagaaatagaactttctccttgtacttgcctcagaagccatgtgacccaagccagtcacagcccctgccaccttcaaagtcagcattgtattaacttatagtacttacatccttgtggatttttttcattgcagataatttttaacatttttgaggtataattgctatatataagaaagagcacatatttaacrtatgcaatgtaataagttttgacatatgtacatgcccttggaagcattatcacaattaagatagcaaatactggctgagtgcgggggct

SEQ ID NO: 367224 - DNA, 603 bp, Homo sapiens
cttcctgctctggagatggtgacagcacttggtatttgagcagctacagctatcttctaatcatgaaggaaaggctaaagccttcaaatgcattctgatgtttctgagctactgacccaggcctaagctaccaatacayacacactgtgtgtgtgtatgtgtgcacacatgcatgtgtgatgctttctaagtatgtatacataccagaataaaagtgtagtaattattaattatcagtgcaaacactttgttttcacaaaatgaggccatttttgagaaaggaaaaacaaaagcaaaattgcggcaacgaatagactcaaattaaagatgtggtcacaggaagactttgcattgctgcccaagctctgccactcattgagccactgaatgagctccagtggcagagcttattccactgataccacatcactggagagtttctgggtctttctatgctgtttccttttggcaaagcttgggttaacctgtggaatgttagtcaagtgcccagctattaataggagtaattctgcttttcacagagtggcaatgaaagtaatttgcaaatgtgggaggtagaggaacagggaaagagaaagtcag

SEQ ID NO: 367225 - DNA, 603 bp, Homo sapiens
cttcctgctctggagatggtgacagcacttggtatttgagcagctacagctatcttctaatcatgaaggaaaggctaaagccttcaaatgcattctgatgtttctgagctactgacccaggcctaagctaccaatacatacacactgtgtgtgtgtatgtgtgcacacatgcatgtgtgatgctttctaagtatgtatacataccagaataaaagtgtagtaattattaattatcagtgcaaacactttgttttcacaaaatgaggccatttttgagaaaggaaaaacaaaagcaaaattgcggcaacgaatagactcaaattaaagatgtggtcacaggmagactttgcattgctgcccaagctctgccactcattgagccactgaatgagctccagtggcagagcttattccactgataccacatcactggagagtttctgggtctttctatgctgtttccttttggcaaagcttgggttaacctgtggaatgttagtcaagtgcccagctattaataggagtaattctgcttttcacagagtggcaatgaaagtaatttgcaaatgtgggaggtagaggaacagggaaagagaaagtcag

SEQ ID NO: 367226 - DNA, 603 bp, Homo sapiens
cttcctgctctggagatggtgacagcacttggtatttgagcagctacagctatcttctaatcatgaaggaaaggctaaagccttcaaatgcattctgatgtttctgagctactgacccaggcctaagctaccaatacatacacactgtgtgtgtgtatgtgtgcacacatgcatgtgtgatgctttctaagtatgtatacataccagaataaaagtgtagtaattattaattatcagtgcaaacactttgttttcacaaaatgaggccatttttgagaaaggaaaaacaaaagcaaaattgcggcaacgaatagactcaaattaaagatgtggtcacaggaagactttgcattgctgcccaagctctgccactcattgagccactgaatgagctccagtggcagagcttattccactgataccacatcactggagagtttctgggtctttctatgctgtttccttttggcaaagcttgggttaacctgtggaatgttagtcamgtgcccagctattaataggagtaattctgcttttcacagagtggcaatgaaagtaatttgcaaatgtgggaggtagaggaacagggaaagagaaagtcag

SEQ ID NO: 367227 - DNA, 532 bp, Homo sapiens
atttttccaagtgagaaaactgcatgatcagataaccatgcataggttggagatgtgtccagagaaatttattcctgaaagacagcgataaagtaccagagctaaaatagtccatctgatagagacattggagctgagatctgaaatgatgcctgtttcttattaagttggattctatttactacacattttttagtgtatagatagaaaagggtacacaataggtacctaaaagcagatagctgtaattactactatttatcttttgtgctctgaggtttctcatactgtgttggtgccacactctaatcagctgcataaawgggtagatcacttgccaccacagaggcatgtgggagaagacagcatgtctaggacattacgctgaggctgaggcagtaggcaaggaagtccaacctgcaggctaagagtcagttttcactcctgtgggaaaagcatgcccagctctcagcaaaagcatagaaatcaagagagaacagtaaaggcaaacaggatatgtagcctagttcca

SEQ ID NO: 367228 - DNA, 590 bp, Homo sapiens
ctggtaatagcactcctccctccctttacagatacgcttctaccctattccttgtgggtctgccagtcacaatcctcttgcccttggttgcagggtgagcatgtgatccaggactagtcaactggtatatggcttcagcaaattatccaaggataagtatataatccaggtcaggccaggccaagcagggcctttccctgggacttttcgtactgaagatggaagggaaatgtgtctagaagsatagaatcacctagagttcctggccatcatggaagggtctacaaaaaggaagccagtacataaaaagcagccaattccttatataaaagaaaaagggagagacgcagttaaaattggaatactattttagccgctggatccagataaccctcagaccagttttatctcagaattttttttttctttttttttttttctcttcacttaaattagttcaaatggtctcttaacactttttagaaagtggccttggaaaccaacaagtccaatatccttattttatgatatgtagatggagacacagggagatcaagaaattgctgttatcagctggttggtaccaaagg

SEQ ID NO: 367229 - DNA, 575 bp, Homo sapiens
aatgactaaaaccacgaaaataaattcttagatgaaacagttcaattatctaatgtaattactcctaaggaaaaaatgagagaaatttatcatagctacatgaagtttccaatgtggttatatatgactgtgtatagtcaacagttattcatctggcgttctgtcaaacagagttttctataatatggtatctgtgactgtttccaatacaataaaaatgctgcaaaatcttgaaatgcttttcaaaagaagaatactttatagtatagtgtgtacagctgtagtattgagcttattttgctgtactttattaatcttttccaaaacatgtaaataatgaagtttgttgcacaccacatctggatttcatgattatactgtaagacttatatagtagatggcccttcatttagggaagtagtatatacaccagaatrtgccttttctttttaagatttaaacaacggaaaaagccactgaagtatgtatagtatctgtgcgccgagatacacaggaaagcatggaacatgtggatggaaggaaccgggatcatctcatccagctgagtaataagt

SEQ ID NO: 367230 - DNA, 575 bp, Homo sapiens
cctgccaggatttgttaattttttgatttctcaactagtgttggcaagcttggagtggaaagtataaactttcaattttgtattataaaatcttgtttttatcagtagcactctcatgtcttggtttcactatttactttgtctcagaagccctagattggggcagcttgcttcttgactgacatgcacaatgtcaaaggatatgacaccagtctgtcagcagagctctagcagctacctcaacaccgtgaccatgtctgcagagaatgctccagccttgcctgctcatacacgttagtaacatgatacagtcttttccatctgtacagaagagctagaatattccaccaaagttgtgaaacatgaatctagcaaaaacaaacaaaaaagaagacaaaacacaaaccatraaccttgtgtggtctggaaaagggagaggggttggtgaggtagagatagagctgaacatgtgtgaaagtctctgaggaggagccctgtgtgctctctgaatgagggggatagaatcccaggaagtatgagcatctgtcctgtaatcaatttctgcctgaaaccac

SEQ ID NO: 367231 - DNA, 450 bp, Homo sapiens
gaattgtttaacaaattggaatttgtttacacctactttaatttttaaattacgtcaaaacttacattacttgccaagcagtatgatataagagtagaggaaacataaataagaatacagaggcatcaatttggttaaaattcaccattttataagactaagcaataatcytaaaaatctctttcctgaatatttaaatgtgtttgcatggtgttatgactaaattgttcctgatttagagactaaaccctcttaaaacctttaactagttaaatataaaaaaattatatgtatcttgcttccctgatggaaaactatataaaattgtagacttaaaaggtttgtggaaatacattaggatatcagaaaactaaatatatggacttgctttatgactatctattacatgtcaaataaaatagcttcttttgaaaaaaaagtgtaaaaacc

SEQ ID NO: 367232 - DNA, 655 bp, Homo sapiens
attaataactgttttacaggattaagaggtgtacactgggaatacattatataaaacgttttcaagatgaatgttctcttaacagtgattaggcttttgtagtaagtgtttgcattttacaaaaagattaaaccagacagctttggggacagcttagagacattttaacaraaaaaagaggtcagtcagttctttaaaaatttttatatttatttttaaatttacattctgattagttttgtttgtttgtttgtttttaaatggacagtagattgaggggtggatggcgatttggctttttcctccccagtgccaaagaaagaccaaatccttaaaacataatcagaacatttacaaaaattggcttttcttttcttgcaataataataaatctgttgttatttttacagttttcagtttgcggatttaaaaaaattaaatgagaactatttctgaatcgggttttagttaacaaagattcattacagggacacaatagagaaagtcctttcctttgtatgttagctgggttgaagggggaagggaggagttatacaattggttcctgtcttttagttatgagagggagagaggtgtctgcaaaggcgactccttgaattagaatgagcaaatgaataaaacccttaaaatattt

SEQ ID NO: 367233 - DNA, 594 bp, Homo sapiens
tttctgttgaacgtgaaagacattaataaaacattaaaaaaaatactgcataaagctaaaaatgaagatctcaatcttgtattgaaagaatggatccatcagcatcgctgtgaacacatgccacttaatggtatgctgaccatgaaagaagcaaatatctatcatgacgaattgaaaattgaagggaactatgaatattcaacaggctgatcacagaaatttaagaaaagacacaacattaaagttttaaagatttgaggtgataaagcatctgctgcatctgtggtgataataaagcaacagagaaattcattgaccagtttgcaaaggtcactgctgataaaaatctgatgccggaacaagtctataatgcattattgcaccagaaagacagtgactacaggaactaaggctgccaaagacagaataactgtgctggggtgtgcttttgcmaaaggcacacaacaaggaaaaccttacaccccagtacttgctgttttcaaggagtaaatttcttaccagtccataagtatcctaacaaaggcatggatcatcagggacatgccttctgattggttacacaaacattttata

SEQ ID NO: 367234 - DNA, 594 bp, Homo sapiens
tttctgttgaacgtgaaagacattaataaaacattaaaaaaaatactgcataaagctaaaaatgaagatctcaatcttgtattgaaagaatggatccatcagcatcgctgtgaacacatgccacttaatggtatgctgaccatgaaagaagcaaatatctatcatgacgaattgaaaattgaagggaactatgaatattcaacaggctgatcacagaaatttaagaaaagacacaacattaaagttttaaagatttgaggtgataaagcatctgctgcatctgtggtgataataaagcaacagagaaattcattgaccagtttgcaaaggtcactgctgataaaaatctgatgccggaacaagtctataatgcattattgcaccagaaagacagtgactacaggaactaaggctgccaaagacagaataactgtgctggggtgtgcttttgcaaaaggcacacaacaaggaaaaccktacaccccagtacttgctgttttcaaggagtaaatttcttaccagtccataagtatcctaacaaaggcatggatcatcagggacatgccttctgattggttacacaaacattttata

SEQ ID NO: 367235 - DNA, 575 bp, Homo sapiens
aattgcaacagatgaagagttgtttcttatggatgagaaaagaaagcagtttcttgaaatagaatttatttccggagatgatgctgtgaacaatgttgaaatgacaacaaaggattttgaatattttatgaacttagtcgataaagcagcagcagtasgttttgagaggactggagtcagtcctctcaaaagttctactgtaggtaaaatgctatctcacagcatcacaagcttcagagaaatatttatgaaagaaaaatcactggctatggcaaacttcgatgttgtcttattttaagaaattgccacagccaccccaactgttagcaactactaccctaatctagtcaccagccataaacattaaagcaagacctttcaccaacaaaagaattataactcactgaaggctcagatcatcattagcatttttcagcaatacatcacttattaattaaggtatgttcatttttagacataacaccattgcacacttaataaactgcagtagagtgtaaacttaactttttttatgaactaagaagcttgagaatttgtgtgacttgatttattgc

SEQ ID NO: 367236 - DNA, 575 bp, Homo sapiens
aattgcaacagatgaagagttgtttcttatggatgagaaaagaaagcagtttcttgaaatagaatttatttccggagatgatgctgtgaacaatgttgaaatgacaacaaaggattttgaatattttatgaacttagtcgataaagcagcagcagtacgttttgagaggaytggagtcagtcctctcaaaagttctactgtaggtaaaatgctatctcacagcatcacaagcttcagagaaatatttatgaaagaaaaatcactggctatggcaaacttcgatgttgtcttattttaagaaattgccacagccaccccaactgttagcaactactaccctaatctagtcaccagccataaacattaaagcaagacctttcaccaacaaaagaattataactcactgaaggctcagatcatcattagcatttttcagcaatacatcacttattaattaaggtatgttcatttttagacataacaccattgcacacttaataaactgcagtagagtgtaaacttaactttttttatgaactaagaagcttgagaatttgtgtgacttgatttattgc

SEQ ID NO: 367237 - DNA, 553 bp, Homo sapiens
aaatgaattacaggaatgatacaagagatggataagaggaattaggattattttggcgctaggagaactagcactagctaggagctgttatagtgctgtttgaaaataatttggatttgtcataaatgtatattacaaactatggcatccactaaaaattttttaagtaatgaaatgctgataaaggagaaaacatggaatcmtaataatgctcaattaaagctacaaaaggaagaacaagagtgggagacaatacagaaacaaaaaatcagagcaacaattagaaaatgccacttaatacaatacatattgacaccgacatatccgtaattcttttgaacatcagtggttgttgcaccaattaaaagacagagactgtcaaagtggatcacgaaaaaagacccaatcatatgttgcctgccagaaacatattgattaaaagtagctattttaatggcatacctgttaaaataatacatagaaaccaaccaggaggcagacgggaccgggatcccccagcccatcccagctgctctaccagaacatggccaga

SEQ ID NO: 367238 - DNA, 361 bp, Homo sapiens
attccaaaaggaagaagtagacaagaaaagaggggtatctgattccaagtatcttcaaaatctaatagggagaacagcattgaatytttttttttttaatactttaagttatagggtacatgtgcacaacgtacaggtttgttacataggctccgtaataatctcctttgactccataccccaccttctgggcattttgagctaggagttaggccctcaagggcttgggcctcctgcaaaccacaacttagctgggcttagcctatgcagcagttctcattggtcagagtcttgtgcctccagctctcaggctggggctgcacactggtgtctaagagttctgaggtctcagcaacagcca

SEQ ID NO: 367239 - DNA, 478 bp, Homo sapiens
tgcccaatacccagctaaaccaatgaaggcaggatcaaatccacacatactgatactgacattaaatgtaaatgggctaaatggcccaatgaaaagacacagagtggaaaactggataaagaaccaagatgcatcagtatgtggtcctcaagagacccatctcacgtgcaatggcacacaaaagtctcaaaataaaaggatgaaggaaaatatatcaagcaaatttaaactaccaaaaagcaggggttagaatcctagtttctgacaacacagacgttatcccagcaaagataaaaaaaaaaaaaaaaaaaaaaaaaaagggcatcacstgatggtaaagcattcaattcaacaagaagatctaaccatcctaagtagatatgcatgcaatacaggagcaaccagatttacaaagcagtttcttatagacctttaacaataatagtggagtctttaatatcccactgccagtgttaga

SEQ ID NO: 367240 - DNA, 303 bp, Homo sapiens
caatgaaaagacacagagtggaaaactggataaagaaccaagatgcatcagtatgtggtcctcaagagacccatctcacgtgcaatggcacacaaaagtctcaaaataaaaggatgaaggaaaatatatcaagcaaatttaaactaccaaaaagcaggggttagaatcctagtttctgacaacacagacgttatcccagcaaagataaaaaaaaaaaaaaaaaaaaaaaaaaagggcatcacctgatggtaaagcaytcaattcaacaagaagatctaaccatcctaagtagatatgcatgca

SEQ ID NO: 367241 - DNA, 630 bp, Homo sapiens
cactacacacaaagtcttataagaaaaagagagaagcaaactatgcattgaagtaataacccaaggttatcctactgctgtcttgaaattcaacataaaattgtataracatacaaacctttcttgacttagaatttatataccataacatatatccttttaaaaacatacaaatttttttagtatatttacaatctaattttaaaatatttctatcctgttaaaagaaactaaactttattccacacccttttctcacttagccctgagttatcactaatcaacatttttctctctagattgacatatctgaaaattttaagtaaaattatttgaaattattattatgaaaaaataagttgttaatattagatttgttctaataaactcaagttacacttaaaacattctaaaatattataaatattttaattataattaaaatattcaaaaatatttaaatattctacagttaaaatatccatcacatttatcaaaagctaatataaatatattttatctttcttttgaacttaatatttttaacattgtttctaaggggaaatgcaggcctagatttaaaattatgattaatacattactattacatttcaactattttcacaaacc

SEQ ID NO: 367242 - DNA, 630 bp, Homo sapiens
cactacacacaaagtcttataagaaaaagagagaagcaaactatgcattgaagtaataacccaaggttatcctactgctgtcttgaaattcaacataaaattgtataaacatacaaacctttcttgacttagaatttatataccataacatatatccttttaaaaacatacaaatttttttagtatatttacaatctaattttaaaatayttctatcctgttaaaagaaactaaactttattccacacccttttctcacttagccctgagttatcactaatcaacatttttctctctagattgacatatctgaaaattttaagtaaaattatttgaaattattattatgaaaaaataagttgttaatattagatttgttctaataaactcaagttacacttaaaacattctaaaatattataaatattttaattataattaaaatattcaaaaatatttaaatattctacagttaaaatatccatcacatttatcaaaagctaatataaatatattttatctttcttttgaacttaatatttttaacattgtttctaaggggaaatgcaggcctagatttaaaattatgattaatacattactattacatttcaactattttcacaaacc

SEQ ID NO: 367243 - DNA, 554 bp, Homo sapiens
tctattcagaattcagtggagagttgtaactgatgctgttttcaagcaatgtaccatccaatcgagtgagttacattagataacccctaaactacattatatacaaatatacatttatatgtaacacacactcaacagaccttttagaaatgagtgaaacagattattagaaatgatgggaaaaattgtcatttcttcagaacagaaaaaatattgttattattcatattttcacagactggtttgcaaactcttaatgattagccataaagataaattttgtggaagaaggcagggtttattggacttcatctgttatctagccatgyatcagatatttatccataattttatactatagcaaacattttattatatgttaattttacttacttccattttaagattaggactctatttgttggctggataaaattacttcaaaaacagtattgtttataaactttcagtcctatataaaagtaattatacaaaaaaatttcaatcatgttataactatgatctatttattcagagcttttaaagcatttttt

SEQ ID NO: 367244 - DNA, 602 bp, Homo sapiens
tataaaagtaattatacaaaaaaatttcaatcatgttataactatgatctatttattcagagcttttaaagcatttttttattataactacccttagtaattgaaatatttctttattgcaaaagaatcataaaaactattcctgtaaaaattactttagtattgttatctttgtcaaaacagcatatataattcttatattatgtatttaygtaattataattcattctgtggcagcccctaaaatctttctctgcccaagagtacaggcagtgaagaatttctgtcctttgtgcctctaagagtaataaaacttctttcttataagctatcttgaaacatattatttgtctaattgaaaaaccttagtttagctaatgaaaatgttctcattaattatcaagagaaactatgtaagcatgttcataaacagaataacagcgctggttcagtgttatatgattaatagtatgtaataagatgtgtaagcagcaatgtaaattatgtggtatgtaataattttatacattataaaatggtgttaaacagagcgtactaacatttcttcccaatgattaatttgacaagcttgtcacaattgc

SEQ ID NO: 367245 - DNA, 602 bp, Homo sapiens
tataaaagtaattatacaaaaaaatttcaatcatgttataactatgatctatttattcagagcttttaaagcatttttttattataactacccttagtaattgaaatatttctttattgcaaaagaatcataaaaactattcctgtaaaaattactttagtattgttatctttgtcaaaacagcatatataattcttatattatgtatttatgtaattataattcattctgtggcagcccctaaaatctttctctgcccaagagtacaggcagtgaagaatttctgtcctttgtgcctctaagagtaataaaacttctttcttataagctatcttgaaacatattatttgtctaattgaaaaaccttagtttagctaatgaaaatgttctcattaattatcaagagaaactatgtaagcatgttcataaacagaataacagcgctggttcagtgttatatgattaatagtatgtaataagatgtgtaagyagcaatgtaaattatgtggtatgtaataattttatacattataaaatggtgttaaacagagcgtactaacatttcttcccaatgattaatttgacaagcttgtcacaattgc

SEQ ID NO: 367246 - DNA, 602 bp, Homo sapiens
ctttctctgcccaagagtacaggcagtgaagaatttctgtcctttgtgcctctaagagtaataaaacttctttcttataagctatcttgaaacatattatttgtctaattgaaaaaccttagtttagctaatgaaaatgttctcattaattatcaagagaaactatgtaagcatgttcataaacagaataacagcgctggttcagtgttatatgattaatagtatgtaataagatgtgtaagcagcaatgtaaattatgtggtatgtaataattttatacattataaaatggtgttaaacagagcgtactaacatttcttcccaatgattaatttgrcaagcttgtcacaattgccctgtcatctgctcacatactgttcatgacaggtctctgacgccaactcataatgcttgggaaaaattagcatttggcctttagcagccaaactcaactagacttataaatgaaagttactgctccagagctgatatttttttcaaggttaaataaacaaaatgtaataaaattagattgtaagtagaatgcgtaagtgcatacctgcattggaaccaaaactcataaaacagatatatgtcaagca

SEQ ID NO: 367247 - DNA, 569 bp, Homo sapiens
tttaaaacttcaccacccattggaaacattgtatacttttctttaatgatatagtcttataatgctaatttttacttacaattctaagttgcgaaatttttcttttataaaamcgggtttgtactcactttggcagcacatatactaaaattggaatggtacagagaagattagcatggggtctgtgcaaggatgcctcgcaaattcttgaagtgttcagtagtttcatgaaaatggccatactgcttgaagaaatttatagattagatgctattcttcttcattatttttatctttttttctttattcaactttctgtgaacttaactttttaaaatttgatgctttaaattatggtctactggtcattcttcaacgataagtcaattatcctctagtttccacttcagatacaacctgtaatttttatatgaaatattcttatcaataattgtaaggttctaaatattttcagacttttatcatgctttcttttttcttttttagttatataatttcctttctgtatttttacatagtagatatttaatatgtttgtttttttcata

SEQ ID NO: 367248 - DNA, 569 bp, Homo sapiens
tttaaaacttcaccacccattggaaacattgtatacttttctttaatgatatagtcttataatgctaatttttacttacaattctaagttgcgaaatttttcttttataaaaacgggtttgtactcactttggcagcacatatactaaaattggaatggtacagagaagattarcatggggtctgtgcaaggatgcctcgcaaattcttgaagtgttcagtagtttcatgaaaatggccatactgcttgaagaaatttatagattagatgctattcttcttcattatttttatctttttttctttattcaactttctgtgaacttaactttttaaaatttgatgctttaaattatggtctactggtcattcttcaacgataagtcaattatcctctagtttccacttcagatacaacctgtaatttttatatgaaatattcttatcaataattgtaaggttctaaatattttcagacttttatcatgctttcttttttcttttttagttatataatttcctttctgtatttttacatagtagatatttaatatgtttgtttttttcata

SEQ ID NO: 367249 - DNA, 562 bp, Homo sapiens
gtttgagctctttgtagattctggatattagacctttgtcagatgagtagattgcaaaaattgtctcccattctgtaggttgcctgttcactctgatggtactttcttttactgtgcagaagctctttagtttarttagatcccatttgtcaattttggctttattatttcaatctctgttaaattcttgtgatgaatttttgaatggcttctttacgttttcttgaagtttgttaagattcctaaaaagagctattatgaattctctgtttcagacatcagaaatatctctctctccagggtttgtcattggtcccctatttagtcattttggtgagatcaaatttccctgaatggtcttaatgtttctgaacatacatcagtgtctggttgttaaagaattagttatttggtccaggctttacagtctggccttgtttgtacatatccttcttcagatgaccttccaaaaattcaaaggcaactgactattcagttcccaaagcctctagtcactgcaaccatttcagcactagagtgtgccctaagcccaggttcactg

SEQ ID NO: 367250 - DNA, 562 bp, Homo sapiens
gtttgagctctttgtagattctggatattagacctttgtcagatgagtagattgcaaaaattgtctcccattctgtaggttgcctgttcactctgatggtactttcttttactgtgcagaagctctttagtttagttagatcccatttgtcaattttggctttattatttcaatctctgttaaattcttgtgatgaatttttgaatggcttctttaygttttcttgaagtttgttaagattcctaaaaagagctattatgaattctctgtttcagacatcagaaatatctctctctccagggtttgtcattggtcccctatttagtcattttggtgagatcaaatttccctgaatggtcttaatgtttctgaacatacatcagtgtctggttgttaaagaattagttatttggtccaggctttacagtctggccttgtttgtacatatccttcttcagatgaccttccaaaaattcaaaggcaactgactattcagttcccaaagcctctagtcactgcaaccatttcagcactagagtgtgccctaagcccaggttcactg

SEQ ID NO: 367251 - DNA, 588 bp, Homo sapiens
ttgttattatgcttaaaccatatcctgtgatctcttacttggtttctttagtttttgagatggtgttttcttgcataaatagttgtttgaattgatgttcctgagggaattttcactagaaggttttattctacaatcttgttctgtcttcaccctaccactttaataacatctttaccctgattaacttttcttctttcagataacaccacaacttstctgctcatgtcttcataaaaagttcttgaaagacttggcttcatatgatgtcttccatgtacattttcccatgctctttgatcctttgtctaaacaagctttaactacatggtttcaccaaaattgctcctgtcaagctcatcaaagaccaatatataacatatggatcatccccgttcttattacatcctcttccccccctacttccagctcaccacatttcttctccttttgtcttgcctattcagattctacactctcagaattgttatacttgttatatatataattccaggattcattcctctttgttcctttctttactttctcccttgacgatttcctcaaacttatatctccaagatatgg

SEQ ID NO: 367252 - DNA, 579 bp, Homo sapiens
ttaataagctgtctgatctaatccccaaaacaactctactgtttcrgtttaggaaaaattaatccctcatcaactgtcattcagcattttaaacctagtgacaggattctactttagatttatcttattaaaaattgtttgctctttcattcgcattaacttttttgggtatgagttatatatttcagtaactaactgagaagttagtatgttgacatcaactcagtgcatattaggcttccataaacacagcagccattttctttaataaatgtatctaccactggcagtttgccagtctgggagagtagaggtggaatctacaaatatcctactggcaaaacagattggatgtctctgagctgtcagaaaaatgtttcatagcaccttccatggctctatatgtatagtgaagtgttgaataaataagtaatctaagcaaataatcactaaagggagaaaagaagcaataattgaacaaacagaaattataacctggaatgaaagaacaggcattgtaacttttataaacaaaccatcaaaagaaacagcatttgcctttccagcactacctttgct

SEQ ID NO: 367253 - DNA, 608 bp, Homo sapiens
aaacacattttaaggaaaaactctattaatgttgtcagtcagcaggtggcatgaaagcaatccagaaataaatcaagttgtacctaagatttttgtagcaacctttgcaagtgtttaaaactgaatgaatgtggccatctgtgactgtttatacacaaaggccatttcaataacttcatataaacaaaaacagacaagattttcagcaggctcctaccaggtgcccaaccatatgagattcaatttgttcccactaccttttattgagaaaagaacctgtatttaatgatcagtgtatcataaagaatcacccttgattcatcactcaaaatacatggaaaactaacacagaaaaaaaagagatcatgtaaagttctaatgtgytgttgctaaatggcttatatagtaaatgctgtgccctagacaagcattagcagatgctggtgtcttcataacctatacagtggaactttggaatagtgctgaataaatcccagtgtaagactttttgtttgtatgaaaagtgtagtgaaagaaggagtagtaaatcatggtaatttctaatctctaattgaatattctaatgtaaatattctaatatcattatt

SEQ ID NO: 367254 - DNA, 583 bp, Homo sapiens
gactagataagacctactagggaaagagaaacatgcaaagggaagagggaaggagtgcatcttagattatcatctgcaactatttcattcttctgttttataatgagtctggtttggtatcgtgctaaacattttacatttacaatatcatttattactcaatagcacctctataaataagtctactgacctcattgcacaaatatgtaaagtaactttcaaaatgtcaaataagttgccctaaatcacatagctgtaacatgaaagagaaagattactcatctctaccttaaaaattccactatgctctttccactatgctctttgtrcaagatacatggtaaagtagtttgtgcatatcttcactttcccacccaaaatacattaagaaaagtaagattacccacggaggtaagaaagcagtatcaactacccatttccttcttctttctctctggttatggaaaatttactttccaaaggcaggcattctctcccaggaaggtcatgatttcagggtcctgaactgtgactattctctaggtccatgcatgtttgtgtctttctacaaggtcagacttgt

SEQ ID NO: 367255 - DNA, 583 bp, Homo sapiens
gactagataagacctactagggaaagagaaacatgcaaagggaagagggaaggagtgcatcttagattatcatctgcaactatttcattcttctgttttataatgagtctggtttggtatcgtgctaaacattttacatttacaatatcatttattactcaatagcacctctataaataagtctactgacctcattgcacaaatatgtaaagtaactttcaaaatgtcaaataagttgccctaaatcacatagctgtaacatgaaagagaaagattactcatctctaccttaaaaattccactatgctctttccactatgctctttgtacaagatacatggtaaagtagtttgkgcatatcttcactttcccacccaaaatacattaagaaaagtaagattacccacggaggtaagaaagcagtatcaactacccatttccttcttctttctctctggttatggaaaatttactttccaaaggcaggcattctctcccaggaaggtcatgatttcagggtcctgaactgtgactattctctaggtccatgcatgtttgtgtctttctacaaggtcagacttgt

SEQ ID NO: 367256 - DNA, 396 bp, Homo sapiens
  misc_feature (1)...(396): n = A,T,C or G
ctgggatgggtaggtggggggcaggggaaagcagggttgattaatgggtccgaaaagtaattggaaataatcaataagaccactatttgctagaacaacatgttaactatagtaaaaaataatttaactgtttatacaaaaataaccaaaacagtatcatggattgcttgaaacaaaggataaatgcttgagatgatgcataccccataycctgatgtgattatttcacattgcatgcctgtatcaaaatttctcatgtaacacataagtatatatacctactttatacccacataagttaaaataaaaaatttaaaaaaacaaattttatatggggaagcaaactaccctgaatagccaacacaatatgttaagatgtgtaaagctggannnnnn

SEQ ID NO: 367257 - DNA, 566 bp, Homo sapiens
tatgaaacaatcatctataatgctcatggattctgtggtcaagatttcagatggggcattgcagagatartttgtccctgctccattatgtctatggcctcaactgtgagacccaaagactagggcctcttttgaagggtcatttacttgcatatcttttgatggttgatgctggttgttgagattcagttcgtatccattgtgccttgacaagtggtctctccagagtggctggttcaggctagcccacagtatgatgaatgtctttcatagccatgtatcctgtgagagtaaaaaacaggtaggaaatgacatttttaaggcctagcatttaactcacatggaattcactttccactattttctatggagagaagcaattgcatcaccaactcagattccagagaagggaatagatttcacctgctgagtgaaaaagtatcagtcacatttttaaaataacatgtgagaagatatatatgaccatctttggaaaataaaatacactataaatattgatattaatttgtcatttatcagagagaaatggaaaattcttcatgtcc

SEQ ID NO: 367258 - DNA, 566 bp, Homo sapiens
tatgaaacaatcatctataatgctcatggattctgtggtcaagatttcagatggggcattgcagagatagtttgtccctgctccattatgtctatggcctcaactgtgagacccaaagactagggcctcttttgaagggtcatttacttgcatatcttttgatggttgatgctggttgttgagattcagttcgtatccattgtgccttgacaagtggtctctccagagtggctggttcaggctagcccacagtatgaygaatgtctttcatagccatgtatcctgtgagagtaaaaaacaggtaggaaatgacatttttaaggcctagcatttaactcacatggaattcactttccactattttctatggagagaagcaattgcatcaccaactcagattccagagaagggaatagatttcacctgctgagtgaaaaagtatcagtcacatttttaaaataacatgtgagaagatatatatgaccatctttggaaaataaaatacactataaatattgatattaatttgtcatttatcagagagaaatggaaaattcttcatgtcc

SEQ ID NO: 367259 - DNA, 596 bp, Homo sapiens
acgtcttaaaacacatcagaacaaattcagccttgacaggaaataactacctatcttgattaaygtaaatcggcaatagaagatagttcacagcctgtgctatgtttgccacatatttattaacatcaaaatctaaggctatattaacagtatgttactgctgctatgttagaaagaaaaatgggttgaaagttttaagaaactggtgtacatatctagtaaatatgcaactttaacttgactttttccaagtaaaaaggaatggacattacagaaagtctatctaggttagtcttaattcatattttcaatttaaatgttctgatttcctgatgcatacttaaaagtaactaaaaatattcatgtaaatccgaagtatggatggttttctttcagagaaagataatgtaacttaatattttgttttatacaaaatgttttctgtatatatttctaggtaatatacaaaatacatatgtcttagctaaatgtatatcttacataaatataaggctgctataattattataatttattaaatgttcaagtaatatatttaatggttttctattagcttatttgattatagcatattt

SEQ ID NO: 367260 - DNA, 596 bp, Homo sapiens
acgtcttaaaacacatcagaacaaattcagccttgacaggaaataactacctatcttgattaatgtaaatcggcaatagaagatagttcacagcctgtgctatgtttgccacatatttattaacatcaaaatctaaggctatattaacagtatgttactgctgctatgttagaaagaaaaatgggttgaaagttttaagaaactggtgtacatatctagtaaatatgcaactttaacttgactttttccaagtaaaaaggaatggacattacagaaagtctatctaggttagtcttaattcatattttcaatttaaatgttctgatttcctgatgcatacttaaaagtaactaaaaatatycatgtaaatccgaagtatggatggttttctttcagagaaagataatgtaacttaatattttgttttatacaaaatgttttctgtatatatttctaggtaatatacaaaatacatatgtcttagctaaatgtatatcttacataaatataaggctgctataattattataatttattaaatgttcaagtaatatatttaatggttttctattagcttatttgattatagcatattt

SEQ ID NO: 367261 - DNA, 596 bp, Homo sapiens
acgtcttaaaacacatcagaacaaattcagccttgacaggaaataactacctatcttgattaatgtaaatcggcaatagaagatagttcacagcctgtgctatgtttgccacatatttattaacatcaaaatctaaggctatattaacagtatgttactgctgctatgttagaaagaaaaatgggttgaaagttttaagaaactggtgtacatatctagtaaatatgcaactttaacttgactttttccaagtaaaaaggaatggacattacagaaagtctatctaggttagtcttaattcatattttcaatttaaatgttctgatttcctgatgcatacttaaaagtaactaaaaatattcatgtaaatccgaagtatggatggttttctttcagagaaagataatgtaacttaatattttgttttatayaaaatgttttctgtatatatttctaggtaatatacaaaatacatatgtcttagctaaatgtatatcttacataaatataaggctgctataattattataatttattaaatgttcaagtaatatatttaatggttttctattagcttatttgattatagcatattt

SEQ ID NO: 367262 - DNA, 571 bp, Homo sapiens
atgtttgctgagaatctttaaaataaataggtgcttgtcaggagcattgactgtggatacatagagagaaagaacaagcaaaggattttcttatcatagactgttattctcttgtttataattggcyttaaatttttttttaacccaaatgtccactggagatttgaactgcactctcaaactcccaaggagcctatcatttcctgtgggttctttcccctctttcattgagaagcattcacacccatattcattctcagagtctacagctggtaaaacagggcttaactcactttaaaaatgaaatatcatcataggctaagcaactgcttgttttgtttggtgagtagaagctaaagcagaatttctgtttttcacagtacaatagtttttctgtctgcacatgattaatgatacttagccaagaagaaaatgcttcaacttcatttgctggtatcctgtctcaaccttttaaaagctatgtttacattagagaacctgagggaaaatttgccctagtagttcctcatgtatttcttcatctgtttcatagagaatttaccagaaaaaa

SEQ ID NO: 367263 - DNA, 585 bp, Homo sapiens
ctcttttcgagttgtcataattaaaaaaataatactttatatgtgaaaaatctaaactcaataatctcttactattaacactgtcttggttaataagtmtttaaattagatagtgtgagtcctcaaattttgttctttttcaaacttgttttgattattccaaggccattctatttccatatacatgttttaaaacagcttatcaattattactaaaaagcgtgctaaaatttttattaagataatactaaatttatacattgattgaaaagaacccatcattgaattcatggtcatactaattgtttccaggaattttactcttttattcatctcagcaatgttgctgttgttttcagggtataggtatctcacatctttgttcaactttgtcactgactttttttgttttggatgctttaataaatcgtactttcagatttcaaaaataaaaaccccacaggtaaagagtagcaggctcttaccattcagcttccttagccatattttgttatctaaacaataacaaaaaatttaaaaatgcagttttctaaattaccaaacatagactcagactgaaatata

SEQ ID NO: 367264 - DNA, 585 bp, Homo sapiens
ctcttttcgagttgtcataattaaaaaaataatactttatatgtgaaaaatctaaactcaataatctcttactattaacactgtcttggttaataagtatttaaattagatagtgtgagtcctcaaattttgttctttttcaaacttgttttgattattccaaggccattctatttccatatacatgttttaaaacagcttatcaattattaytaaaaagcgtgctaaaatttttattaagataatactaaatttatacattgattgaaaagaacccatcattgaattcatggtcatactaattgtttccaggaattttactcttttattcatctcagcaatgttgctgttgttttcagggtataggtatctcacatctttgttcaactttgtcactgactttttttgttttggatgctttaataaatcgtactttcagatttcaaaaataaaaaccccacaggtaaagagtagcaggctcttaccattcagcttccttagccatattttgttatctaaacaataacaaaaaatttaaaaatgcagttttctaaattaccaaacatagactcagactgaaatata

SEQ ID NO: 367265 - DNA, 585 bp, Homo sapiens
ctcttttcgagttgtcataattaaaaaaataatactttatatgtgaaaaatctaaactcaataatctcttactattaacactgtcttggttaataagtatttaaattagatagtgtgagtcctcaaattttgttctttttcaaacttgttttgattattccaaggccattctatttccatatacatgttttaaaacagcttatcaattattactaaaaagcgtgctaaaatttttattaagataatactaaatttatacattgattgaaaagaacccatcattgaattcatggtcatactaattgtttccaggaattttactcttttattcatctcagcaatgttgctgttgttttcagggtataggtatckcacatctttgttcaactttgtcactgactttttttgttttggatgctttaataaatcgtactttcagatttcaaaaataaaaaccccacaggtaaagagtagcaggctcttaccattcagcttccttagccatattttgttatctaaacaataacaaaaaatttaaaaatgcagttttctaaattaccaaacatagactcagactgaaatata

SEQ ID NO: 367266 - DNA, 618 bp, Homo sapiens
acgtttcagcaagttacacaaatacaaaatttcatataagaaacacaacattctatttggagaacaagtttttacttctaaattaaaagtaatataaagtcaatgttaaakatgttatatgttgcttgtttacaccaaaaatacttaataggattgatttctctaaaatactgacattctagtggccagaatattacaagtgagataaattattaaaaaaaaagaaatcgtagttaaattggcctttgctaatcatctattagaatcaaatttctaagaacattgaataattgctatgtaaaatctatagtagagcactcttacatttattatgaatacatacacatacctgtgtagggtgcctatcagaacctgtgtatatggtagaaaaatttcaatgactttttaggtttaggtaattaatttaaaccaaaacattgactcttcattgcgaaattgggataaaaatagctaccttatgttgtagtgagaatttaattagataaggactaaaattctctagtttaatttctcatatgtaacatgttctaaatgttagtggatatattctatcaattcttttgacactggtactggaggcagggagctgggtggtag

SEQ ID NO: 367267 - DNA, 480 bp, Homo sapiens
aatctacatgctgctttattctwctatggctcagctggcatctaagctgcaatacgaagttcttcccactcttctccttttctcaagcataaggagtctctggggctaccacctgcccaggcctgcagcaagtactgcctggctactcctgatgttcgctcaagaccccacagctcttctatcagtttctggtgaaagttgccaggcctggctctctcccttaagggcagtaggcttcctgcctggcccaggacaggtccagaaatgccattcatgagccaaggtctggaatcagggaccccagaaacacacttggcactctacctcactgtggctgagctgctacccagactgcaagaaaaagtcttctatactcttccctctcttttcctcagtcagtccctcagtcccactgatggaaatatggtgggtcatacctgaaaccagcacagcactgggtctcattaaagaccacaggga

SEQ ID NO: 367268 - DNA, 480 bp, Homo sapiens
aatctacatgctgctttattcttctatggctcagctggcatctaagctgcaatacgaagttcttcccactcttctccttttctcaagcataaggagtctctggggctaccacctgcccaggcctgcagcaagtactgcctggctactcctgatgttcgctcaagaccccacagctcttctatcagtttctggtgaaagttgccaggcctggctctctcccttaagggcagtaggcttcctgcctggcccaggacaggtccagaaatgmcattcatgagccaaggtctggaatcagggaccccagaaacacacttggcactctacctcactgtggctgagctgctacccagactgcaagaaaaagtcttctatactcttccctctcttttcctcagtcagtccctcagtcccactgatggaaatatggtgggtcatacctgaaaccagcacagcactgggtctcattaaagaccacaggga

SEQ ID NO: 367269 - DNA, 607 bp, Homo sapiens
gtcccactgatggaaatatggtgggtcatacctgaaaccagcacagcactgggtctcrttaaagaccacagggagttctgtcagactaacactaatatttattcaaggctcaagaagcctttagtcagaaggcggtgaatccagccatgactggatctttcctttcaaaggcagtgggttctgttctggaccagagggggtcaagaaatgttgcccaggaactagggcctgaaatgggggttgtgggtagcctcagaactctgcctggtgctctattctactctggctgaggaggtattcaagttgcaagacaaagtcctctttactcttctctcttgtcccctcaagtggaagtaaaaagtctctcctggagctgagaactgtgctgcctgggttttttgggagctgggacgcaagtactcctttggccactccagctgtctcactagatcacaggcaccctatgtccatgtcccctggccccaagtctagcacaacaccaggacttgcccaggaatttcagtccttgtggcctagactccctttcaagtttatttaaaatgccagagcacttaagcagaaaggaatactccatcccagtggtcag

SEQ ID NO: 367270 - DNA, 580 bp, Homo sapiens
aaaggataaaaatcataaacaggggtaggtaaaagtatgtggatgtttaaattgttctaaaagcaggttaatttagattatcctctgagatakcttactttaaagaataaggaaattaaagtccatgacagaaatgcaaatggtgagcgaaagtgaggaaggaaaacaagatgaatacagaccacagtggtgtgtgtgtgtgtgtgtgtgtgtgtgtgtgtgtgtgtgtgtgttcagggatagggaaggtgttacaaatatttgaataccaactgaaaaactgcactgactcccttataaaaagttgagtcactcaactgggcggggtggctcatgcctgtaatcccagcactttgggaggccgaggcaggtggatcacttgaggtcaggagttcgagaccagcctggacaacatggcgaaattccgtctctactaaaaatacaaaaattagccaggcatggtggcgggtgcctgtaatcccagctatgtgggaggctgaggcaggagaatcacttgaacctgagaggtggaggttgcagtgagccgagatcacgccagtgcactccagcctggaagaca

SEQ ID NO: 367271 - DNA, 580 bp, Homo sapiens
aaaggataaaaatcataaacaggggtaggtaaaagtatgtggatgtttaaattgttctaaaagcaggttaatttagattatcctctgagatatcttactttaaagaataaggaaattaaagtccatgacagaaatgcaaatggtgagcgaaagtgaggaaggaaaacaagatgaatacagaccacagtggtgtgtgtgtgtgtgtgtgtgtgtgtgtgtgtgtgtgtgtgtgttcagggatagggaaggtgttacaaatatttgaataccaactgaaaaactgcactgactcccttataaaaagttgagtcactcaactgggcggggtggctcatgcctgtaatcccagcactttgggaggccgaggcaggtggatcacttgaggtcaggagttcgagaccagcctggacaacatggcgaaattccgtctctactaaaaatacaaaaattagccaggyatggtggcgggtgcctgtaatcccagctatgtgggaggctgaggcaggagaatcacttgaacctgagaggtggaggttgcagtgagccgagatcacgccagtgcactccagcctggaagaca

SEQ ID NO: 367272 - DNA, 576 bp, Homo sapiens
atttagatacatgtgactcaagtactgaaagctgctcagctcataatgtgaggggggagggaagagtaacattttgtaatgaaatcctcaaaagtagctctaaatgttggctgccttatgtcttaaatgacatacttcatatgatagaaaaaagtcaatgaaaagtttgatctggtatttattaggtaaaaatggcttcagatgtttcccagctaaatagaccatggcagaaaaattataatgaaagagcagaagagttgctatgggtgtttattccctagaaagccattagaataaaagtcaccctcactttttgctggcctctctctggtgcattaatgtcactctcaagtccctctctgagatggtggtgtttctgaccagccagaagtagttttagtgatgaacagattattttctgaaaaaaatgaagttgtcactaaaaataaggcctctgaataaaagaaactayttgtatctgataatgacacacacattttgacacctatacactgttttgcttccagatagatgtccatttaagtcaccctataatgccttcccccacatactact

SEQ ID NO: 367273 - DNA, 548 bp, Homo sapiens
ttttggagcaaggggaattcctagggattgtctaggatacacttctggttcaatacagaaaaataggacgatatccctttacacattttttacttrtgttcccaataagagatattttcctagaaaagcttatcaggcattttacccaggctaagtagaaccaaaagttctattctattaatgttaacataaagttaagtttagagctcttaataattgatgcatctttttaagtgactgttggctttaagaaagaagcagacacattttcacacttcactgacatcaccatttccacaagagacatctgcacactcctccctgactctgtgtcatatggtcaccattaaaggtcaccacaattggaaatctattcctaagaactaagaaggttatttaatcatctaggagaggagagctgtcagggctgagaataccaccatgaggaatttgggtcccctacaatcaagtgggtagtatgttattttcaagttcaaattttcttccatttagttctgttattttttaaaccgcaaatatattaatag

SEQ ID NO: 367274 - DNA, 548 bp, Homo sapiens
ttttggagcaaggggaattcctagggattgtctaggatacacttctggttcaatacagaaaaataggacgatatccctttacacattttttacttatgttcccaataagagatattttcctagaaaagcttatcaggcattttacccaggctaagtagaaccaaaagttctattctattaatgttaacataaagttaagtttagagctcttaataattgatgcatctttttaagtgactgttggctttaagaaagaagcagacacattttcacacttcactgayatcaccatttccacaagagacatctgcacactcctccctgactctgtgtcatatggtcaccattaaaggtcaccacaattggaaatctattcctaagaactaagaaggttatttaatcatctaggagaggagagctgtcagggctgagaataccaccatgaggaatttgggtcccctacaatcaagtgggtagtatgttattttcaagttcaaattttcttccatttagttctgttattttttaaaccgcaaatatattaatag

SEQ ID NO: 367275 - DNA, 580 bp, Homo sapiens
agagctcttaataattgatgcatctttttaagtgactgttggctttaagaaagaagcagacacattttcacacttcactgacatcaccatttccacaagagacatctgcacactcctccctgactcygtgtcatatggtcaccattaaaggtcaccacaattggaaatctattcctaagaactaagaaggttatttaatcatctaggagaggagagctgtcagggctgagaataccaccatgaggaatttgggtcccctacaatcaagtgggtagtatgttattttcaagttcaaattttcttccatttagttctgttattttttaaaccgcaaatatattaatagatcctaaataacattctgcatgaaatatttaaaggttttctaattttgctgtattaagtcaataatttgtgtgtatgacactagcagctagagattttccttgtgatcataatttcttgagtccagctttcaactaataacagggcagcagaaaatgaagccaaactactgaaccactaaaccaaacttcttgaggatagaaaagacaaggaaacaaagatgaatgatcccata

SEQ ID NO: 367276 - DNA, 580 bp, Homo sapiens
agagctcttaataattgatgcatctttttaagtgactgttggctttaagaaagaagcagacacattttcacacttcactgacatcaccatttccacaagagacatctgcacactcctccctgactctgtgtcatatggtcaccattaaaggtcaccacaattggaaatctattcctaagaactaagaaggttatttaatcatctaggagaggagagctgtcagggctgagaataccaccatgaggaatttgggtcccctacaatcaagtgggtagtatgttattttcaagttcaaattttcttccatttakttctgttattttttaaaccgcaaatatattaatagatcctaaataacattctgcatgaaatatttaaaggttttctaattttgctgtattaagtcaataatttgtgtgtatgacactagcagctagagattttccttgtgatcataatttcttgagtccagctttcaactaataacagggcagcagaaaatgaagccaaactactgaaccactaaaccaaacttcttgaggatagaaaagacaaggaaacaaagatgaatgatcccata

SEQ ID NO: 367277 - DNA, 577 bp, Homo sapiens
gctttaaattatcattccttccctttgtctacacccaacctgggcaaaccctccaaattataatgatccagaaagaggaccattattgtttttatctttgccacatgaatattgtgggtgaagcaaacagagaaaggccatgccaaaggccatcaccagggagattacagagtaattttgttcaaaattcccttcccccaccaaatatttctatactggggaaatctatttctacactggaaaaatttgagggccacaagcctcaaaacaggccctgatggtaggaccactgtagaaacagtgggcacaatagccaacaggtagaaacttcccagggaggaggtgtcacaaaagacatygaagctgctggcttgtaggtaccaaggtgtttacacacagaatgctaacttcagagccagctgctagctgctagctcctcctctccccagctgctctgcacagcacagagcctaaacaaactcaatttggcatacccaaagaaagcctctgaagtgggaaaaaaatctcccccttttcctgacgacagcagacatcatctcccaagtgagtagcccaa

SEQ ID NO: 367278 - DNA, 551 bp, Homo sapiens
tgtgatttttgtgtgggttgatttagcagttggtgaaatagtgagggaatggaaggcaagaaattctgttccatcaccagcatgatgtcctttatgctttgtgttcaaggactccacttctcggccatgtgtggggcgtggacaccttcggtgaggctgggagtccctgtgtgggggcgttgagagtagggagtcctggctactgagtccacggggggtaaaggctgtcacaaaaccctttccccttctacctgagaattttaccttcgaataatttctttctctgtttcccccagaaacctgacaaaggtagtatgtcaactgtgttattaggtatagtaactgatgtcaaaaatgactccttactggtaaattgcacctgkactgggagaactaaatgcctaagaggaagccatagctttgggcttggccgagagcagtgactcttgacacagggtatgtcccttgaggtgatgctgacagctgttgtggagttgttacaagacatattggctcctgtggggcatgaggctccggggctagggaggatt

SEQ ID NO: 367279 - DNA, 495 bp, Homo sapiens
catttggtgaacatcatcttattcatgcttatatatagacagacaggaataatttcataattatgagagtacgctattttaaaaaayaaaagtttaaattatgattttgtttgaatttaataacaagggaaaatatcttaaactctaggtaaatgctgaactctaggtaaaggtttctttgccacagaactcttaggttctgtaagatttcactaaaattaggaaaatagtttataaaaaacagtaagaaatcagagtattttttaaaactgcttgtttaaaatttagatattagatatgaaatccctactgtgaatgatgaagttgagtgctattcatatgttctgtcatctctttcttcagttctgaattttatgttgtttgtattttcgctttttcagggcatataatatttgctttctgtttaccagaagttagtctagctctatgtttagccttagttctatatttaaatggattcagtgcttaccatca

SEQ ID NO: 367280 - DNA, 584 bp, Homo sapiens
aaaagttttattagaatattttccttaaatcatttgtgttgatatgtattttattaatgctgacttaaaactttacatgataattttacacttattaacacatcacttrtcaaaataattagttcagagaaatctgataaaacatgggtgaaatgtatacaagtatttatattttattcctttggaaatgtcactaaaatgagagggatattaagcgttaagaaagagctaaatccaaagaacaaagattatgggtgaggcaacttcacaggtgagagatgtccacaacatttggatgacagaagcagatggataagtgggaactgacttaacagagtataaaacaaagactctgatgtgggtggcagacgaagccaccaaaaagcagcccagagtatgctgcaatgccctagaaagcccacagaattggaatcgccagttacctctgaaggcaaaggtagcgggtggcgctgaaaacagaaaacagattggctggatctccaccagctccaaccttgctacctctttgttaagaagaactgctacatgtcctttttttcctttttaaaatgtttacaaagatt

SEQ ID NO: 367281 - DNA, 584 bp, Homo sapiens
aaaagttttattagaatattttccttaaatcatttgtgttgatatgtattttattaatgctgacttaaaactttacatgataattttacacttattaacacatcacttatcaaaataattagttcagagaaatctgataaaacatgggtgaaatgtatacaagtatttatattttattcctttggaaatgtcactaaaatgagagggatattaagcgttaagaaagagctaaatccaaagaacaaagattatgggtgaggcaacttcacaggtgagagatgtccacaacatttggatgacagaagcagatggataagtgggaactgacttaacagagtataaaacaaagactctgatgtgggtggcagamgaagccaccaaaaagcagcccagagtatgctgcaatgccctagaaagcccacagaattggaatcgccagttacctctgaaggcaaaggtagcgggtggcgctgaaaacagaaaacagattggctggatctccaccagctccaaccttgctacctctttgttaagaagaactgctacatgtcctttttttcctttttaaaatgtttacaaagatt

SEQ ID NO: 367282 - DNA, 611 bp, Homo sapiens
ccccattcatcctcctccaaaaaaaataaagcttcttatgagtttaagctactatttttcaaatttctgtaactcacagccaaatacatcccctaaataatagattgtttaactcagggaggagttaggagtattttagggattgatcctgaccatggtttaaagtacctgggttctgaatctctattttgcactagtccactcttttcaatcaatgtgtggatgccagatcatcagaattacctgaggtgcttatttaaaattctgatttcttgctctcaaaatggatttgctgaatcagaatctctgggagttgacctctttaaaaagtccccatggaggctcttatggccattgaaatctgagaaccactgcagccctttacgttatttacactgtttctctgaaattaattgttccgtttgaacagtctttatcacttaaggtggatcattcacctcacattctgttgatgctgtagttaaccctgtttaactccattgattaagcaaaatctgtttccctaacagtgaaaaattttatctytcttacattgagtctttacagatttgaaaagctacctggtaacctagtctagatttttattttac

SEQ ID NO: 367283 - DNA, 567 bp, Homo sapiens
agctgaattaatggaatcttacagcaacatgtgttttctatttggatgctatcagaagaagttgttattgtgtgggaaatgatggatcaattttacacattagcccaaagcagacttgacaaaaacatccctgactgagtcagccagagacacaatggttgcccctgcccccaactcatattcagaaagaaactctgagatctaggtctctcctgagaagatgggctgtcatagtaaccaacaccaaacttctaaatgttgtgagctagaccasgataagcaatggcactgaaattacttcctaacatttgacaatagcatgtgtgattggagaactggcatcagtgcagctctctccctattcagaggcagagaatgaacataaacagaaaaatattggttagataactaaaaataatagaatcttggaataaaatatccagttgtcagtaggatatatttacacccataagtgaatttcttcaaggttgcttgctcatccaagattagattgcagctatgccaaagtctcatttttcatggcgcgctcccatccccctgccacca

SEQ ID NO: 367284 - DNA, 615 bp, Homo sapiens
cccacacttgtcccattgttaccctgatgcttccaagctccccttcttattcaccacggggattgcttaagagtactcrggtgtcctccagcttcatttcacattctccaaccatcgctctggtgaccctttgacctgggttcgagccccacatatgggcatgacttgctgagaccagcacagttgtggaggccctaatccagcagtgctagaggaattaaagacacacccacagaaatatagagtgtggagtgggaaatcagggggctgacagccttctgagctgagagccacgaacagagatttgcccacatatttattgacagcaagccagtgataagcattgtttctatagattatagaatagctaaaagcattccttatgggaaacaaagggatgggccaaaacaaagggatgggttctggctagttatctgcagcaagaatatgtccttgaggtacagatggctcatgctattgtttgtgacttaggaacaccttaagcagttttcagccctgggtgggccaggtgtttcttgccctcattctggtaatcccacaaccttcagtgtgggcatcatggccattaggaacatgtcacagtgctgcagagaa

SEQ ID NO: 367285 - DNA, 639 bp, Homo sapiens
tgtgaaaatctttaaggcaaagacttcatcttctttcatcttgagtctaatcctctagcatggtgcctggcacataacacaggctcaatagacatttgttgaactgaattgaatctatttatagaacagtttgtttaactaaatttattctaaagtgattcccaagtttccactagtccaagaagaatgctactttatgtacagcttcctgaaggagacattaatatgtattttttatgaaagcagtttctgatttgtgttgcagtgatagatttcagcatctgatgataggtttcagtgataggagagtgataccacgtatgtaattcacaaaaggcgtaacgtgtaacgctcagcaattggctgagtttagggacataagctcatctccaggctaccactacacacgtgactgagttttaccttgtgtttttggttttctgctttgcaaaagaaaacaagtcactgcttctttctacctaacaggagggaccagaaaacctaccctgcacaaccagatcataaaaggwgagtttttaattgataagggctcatcctctcaaagagttctttcacttacatagtcattccaattactaataactaaatctgcaaaataaatgtagaaataacagctga

SEQ ID NO: 367286 - DNA, 536 bp, Homo sapiens
caagttcaaagcctcatctgagacaaggcaagtttcttccacctaggagcctgtaaaattgaaagcaagttagttacttcctatatgcaatggaggcacaggtattgggtaaatacagccattccaaatgggagaaattgtccaaaacaaaggggctataggcccttttcaagtccaaaatccaaagatgcaataattaaatcttaaagctctgaaatmatctcctttgactcattgtctcacatccaggacatcctgatgcaaaaggtgggctcatagaaccttgggtagctccaccactgtggctttgcagggaaattcctcctcctggctattttcatgggttggcattgagtgtctgtggcttttccaggcaaacagttcaagctgttggtggatctaccattctggggtctggaggatggtggtccttttctcacagctccactaggcagtgtcccaatgggaattctgtgtgggggggtccaaccccacctttctcttttgcactgccctagctgaggttctccatgagg

SEQ ID NO: 367287 - DNA, 523 bp, Homo sapiens
agcagggggtccctggccctggcccttgaaaccattttttcctcctaggccttcaatcttgtgatrggaggggctattctttgacatggcctggagacattttccccattgtcttgtggattaacattaagctcctcattacttaagtaaatttctgcagccagtttgaatttttcctcagaaattttctattgcatcctcaggctgcaaactttccaaacttttatgctctgcttatcttttaaacataaattctaattctaaaccatatctttatgaatacataaaactgaatgattttaacagcacccaaattacctcttgaatgctttgctgcttaaaaattttttctgacaaataccctaaatcatctctctcaagttcaaatttccacagatctctagggcagaggcaaaaagccatcagtctctttgctaaagcatagcaagagtgacctttaccccagttcccaacaagcttctcatcttcatctgagaccacctcagcctggacttcactgtct

SEQ ID NO: 367288 - DNA, 523 bp, Homo sapiens
agcagggggtccctggccctggcccttgaaaccattttttcctcctaggccttcaatcttgtgatgggaggggctattctttgacatggcctggagacattttccccattgtcttgtggattaacattaagctcctcattacttaagtaaatttctgcagccagtttgaatttttcctcagaaattttctattgcatcctcaggctgmaaactttccaaacttttatgctctgcttatcttttaaacataaattctaattctaaaccatatctttatgaatacataaaactgaatgattttaacagcacccaaattacctcttgaatgctttgctgcttaaaaattttttctgacaaataccctaaatcatctctctcaagttcaaatttccacagatctctagggcagaggcaaaaagccatcagtctctttgctaaagcatagcaagagtgacctttaccccagttcccaacaagcttctcatcttcatctgagaccacctcagcctggacttcactgtct

SEQ ID NO: 367289 - DNA, 419 bp, Homo sapiens
agcaccccattctccacagtaccacttcactgtattagtcttttctcatgctgctattaataactgtctgagactgataatttgtaaataaaagaggtctaattgactcacagttctgtatggctcgggaggcctcaggaaacttacaatcatggtggacaaggaagcaaacacatccttcttcacatgatggcagcaaggagaagtgccgagcaaagaggsaagagtcccttataaaaccatcagatctcaagagaactcgctcactataatgagaacagcagcttgagggcaaccactcccatgattcaattacctcccaccatgtccctcccataacacatggagcttatgggaactacagtttaagatgagatttgagtggggacaccgccaagccatatcagtaattatgtata

SEQ ID NO: 367290 - DNA, 419 bp, Homo sapiens
agcaccccattctccacagtaccacttcactgtattagtcttttctcatgctgctattaataactgtctgagactgataatttgtaaataaaagaggtctaattgactcacagttctgtatggctcgggaggcctcaggaaacttacaatcatggtggacaaggaagcaaacacatccttcttcacatgatggcagcaaggagaagtgccgagcaaagagggaagagtcccttataaamccatcagatctcaagagaactcgctcactataatgagaacagcagcttgagggcaaccactcccatgattcaattacctcccaccatgtccctcccataacacatggagcttatgggaactacagtttaagatgagatttgagtggggacaccgccaagccatatcagtaattatgtata

SEQ ID NO: 367291 - DNA, 602 bp, Homo sapiens
aaagagctgatattcaggctgcatcctagaaaaactatcagatactcaggatgtgacccaggtctttgtattcttcttgaatttcccagawgattccaagatttagagaacaaaggttgcacctcactgctatgattgaaactgacctacatgaaaaacacatgactggaaaaaagcctatggtggcagcagtagcatattagaatagctttggtatcattcctcaggaggttgaaatatctcttatggcccatacatgggttatgacaggagctaagttttaaaatcacattaatcaattgtaaactctttagagtgtatttattgggtttagggtgaaaacaagtatcagatttggtatgtatagaaggaaagcatgggagctgaattaaatactgcaaacggcataagaaccaccttcatttcatggtgggagggtggaacttttcttccagatagccaggtacaagagaaaacacagcagatgtactttgcattgaataaagactacacatcctccttaatcaccacctttcctttttatggagtaagtgtgaattattgtcagtttcatcatttgtaatcagtggctgaaacagatg

SEQ ID NO: 367292 - DNA, 325 bp, Homo sapiens
aatccccacacgtatggcataatatctggctctcatcacataatttgtggagtatgaagcacagggaaacaagtacagttattgctttaaataataactttgatcaccactccagaaacctcatgtttgatttctggataaaagtaaatgactattgatattaaagacttaccaagagtttgtctatttataacattctggtctttactcttcatcaatactttgagagtattttgttatcgtatcattcccatttttatatttaaaaaaygccatcaatccaattcttgatcttttatatgtaatcatgtgtttctgtaagctt

SEQ ID NO: 367293 - DNA, 448 bp, Homo sapiens
atctctgggtaggtgggggaaatgaatctggcctttattctccacctgagaaaatgagcttgtaatgacagtatcagtgtggagttttaggagctaaaattagatagctcctaaaggttataattggcatgtgattgtttatggaaagccagcaaaagatttatttctgaaagacctgtggaggcagtccttcagcagatgctggaggccttttacctatccatagggatctggctgagacatagtattagtaacagatattcgtttggaaaagagtactgcaagactcagccttttttccttttgcataagaagtttgggggatcctgagactgtttaattttcctttgcacatcttaatatggaatattgcyccaagattttttaaattaaactgtttattttttatacagatagatcttatgtattgtgctttacttcgctttgc

SEQ ID NO: 367294 - DNA, 574 bp, Homo sapiens
tataggtggtagacaggtcttttagaataacmcagtcagataaaaataaagcaaaaagaatttacaaagactttgagaaatacgggactatgtaaagcatccaaacatatgatttgcaggtattcttaagggagaagaagaaaaagtaaaaagtatgaaaaaccaggtaaggcaataattcaggaaaacttccctggtcttgctagagatctagacattcagatacaataaactcagagaactcctgaaggatacattgcaagaatctcaccaaggaatatagtcatcagagtatccaaagtaaacatgaaccaaaaagtgctaacagtggcaagagagaagcatctaatcacctatgaaggaaatctcatcatactaacagtggacttctcagctgaaacattatatgccagaagagaccggggtcctgttttcagtcttcttaaagaaaacaaatgccagccaagaatgttgtattctgctaaactaatcttcactaattaaagagaaataaagtctttttaaggtaagcaaacactaagaattcatcaacactagactcgtcctgtaagaa

SEQ ID NO: 367295 - DNA, 551 bp, Homo sapiens
ttatatagatgagcaaagaaagtggtttcttgagatggaatttactcctgatgaagatgctttgaacactgttgtaattacaacaaaatacttagactattacataacactagttgacaaaatagtgacagggtttgaaaggtttgactctaattatgaaaacagttctagtgtggrcaacatgctatcaaacaaaaccacatgctacagagaactattttgtgaaaggaagagtcaaactttttcattgtcctattttaagaaactgccacagccactcccaaattttcagcatccaccactatgattagtcagcagccttcaacatcaaggcggaagtctccacttgcaaaatgagtacctctctttgaaggaccaggtgtagtcagacaaaactgaaaacctaacttagtagtgtgcacctgtaacaatagctgaatgttggccaatcccagcagccatgtttcagccactcatagactgctgaatgtgcaaactgcattcaaataaggcaaacaccgagttgtaactgatctcactgtttctgttcc

SEQ ID NO: 367296 - DNA, 596 bp, Homo sapiens
ttgatctctcagagtgcctggagatggtaggtaagttcccacttggggttcagagctccacggatttgtgttttcaactcttctagtttccttgagcaaacttctgatccaaactgggtttggagtcatgacagaaactggactggayccaggaatggatttgacccaggaattaactgatttgcatccagttagaggcctcttacctctgactgggtcagaaaggaactgatagtaagcaatcatgttgcaggggttataaatttttggcttttgacaattcacagggatttttgtgttctatccctttgttttatttttcttgcgtgcttaggtaggaaaaaaatacattggctaagttaatcaagagaacctgagaggaaagccaatattttaggtaaaaatggcattcttaatttctgaaaaactgagtttcttctggcttctacataaggtcagggaggcagcaaagtcttacagaaatggcaaaatcttactaaagataacttacagtgcaaagttctgaatgaataacaatgcattgaagtacctttaaaaatgaggacttttggtaaagtccctttcgtttaagaacg

SEQ ID NO: 367297 - DNA, 541 bp, Homo sapiens
gatatcaattaaacaattaactatacacacacaccccaaagaaaacaccttcataagaacaaaaatcaaatgagcattcacagtacctggtttttaactttatatccctgaaagagacactgaagaggtaggacaaacactcttgaatcaccaacayacccctcccccatcctccagcagcagtaacatggcatggagagtaatgctgtgcactagggagagggagattacagcaactgtgaggcactgaactcagtgctgcagtgtcatagtagaaagcaaaaccagtccaagctcagcagacacccacacatgaaggcagtatttaaactagccctagccagaggggaatcaccaagcccagtggttggaacttgtgtgcccccaagtcttgccatcacaggctatactgctgtggcactcaaacttaacaggaagtctaggacacaaagattgcaataactaggcaaatcctagtgctgaacagggcccagagccagtgcaatgggggaacacagcctactaagacaccagctgggga

SEQ ID NO: 367298 - DNA, 541 bp, Homo sapiens
gatatcaattaaacaattaactatacacacacaccccaaagaaaacaccttcataagaacaaaaatcaaatgagcattcacagtacctggtttttaactttatatccctgaaagagacactgaagaggtaggacaaacactcttgaatcaccaacatacccctcccccatcctccagcagcagtaacatggcatggagagtaatgctgtgcactagggagagggagattacagcaactgtgaggcactgaactcagtgctgcagtgtcatagtagaaagcaaaaccagtccaagctcagcagacacccacacatgaaggcagtatttaaactagccctagccagaggggaatcaccaagcccagtggttggaacttgtgtgcccccaagtcttgccatcacaggctatactgctstggcactcaaacttaacaggaagtctaggacacaaagattgcaataactaggcaaatcctagtgctgaacagggcccagagccagtgcaatgggggaacacagcctactaagacaccagctgggga

SEQ ID NO: 367299 - DNA, 593 bp, Homo sapiens
ggcactcaaacttaacaggaagtctaggacacaaagattgcaataactaggcaaatcctagtgctgaacagggcccagagccagtgcaatgggggaacacagcctactaagacaccagctggggaagctaagggagggctagcatcactcctcccctattcctaggatacacaactcatggctccaaaagaaacaccttccttctgcttcaagagagaaaagagaagagtggggaggatgttgtcttgaatcttggataccagctcaaccacagtgagagaagacaccaatcagagtcatgaggctccctttccatgctctacctcacagatgacatttctagatayaccctgggccagaagggaactttctgccttgaagaaaatgatccagtcctggcaggattaatcacctgctaactgaagaaccattgggtcctgaataaccagcagcaatacctaggaatacatagaggaccttgtgtgagactctgtgactagatgacttcaggtgagactcagcacactcctagatgtggtggctatggagtgagaatctttctgcataagaaaagatgataaagtaacaggggc

SEQ ID NO: 367300 - DNA, 608 bp, Homo sapiens
aaattgaaatgaagaaaacaatacaaaagatcaattaaacaaaaagtgtttttttaaagttaaacaaaattgacaaacttttagccacacaaaccaagaaaaaacaaagaactaaataaataagagctcaaaaaggaaacattacaactgatactgcagaaattcaaaggatcactagtggctactatgagcaagtatatgctaataaattggaaaatatagaagaaatgaacaaattcctagacacatacaacctaccaagattgaaccatgaagaaatccaaaccctaaacagaccagtaacaaacaagattgaatctgaaaatcctgggaccctatgaattcactgctgaattctaccaagcacttaaagaagaataaatatccatcctacttaaaygattccaaaaaacacaggaggacagaatactaccaaactcatcctatgagcccattattaccttgataccaaaattaaagacacatcaacaaaggaaaactacaggccaatacctctgattaatattgatgcaaaaattctcaacaaaatacttgaaaccaaattcaacaaaacaataaaatgatctttcatcatgaccaagtgagat

SEQ ID NO: 367301 - DNA, 481 bp, Homo sapiens
atttttatatgacaatattgaacaaatctgaaaaataaatttaaaagtaaccccatttactacagccataaataaaattaaatmcctaggaattaacaaaagaagtaagagatctttaaaatgagaactataaaaccccaatgaaagaaattgagtgggatcccaaaaaccaaaatgattttcagtgttcatggattaaaaaaatcaattttattaaaacatccatacaggctgggcacggtggctcacgcctgtaatcccaacactttgggaggccaagagggtggataacgaggttaggagttcaagaccagcctgaccaagatggtgaaaccccatctctactaaaaagtacaaaaattacagcatgcctgtaatcctacctacttgggaggctgaggcaggagaatcacttgaacctggggggcgggggttgcagtcagcagagattgggccactgcactccagcctgggtgacaga

SEQ ID NO: 367302 - DNA, 481 bp, Homo sapiens
atttttatatgacaatattgaacaaatctgaaaaataaatttaaaagtaaccccatttactacagccataaataaaattaaatccctaggaattaacaaaagaagtaagagatctytaaaatgagaactataaaaccccaatgaaagaaattgagtgggatcccaaaaaccaaaatgattttcagtgttcatggattaaaaaaatcaattttattaaaacatccatacaggctgggcacggtggctcacgcctgtaatcccaacactttgggaggccaagagggtggataacgaggttaggagttcaagaccagcctgaccaagatggtgaaaccccatctctactaaaaagtacaaaaattacagcatgcctgtaatcctacctacttgggaggctgaggcaggagaatcacttgaacctggggggcgggggttgcagtcagcagagattgggccactgcactccagcctgggtgacaga

SEQ ID NO: 367303 - DNA, 481 bp, Homo sapiens
atttttatatgacaatattgaacaaatctgaaaaataaatttaaaagtaaccccatttactacagccataaataaaattaaatccctaggaattaacaaaagaagtaagagatctttaaaatgagaactataaaaccccaatgaaagaaattgagtgggatcccaaaaaccaaaatgatwttcagtgttcatggattaaaaaaatcaattttattaaaacatccatacaggctgggcacggtggctcacgcctgtaatcccaacactttgggaggccaagagggtggataacgaggttaggagttcaagaccagcctgaccaagatggtgaaaccccatctctactaaaaagtacaaaaattacagcatgcctgtaatcctacctacttgggaggctgaggcaggagaatcacttgaacctggggggcgggggttgcagtcagcagagattgggccactgcactccagcctgggtgacaga

SEQ ID NO: 367304 - DNA, 481 bp, Homo sapiens
atttttatatgacaatattgaacaaatctgaaaaataaatttaaaagtaaccccatttactacagccataaataaaattaaatccctaggaattaacaaaagaagtaagagatctttaaaatgagaactataaaaccccaatgaaagaaattgagtgggatcccaaaaaccaaaatgattttcagtgttcatggattaaaaaaatcaattttattaaaacatccatacagrctgggcacggtggctcacgcctgtaatcccaacactttgggaggccaagagggtggataacgaggttaggagttcaagaccagcctgaccaagatggtgaaaccccatctctactaaaaagtacaaaaattacagcatgcctgtaatcctacctacttgggaggctgaggcaggagaatcacttgaacctggggggcgggggttgcagtcagcagagattgggccactgcactccagcctgggtgacaga

SEQ ID NO: 367305 - DNA, 521 bp, Homo sapiens
gtgggtgttggagagaattggatccagctatgtaatgaagaagtcaaaatgccagagataaaccagggaaagcatgaaaaagaggaatagtgagggaagaagtcttgtcttactggtgttgggccatataccagtcactttyaatcactataatattaacatgagaataaacaagtcaattgcaaagaacagaaaaacctgtaaatcaaccttatatatttgaaaatgtaatatgtacaaatgggtaaaaatgttacttcatttgagcaagaagggtaaagagtttattcaatagatgctgttggcacaagggtcatcaatatgaaaggaagtgaagttgaatatttttctcacatgatgtgcagtaattgtgtctaaacaaaacttacaataaataaataaataaataaataaataaagtagattttaacagggaaaggggagaagattttaatgttgaatcaaatctgaatatctggcaatgaatgttatgtatgtctagttgagttttcatttcagac

SEQ ID NO: 367306 - DNA, 599 bp, Homo sapiens
cagccataagtaattttgtattctcttacctcacatcmtgcttctgcatcagcctcttgcagttataagtagcagctgattagtagaccaagaaagggagtgaaaaacagagaagctgcctacaccttcctttcgtttgcattacagtgtcctgcttaaggtgaggccaggatgagggaagagaaacgtcttaactagatgagaatttagacttctaattgatatgttttggatctgtgtccccaccaaatctcattttgaattgtaatccccagtgttggaggtggggccttgagggaggtgactggatcatgggggtagtttctaatggcgtagcaccatccctctagtgctgttctctggagatctggttgtttaaaagtgtgaagcccctgcccactttctcttttcctcctgcgctggccatggtaagactccctctcccgctttgccttttgctgtaagtaaaagcttcatgaagcctcccccaccaatcttcctgtacagcctgtgaaactgtgaaccaattaaatctattttctttgtaaattacacagtctcaggtatttctttatagcaagcaagaacagactaataca

SEQ ID NO: 367307 - DNA, 599 bp, Homo sapiens
cagccataagtaattttgtattctcttacctcacatcctgcttctgcatcagsctcttgcagttataagtagcagctgattagtagaccaagaaagggagtgaaaaacagagaagctgcctacaccttcctttcgtttgcattacagtgtcctgcttaaggtgaggccaggatgagggaagagaaacgtcttaactagatgagaatttagacttctaattgatatgttttggatctgtgtccccaccaaatctcattttgaattgtaatccccagtgttggaggtggggccttgagggaggtgactggatcatgggggtagtttctaatggcgtagcaccatccctctagtgctgttctctggagatctggttgtttaaaagtgtgaagcccctgcccactttctcttttcctcctgcgctggccatggtaagactccctctcccgctttgccttttgctgtaagtaaaagcttcatgaagcctcccccaccaatcttcctgtacagcctgtgaaactgtgaaccaattaaatctattttctttgtaaattacacagtctcaggtatttctttatagcaagcaagaacagactaataca

SEQ ID NO: 367308 - DNA, 537 bp, Homo sapiens
agccactgtttcaggttcaaagaataaattagtacaaacacacacatacacacatacatacactacacagaaaaagaaaaggtccttaccctcaaggaacttaccagtgaaggaagataggagataaataaaatcagtgaattatttattaaaaggcaggaaaatatggcacaaagaatacgcaatgctggggcggaagtgaggtttaaaaatgtaaataaracggtaaaaaaaaaaagacgagtgattggaaaagctatggaatttacttgagttttaatcaagaggcaggaaagaatatttcgtaggctgaatttagtaaggactggcaagaaagaataaagtatggtattgagtacaaactggctcactttactaatatgattataatataatttaaggacaagagcatccagaacaaaacttcacaattgccaaaatcctgtatgtttaaaatgtgctcgtttgatattccatttacactcaggggaaaaaaaaattctctacttgcagggaccaatctaaaggccttagtag

SEQ ID NO: 367309 - DNA, 537 bp, Homo sapiens
agccactgtttcaggttcaaagaataaattagtacaaacacacacatacacacatacatacactacacagaaaaagaaaaggtccttaccctcaaggaacttaccagtgaaggaagataggagataaataaaatcagtgaattatttattaaaaggcaggaaaatatggcacaaagaatacgcaatgctggggcggaagtgaggtttaaaaatgtaaataagacggtaaaaaaaaaaagacgagtgattggaaaagctatggaatttacttgagttttaatcaagaggcaggaaagaatatttcgtaggctgaatttagtaaggactggcaagaaagaataaagtatgktattgagtacaaactggctcactttactaatatgattataatataatttaaggacaagagcatccagaacaaaacttcacaattgccaaaatcctgtatgtttaaaatgtgctcgtttgatattccatttacactcaggggaaaaaaaaattctctacttgcagggaccaatctaaaggccttagtag

SEQ ID NO: 367310 - DNA, 537 bp, Homo sapiens
agccactgtttcaggttcaaagaataaattagtacaaacacacacatacacacatacatacactacacagaaaaagaaaaggtccttaccctcaaggaacttaccagtgaaggaagataggagataaataaaatcagtgaattatttattaaaaggcaggaaaatatggcacaaagaatacgcaatgctggggcggaagtgaggtttaaaaatgtaaataagacggtaaaaaaaaaaagacgagtgattggaaaagctatggaatttacttgagttttaatcaagaggcaggaaagaatatttcgtaggctgaatttagtaaggactggcaagaaagaataaagtatggtattgagtacaaactggctcactttactaatatgattataatataatttaagracaagagcatccagaacaaaacttcacaattgccaaaatcctgtatgtttaaaatgtgctcgtttgatattccatttacactcaggggaaaaaaaaattctctacttgcagggaccaatctaaaggccttagtag

SEQ ID NO: 367311 - DNA, 569 bp, Homo sapiens
tttcaagtagaatcttaatatcaataagtatttaagttctcactgtatgccaggcatgytgttatgtgcacatgataacaaacttgaattaacccatgagtgttcctctcaatggggccacacagtcatgaaagtgaccaaagagtaaaataaataagccccaaaattcattgaaataagttgtcattagtcttataaagacattctatgaaaagaaaagagtaacatggataggagacaggacacaagggatggtgacaactgaacttggtcatttcaaccctgtaacttttttctgattaataaatatacataaaaaagtggaaatatagaaatatgtaaagaagataagtaaaatatcactagtaatcccacaatctaaacaaagcagacctgccccatcctgccccatatgtatgtatacgtatatcaaatatatgaatgtgtgtgccgatctaagtaaccagagagagaatctttaaaagaaaagatatttgtttgggaataaagattgtagtgggaatatgcatgccatagaaatctagatatgtattcagggaggtaaagaa

SEQ ID NO: 367312 - DNA, 575 bp, Homo sapiens
cacaggagacaaatgaattgcttaagagattgagagatataacaagagcaaaggatctgaatagatatttctccaaaacagaaaaatgaatagtcaataattacataaaaggatattcagtattattagccatcagaagactgcaaagccaaacctcaatgagataccactgcgtacctatttagaggattataagaaaacaaaaagacagctaataactgttgccaaggacatggaaaattaggatcttcacatattgctgatgggaatgtaaaatggtgcagtcactttgtgaaacagtctggtagtttctcaaaagattaaacatagagtgtcatataacccagtaattatggtcatagatatgtactcagcaaataaacatakaggttcatgtgaaaccttgtacacagattttcatacattattcatgatggtcaaaaattggaaatgattgaactgttcatcaattaattgataaataaaatgtggtatagccccaaaatattattcagcaataaatagaaataaaatactgatatatgctacaacatagatgaaccttaaaagcatta

SEQ ID NO: 367313 - DNA, 575 bp, Homo sapiens
cacaggagacaaatgaattgcttaagagattgagagatataacaagagcaaaggatctgaatagatatttctccaaaacagaaaaatgaatagtcaataattacataaaaggatattcagtattattagccatcagaagactgcaaagccaaacctcaatgagataccactgcgtacctatttagaggattataagaaaacaaaaagacagctaataactgttgccaaggacatggaaaattaggatcttcacatattgctgatgggaatgtaaaatggtgcagtcactttgtgaaacagtctggtagtttctcaaaagattaaacatagagtgtcatataacccagtaattatggtcatagatatgtactcagcaaataaacatagaggttcatgtgaaaccttgtacacagattttcatacattattcatgatggtcaaaaattggaaatgattgaactgttcatcarttaattgataaataaaatgtggtatagccccaaaatattattcagcaataaatagaaataaaatactgatatatgctacaacatagatgaaccttaaaagcatta

SEQ ID NO: 367314 - DNA, 608 bp, Homo sapiens
ggttttgttgtacagattattgcatcacccaagtattaagcccagtactcatgaattatttttcctgatcctctccctcctcccaccctccaccctccaataggcccagtgtgtgtttttctgttctatctgtccatgtagtctcatcatttacctctcacttataagtgaggatatgtggtatttggttttctgttcctgagttagtttgctaaggataatggcctctagctccatccatgttcctgcaaaggacatgatctcattattttttaatggctgtatagtatcccatggtatatatactacattttctttatccagtctatcagtgatgagcgtttcggttgattccacatgtttgctaytgcgaatagtgctgcagtgaacatacagatgcatgtgtctttagaatagaataatttatattcctttcagatatacccagtaatgagattgctaagtcaaatggtatatatgtctttaggtctttgagaaattgtcacactgtcttccacaatggttgaactaatttacactcccaccagcaatcctttttctccacaaccttgccagcatctgttatttattgacttttaatactagcc

SEQ ID NO: 367315 - DNA, 608 bp, Homo sapiens
ggttttgttgtacagattattgcatcacccaagtattaagcccagtactcatgaattatttttcctgatcctctccctcctcccaccctccaccctccaataggcccagtgtgtgtttttctgttctatctgtccatgtagtctcatcatttacctctcacttataagtgaggatatgtggtatttggttttctgttcctgagttagtttgctaaggataatggcctctagctccatccatgttcctgcaaaggacatgatctcattattttttaatggctgtatagtatcccatggtatatatactacattttctttatccagtctatcagtgatgagcgtttcggttgattccacatgtttgctactgcgaatagtgctgcagtgaacatacagatgcatgtgtctttagaatagaataatttatattcctttcagatatacccagtaatgagattrctaagtcaaatggtatatatgtctttaggtctttgagaaattgtcacactgtcttccacaatggttgaactaatttacactcccaccagcaatcctttttctccacaaccttgccagcatctgttatttattgacttttaatactagcc

SEQ ID NO: 367316 - DNA, 591 bp, Homo sapiens
ggagctgtttgtttttttctttaaaaaaaaaaaaagaaactaagaaaatagactgctagctagactaataaataaaaaagattaaataaacacaaycagaaacaacaaaggggatattaccactgaccccacagaaatacaaacaaccatcagagaatattatgaataccactatacacataaactagaaaatctaaaagaaatgaatagattcatgattgcatacaccctcccaaagactgaatcaggaagaaattaaatccctgaacagaccgcataatgaattctgaaattaaggcagtaataaatagtctaccgaacaaaaaaagcccaggaccaaagggatttactgctgaattctgccaaatgtacaaagaagagctgaaatcattcctacagaaactactcccaaaaaattgaggagaaggcactcctttctcactcattctatgaggccagcatcatcctgatatcgaaacctggcagagatacaataaaaaaggaatgcttcaggccaatatccttgatgaacatcaatgcaaaaatccttaacaaggtgctggcaaagcaaatccagcagcacatcttttt

SEQ ID NO: 367317 - DNA, 546 bp, Homo sapiens
cagaatttttatggtgccataattcttgtgttggtttcttcttatctggagattctggcacttctgatttttgtaattatttttgtacaggtaggaatttttcttttactttatttctttataaacttagtggttttctgtctctttctctttcccttttccccctccctagggggtgtgactatagagaatgttgggtaaggtagagaatgttgggtaaggtctttttgcttttgcacttcttttggtgggttttatacttatctktgcagtccaacctacaagccagtagatggtatttatggataagaactggatggggctaatatggctgggtatatacctgagccttgtttactgagagaaggtctctgttgcctcaggcaatggactgatctgtggattgcacagtggtttgagctccctgttcagccctggggagtgaggactatgatgggcaggtccagactaggcatgcccacctgcaggacccttgatgacaggcacaagcactagtgctaaagaagaatctaatgggtggcctcc

SEQ ID NO: 367318 - DNA, 594 bp, Homo sapiens
ttgtttatgtttttcttttataaaaaataattgccataaattgtgacaggctgccttttcaacacttttcatttaaatgctcattaactcatttgggataattaaaatgttcccaatgagaaagtcagctttttacgtgaagcatacaatcttgtttttgaaattccagaaaaatgcttagggaacaccaattgcaacttaacatttgtcctgtggctttaagggaagaaagcagtttctgttaaataaaaactttaattcttttgacccagcacacagttagtctcctaccctaaatttgtctctatgatttaatattttgccttcttagcaaatattttgaaacaagtagtaaaagagataatttttgttaaaatactttcatgaaaatgattaaacatgatttggaagaagaagaaactaatctgtgtagtttaaaaggatgaggtggcttttgtatgattataaagttttaacagtttaaattgagagaacatttgtcaaaaagccaacattcagaacacttaaacatttcttattaactctggttaacccwattaactatttcaatggaaataaaaacaacctattctc

SEQ ID NO: 367319 - DNA, 643 bp, Homo sapiens
aaacatttctgtagtgatgaaaatggaaacaatgtataatggggagaaaaagacagaaacataaaaaataaaaatcatttatttaaacaaaaatatacacacagtgtacaatgaatatggtttacacagaacaataaaacaaaaatgatatctcttaaatgccaacataaaatgatctatttatgcctagaaaaaatttctaggaatacacattattgattcatctaaaatacatatataacataaaaagaaaacaaatgccaacctttcagatgagtaccacaaaaacctaaaagttaaatgttagattaaataaaattataaaatatccacacgagaagtatgtgtatacaaagtattgtatgtatgcagtgaaatgagagtgcccatacagttatatgcaaacttttgaaagtttcatagttgtttaacaaaatatttttaatgttgatagtgacataaaaacatcacaagaattatctagataatatagcaatattgccaaaatttgagtcaatgttrcctgtgagtgcaataggtcatcattgatcgcgtcctttcatgacctggcggtaatttagatgattgaaggaatattatgaatgtatttacactgtgagtgtgaaagggcaacatttttctt

SEQ ID NO: 367320 - DNA, 608 bp, Homo sapiens
aagactaaaaactccctttccctggtgcacttaccatgagagttcatgatatgatacagggtctgccaatgagatccacttataccatatttggaaggcagaaaggagtgggaggcaaattattatttgttttttataccagtgtgcacagacaagtatattgcagtagaatgcaagcagcagttagactcccatatctattatccacctactaggttgtcagttgaggtggctatgtcagcagtggtgrcaaccatagaggtaacattttcctgccctctggctagcaatagcacttggtaacaactggatcagagacgtttgaatccagaagactgataagggtcttgcaacataaggttccgccatgttttccaatgattttataaacatctaattccctgtaataaatgttctaaattattttcttctagcaataactggattttatatccataactgatacccttagtctagggtatatattttcaaatttgaaagttgttgctgattaaccttttgatcttctatttttatttgggctcctgcattacctttaccaagtctctgctggctatttgtgaatgtattaatatatgtatttaaat

SEQ ID NO: 367321 - DNA, 608 bp, Homo sapiens
aagactaaaaactccctttccctggtgcacttaccatgagagttcatgatatgatacagggtctgccaatgagatccacttataccatatttggaaggcagaaaggagtgggaggcaaattattatttgttttttataccagtgtgcacagacaagtatattgcagtagaatgcaagcagcagttagactcccatatctattatccacctactaggttgtcagttgaggtggctatgtcagcagtggtgacaaccatagaggtaacattttcctgmcctctggctagcaatagcacttggtaacaactggatcagagacgtttgaatccagaagactgataagggtcttgcaacataaggttccgccatgttttccaatgattttataaacatctaattccctgtaataaatgttctaaattattttcttctagcaataactggattttatatccataactgatacccttagtctagggtatatattttcaaatttgaaagttgttgctgattaaccttttgatcttctatttttatttgggctcctgcattacctttaccaagtctctgctggctatttgtgaatgtattaatatatgtatttaaat

SEQ ID NO: 367322 - DNA, 559 bp, Homo sapiens
tttttctgttgtgaatttcttattcagtcttttctgaattttcttatcagttgcgtgagctatttaagactttctactagagaatatttagaagatagaatagcaaataattttcatcctcagaggtttctacttccatgtcataccacagctcccagttagagaggtatacctggaggatgtagaaaaagtgtttatttaatagactttggagagaatctcccctctgaaaagagaacgaatccaagaggcttatggccatagcacaagaagatacggcaaacagaatggaaaggtctttgcttcttgaacaagagatatgtaaaaaagaagggatagatgagaaaagaagtgagaacataatcctaaagggtctatcccggactccacaccctcagtgattcactttccaggagaatgcttcagtttttagaaatatacagataggcaacacctggagttaggccagaaatttgctcatgttacrgtataagaagagattgcaagccccttatttaacctgcaaatcctctgatcctcacaggccattttcctttct

SEQ ID NO: 367323 - DNA, 547 bp, Homo sapiens
aatgaataatatcctcataataaatacagcaatcagtttcctagggctgtttcacatgtcctcacctgttgatcagtggtataaggcctggcataaaaactggcatataaaaactaacctgaagcacagttctacaatgctttggtagaacggggtgttcttctcacctctgacttaattgagggatatatttttaaactgtctaaaatagaattctacaaaatttagtaggagyggggtatgagttaaacaaaaatttattaaattctaacccacagccataaataactctccctccactgagctttaagtagatattatgtagtaataaatttcatgttgtactcagataaattcctggagtgcaaacttgtataatgttgttaaagtgtatgcagacataattgaacaaccctcgggtatgggatagaatttccattctattgtaaaaattgagtagcctaacagtcacaaaactcccctcaaaagcccttttctgaggtggcccaaggcagtatgtctaggcaggagaaattatgctcaagaa

SEQ ID NO: 367324 - DNA, 592 bp, Homo sapiens
taattaacatatccatcacctcacatagttaacattgtgtgcctgtgtctgtggtgagaacacttaagatctgctctcttagcaaatttcaagtctacaacacaatattattaactgtawattattattaattatactccatactatacattacctctccataacttacatcctgaataactgagactttgtattctttgaaccacatctcccctttggctccatccctatcccctggcaatcaccattctattctctgcttttaggagtaacgttttaagattccctgtaaaaacgaggcaatgaagtatttgcctttctgtgcctgaattatttcacttagcataatgtcctccaagtttatccatgttgttgaaaatgtcaggatttccttctttttaaaggctgaatagtattccattgcatatatatacgccctattttctttcttcatctgttgatagataccgaagtagtttgcgtattttggctattgtgaatagtggaatgcacatgggcgtgcagatatctcttcaagataatgactttattttctttgaatatactccagaagcagtgtttctagtcaata

SEQ ID NO: 367325 - DNA, 592 bp, Homo sapiens
taattaacatatccatcacctcacatagttaacattgtgtgcctgtgtctgtggtgagaacacttaagatctgctctcttagcaaatttcaagtctacaacacaatattattaactgtatattattattaattatactccatactatacattacctctccataacttacatcctgaataactgagactttgtattctttgaaccacatctcccctttggctccatccctatcccctggcaatcaccattctattctctgcttttaggagtaacgttttaagattccctgtaaaaacgaggcaatgaagtatttgcctttctgtgcctgaattatttcacttagcataatgtcctccaagtttatccatgttgttgaaaatgtcaggatttccttctttttaaaggctgaatagtattccattgcatatatatacgccstattttctttcttcatctgttgatagataccgaagtagtttgcgtattttggctattgtgaatagtggaatgcacatgggcgtgcagatatctcttcaagataatgactttattttctttgaatatactccagaagcagtgtttctagtcaata

SEQ ID NO: 367326 - DNA, 613 bp, Homo sapiens
tcattgcagcactattcacaatagcaaagacatggaatcagcctaaatgtctatcaatgatagactggatagggaaaatgtgatacatayataccatggaatactactatgaagccataaaaaagaatgagatcatgtcctctgcagggacatggattgagctagaggccattatccttagcaaactaatacaggaacagaaaaccaaatactgcatgttctcataagtgtgagctaatatgatgagagtacatggacacatagaggggaacagcacacactggggcctttcagaggatggagagtggaaggagggagaggatcagaaaaaatgctaggctaggcttaatgccttggtgatgaaataatctctacaataaacccctatgacacaagttaaactatttaacaaacctgaacttgtacccctaaacttaaaataagttaaaaattaaaaataaaattccaaaaaaagcacaaagagataccactatatttccacaacaattactaaaattgagattttaccaagtcttgacaagaacatggatgaatctcaaaataattatgttgagagaagccaaagtaagagttcatattatataattatatt

SEQ ID NO: 367327 - DNA, 582 bp, Homo sapiens
tctagagaattacaaagtaatctatagtgatwtaaagtagataattgcttgcctggaatgcagtttggccgatggaggagtggactttaaaatggcattagaaagctttgggagcaatggatatccacattcccttgactgtgcagacagcttcattgtatatgtgtgtgtccatatatatgtgtacgtccatatatgtgtgtacgtccatatatgtgtgtacatgtgtgtgtagagagatcaggaagatataaaaattaaaaacaataaatagagctgatcaataagtggaggaaataccattatcaagaatcataagatagtatggtgtgtgtaaaaactaatcaaattgcacattttaagtaaatgatatgtataaaaactatactttaataaagctgtttaaaaatgacaccaatcttaaaaaaaaaaaaaaaactcttccaaaaaatagaataaggttgaatgctttccaacatgttttatgaggccagcataatcctgactacaatacttggtgtaaataatacaagaaaggaaaatcattagccaatgattcttattaaaacaattacaaatatt

SEQ ID NO: 367328 - DNA, 582 bp, Homo sapiens
tctagagaattacaaagtaatctatagtgatataaagtagataattgcttgcctggaatgcagtttggccgatggaggagtggactttaaaatggcattagaaagctttgggagcaatggatatccacattcccttgactgtgcagacagcttcattgtatatgtgtgtgtccatatatatgtgtacgtccatatatgtgtgtacgtccatatatgtgtgtacatrtgtgtgtagagagatcaggaagatataaaaattaaaaacaataaatagagctgatcaataagtggaggaaataccattatcaagaatcataagatagtatggtgtgtgtaaaaactaatcaaattgcacattttaagtaaatgatatgtataaaaactatactttaataaagctgtttaaaaatgacaccaatcttaaaaaaaaaaaaaaaactcttccaaaaaatagaataaggttgaatgctttccaacatgttttatgaggccagcataatcctgactacaatacttggtgtaaataatacaagaaaggaaaatcattagccaatgattcttattaaaacaattacaaatatt

SEQ ID NO: 367329 - DNA, 582 bp, Homo sapiens
tctagagaattacaaagtaatctatagtgatataaagtagataattgcttgcctggaatgcagtttggccgatggaggagtggactttaaaatggcattagaaagctttgggagcaatggatatccacattcccttgactgtgcagacagcttcattgtatatgtgtgtgtccatatatatgtgtacgtccatatatgtgtgtacgtccatatatgtgtgtacatgtgtgtgtagagagatcaggaagatataaaaattaaaaacaataaatagagctgatcaataagtggaggaaataccattatcaagaatcataagatagtatggtktgtgtaaaaactaatcaaattgcacattttaagtaaatgatatgtataaaaactatactttaataaagctgtttaaaaatgacaccaatcttaaaaaaaaaaaaaaaactcttccaaaaaatagaataaggttgaatgctttccaacatgttttatgaggccagcataatcctgactacaatacttggtgtaaataatacaagaaaggaaaatcattagccaatgattcttattaaaacaattacaaatatt

SEQ ID NO: 367330 - DNA, 582 bp, Homo sapiens
tctagagaattacaaagtaatctatagtgatataaagtagataattgcttgcctggaatgcagtttggccgatggaggagtggactttaaaatggcattagaaagctttgggagcaatggatatccacattcccttgactgtgcagacagcttcattgtatatgtgtgtgtccatatatatgtgtacgtccatatatgtgtgtacgtccatatatgtgtgtacatgtgtgtgtagagagatcaggaagatataaaaattaaaaacaataaatagagctgatcaataagtggaggaaataccattatcaagaatcataagatagtatggtgtgtgtaaaaactaatcaaattgyacattttaagtaaatgatatgtataaaaactatactttaataaagctgtttaaaaatgacaccaatcttaaaaaaaaaaaaaaaactcttccaaaaaatagaataaggttgaatgctttccaacatgttttatgaggccagcataatcctgactacaatacttggtgtaaataatacaagaaaggaaaatcattagccaatgattcttattaaaacaattacaaatatt

SEQ ID NO: 367331 - DNA, 590 bp, Homo sapiens
aattcaatcagggttaaaagtcgtaaactgtcactttactttctttagtaatttggcaamcgcaaattaaaaccacattgagctgccattatacacttatcagaataactagcataaaaaacctggcagaacaagtactgataggaaaatacgaaacagctgggaattttatatattgctagcagaagtgtaaattagtgcactaactctgaaaactgggcagaatctactaagctgaacatatgcaacctctttaccagcaattctactcctaggcagtggcatacctagaatggagtggtggaagaaataagccctgggtgaaggaaattagagtgttccttgcatttagagagttgaacaaaacaactaaaacagaaaaaagaataaaagatggtctgattttttatcgttcataatatttcaaaatagtaaataacacaaaagtccatcaatagtagaataaaacttggtatattcaatgaaatttgtacaataaaaaataaactagtgttacatgtaaatacatatgtgaatgtctcaaacatggttatgctttaataaattgtatataccacataaatgttaat

SEQ ID NO: 367332 - DNA, 590 bp, Homo sapiens
aattcaatcagggttaaaagtcgtaaactgtcactttactttctttagtaatttggcaaacgcaaattaaaaccacattgagctgccattatacacttatcagaataactagcataaaaaacctggcagaacaagtactgataggaaaatacgaaacagctgggaattttatatattgctagcagaagtgtaaattagtgcactaactctgaaaactgggcagaatctactaagctgaacatatgcaacctctttaccagcaattctactcctaggcagtggcatacctagaatggagtggtggaagaaataagccctgggtgaaggaaattagagtgttccttgcatttagagagttgaacaaaacaactaaaacagaaaaaagaataaaagatggtctgattttttatcrttcataatatttcaaaatagtaaataacacaaaagtccatcaatagtagaataaaacttggtatattcaatgaaatttgtacaataaaaaataaactagtgttacatgtaaatacatatgtgaatgtctcaaacatggttatgctttaataaattgtatataccacataaatgttaat

SEQ ID NO: 367333 - DNA, 555 bp, Homo sapiens
taaatgctttaaggtcataaactgctttggcttttgaaaattgttcgatttattttagagacattgaagtgaggcctggggatatatggaatcatccatgtcccctaactatgcaaagaaggttataaagaaaagatattttatatgagaaargatgttctatggtaaattcttgtcctaaagtaaaatgactggttgtttaaaaagaggaatgtttaggaaatgtcagaaagtctaaacatgttgtacatggtctgtgtaagttgtgaaagaatttatgaaaaggaatttatgccagaagtgttatataatttaaaggtgattaagcctcctaacgcttcataaaatgccactataactcttaactgttcagcttacctgctttacatctaggtaaggcctggaacatgtgaagttagatgctgaaaagagtcagacctcgtctgcatttctctctgggtcctaggctccacacttagtacataattaaaatccttacttaccaacgttttcacccaaagtaaaagttgctaagaattaacattgtaatatgta

SEQ ID NO: 367334 - DNA, 440 bp, Homo sapiens
tcatttgttgtcattttatataggctaacctttacattatcatttattcttattacagaaactttaatatactattttggacaaggctgctgagtctaattgttaaaaaacaaaacgagaatgaaacacaggggcttggagttattggtattctattctgcctcatttaagggatttgtggtggcaatacagtgatattagtagtattctcaaaggaactttggtgattttaaggacarcagcctcaggaaagtgaaaacagaaactcacagattgctaatttcttcctacaggttgactatggatttattgattgaactgaatgggcaaatacgacaacggctgaggaatgttgctgtgaagggaggagggtttctctatttttctgtgggtctagaaggatatccattccttgtctctacccccaacttaccccaaag

SEQ ID NO: 367335 - DNA, 645 bp, Homo sapiens
ctttgtttttcttggtttacacactcattttgctagagcaaagagtatgtgagaagtgatatttctgaaaacttgtatgtctgaaaatgtgtttagtttagtacaaatgtttagcaaaaatgtttagtacaaacatttgaatgacagtttygtgtgacatggaattttagtcaaaatatatttcacgcttctgaaatctttgctctatgactatggagtatccaatgttgttgatgagaagactggcgccagtctgatcatacctctgtagatgatgtatctgtctctctcaaaactattaggaccttgtctttattcctttggttctaaagttatagtctaggagtgggactttttcatttatttatttggcacatagaaatgcttttgatctggagacttatgttctgcaactccagcaaattctctcgaatgattctttgatattttacaacctctctttcctatgccctctcattacaaattgctatttactacattaatatttattactccctatccaataacgattttaaaactgaggtataggtacttgctctggattcacaatcatcttgagtttaatctagatacactctcaacaagtccataagagtcaaatcttccagcctcccctgaggctag

SEQ ID NO: 367336 - DNA, 524 bp, Homo sapiens
tcctttttttttcttttttttctgtttgttgttgttgttgttgttgttgagacacagtctcactctgttgcccaggctggagtgcagcggtgtgattttggctcactgcaacctctgcctccccggttcaagcagttctcctgcctcagcctcccaagtggttggaattacaggtgcatgccaccacgcctgcctaatttttgtattcttagtagagacggagtttcatcatgttggccaggctggtctcaaactcctgacctcaggtgatcctcccgcctcggcttgctgggattacaggygtgagccactgtgcccggcctgggaaagtccttaaagacacatttgtgaatcactctccaaccgtggaggggctggcatctttcgtggattctgtgagccttgaaccagattttgttgccattctcctgatattcaagctgggtggggctgcaaacctttagtgggaatatgtaacaaaaaagtaagtatactaattatttcaggagataagtcctcaccta

SEQ ID NO: 367337 - DNA, 527 bp, Homo sapiens
aaatgggagaaaatatttgcaaatcatatatctgataaggagttaatatgcaaaacgcatagggaactcatacaactcagtagcaagaaaacaaataacccaatttgaaaatgagcaaaagatctgaatagatatttcccatttgtttatttttgcttttgtttcctgttctgttggtgtcatatccaaaaaatcattgccatcagcaatgtcaagaaggcttttttctrtactttcttcagtagttttacagtttcaggtcaaaacttcattttgagtttatttttgtgtatgatgtggtgtatttgtatgtctcaaaagaaggcatacaaatggtcagcatggaaatgaaaatgtgctcaacatcaggaaaatgcaaatcaaaacacaatgacatatcacctcacacctgcaaggatggctctactatcaaaaaagacaaaagtgttggtgaggatgtggagaaaagagaacccttgtacatttttatagggatttaaagtggtacaaccattataaaaaacagt

SEQ ID NO: 367338 - DNA, 529 bp, Homo sapiens
caaaaatagtgaattgatttttttaaacttttaagtacataattctatgaatgatatgataatacagcagaaattatgaaagtggtgcttgaataactgacatctgaaaaacacctgtgtaaaggaaggagtactggccagagggacaaggaggacaaactcttaggtcctcttccactgctgtgtaatcttgggcaagtcacaacctctctgggcctcagtttccccaaacatgcaatgccagttgaacaagatgctgtctcagagatgaacaagccatgatagaatatttcttctatcctcagagtttagttgagaaaattgaggcccagaaagggccagaacggtcctggcacacagtaggtgaccaacaagctggtcacttcctccctttctgctctccctccctccccttctgctctccctccctcccctcctgatcttgccagtcactagagagagaactctgtgtyacccatggatagaagttccacaaacaccgacaagggaaaactaaggggcaatttca

SEQ ID NO: 367339 - DNA, 348 bp, Homo sapiens
gtgtagtttttatgtgaagatgattccgtttccaacgaaatcttcaaagaggtctacatgtccccttgcagatgccacagaaagagagtttcaaaactgcgctctcaaaaggagtgttcaactccgtgagttgaatgcagtcatcacagagaagcttctgagratgcttctgtctagatgtcatgtgaagatatacccgtttcgatcgaaggacacagagtggtccaaatatccacttgtagatcctgcaaaaagagtgtttcaaacgtgaactttgaaaggaaagttcaactcggggatttgaatgcaaacatcacaaagaagattctgagactgcttctgtttagt

SEQ ID NO: 367340 - DNA, 523 bp, Homo sapiens
tgaatacaaacatcaccaaaaagttcctgagaatgcatctgtgtagtttttatgtgaagatgattccgtttccaacgaaatcttcaaagaggtctacatgtccccttgcagatgccacagaaagagagtttcaaaactgcgctctcaaaaggagtgttcaactccgtgagttgaatgcagtcatcacagagaagcttctgaggatgcttctgtctagatgtcatgtgaagatatacccgtttcgawcgaaggacacagagtggtccaaatatccacttgtagatcctgcaaaaagagtgtttcaaacgtgaactttgaaaggaaagttcaactcggggatttgaatgcaaacatcacaaagaagattctgagactgcttctgtttagtcagctgaaattatcccgtttccaacgaattcctcacagaggtccaaatatgcacttgcagattctgcagaaagtgtgtttctaaactgctacatcgcaaggaatgctcagctctgtgagttcaactcaatcatcc

SEQ ID NO: 367341 - DNA, 523 bp, Homo sapiens
tgaatacaaacatcaccaaaaagttcctgagaatgcatctgtgtagtttttatgtgaagatgattccgtttccaacgaaatcttcaaagaggtctacatgtccccttgcagatgccacagaaagagagtttcaaaactgcgctctcaaaaggagtgttcaactccgtgagttgaatgcagtcatcacagagaagcttctgaggatgcttctgtctagatgtcatgtgaagatatacccgtttcgatcgaaggacacagagtggtccaaatatccacttgtagatcctgcaaaaagagtgtttcawacgtgaactttgaaaggaaagttcaactcggggatttgaatgcaaacatcacaaagaagattctgagactgcttctgtttagtcagctgaaattatcccgtttccaacgaattcctcacagaggtccaaatatgcacttgcagattctgcagaaagtgtgtttctaaactgctacatcgcaaggaatgctcagctctgtgagttcaactcaatcatcc

SEQ ID NO: 367342 - DNA, 348 bp, Homo sapiens
gtgtagtttttatgtgaagatgattccgtttccaacgaaatcttcaaagaggtctacatgtccccttgcagatgccacagaaagagagtttcaaaactgcgctctcaaaaggagtgttcaactccgtgagttgaatgcagtcatcacagagaagcttctgaggatgcttctgtctagatgtcatgtgaagatatacccgtttcgatcgaaggacacagagtggtccaaatatccacttgtagatcctgcaaaaagagtgtttcaaacgtgaactttgaaaggaaagttcaactckgggatttgaatgcaaacatcacaaagaagattctgagactgcttctgtttagt

SEQ ID NO: 367343 - DNA, 497 bp, Homo sapiens
ctgtgaagattctcccgtttccaacgaaatcttcaaaataggtccaaatatccacttgcagattccacagaaagagtgattggaaactrctctttgaaaaggaaccttcaactctgtgagttgaatgcaatcatcacaaagaagtttctgacaatgcttctctccagtttttatgtgaccataattcgttttccaccacaggcctgaaagcgctccaaatgtccacttgtagacactacgaaaagcatgtttcagaactactctatgaaaagcaatgtgaaactctgggagttgaacacaaacatcacagagaagtttctgagaatgcttctgtttagtttttatgtgaagatattcccgtttccaaagacatcttcggagaggtccacgtatccacttgcagattccacaaaaagagagtttcaacactgctctatccataggagggttcaactctgtgagttgaatgcaatcatcacagagaagtttctgagaag

SEQ ID NO: 367344 - DNA, 497 bp, Homo sapiens
ctgtgaagattctcccgtttccaacgaaatcttcaaaataggtccaaatatccacttgcagattccacagaaagagtgattggaaactgctctttgaaaaggaaccttcaacyctgtgagttgaatgcaatcatcacaaagaagtttctgacaatgcttctctccagtttttatgtgaccataattcgttttccaccacaggcctgaaagcgctccaaatgtccacttgtagacactacgaaaagcatgtttcagaactactctatgaaaagcaatgtgaaactctgggagttgaacacaaacatcacagagaagtttctgagaatgcttctgtttagtttttatgtgaagatattcccgtttccaaagacatcttcggagaggtccacgtatccacttgcagattccacaaaaagagagtttcaacactgctctatccataggagggttcaactctgtgagttgaatgcaatcatcacagagaagtttctgagaag

SEQ ID NO: 367345 - DNA, 286 bp, Homo sapiens
ttctctccagtttttatgtgaccataattcgttttccaccacaggcctgaaagcgctccaaatgtccacttgyagacactacgaaaagcatgtttcagaactactctatgaaaagcaatgtgaaactctgggagttgaacacaaacatcacagagaagtttctgagaatgcttctgtttagtttttatgtgaagatattcccgtttccaaagacatcttcggagaggtccacgtatccacttgcagattccacaaaaagagagtttcaacactgctctatccatag

SEQ ID NO: 367346 - DNA, 586 bp, Homo sapiens
attcaatcaaacttcaatcacaatctagctgttgcgatgaaggtattttgtagatgtgcttaaagtcaataatcagttgatgttatgcagggagattatcccagatagtcagtgtgagcctgaatcaatcagtcaaaggccttaggatcagaactggggcttccttaaggaaaaagaaattctgcctgtagatagcaacctgaaattatgctcaggactctcagcttgcctttcttggtttgtcctgtggatttcagacttgctttgacatcmccaagaattgcacaagtcaattccttgcaataaatctcttagtatctcctactgatgttgtttctctggttgaatccttactgatataactaaaaaaacaaaaacaaaaacaagaaaataccaaaaacttccttgtcttataatctttcttgtgtcaatattaatttgtttactcaatttctttcttctttagagaataaatttattgaaatcaagatctggatttctcaagtctttgaagcactaagcacaaggccttatctaaatgtatgctcagtgaacaatagttaaagaaatctcagttttaagtttt

SEQ ID NO: 367347 - DNA, 641 bp, Homo sapiens
cctggagattataagtattaaaaatttagggtattattaatgttgaggccatgagattgcactgggcactttttccatacaccaataagtcactagttgtggctaagtggcagtgcaatcttaacattgtgctggaaactagtgaactagacctagaaaaaaatatatarcattttctatatgtgaatgatttgtatcttacaagtaatatagaattaatgttacataattcagaaaaaatgtaaaaatatttgtgtagctcttttcttgagaggaagtgaattagtggccaattgaagatgtagataagagggaaagataggacaatggagaagatagattagggagcaagcagccttgtattgtgtcagcaggaagctaattaagaaaaataatgtccaaaaaaattcgtcgtagcagaggcttcaacgaaagtacaaatcagtgccataatgatatcaaatttagttcatttggtcatacaattaggcatgctttctcaaaaaagttagtgatgttaataaaatggctaaagaattatggtccatgcaacacatagaattgtaaaagaaaagaggatacaattatagttttggtgattggttaaaatttgaagtatattgtagaaaaggcaaatgaaa

SEQ ID NO: 367348 - DNA, 582 bp, Homo sapiens
caactcattacaaagacaaaacataaataaaaaatacaaagtgattcaaaaacacagttttcataatagactcataagaatccattatggactattaaccaaagactaaactttggcaagagaatggtcaaaagagggcaactaactttcacatagtgcatctctatgattgaaagcaaatggatgaaacaaaaaagcatgagatactttttgtgaaagtggcaagaattttgcagttgtgaacaccaatcaaaactgtctcatttttattttattttattttattttattttattttattttatagagccaaaagtctgtcctgggaatcctaatatgtttcaygcatagctggaagtgtcttttcaacactgtctcacacatccataaaaaatcacatggcttcctgttctacttgccagcacccacaattatattttcatatgtctgtgagcccttagatgtcagagacggacacagcctccattcactgaagtcatatcacctacaacaaggcaagtagcacatgatagtaaagttacggcacatcaggttatgaactttaaggatctagactactcc

SEQ ID NO: 367349 - DNA, 696 bp, Homo sapiens
ccaaagagatgccaacacagcttggcacaatcagaagagaatatccagctgtggcttctcccttgggttggaaagtgaagagtgaaatgtgtgtccaacattatgtcttttcagggattgcctggtggactggttctgtcccacctgacttggggtactgatgggactgaactactttggatgcctcagggccactgacaagagttcaggggcttgttgcaccagagcacttgcagtactgcagatatacacaagagggagcaagaawttacaagttcctgataaaacaagaaacttctcccattgggaaattatatgcatgattcccagaaaaagcttgagagaccctcaggctctctaatcaagatgattggtgaagggttttccctataagaatccagaccatgaaaattgagagaggtggctgttttttcaagtgcacaaattccagaaaataataccacgtacaaagaaataggtaaaaatgacccaaccgaaagaacaaaataaatctcaaaaacccacctgaaagaaaagatgatgtatcaattacctgacaaacaattcaaaataattgttttaaagaagctgaatgaagtatcagaggatacagacagaaagctaaacaatcaagaaaatgatacatgaacaaaattagaacattaacaaagaaatagaaactaaaacacagaacca

SEQ ID NO: 367350 - DNA, 531 bp, Homo sapiens
cagtcaggaaaggtcttataaaggagaaactggtgtatttcattaaacatggataatttatgtgtttaactggagaaggctttgtttcaaaagcttgcttatttttccagccacacatctaccagtaaataagccaaaccccaccaaaatcatattacatatattgtcttgggagagcctttaaaatatatatacacatatttatgaaagtattttatattcatgatgtagaaaataaaaaaagttwccaaaaattgcaggttgtttgctttcttggctaaaattctcgatttctttgtgggaggcaggcagagccatgtacagtgctgcatacttcagttatctgatctcatattgcatgccacaaaatgggatcttctaccttggggttgttcactagaaattttatcatgattatgctaaagaagtccccatttatgtgacactgattagaagcatatagctaacttatttttactgagttaatatattttaaggtatataatttaaggtaggaaaagaactttatat

SEQ ID NO: 367351 - DNA, 617 bp, Homo sapiens
tgtattaggcttctccagagcaccaggagctacaggatgtatatatgtatgtggagagacagagagagagaacaaaaagagagagagaaacagatttactttaagaaaatgactcacacaattatagaggacttgtgggtctaaagtctaatgtagcgggtttgtgggttggagactgagggaaaagttgcagtaacttttagaggtgaagcctgtgagtagcatttcttctttcttggggaagttcaaactttgttccattaagccttcaatattgaacaagacccacccacattattgaggataatttgcttttctcagagtttatcaatttaaatgttaatctcataaaaacaaaacaaaacaaaaacaaaaacaataaaacaagaacaagttcagagaaacacacagaataatgtatgacaaaatatctgggcactatggttcagccaagttgacatgtaaaattaaccatcacattgagcatgggctggagttcaactcgtcttcaactctttagtcatttaccaatgtgtagagccaaactgcacaactactcacactgagcttgtttttggtagcccgtgycagtccacatgctagtacctttggggacc

SEQ ID NO: 367352 - DNA, 589 bp, Homo sapiens
taccaatgcaccgaactataaagcaatagctctgaaaatgatgtatcaaaggcaggactcattgtagaagtgaacaaaggcaaaagccttattagtaatgggctaatcctatggtgagcctgggtgggtaaactgctgtctagaagtagacwgttcactcatgtgaagtaaattaacacttccttggcaccagggtactattaggtgcattgaaacaacttatttactatggacatcctggtgcccttgcatatcccacatcactataagatcaggcataataaaatcatatggtgccaaggagccagaccttacaaattttagcccatagcccagtgaagtggcaggaatttatggtagttaaatcagctggggcactgttctagctatagcagaaattttattcttagtatctgtaaagcaaagaaattaaagcaagctaatcgtccctgatgacaaatcacctaagcctttcttttatgtactatgtgattttgcaggctcacttcttgctcactggggggaaaaagaaaaacaaaccaaagatttcttttattccttgaagtaaagaaccagagagaaagttgac

SEQ ID NO: 367353 - DNA, 557 bp, Homo sapiens
atgtagaaataggttaaattagttatgaaagaaataagtgctttaataatcaaaattgataattttgatagttggatagcattgatgtcttttgtgatttttatttttaaaactagggtttaacacatattcagctattaacctcaaactcagagtgaacgaaggtccatttgtagttctgtttataatttawgttttagaatatattataaagaaacacacaaacacaaaattttacccaacaaataggctgccgaacaaaataagaattctctgttgaatctgggaagattatagtagtaatttttgttttctaatcggaaagccttagttcatctaatttcatgattttatacgtgaatttttataaacatggaggttatatttccaaccaaagtcgtatcaaatttgtctcatttttaaatgattcttttttgaacaaggaaaacttaatcttttattctgttcatccttgaaagatagttgaagccaaattgctacaaaattatgttggctgaaatacaaaatgaacacgttgggttctgtaaagctgggac

SEQ ID NO: 367354 - DNA, 560 bp, Homo sapiens
gtttcaggaactgaagaaggtcattttggctagaatgcaggtattgagggagaggacaggacatgagtctggggaggaggaaggagccagatcacaatggtcaaagtaggccatgccaaagttgccaagatggtctctattttcatgggagattacggtcaagcaaaagcacggaattattgacaaccacgtattttgtagatggcactggataaattagtttacagtagagaccaatttctaaaaatatctcattacaaacgtggtctttccccccyttttgagcatagatcagcaatctgaactattaactaacatttccaaaggactggatgtctaagtcaatcttgtttttcagacacatatgtgtttatctctatatgtgaaataaatatggtctcatttacagttcttatagtctttcctattgtaattttactgctctactaaactataaattatgttaaagaaaccatataactgatggaaaaattataaaatgtgaaatacaaattaagttatgatcaaataataattgccttatacttaatgctatttta

SEQ ID NO: 367355 - DNA, 569 bp, Homo sapiens
tatatatattgagttccctttgttattgtcttaaagtattcaagaagaaagtcagggcagaggaaatttctgtagagaggaggacagctggtatgaacctgagtgcctgaaaaaaaaattggtttaagatcaactcttagggtaagaaagaatcaggttgggtattggcaggtcagactggcagggaggctgctgagttcttctgcaatccatccatgtgaggaaagtctgtgggtcacactgcactagttgcaaggattaataattgtccaaattattttaactctaagaattgtaagtaaagtctgggatgaattctaaagaccttgtttaaatataktctccagggactgttatttgaagtggaattcaattttgaccaaccaaaacattttttctccacttatgaatgaaagaacaagggctgaaatcggtgttgaacactattatgaatataaaatttaatattgctcagtaaaagtgtaatcatttttcagtggtgtcttagctaattagtactttaaaaaaatttgttttctaaattattatttttattatatgaaattatt

SEQ ID NO: 367356 - DNA, 569 bp, Homo sapiens
tatatatattgagttccctttgttattgtcttaaagtattcaagaagaaagtcagggcagaggaaatttctgtagagaggaggacagctggtatgaacctgagtgcctgaaaaaaaaattggtttaagatcaactcttagggtaagaaagaatcaggttgggtattggcaggtcagactggcagggaggctgctgagttcttctgcaatccatccatgtgaggaaagtctgtgggtcacactgcactagttgcaaggattaataattgtccaaattattttaactctaagaattgtaagtaaagtctgggatgaattctaaagaccttgtttaaatatattctccagggactgttatttgaagtggaattcaattttgaccaaccaaaacattttttctccacttatgaatgaaagaacaagggctgaaatcggtgttgaayactattatgaatataaaatttaatattgctcagtaaaagtgtaatcatttttcagtggtgtcttagctaattagtactttaaaaaaatttgttttctaaattattatttttattatatgaaattatt

SEQ ID NO: 367357 - DNA, 458 bp, Homo sapiens
gagactggaagttggattagatgccaaaattaaatgatttaaatagacagctgcataatggaaactactaaataacaccttataaacagtttctaattatagcaagtctaaatcacagaaggatgacacattttattttgctagagcaaacattacttgttgttctaatgccattacgtctaatgcccatagttatgttaccttaacattcactcttgctcatgtttgtgaacacataccctctttagaatggtagcttttgaaatcacaactcattttccctagtcaaasagtacacttgcaaaacaatctgtttaaatatatatcatatttgcataggttgaaataaacaaagtgacttatatgttacactatattctccactttctatgctgtgaaattaatagcttcttgtgaaaatattgattttcagaccataatttcctatctataatgct

SEQ ID NO: 367358 - DNA, 442 bp, Homo sapiens
tttgtggtaactttggcacgtagttttaacggttatttgtatacatgtgaaagatgggttcttaatgagagtttgaaataatctgacctggggattsttaatgagcagaaaggctcattaaggctcatctaagggatgatgagggtaatatttggacattgcaaaacatgccacctgtttgcatatattagcttaagccattttttaactgcacattaaaattggaatccacacaatgaactctggatagtaatgaaagtagctgcagcagcttccacccagtgtttgcctaattgggccaataagctcaaggctcctagctgaggattgttgaactatgtaaaaagatgtactggctatagttataaatgtgcataaattaatacatacttgggtgacagaaatgtgtaattacatcaataggtaggtcatcattacttga

SEQ ID NO: 367359 - DNA, 596 bp, Homo sapiens
tttagctcttttgctcaggctggtgagaggatcatgaatattaaagagattcaaatggatatgctctcatgtaatatggagtatcacaaatgaaaagactaaatgagggcagactgtgactctatgtgctgatatatctcttaaataaagtgaaatgcctaatcaatttctttgctcacatatagcaaccaaatagaaaaataacaacttctttttcttctgcacttcttcatctccttctctttcttcctytcttcttctccttctccttctccttttcttcttcttcttcttcttctttcttctcatatgttttaatcacattgacaaactaatggacatggtacattaagaatatttttaaagaaaagatttacataatagttaataaggtataatagctataatttaaaagacatcagttaaagactggggcacaatgcatttacacagcttaaattgtagtatgttttagagacaaagaatggagactgctgacaaatgtcttcttgaaagagagatatgataatataatattttattttttacataataatcccttatactttttaaatctatgctattagaaatatgat

SEQ ID NO: 367360 - DNA, 597 bp, Homo sapiens
ttaaattgtagtatgttttagagacaaagaatggagactgctgacaaatgtcttcttgaaagagagatatgataatataatattttattttttacataataatcccttatactttttaaatctatgctattagaaatatgataccatatgttgaatggtatacattgattttatctattattaaaagcaaaattttgctttttagacagaaatagaagaaaaagattattcatagaaatctctaaatagttaattaagggctatgtcacttttagaattttgattttcttttcacatggatatctgctagtaaggaattataacatatttacaattaaaacatgacacattyatttataatatagaataaaataatacatttataaatagccaaattaatacataggcatacctcattttattgtgctgcattttttatgaatcgaagctttctgacaacccagcattaagcaagtgtatcagtgccattattctaacagtatgcactaactttgtgtctctgtttcacattaggaaattcttatatatttcaaacttttaattattctgttatggtgatctgtaatcattgatctt

SEQ ID NO: 367361 - DNA, 623 bp, Homo sapiens
gttatccagaagatctagctgagatcattgatgaaggtggctaaacaactagattttaagtgtactgaattaacaatacacataattatacatgattataaaagtcctcactaagaaagtgatatttaagtcaaaacttgagtatgtaatagaagttaggcagatgaagaatgaggataaagtatgttgcagggcatgtrtaaaggatgtgatatgctttgtatttatgaaagactgaaagagttcaagatgtagtgaacaagtcttagaaattctgatgggaaatgagtatgggaaagttggcaggggacagtttatgaagattatgaaagagatttggaattttattctgatgttctatttttcaaagtttaagctgacttgtagaaataattataaaaatacagagtaataacatttagcaaggcttttcagttctccaaataagaaaagcttttggtttagactaagttgatacctgggtaaatggagataaataaatggaattgaaatacgtattaaaggtgaaagcaactaacttggtacttaattgtgatggattgggaaaggggctaacaaaaaggaaaagtcaaccacttaagatttctagcattaaaggaaat

SEQ ID NO: 367362 - DNA, 523 bp, Homo sapiens
gccttcaagggctcttgtaaggcaggcctagtggtgacaaaagccttcagtatttgcttgtctgtaaaggactttatttctcygtcacttgtgaaatttagtttggttgcatatgttcataattatatatatcatcaatttttgtaaatattggcaaattacaactgtcacatatgaaatgcttattgatacatgaataggtctgtttgtaagcactttatcttacactattggtcaatttttctatacctgtgtcattatcaccctgtcttattgttataacttggtaaaattcttgatatatggttgagaaatttctcaaattttgttctgtttcaaagtcatcttactatattcctaacatcttgttattatcacctaaactttagataagctcatcatgtttcttgttgctgttttgattgaaattacactaaagtttcatttgtgggagaatgaaaagtaagacttagaacagtaagtcttccatttatgaacacagcatttcttttcatttatttgt

SEQ ID NO: 367363 - DNA, 534 bp, Homo sapiens
gtggtatcctagaagcaagacaaagtcctccccattcttccctctcctttcctcaagcagaaggaagtggtctcttggagcagctagctgtgcagcctgaggttaggggaggagtgaggccaacacttccttaactgtccagctggtgtttcagtatgtyttctcatcccaccccccatcagttgactgtgtctgggcctaattcagcactagaacttgcctatgagttgctattcttatggcctagactgtctttcaagtttacttggagacacagaaggctgtagcttactgtggcaaggtttgtgggcactcaagtttggatcactgagatcagcaattcccctctgtctagggctggtttaaatcctccctgtgcacagacatcagctgagtttggtcccgtttttctttctgctctaacaagccagcactgagttcaatgcctcacgattgctgtgctcttcctgtcctggtgcccagaggtgctctccataccacacagcagctctctgcagtagggaggagtggcgt

SEQ ID NO: 367364 - DNA, 534 bp, Homo sapiens
gtggtatcctagaagcaagacaaagtcctccccattcttccctctcctttcctcaagcagaaggaagtggtctcttggagcagctagctgtgcagcctgaggttaggggaggagtgaggccaacacttccttaactgtccagctggtgtttcagtatgtcttctcatcccaccccccatcagttgactgtgtctgggcctaattcagcactagaacttgcctatgagttgctattcttatggcctagactgtctttcaagtttacttggagacacagaaggctgtagcttactgtggcaaggtttgtgggcactcaagtttggatcactgagatcagcaattcccctctgtctagggctggtttaaatcctccctgtgcacagacatcagctgagtttggtcccgtttttctttctgctctaacaagccagcactgagttcaatgcctcacgattgctgtgctmttcctgtcctggtgcccagaggtgctctccataccacacagcagctctctgcagtagggaggagtggcgt

SEQ ID NO: 367365 - DNA, 597 bp, Homo sapiens
atgggggctgggtcaaaaccactttaatttagtggtgctatctaaggatcacttcttcactccaactccaattttgtttttgggcgtacgcttcctgtagaatgacccttatcccgggcccccaggatgtttcttctgagagttccatgcaaaagaatcctaccatatcacttccatgaccatctattaaggtgggcacacctagacatgtctgaattaattctaggttggcctgacattggagtyctgctacatttgaaagcatgctagcgaaactaaaaatttggcaataatcttcatgtagaactgaacagattttgaattagggcaggaaatatttgttgagagaaaaaaatgtgagattaaaattttgagaaaaatatgtatacgcattagacatcaggtataatctctgtgtgtgtgtttgtgccaggagattgcaaatacaagtgctgaaaggggtgagggagagaatgtaaatgagtgaagtgggatgggagaattagagagtggtggaggcttgttgtattgtaaaacatagcccagtctaaaaggattttagccaactgttttcaagcagaaaggttaatgtaatat

SEQ ID NO: 367366 - DNA, 307 bp, Homo sapiens
atacaacctgctcttctgtccttctccctccctaaagagcacaaacacaagagtgatttctaggccagacatccaggatccctggtttcttctcccacacttcaggataatggaccagggatgctcatggaatatcttcattggtcaccttttctagaggaaggaagtaaggrtgatcagagccctagaaactccacccactagccttcaatcatggaaaatatgtagctagatttggggagaggttctttccaagcaatactggcttgtgatggctgaaaaactgaaaaataaaaatacagcactc

SEQ ID NO: 367367 - DNA, 447 bp, Homo sapiens
ttattaagaaatttatcaacagtaaaagtaaagcgggagaagcacaaccaggcgtaacaccaaactggttcaagggagaaacaaggctttggcattctgctggctccagtgcttcctctgaaacctgaggcttgccaatgtgtggacactgtgyagtcttttattgcagccattcaatgcccacatgttttgccttcttgtttcagaaaagcacaaagtcacaacaaagtattttctttccttccaaagccttttgtctccttgtgccactttttatccttaggaaaagatacaggtgttcctgaaaagaaccataaatggaacaggggaggctggtcctgttgctgttgctgattaagttttaaacttttatttattatttatgtgtgctgtattttaaataaacattctctctccttccacttccagtcatagtgtgcctgtagc

SEQ ID NO: 367368 - DNA, 585 bp, Homo sapiens
aatggcatagagtaaatgtgcaagaaatatctgatgaatgaatgcaacgttaacaatgaagacagtgaatgtctccttagggggtggggtggtcctgggcaaggaggtgcctgtgggttggtgcagggagcagaagaaagggmgattaagtatgcaagtgcgggtcgtatacctgtggaaaggcccacaggaaagttgtactaacccacaacaggaatgctagatgctgcccaggtgacagatatgtcctagagtggaccatagtcgttcctcaggctcctccctcccccacctgctttgggatccacagtgactaggcagcactctgatcattttacttcacatatagatagggctagaagggagaatgcctgcaagctgagaaacatatgcatccaattggcttggcagttaatgttttttaaaagcttggtatttataatgacaaactgtttcttatgactttgattatggagaaaatcatctttcaaaggtgtattccacctaggcatactgaaaatttcatctgtgggattttagggtaacaccccaatgttgtgctcctcttaaagacaacagtgtagg

SEQ ID NO: 367369 - DNA, 585 bp, Homo sapiens
aatggcatagagtaaatgtgcaagaaatatctgatgaatgaatgcaacgttaacaatgaagacagtgaatgtctccttagggggtggggtggtcctgggcaaggaggtgcctgtgggttggtgcagggagcagaagaaagggagattaagtatgcaagtgcgggtcgtatacctgtggaaaggcccacaggaaagttgtactaacccacaacaggaatgctagatgctgcccaggtgacagatatgtcctagagtggaccatagtcgttcctcaggctcctccctcccccacctgctttgggatccacagtgactaggcagcactctgatcattttacttcacatatagatagggctagaagggagaatgcctgcaagctgagaaacatatgyatccaattggcttggcagttaatgttttttaaaagcttggtatttataatgacaaactgtttcttatgactttgattatggagaaaatcatctttcaaaggtgtattccacctaggcatactgaaaatttcatctgtgggattttagggtaacaccccaatgttgtgctcctcttaaagacaacagtgtagg

SEQ ID NO: 367370 - DNA, 562 bp, Homo sapiens
gccacattcgttagtccacagttttgccccaagttgagtttcagtttgaagttcatttatcagactcctaacttatctgtttgtattcctccggaagacctgcaactgaaggaaagggcagaacttcttttttattttccatctccatcattagaaataatacatgaatattagcaacaatgttaactatttaagtatggtataatacttgctctcttttggttagtaatagttaccgaattaggggtttttaacaggaatggtgacgttgcagaaatgtctatctctaagttttttttagagagtagagcatgcagagcacagcattttacattaaataaaaactgcttaacatgacaagaaaatcatgtgctgtttctgagagcctttttttttgtctcactggaggaaacctccatgaagtaygggtctgcagggtcatgcctgtttttatgtgtgggtgtatatgcttgctcaggcatatgacaataatgatttgggaaaggaaacttctggtgctcaaagtgagtaagaggtttcgctagtagtaaaatcacgaaaa

SEQ ID NO: 367371 - DNA, 583 bp, Homo sapiens
aaatgttcctcttgttattgatttctaattttattccattgtggtcacataagatgatatgattgtaatttttaaaaattatttgagacttgttttgtgacctaacatattgtcaattctggagaatgttccatgtgctggtgaaaataatgtgtattttgcagctgttatataaaatgttctgtaaaggtctgttaggtctgtttgatttatggtgyggtttagatccaatgtttcttgattttctgtctagatcatctgcctaatgctgaaagtagggtgttgaagtccccacctattattgctttgaggtttatctctccctttagctttaataatattagctttatatatctgggtgctccaacattgggtccatatatatttccaattgttatgtcgtcttgctgaataaattcctttatttttacataatgttcttttttatatagcctttgtcttaaagtctgttttatctaatgtaagtatagctactcctgcttgtatttggattctgtttgcatgtcttttttccactccactttcagtttatgtgtgtctttacaggtgagatgagtttcct

SEQ ID NO: 367372 - DNA, 583 bp, Homo sapiens
aaatgttcctcttgttattgatttctaattttattccattgtggtcacataagatgatatgattgtaatttttaaaaattatttgagacttgttttgtgacctaacatattgtcaattctggagaatgttccatgtgctggtgaaaataatgtgtattttgcagctgttatataaaatgttctgtaaaggtctgttaggtctgtttgatttatggtgtggtttagatccaatgtttcttgattttctgtctagatcatctgcctaatgctgaaagtagggtgttgaagtccccacctattattgctttgaggttyatctctccctttagctttaataatattagctttatatatctgggtgctccaacattgggtccatatatatttccaattgttatgtcgtcttgctgaataaattcctttatttttacataatgttcttttttatatagcctttgtcttaaagtctgttttatctaatgtaagtatagctactcctgcttgtatttggattctgtttgcatgtcttttttccactccactttcagtttatgtgtgtctttacaggtgagatgagtttcct

SEQ ID NO: 367373 - DNA, 583 bp, Homo sapiens
aaatgttcctcttgttattgatttctaattttattccattgtggtcacataagatgatatgattgtaatttttaaaaattatttgagacttgttttgtgacctaacatattgtcaattctggagaatgttccatgtgctggtgaaaataatgtgtattttgcagctgttatataaaatgttctgtaaaggtctgttaggtctgtttgatttatggtgtggtttagatccaatgtttcttgattttctgtctagatcatctgcctaatgctgaaagtagggtgttgaagtccccacctattattgctttgaggtttatctctccctttagctttaataatattagctttatatatctgggtgctccaacattgggtccatatatatttccaattgttatgtcrtcttgctgaataaattcctttatttttacataatgttcttttttatatagcctttgtcttaaagtctgttttatctaatgtaagtatagctactcctgcttgtatttggattctgtttgcatgtcttttttccactccactttcagtttatgtgtgtctttacaggtgagatgagtttcct

SEQ ID NO: 367374 - DNA, 583 bp, Homo sapiens
aaatgttcctcttgttattgatttctaattttattccattgtggtcacataagatgatatgattgtaatttttaaaaattatttgagacttgttttgtgacctaacatattgtcaattctggagaatgttccatgtgctggtgaaaataatgtgtattttgcagctgttatataaaatgttctgtaaaggtctgttaggtctgtttgatttatggtgtggtttagatccaatgtttcttgattttctgtctagatcatctgcctaatgctgaaagtagggtgttgaagtccccacctattattgctttgaggtttatctctccctttagctttaataatattagctttatatatctgggtgctccaacattgggtccatatatatttccaattgttatgtcgtcttgctgaataaattcctttatttttacataatgttcttttttatatagcctttgtcttaaagtctgttttatctamtgtaagtatagctactcctgcttgtatttggattctgtttgcatgtcttttttccactccactttcagtttatgtgtgtctttacaggtgagatgagtttcct

SEQ ID NO: 367375 - DNA, 576 bp, Homo sapiens
ttgtcaaatgatttttctatgcagttgataaatgcattttagtgacttgtaacatttaagagagaaaaaaaaagaataatcattagggaaactgacaaatcacataataaaattttcatcttttgttttccatgttgttatcaaagttacggtgtagcagcttatttaagctctacyggaaaatttgagtaaataatacagaagaatgagaaacttgtgtatagtttgatggctgtgttataagttgcatatcatttaaaattaaatgatgaaaaataatttagaataacctttggtaatattctcaaggtctgagaaaggattaaacactttatcttttgaaaaatatatattatcagaaaattttagagcatcataatgaccatacaaatgaactatgctctattaatggaatggtggtgactaacatattagcactaatcacaagggctattgaccgcttaaaatgaggataatcataactgcagtcagaaatttggagaactggggtgggagatgtggtgacagtgtggtaaaacctgccctctgcaactaatgggtatgaaaaatggcatt

SEQ ID NO: 367376 - DNA, 576 bp, Homo sapiens
ttgtcaaatgatttttctatgcagttgataaatgcattttagtgacttgtaacatttaagagagaaaaaaaaagaataatcattagggaaactgacaaatcacataataaaattttcatcttttgttttccatgttgttatcaaagttacggtgtagcagcttatttaagctctactggaaaayttgagtaaataatacagaagaatgagaaacttgtgtatagtttgatggctgtgttataagttgcatatcatttaaaattaaatgatgaaaaataatttagaataacctttggtaatattctcaaggtctgagaaaggattaaacactttatcttttgaaaaatatatattatcagaaaattttagagcatcataatgaccatacaaatgaactatgctctattaatggaatggtggtgactaacatattagcactaatcacaagggctattgaccgcttaaaatgaggataatcataactgcagtcagaaatttggagaactggggtgggagatgtggtgacagtgtggtaaaacctgccctctgcaactaatgggtatgaaaaatggcatt

SEQ ID NO: 367377 - DNA, 576 bp, Homo sapiens
ttgtcaaatgatttttctatgcagttgataaatgcattttagtgacttgtaacatttaagagagaaaaaaaaagaataatcattagggaaactgacaaatcacataataaaattttcatcttttgttttccatgttgttatcaaagttacggtgtagcagcttatttaagctctactggaaaatttgagtaaataatacagaagaatgagaaacttgtgtatagtttgatggctgtgttataagttgcatatcatttaaaattaaatgatgaaaaataatttagaataacctttggtaatattctcaaggtctgagaaaggattaaacactttatcttttgaaaaatatatattatcagaaaattttagagcatcataatgaccatacaaatgaactatgctctattaatggaatggtggtgactaacatrttagcactaatcacaagggctattgaccgcttaaaatgaggataatcataactgcagtcagaaatttggagaactggggtgggagatgtggtgacagtgtggtaaaacctgccctctgcaactaatgggtatgaaaaatggcatt

SEQ ID NO: 367378 - DNA, 595 bp, Homo sapiens
gtctttacaatactgaaaagccagacatagagggttccattcaatctacacatacttgccttatacaacctgtagggttggaagacatgcttatgaggcgattcccagtttcagatcttaagatgtttttgtgatactcttgattttagtgaaaccataaaaaagagtaaaatgccttctgtcaagtagcacaggactatgtctattctgataaaacctgaactttagtccctgaagatgcttttgaaagagaatgccacaagacagktaaagcacaccagtaagatctccaggatgactgtgagggcaggaagtaaagtgaaagcacagcactgcaggtgctttattttcacctttcttccacttagaaagcaactcttctcacaattatcctatagtgcctcctaccctttggtttaactgaccatgtaagatgcattgagtatgagggctatctgttgtaatgacgtaatctctaatgttattctgcctatggaaatctctgattgttctggtaatgctgacacttcttacattatgacaaccattcttgaagagttttgtgaagattaaaaaaaattaagccacagtgttt

SEQ ID NO: 367379 - DNA, 603 bp, Homo sapiens
agaataaaaggaaatgaggaaaggagagagggaaagaagggggaaaaaagaaattatatctagtcatgctatgttcttaataaatgtggattttctttctttatttccttaaccctgaaatcgcaggggaacctgcaataatgctcaggaatcctagggcataggaattcctccctctttgagattccaggctaattcctgacacaggaccctcaaaaagctgctaatatctgtctagtttaatgattaatattctagcaaatatatattcttggctcatctcctaatttctaatattgagactaacagagagatagagttcaatctaccacactaagattcactggaaaaaacygatgtctttgatattggcctcttgcacactggtgtgaactgaggtaaaagaaaaactgttcccagaggaaaggtagttccatgcctaaaagtacatgtgtcataaaccagtggtactaaaatttgagaagcctaaacaaaaggttttaatgcaatagataactggcttattatgtaaactgtgccaatcttatgtgacgggcttatgccacacaaaacggaacattagaatgatctatctaaagcaag

SEQ ID NO: 367380 - DNA, 588 bp, Homo sapiens
actggtactcttaaaaatatttcctagttctagccaggagtggtggctcacgcctgtaatcccagcactatgggaggytgaggtgggctgatcacctgaggtcaggagttcgagactagcccgagattacgctattgcactccagcctgggtgacaagagagaggctccatctcaaaaaaaaaaaaaattctttttgaaagcaaacggacatgtttaatttatatagttcttctgagcacagtcgattacagcaacacattatagtcagtaagtccactttataatactgcttaaaagtatatagaggtaataattttgatgatggctcaataaaacaacatcttcgtatattctgatgggaatgtggattacaaaagactttctagaaacccactgagtactatgtatcaagaacccaaagttcaatatttttactcagtaattttagtcccaggaatcaaatgtaatagaaaaccaacagaaatttatgtaaaaaagataatttttatgacagtaaaaaactataagcaacctaaatatctaatagaaaaataattaaataaagcatagcacatctatataaagga

SEQ ID NO: 367381 - DNA, 546 bp, Homo sapiens
aaagctatctgcctataagaaagaggaagtatgaggagcacagttatctattaatcaacactgtgaactggaaacagataaagtgcaataaagaaggaaaaggaaatcatatggtaaacaccgttaacccaacggcacagttgatctgtctagaccttaggtcagataagctgtaataaagctataaaatccacgaaaaactaaagcttatttacaaaaactgcaaaatttgaattttctataattaatgccacttaaaatgaaagaatttaatatcaaatttcatgtataaacatgataaatttgaactctcaagtagaaacctcatctacaatacrctaagtgttaataattctaattgtcctataatccacacttcacagcatattctagagaaaatagctgttgggtttttatgacttaacttaaacttcacaacttttaaaataaaagtttaagagctaatttaaaaatgtatttaagaacctaaaatttagaaaatattaaaaattatattttcaaaatatcctcaacttgaagttatgg

SEQ ID NO: 367382 - DNA, 440 bp, Homo sapiens
gatcccaaacaggaatgctctaagacatattataaccaaattgtcaaaagtgaaagacaaagagagatcttgaaagtagtgaaagaaaagagccttgttccatataagtgaacatccaaaagacaatcagtagatttctcaagaaaaaccttgtaagccaggagggaatggaataatagattcaaagtgctaaaagaaaaaaaaaaaaaaaacctgccaaataaaacagtatatccacaaaagctgtccttcaaaaatgaaggagggataataacataaccagacaaaggaaaactgagggaggtcatcacaagacttaraaaaaatgctaaaaaaagctcttggagtggaaataaaaggatactagatgataaaataaaattatatgaaagaataaaacttactggtaaaaataaacatatagtcaaaatcagtatact

SEQ ID NO: 367383 - DNA, 440 bp, Homo sapiens
gatcccaaacaggaatgctctaagacatattataaccaaattgtcaaaagtgaaagacaaagagagatcttgaaagtagtgaaagaaaagagccttgttccatataagtgaacatccaaaagacaatcagtagatttctcaagaaaaaccttgtaagccaggagggaatggaataatagattcaaagtgctaaaagaaaaaaaaaaaaaaaacctgccaaataaaacagtatatccacaaaagctgtccttcaaaaatgaaggagggataataacataaccagacaaaggaaaactgagggaggtcatcacaagacttaaaaraaatgctaaaaaaagctcttggagtggaaataaaaggatactagatgataaaataaaattatatgaaagaataaaacttactggtaaaaataaacatatagtcaaaatcagtatact

SEQ ID NO: 367384 - DNA, 440 bp, Homo sapiens
gatcccaaacaggaatgctctaagacatattataaccaaattgtcaaaagtgaaagacaaagagagatcttgaaagtagtgaaagaaaagagccttgttccatataagtgaacatccaaaagacaatcagtagatttctcaagaaaaaccttgtaagccaggagggaatggaataatagattcaaagtgctaaaagaaaaaaaaaaaaaaaacctgccaaataaaacagtatatccacaaaagctgtccttcaaaaatgaaggagggataataacataaccagacaaaggaaaactgagggaggtcatcacaagacttaaaaaaaatgctaaaraaagctcttggagtggaaataaaaggatactagatgataaaataaaattatatgaaagaataaaacttactggtaaaaataaacatatagtcaaaatcagtatact

SEQ ID NO: 367385 - DNA, 639 bp, Homo sapiens
ctttgtgttacaaagaatccaactacactcttttagttattttaaaatatacaattaaattatttttgactagtcaccctgttgggtgatcaaatactagatcttactccttctttctagctatcgttttgtactcattaaycatccccacttccccggctcctactccccagttacccttcccaacctctggtaactgtcattctactctctatctccgtgagctcaattgttttaatttttagctcccagaaatatgtgacaacatgttaagtttgtctttctgtgcctcactgacacacaaaaaagaatgacagaacctcattcttttttaaggctgaatactactccattgcatatatgggccatattttctttatccattcttttgttaatggacacttaggttgctaccaaatcttagctattttaactagtgctgcaataaacatgaaagtgcatatatatcttcaatatactgatttcctttgttttgggtatatacctagcagtcagattgctggaccatatggtagatctgtttttagttttctgaagaacctccaggctgttctccatagtacttatacttatttacatttccgccaacagtgtacaaagattctcttttctccatat

SEQ ID NO: 367386 - DNA, 588 bp, Homo sapiens
gtggtgttatatccatgcagtggaatagtattcatcagtaaaagggaatagactactgctacatgccacaacataaaagaatcttaaaaatgaattatgataagtgaaaaagctmcatgaaagagatcacatattatttgattgcattaataaaaatatccaaaaagggcaaatttatagagagagaaaatatttgttgtctgggtctagggattgactccctaagggtatgaaggatctttgtagggtgacaaaaatattctaaaaatgaattgaggtgatggttatacaactctaaatttacttaatgtcattgagttatacacataacaagagtggattgtatgttatataagttatatctcaataaactgttatgcttattaaaactaagtatagagaaacctggcagacattctcctaagcaagcgaccaaggttaacataccccgagatatcatatacctttgatgttataagaagggcacatcacctcttttgtattcttctctaaaacctataatccgaatctagttacgggattggacaaatcaaagttgtaaaaggtttcacaaaatatctgaccact

SEQ ID NO: 367387 - DNA, 460 bp, Homo sapiens
tcattatgtttgaaaactaccattacatactaacattttatctgcatgtttatatctgttgacatttcaatcagcttatctgcattgttttcacgaaacagaataagcctctgagagtctatagacaggtctgaaaaaacaaaaggtgttgtgatagcacagagaggaatttaatgtcactttggaggaaataacctaaagtcctactctgccaagccagtaaaatcctgtcctctgcctgcaacacctggcccagtccatgctatcttgctgaatttcagtgcagctctttggataaactcaaattcaggtttggatggaataycaggttgatacaacagtcattttttttcaacagaagtgcaggttggactaccttttacctaccaaaatcacctcattctttgatatatagaacatttagctaattttattatgacttagtatgccagtactcctc

SEQ ID NO: 367388 - DNA, 563 bp, Homo sapiens
tattgatatgggtaagtaagatttatgaaatctagtgaagcactaaaaatatgctaacatattcgtaatgttacagatagcatggctttgcaacaaatttcttcagaaacttttttgagagggagaatgaaaatgatagttttcattcagaataattgtaartgtcttcaaaatgaagttcaaatccatggataggaggtggaaggaagccaagaaggaatccattataaggtgaaaatcataagtcctctttttgtgactctatcttgcccgtttaatagaagtgatataagtaagatctgccacctaggaccaaatatttctttctctagtacttaagacaagaagacgcagaatttcagaatactgtatgtgggttctcatctgtcaaccaaaagcagctgaaaaggcgagagccctggagaaatgtttcctacatatgtatttgtttttagacaaatgtgtttgtttaaaagtctaaaaaccatggaaatgggtaccatggaaatgcatagttgaggggtagaagccctagaagtgttgactcaattcttgatccttct

SEQ ID NO: 367389 - DNA, 563 bp, Homo sapiens
tattgatatgggtaagtaagatttatgaaatctagtgaagcactaaaaatatgctaacatattcgtaatgttacagatagcatggctttgcaacaaatttcttcagaaacttttttgagagggagaatgaaaatgatagttttcattcagaataattgtaagtrtcttcaaaatgaagttcaaatccatggataggaggtggaaggaagccaagaaggaatccattataaggtgaaaatcataagtcctctttttgtgactctatcttgcccgtttaatagaagtgatataagtaagatctgccacctaggaccaaatatttctttctctagtacttaagacaagaagacgcagaatttcagaatactgtatgtgggttctcatctgtcaaccaaaagcagctgaaaaggcgagagccctggagaaatgtttcctacatatgtatttgtttttagacaaatgtgtttgtttaaaagtctaaaaaccatggaaatgggtaccatggaaatgcatagttgaggggtagaagccctagaagtgttgactcaattcttgatccttct

SEQ ID NO: 367390 - DNA, 576 bp, Homo sapiens
tcactaaaaaaaggaacaaacacaaaattaatatctgaaaggctttcccttcctattctaatgtactatctcattataaaaaggtttgtgtgcttcttctaattacatgttcraataattttgacagagtagaccagccatatgcatttctgtccaactttctgacagacacaattgccttcttaatgacaagtacagtttcatactcacagatatatctgaaacccctagcatcgtgactagcacagattaggagctatgtaaatattctgcaaatgaatgaattagacgctatttcttttgattttacattttttttaattcagattctctttaggattgagcacaaactgctttgcctaaacttttatatttcttttgccaaggttcatgcagatcctctgaatatctgattttggattgatggtcttctgaattctattaatatagcatgttaattgctgatgcctgccttttccatagccatcacctctaattaatcaatctgctctatagaattgacctcctcaataagtctcaaatccattcactcctttctttctgctgtgtgaccac

SEQ ID NO: 367391 - DNA, 576 bp, Homo sapiens
tcactaaaaaaaggaacaaacacaaaattaatatctgaaaggctttcccttcctattctaatgtactatctcattataaaaaggtttgtgtgcttcttctaattacatgttcgaataattttgacagagtagaccagccatatgcatttctgtccaactttctgacagacacaattgccttcttaatgacaagtacagtttcatactcacagatatatctgaaacccctagcatcgtgactagcacagattaggagctatgtaaatattctgcaaatgaatgaattagacgctatttcttttgattttacattttttttaattcagattctctttaggattgagcacaaactgctttgcctaaacttttatatttcttttgccaaggttcatgcagatcctctgaatatctgattttggattgatggtcttctgaattctattaatatagcatgttaattgctgatgcctgccttttccatagccatcacctcyaattaatcaatctgctctatagaattgacctcctcaataagtctcaaatccattcactcctttctttctgctgtgtgaccac

SEQ ID NO: 367392 - DNA, 618 bp, Homo sapiens
aaggacttgtcagtcaggggtttgtggatcccaactttgcctccatttcctcaaagttaacatcaaccttgtataagtatgtcagatcttgcagacccttccaaagccaagagaggtagaacaggtgaataaactttcccttctcctaagctgagtgattaaagggagatcataggagtttcttcagggatctcagcagaatgctaacatcctgcctttacactacaggcccacagaccataaacccattttgcttcttacctcctgtaggattcccatcattaaggacacttcaacaaccagacttgagtcttaaagagtggacagggaaaactaacagtccatctaagaggtcccagcaaaccagagaaaggaagatcaggtagaacactcaaaatgagttctcatgaaacagaactgccaaaggaaataggcagragcctgaatagaaaataaggttgctaagctgttctaaaagcagttttaaaatactttacttgcataaaaatataatttttctttgaaaattcagtaaattaaagatgattattattaaggctctaattagtgctctggaagatcaaatgcaagaaatacttcaaagtactgaacaaaaaa

SEQ ID NO: 367393 - DNA, 482 bp, Homo sapiens
ctatcccattcaaaaatgtctctgtgtgtatatataaactatttgtatttccttgactctgaaatgcttattgttttcacattgtaatttttctgatatcaagatgcctctttgtcaccatctgccatgtgtcagtcattgcggcaccctccttgcctacacatgcacatcaaagcatgtgcacccaactgcaggaggattggaggcttgcgggaataccacagaggtaacagtggggcactgtcacaggcaataatgcatcacgggagctctggatgcacagaggatgatggggtgtggaaaagcacataccccaaagcctaggaattgaaaagggattcagaagagtcagactccaaaggcaacgtttttaaaatatctcacccaactaatgtcactaatagttttcttctcatgtgtgcaaaggaatgatstctaaatagatctaaaaggactaatttaataagcttaaaataaaaatg

SEQ ID NO: 367394 - DNA, 579 bp, Homo sapiens
ctctgccatgctgtgaaaagataacctgctttgggtgctctgataccttttcagcaaacaaaaggttcaatcacataaaacacttgaagcatttcagatcccaggatgtttcttcaagttgggtctagcctgattcacggtgacagcttctctgaagttgtattctttaagaagcaataattgtcatttgggggccttccgggtgaaaaggtaaaacagaagcaactgagctagaacacacaatcgcacagcaaaagaaatgctcagggtgtcaagggcaatgaagtgagtactttaatgtgtatttgactttaaagtcgatctcttcattttctccactttcttaggcaaatagcaaatacaacaaactgtctttaaaatttgagatgtatttcaataaacttcatatccaacacactgggcttctaagctctccttatacatataaatrgaaatagttagactttagatgaaaaaactctgacagaacaaagaaggaccatgatctaatatcagaataaagttaacaaacgtcattaagtgagatgattggtgatgagtgaaggtcatgcccagttt

SEQ ID NO: 367395 - DNA, 592 bp, Homo sapiens
atgaacctcttcacatattttaagtagtaatctgaaattttcatcatacatttgaaagcatatttttaatagyaggtagaaaatctttaaaattcagagtaaatagttcattgcacaatgtgataaaataggcttttgctaccttaggcaataatataccaaatccaaaagaaatcatgtataacttttatccaagggtgttggcaaatgtgtcttgaaaaattttgtaatctgagaaaaccctccatattaaaaattaaatatacattttaaagagtcataattattaacctacaccattttggaggttctgaattcagagcatctcaatacagattcagctctaccctagatggaaatatgtacaaaacagggcaagatagaaaatcctcaccaatttgagatactttaattaggcttctctaaaacaatatttctatttatgactttgtttggtcacagaggtgtttacactctgggacaatccaccagaataagattctacttaggggtaaatatgaatacaggtgagttctcagagagcattaaaaaaatacaaatggaagacaagcaaagatcagaaattgattaa

SEQ ID NO: 367396 - DNA, 592 bp, Homo sapiens
atgaacctcttcacatattttaagtagtaatctgaaattttcatcatacatttgaaagcatatttttaatagcaggtagaaaatctttaaaattcagagtaaatagttcattgcacaatgtgataaaataggcttttgctaccttaggcaataatataccaaatccaaaagaaatcatgtataacttttatccaagggtgttggcaaatgtgtcttgaaaaattttgtaatctgagaaaacmctccatattaaaaattaaatatacattttaaagagtcataattattaacctacaccattttggaggttctgaattcagagcatctcaatacagattcagctctaccctagatggaaatatgtacaaaacagggcaagatagaaaatcctcaccaatttgagatactttaattaggcttctctaaaacaatatttctatttatgactttgtttggtcacagaggtgtttacactctgggacaatccaccagaataagattctacttaggggtaaatatgaatacaggtgagttctcagagagcattaaaaaaatacaaatggaagacaagcaaagatcagaaattgattaa

SEQ ID NO: 367397 - DNA, 559 bp, Homo sapiens
gtgggtgcatgtgtgtacatgtgttgctgtgcgttgtgtctgagtgagagagaatgagaataaataagactcacagagacttctatggtgaagttggaggtgacagtgtactgagaaatagttaatgtgtctgattttataataaaacatattggaagagaagagaaaatgatgagatgcagctctaaagagaaatgatactgatggaagtagtgaagcaaggtttatattaggccatatttgcaacttgaggtaccttcttttaaaattattgtaaaatgcaaacttctataggcaatgcaaaaattatcctttcaaatcaaaagcagtgctttgggaatctggaatcaaaccattagattaagcctataaaatcagagcacaaacagtcaaaaccaagatgctgyattttcaggaaaacttgattaaatgggcgcaaacacatttcaaatacccagggattctctggaatggggttctaaacaaacttcctaggaaataattacagaactggaggactgaaacaaagaaaaatgattgcaatcccttcttaaatctt

SEQ ID NO: 367398 - DNA, 559 bp, Homo sapiens
gtgggtgcatgtgtgtacatgtgttgctgtgcgttgtgtctgagtgagagagaatgagaataaataagactcacagagacttctatggtgaagttggaggtgacagtgtactgagaaatagttaatgtgtctgattttataataaaacatattggaagagaagagaaaatgatgagatgcagctctaaagagaaatgatactgatggaagtagtgaagcaaggtttatattaggccatatttgcaacttgaggtaccttcttttaaaattattgtaaaatgcaaacttctataggcaatgcaaaaattatcctttcaaatcaaaagcagtgctttgggaatctggaatcaaaccattagattaagcctataaaatcagagcacaaacagtcaaaaccaagatgctgtattttcaggaaaacttgattaaatgggygcaaacacatttcaaatacccagggattctctggaatggggttctaaacaaacttcctaggaaataattacagaactggaggactgaaacaaagaaaaatgattgcaatcccttcttaaatctt

SEQ ID NO: 367399 - DNA, 571 bp, Homo sapiens
ccagttggtccagaactggggagaactgagtcctagtcctttgtaggcctctagtctagtaatattcaagaaatggttcttgaatgtttcaataagtggatgttaaatcatcacagcaattaactatagctaccaatcattactaaacgattccttacctttgaacaatgtggtgaatgctttaggaaaatgtattttattcatctgaaaattaatcacaagaagacattttaatgattcaaataatatactgaattctgtcctgattgaatttgagtacatgtcaaaaaaattttatttcacaagataatttatatgcaattaattttgaatttatggtaatgattttttttttagttttgtgagagataatttacacgtaaaattcttcctttttaggtatacagttcaatgaactttgacaaatttaagtgawgcagttgccatcacaatcaagatacatacatacagaaaatttccataatctcaaaagtttccttcaagttcctttgtagataatcccatctcccttccctagaaaccattggtatgatttattttcatctagttt

SEQ ID NO: 367400 - DNA, 581 bp, Homo sapiens
gagagttcctcatcttggcaagggtccttcagctagtgatagcagggctagatagaggtttccagaatcctcattgagtgcttcaagttacaattgaattgtaaaatgtaaaagagaaatagagtatgtgagagaccagaatatgctaccccaaaatataaaggattgttgagctgaagacaatttagaagaagcagacacagaacagctctctggtytccctctgtttgcctaaatgcagggcatggatttataaaaaagaacggtatctcataccattattagttgtcaattttaaaaataaaataaaacatataagtaaatagcaaaaggggtatcctgcctctctctctgccagagagaacagaggttaaccactaaaatcagctttggacccctattagccttgcgatggcatcagaagaaactacattaacaagctttactaactagccgtatctgccagttatttgccttttctcaagctgccacctgtagagactcaaagtcctcttcctttgtcttgccacctctctaaaaatgtactgttctgtgttgaagatgctatataagctggaatt

SEQ ID NO: 367401 - DNA, 581 bp, Homo sapiens
gagagttcctcatcttggcaagggtccttcagctagtgatagcagggctagatagaggtttccagaatcctcattgagtgcttcaagttacaattgaattgtaaaatgtaaaagagaaatagagtatgtgagagaccagaatatgctaccccaaaatataaaggattgttgagctgaagacaatttagaagaagcagacacagaacagctctctggtttccctctgtttgcctaaatgcagggcatggatttataaaaaagaacggtatctcataccattattagttgtcaattttaaaaataaaataaaacatataagtaaatagcaaaaggggtatcctgcctctctctctgccagagagaacaraggttaaccactaaaatcagctttggacccctattagccttgcgatggcatcagaagaaactacattaacaagctttactaactagccgtatctgccagttatttgccttttctcaagctgccacctgtagagactcaaagtcctcttcctttgtcttgccacctctctaaaaatgtactgttctgtgttgaagatgctatataagctggaatt

SEQ ID NO: 367402 - DNA, 552 bp, Homo sapiens
atgattcgagaagcaaaaaacaacccaccacatttaaaaaagggcaaaggatgtgartaggcacttctcaaaagaagacatacacacaaccaacaagcatgtgaaaaaatcccccacattactaatcactaaagaaatgtaaatcaaaaccacaatgagatatcatcttacaccagtcagaatggctatttttacaaagtcaaaaaataacggatactagtgaggctgtggagaaaagggaacacttatacactgctggtaggaatgtaaattagttcagccactgttgaaggcagtttggagatttttcaaagaactgaaaacagaactaccattagactcagcaatcccattactgggtgtataccaaaaagaatataaatcattctaccatgaagatacatgcatgcatatgctcatcatagcacagtgaatacatagcacatattcacaatagcaaagacatggaattaacctagatgcctatgaacagtggactggatgaagaacatgtggtacatatacaacatggaatactacacagctgttaaa

SEQ ID NO: 367403 - DNA, 550 bp, Homo sapiens
atttaccaataactctattcagatcaagttatactatttagacattaagtaccttgattattacttaaaattacatgtaatttcttcatttcctcctccyttctttccttccctctctcttttttccttcccctaccttcctccctccccatccctaaaatatttatttagcacttccagtgtcaaagtgccagacttcagaaatataattgtgagcaaagtcaatgaggaacctgacctcagagagcacagcacctagctataaagagagacattaagcatgcaaatataataaagggtgatcaatgttataagaaggaaatactaaaatgggtaaacttttcagtggggatattacagtttgtgatttttaaaatataatagttccaaagcgattttagcagaatgcctaaagtagcagtgactaataatatgtttacattttttccttcttctttggacctttgacgccattatcatgttctgtctactttttgttctcccctcctttccctctctagcaacacaattctgtgttatttttcacctg

SEQ ID NO: 367404 - DNA, 521 bp, Homo sapiens
aatggctgggctgggattgttctggagggtgatgggatgggttaaatgtgggaaacttccatgatgtaggtgccttggtctgggttgggttgaagaaagttagtggcttggtagaggagaaaagcaattttgcttagtgaatacagtgtaacttggacaaagactgaagtagaggatgggagtctgtttattttatctggaggtatagcaagatggagaaacatacaggyaagacagataatggatagaattatttgaaaccaagattagcagggttgacactggaggggtataagtcacatacccaataaagctccattttagctttgttggaatctgatagacaaaaaattgcacgcttttaatgtatatgtcttgatgagtttggatataagcataccaaactgtgataccattaccttaactaaagcaataaacatattcatcatctccaaaaatgtccttgtgtttgtttgtgtttctcttcttccttttctttggtaggaacacttaacatgaga

SEQ ID NO: 367405 - DNA, 521 bp, Homo sapiens
aatggctgggctgggattgttctggagggtgatgggatgggttaaatgtgggaaacttccatgatgtaggtgccttggtctgggttgggttgaagaaagttagtggcttggtagaggagaaaagcaattttgcttagtgaatacagtgtaacttggacaaagactgaagtagaggatgggagtctgtttattttatctggaggtatagcaagatggagaaacatacaggcaagacagataatggatagaattatttgaaaccaagattagcagggttgacactggaggggtataagtcacatacccaataaagctccattttagctttgttggaatctgatagacaaaaaattgcacgcttttaatgtatatgtcttgatgagtttggatataagcataccaaactgtgataccattaccttaactaaagcaataaacatattcatcayctccaaaaatgtccttgtgtttgtttgtgtttctcttcttccttttctttggtaggaacacttaacatgaga

SEQ ID NO: 367406 - DNA, 601 bp, Homo sapiens
gactaacaccatcatggctcaggtagaggcttctgtaaacagactatactgcaccaccactcttggccacatctagttatttactcgtgttgaccttagtgccactgaggaccattgaggattattgcacacataaaattatgtctcccctatttataatcacctattaatgtcacttatcattcattcactctctccctcagtcattctacaaacatttgttaagcatttactatgcgtgaggcactgtcttaggtgatggggacatcagatctagcagagtgcctgacataaatgtgggaacttgtgtttatctctgttgaatatcatcttgttggattgggttgggatcaccartctttctgtctctatctctttcttgctctcccttcttttttttttctctctctctctctcgggtgtgtgcatgtgtgtgatatagacataaagatatagagtatgcatagtttatatatgtatatgtatgtgtgtttatgcatatatatatattctagtgtttgtgaagtttcccatttatgtattgatgagtctagttaggtagagggaagaaagtttatcatggaggtaaattatggattat

SEQ ID NO: 367407 - DNA, 601 bp, Homo sapiens
gactaacaccatcatggctcaggtagaggcttctgtaaacagactatactgcaccaccactcttggccacatctagttatttactcgtgttgaccttagtgccactgaggaccattgaggattattgcacacataaaattatgtctcccctatttataatcacctattaatgtcacttatcattcattcactctctccctcagtcattctacaaacatttgttaagcatttactatgcgtgaggcactgtcttaggtgatggggacatcagatctagcagagtgcctgacataaatgtgggaacttgtgtttatctctgttgaatatcatcttgttggattgggttgggatcaccagtctttctgtctctatctctttcttgctctcccttcttttttttttctctctctctctctcgggtgtgtgcatgtgtgtgatatagacataaagatatagagtatgcatagtttatatatgtatatgtatgtgtgtttatgcatatatatatattctagtgtttgtgaagtttcccatttatgtattgatgagtctagttaggtagarggaagaaagtttatcatggaggtaaattatggattat

SEQ ID NO: 367408 - DNA, 622 bp, Homo sapiens
tgtgtgtgtgggagatgaggctggttagcatatttgtgataagcatgggttttggagtcagacctcctgagatcgaatgtgggttccatcacttacctgctatgtgactgagggcaaaatgcttagattccccaagtttcagtgccatttgtatacatccctgtatactcaggaataataatagtttctgttcaaagggttattgtggtaattaaatgagwttatgtgtataaagtggttagtatagtgtctgagacatattaaagatcagtagatggtagataaaattatgtaagaaaaagaattgactttcaaggaaggaaaatgggactcgatgtcaaagtccattggagccaactttagaggctatttgaactaaagttttactgggatttgacattgaattttgctgggtttcagaccgttctgaaaaatatttttactggagcaaaatgttggttgtgacaaaacttactgccataggagttgacttggattagtaagtagttaaattaattgtaaaaaaaaaatctctgaatctcaaatgtggcttctttacttactttttacacatttcactttccacaataactcagaataggcggtataatttttctgtaac

SEQ ID NO: 367409 - DNA, 622 bp, Homo sapiens
tgtgtgtgtgggagatgaggctggttagcatatttgtgataagcatgggttttggagtcagacctcctgagatcgaatgtgggttccatcacttacctgctatgtgactgagggcaaaatgcttagattccccaagtttcagtgccatttgtatacatccctgtatactcaggaataataatagtttctgttcaaagggttattgtggtaattaaatgagattatgtgtataaagtggttagtatagtgtctgagacatattaaagatcagtagatggtagataaaattatgtaagaaaaagaattgactttcaaggaaggaaaatgggactcgatgtcaaagtccattggagccaactttagaggctatttgaactaaagttktactgggatttgacattgaattttgctgggtttcagaccgttctgaaaaatatttttactggagcaaaatgttggttgtgacaaaacttactgccataggagttgacttggattagtaagtagttaaattaattgtaaaaaaaaaatctctgaatctcaaatgtggcttctttacttactttttacacatttcactttccacaataactcagaataggcggtataatttttctgtaac

SEQ ID NO: 367410 - DNA, 622 bp, Homo sapiens
tgtgtgtgtgggagatgaggctggttagcatatttgtgataagcatgggttttggagtcagacctcctgagatcgaatgtgggttccatcacttacctgctatgtgactgagggcaaaatgcttagattccccaagtttcagtgccatttgtatacatccctgtatactcaggaataataatagtttctgttcaaagggttattgtggtaattaaatgagattatgtgtataaagtggttagtatagtgtctgagacatattaaagatcagtagatggtagataaaattatgtaagaaaaagaattgactttcaaggaaggaaaatgggactcgatgtcaaagtccattggagccaactttagaggctatttgaactaaagttttactgggatttgacattgaatkttgctgggtttcagaccgttctgaaaaatatttttactggagcaaaatgttggttgtgacaaaacttactgccataggagttgacttggattagtaagtagttaaattaattgtaaaaaaaaaatctctgaatctcaaatgtggcttctttacttactttttacacatttcactttccacaataactcagaataggcggtataatttttctgtaac

SEQ ID NO: 367411 - DNA, 545 bp, Homo sapiens
cctcatgtgaggtatgttttggaattcagaatattccaagctttagaaaggtaattgagtgatagatgtagtcatacatctattatggcgtaatatatataccccaagcaaggtctgaggaaccacttttttattatttgcagtttaattcatggatattatcattcaatagcaaacagattgactatgaataacttcacattaggctagttcaggttttgcayttacaaaaacctttccattttcagagcttttggattttggcatcttggataaaggcatgtggactttaaaaaatcccccttgattacgtataatcagaataccttgattttacgtgcacagtttggtgagttttaacaaatgtgttcactcacaatcaagacacagaatgcttctaccatcccaagatttccctcgtgtcccctcagtgtaggcccaggccactgacctactttctattaccataagcttaatttgtttttttcctagcattttctgtaaaagaaatcatagagtatttactctttttatgtctggcttcc

SEQ ID NO: 367412 - DNA, 545 bp, Homo sapiens
cctcatgtgaggtatgttttggaattcagaatattccaagctttagaaaggtaattgagtgatagatgtagtcatacatctattatggcgtaatatatataccccaagcaaggtctgaggaaccacttttttattatttgcagtttaattcatggatattatcattcaatagcaaacagattgactatgaataacttcacattaggctagttcaggttttgcacttacaaaaacctttccattttcagagcttttggattttggcatcttggataaaggcatgtggactttaaaaaatcccccttgattacrtataatcagaataccttgattttacgtgcacagtttggtgagttttaacaaatgtgttcactcacaatcaagacacagaatgcttctaccatcccaagatttccctcgtgtcccctcagtgtaggcccaggccactgacctactttctattaccataagcttaatttgtttttttcctagcattttctgtaaaagaaatcatagagtatttactctttttatgtctggcttcc

SEQ ID NO: 367413 - DNA, 545 bp, Homo sapiens
cctcatgtgaggtatgttttggaattcagaatattccaagctttagaaaggtaattgagtgatagatgtagtcatacatctattatggcgtaatatatataccccaagcaaggtctgaggaaccacttttttattatttgcagtttaattcatggatattatcattcaatagcaaacagattgactatgaataacttcacattaggctagttcaggttttgcacttacaaaaacctttccattttcagagcttttggattttggcatcttggataaaggcatgtggactttaaaaaatcccccttgattacgtataatcagaataccttgattttacktgcacagtttggtgagttttaacaaatgtgttcactcacaatcaagacacagaatgcttctaccatcccaagatttccctcgtgtcccctcagtgtaggcccaggccactgacctactttctattaccataagcttaatttgtttttttcctagcattttctgtaaaagaaatcatagagtatttactctttttatgtctggcttcc

SEQ ID NO: 367414 - DNA, 545 bp, Homo sapiens
cctcatgtgaggtatgttttggaattcagaatattccaagctttagaaaggtaattgagtgatagatgtagtcatacatctattatggcgtaatatatataccccaagcaaggtctgaggaaccacttttttattatttgcagtttaattcatggatattatcattcaatagcaaacagattgactatgaataacttcacattaggctagttcaggttttgcacttacaaaaacctttccattttcagagcttttggattttggcatcttggataaaggcatgtggactttaaaaaatcccccttgattacgtataatcagaataccttgattttacgtgcacagtttgrtgagttttaacaaatgtgttcactcacaatcaagacacagaatgcttctaccatcccaagatttccctcgtgtcccctcagtgtaggcccaggccactgacctactttctattaccataagcttaatttgtttttttcctagcattttctgtaaaagaaatcatagagtatttactctttttatgtctggcttcc

SEQ ID NO: 367415 - DNA, 493 bp, Homo sapiens
taggggactcaaaaaggcactaggagatgtggaaaggcactggggaacaaggaaggcaactgtcttgcttaggtggctgttggaaagcccgacagtttctatttaaatggagttttaatggtcctggagcaatagctgtatggaggaaartgttgatggctgggtcccaactctacttccaatagctagaaacatacatgcaaaaagcatgaataaggtcttctcaaacagaaaattaaatataactggctaagaaaatacaccatctctggatttgaaaatatgatccccaaaaatcattctctacagcatttcttcttctgtttctccagcatggttggaaggcaggaaacccaaaagcaaccatttaagaggtgggtgcaagggaagaaacacaacataagcatttgtcaaagggtgtcccatggaataattgagtagacagaagttagaatgatggtgggagaagatctgtggataagtgagtttgaga

SEQ ID NO: 367416 - DNA, 493 bp, Homo sapiens
taggggactcaaaaaggcactaggagatgtggaaaggcactggggaacaaggaaggcaactgtcttgcttaggtggctgttggaaagcccgacagtttctatttaaatggagttttaatggtcctggagcaatagctgtatggaggaaagtgttgatggctgggtccmaactctacttccaatagctagaaacatacatgcaaaaagcatgaataaggtcttctcaaacagaaaattaaatataactggctaagaaaatacaccatctctggatttgaaaatatgatccccaaaaatcattctctacagcatttcttcttctgtttctccagcatggttggaaggcaggaaacccaaaagcaaccatttaagaggtgggtgcaagggaagaaacacaacataagcatttgtcaaagggtgtcccatggaataattgagtagacagaagttagaatgatggtgggagaagatctgtggataagtgagtttgaga

SEQ ID NO: 367417 - DNA, 390 bp, Homo sapiens
attttgaaagggaagagcaaactcagagttgggtgtctatacaaggtatcatccctggagagttccctatagaggcagaggagcctcagatccaaagcaggcagacaattgaacaggaagcctgacacaatgtactcccatgtcttgggcaagatttgcaaccatcacgttttaccccctgattagaatgggaagaaaaagaccatgttgcttccaaggttagccacttgggacaggcagatgtgagcgaagggcaaggttargtactaaaagtggcggggggcggcggtgggggcgcggtacttggtgtgtcatgattgtaagacaactcatttttccacaaatgaaaaaaagtccatgttgtcttatctcccttaacatgagaatgaa

SEQ ID NO: 367418 - DNA, 390 bp, Homo sapiens
attttgaaagggaagagcaaactcagagttgggtgtctatacaaggtatcatccctggagagttccctatagaggcagaggagcctcagatccaaagcaggcagacaattgaacaggaagcctgacacaatgtactcccatgtcttgggcaagatttgcaaccatcacgttttaccccctgattagaatgggaagaaaaagaccatgttgcttccaaggttagccacttgggacaggcagatgtgagcgaagggcaaggttaggtrctaaaagtggcggggggcggcggtgggggcgcggtacttggtgtgtcatgattgtaagacaactcatttttccacaaatgaaaaaaagtccatgttgtcttatctcccttaacatgagaatgaa

SEQ ID NO: 367419 - DNA, 638 bp, Homo sapiens
tgtgctttcaggcatgggaaggatacctccaagacaaggcaggacagctactgcctgaggttaatgtttttaggattttagactactttacaagttgagtttgtattgtttgtgaatcttcatttccgtgtgggtgctttttctgcaattagagggttctaacgccagatggcacctttgttataaggtctgaagaactggaattctcaygtaatatatgagtgtatatgtgtgtataaatgtataaatgtatttatgcacccttagtgtatgtatatttacatatgtatgtgcatatatgtgtgtgcatatactttatgtaatacatgatggctttacaaaaatttaacatggtggcaaaagaggatagactctggatcttgactgtgtggaatcaaagcccagctctgttatctattagccctgatgattttggaaagttatgtaatctgcctgcaaagcagtttcctcatttgtaaaatgcggttaataatagagcctatttcatagggttgtgagagttaaatgagttaatatatttaaatgctttgcatagtgcctggtatatgataactacataaatgttaactcttatttacataatttattccaaagttgatctgtggccaggtgcggtg

SEQ ID NO: 367420 - DNA, 638 bp, Homo sapiens
tgtgctttcaggcatgggaaggatacctccaagacaaggcaggacagctactgcctgaggttaatgtttttaggattttagactactttacaagttgagtttgtattgtttgtgaatcttcatttccgtgtgggtgctttttctgcaattagagggttctaacgccagatggcacctttgttataaggtctgaagaactggaattctcacgtaatatatgagtgtrtatgtgtgtataaatgtataaatgtatttatgcacccttagtgtatgtatatttacatatgtatgtgcatatatgtgtgtgcatatactttatgtaatacatgatggctttacaaaaatttaacatggtggcaaaagaggatagactctggatcttgactgtgtggaatcaaagcccagctctgttatctattagccctgatgattttggaaagttatgtaatctgcctgcaaagcagtttcctcatttgtaaaatgcggttaataatagagcctatttcatagggttgtgagagttaaatgagttaatatatttaaatgctttgcatagtgcctggtatatgataactacataaatgttaactcttatttacataatttattccaaagttgatctgtggccaggtgcggtg

SEQ ID NO: 367421 - DNA, 638 bp, Homo sapiens
tgtgctttcaggcatgggaaggatacctccaagacaaggcaggacagctactgcctgaggttaatgtttttaggattttagactactttacaagttgagtttgtattgtttgtgaatcttcatttccgtgtgggtgctttttctgcaattagagggttctaacgccagatggcacctttgttataaggtctgaagaactggaattctcacgtaatatatgagtgtatatgtgtgtataaatgtataaatgtatttatgcacccttagtgtatgtatatttacatatgtatrtgcatatatgtgtgtgcatatactttatgtaatacatgatggctttacaaaaatttaacatggtggcaaaagaggatagactctggatcttgactgtgtggaatcaaagcccagctctgttatctattagccctgatgattttggaaagttatgtaatctgcctgcaaagcagtttcctcatttgtaaaatgcggttaataatagagcctatttcatagggttgtgagagttaaatgagttaatatatttaaatgctttgcatagtgcctggtatatgataactacataaatgttaactcttatttacataatttattccaaagttgatctgtggccaggtgcggtg

SEQ ID NO: 367422 - DNA, 345 bp, Homo sapiens
acaagtaagggccctgatttatacaatctaattaggagaatccctagtgactggtccaggtaatccagatgtaagtcaatcagtagatrgcattttcctgaacaatggaatttatgcaggtgtaagaaggggtgttgacctaggtaatcccaacaaaatgtgagtggaggttttctggagctttggggaaataaggtgtcttgtgatatattgatgcaaaccctgagctgctaagttcttgctactacatgggaggcaaactgaagatgttgctgatttcatacaggaagaatagagagaccaaagaaagccaacccttgaagatattacgaaaccgttggcagg

SEQ ID NO: 367423 - DNA, 345 bp, Homo sapiens
acaagtaagggccctgatttatacaatctaattaggagaatccctagtgactggtccaggtaatccagatgtaagtcaatcagtagatagcattttcctgaacaatggaatttatgcagktgtaagaaggggtgttgacctaggtaatcccaacaaaatgtgagtggaggttttctggagctttggggaaataaggtgtcttgtgatatattgatgcaaaccctgagctgctaagttcttgctactacatgggaggcaaactgaagatgttgctgatttcatacaggaagaatagagagaccaaagaaagccaacccttgaagatattacgaaaccgttggcagg

SEQ ID NO: 367424 - DNA, 383 bp, Homo sapiens
ctgagacccatacagtccttcttgatacaagatcaaaatacatatctwtattagcctgttcttgcactgctataaataaatatctgagactgggtaatttataaagaagacaggtttaattgactcacagttctgcaggctgtgcaggaaggatggcagcatctgcctctggggaggactcagggagcttttactcatggcaaaggcaaagtggaagcaggtgtcttacatggtagaagcaggaccaagagggtcgagggaggtgatacagacttttaaacaaccagatctcccgagaactctatcactatacagtactaagggggaatggtgctaaaccattcatgagaactctgcctctgtgatccaatcacctcccacca

SEQ ID NO: 367425 - DNA, 383 bp, Homo sapiens
ctgagacccatacagtccttcttgatacaagatcaaaatacatatctttattagcctgttcttgcactgctataaataaatatctgagactgggtaatttataaagaaracaggtttaattgactcacagttctgcaggctgtgcaggaaggatggcagcatctgcctctggggaggactcagggagcttttactcatggcaaaggcaaagtggaagcaggtgtcttacatggtagaagcaggaccaagagggtcgagggaggtgatacagacttttaaacaaccagatctcccgagaactctatcactatacagtactaagggggaatggtgctaaaccattcatgagaactctgcctctgtgatccaatcacctcccacca

SEQ ID NO: 367426 - DNA, 383 bp, Homo sapiens
ctgagacccatacagtccttcttgatacaagatcaaaatacatatctttattagcctgttcttgcactgctataaataaatatctgagactgggtaatttataaagaagacaggtttaattgactcacagttctgcaggctgtgcaggaaggatggcagcatctgcctctggggaggactcagggagcttttactcatggcaaaggcaaagtggaagcaggtgtcttacatggyagaagcaggaccaagagggtcgagggaggtgatacagacttttaaacaaccagatctcccgagaactctatcactatacagtactaagggggaatggtgctaaaccattcatgagaactctgcctctgtgatccaatcacctcccacca

SEQ ID NO: 367427 - DNA, 572 bp, Homo sapiens
agagaaaaataaagatagcaagaaaaaaaattgcaagattcaagtagattccaggaaccagtgccatcaataacatgtgtcactcttgatgacattaggagccaaattctggacttcacagccagccaccgggggaagtttttgctggtacagtcactacataaactcccatttggtctttttggtaccccctgctcagcaggcatcctgtaaattttcttgactctatttcacaagatttctgaacctgcacgtcctccctgtgyggtaagtgccagcaagactgaggtcacagcaacactcactcctggagttttgaggaaggtgatgggaagcagctgttctgtgctcggttactgaaaatcacctgctgccttggaaaggctaaaaaccaaccactccagaataattcccccttcctgcttttatgccatcctcattcattcattcattcattcattcattcattcattcatctattcaaaaacgattcacagagcatcaactatggggccaggcattcccaccaccactgctttggtccagtaggatctgctcagagaaagaggaag

SEQ ID NO: 367428 - DNA, 613 bp, Homo sapiens
ttatgataatccacttccagttaatgaggagtaactatatttcgtcttccttatgattttcttaatagcattttcttttctctagcttattgtaagaatacagtatataacacatatgacatgcagaatatgtgtttatagactgtttatgttattaaagcttccagacaacataagctattagtaattgagttttggaacagtcaaaagttgtacactgattttctactgtgsaaggagttgacacccataacccccatgttgttcaaggttcaactgtataaatatataagtactgctttatctgcattgaataaatctgatacataatattttcctttttattccattctattttccacatttcatttttatttttctttgacccatgagctattttgtctttaaattttaaaacgtgtgattgtacttcattaatctttttgtagtatatttctaacttagttgcattgtgatcagagaatacagtctgcataacagttctataaaatttaatcagacatattgcagtaactagtcagttttcataaatgttcggtggatgcttgaaaaggataatttttctctaatggcttggtattggagtcaaagt

SEQ ID NO: 367429 - DNA, 588 bp, Homo sapiens
tgacctacagcagtttctgaataatttttaggatgtacacaggctatcttgtttcatataagataaaaaattcagcttcaatgttcttccaatttttttgtctttagttttaagcatgcttgcaatgacatgctttactctaagcttcgcttctcccttacaagaattgggtgtacaacatattctccacacatatgaccagaaatgtgatactgtaatggtctagtagtgtgacatcaactctaacactgtgagacacatccactgtaatgcagccatcaaatcttggccaattacttgatatcatcatgtgcttactgaatagttggcaaaatccagttttgtcaacagtttaaacacattcatcgcaatgtttttattgtttcctacattttgcttgtattagaaatggaatagcaagcatgcttataataatacggtctttctgattattaatgcagttatgtaaggtcctagacaacttaccaattgtaaatttaatgagtatattccatccyatctcattagtcatgactcaaactagtaggactagctccagtagaattacacctgatctcctctgccttt

SEQ ID NO: 367430 - DNA, 539 bp, Homo sapiens
aacggagaaactcataagactattgaaatgggaggagttttctcttacccatcccagggggcatgcgatgggggtgtggctcacttcttcagtgccccacagctcaaacccctatgggcaagtcatggggagcgtgggctctgaccccacagcagcgtctagggttgagtgtttatagctcctgaagccccagagggtgtgttttgcactgtgctctttcagcttagccatccaacaagccattgagcttatgttaatcagctcaattagaccctctgccttaytgcaaggacacagggttttctgtatcctggggttcttgccctagtgtacccgaaaaatcagatcacatgtgggcttggagaatgagtgtaaggttttattgagtgctggaagtagctctcagcagatggatggggggatggagtgggaaggtgatcctcccctggagtcgggccactcagcagccactcctccaactgccctcagccaaatttccctcggcatctgcatcgttccaccatcgatggcctgccggt

SEQ ID NO: 367431 - DNA, 604 bp, Homo sapiens
taaaaattataagtacgtatgcacctaayattgttgcaccaaaatatataaaccaaatattaatagatctgaaaagagagaccaaatgaaagataataatggttggggacttcaatatcctcctttcagtaatggatagatcatccagacagaaaatcaataataaaacagcagacttgaacaacaacacccaatagacctagcagtcataggcaaaacattctatccaacagcaacaaaatacacattttatcagccacaaacagaacattctccaggatatatcatatgttaggaaacaaaaaaaaattaacaacttttagaagactaaaattgtaagactaagattttctaacaatggtatgaaacaaatgttccttccccagtagtatgaaactagaaatcagtagcaaagaaaattgaaaaattccaaatacttggaaattaacacactcctaaacaactaatgggtcaaggaagaaatcaaaaaggaaaaccagataatatcttgagacaaacaaaaacggacacagaacatactaaaacatatgggatgcagcaaaagcagttctaaaggaaaatgccaaatgcttacatgaagaaa

SEQ ID NO: 367432 - DNA, 555 bp, Homo sapiens
gaaaagagagaccaaatgaaagataataatggttggggacttcaatatcctcctttcagtaatggatagatcatccagacagaaaatcaataataaaacagcagacttgaacaacaacacccaatagacctagcagtcataggcaaaacattctatccaacagcaacaaaatacacattttatcarccacaaacagaacattctccaggatatatcatatgttaggaaacaaaaaaaaattaacaacttttagaagactaaaattgtaagactaagattttctaacaatggtatgaaacaaatgttccttccccagtagtatgaaactagaaatcagtagcaaagaaaattgaaaaattccaaatacttggaaattaacacactcctaaacaactaatgggtcaaggaagaaatcaaaaaggaaaaccagataatatcttgagacaaacaaaaacggacacagaacatactaaaacatatgggatgcagcaaaagcagttctaaaggaaaatgccaaatgcttacatgaagaaaacagaaagatctcaaacaaca

SEQ ID NO: 367433 - DNA, 555 bp, Homo sapiens
gaaaagagagaccaaatgaaagataataatggttggggacttcaatatcctcctttcagtaatggatagatcatccagacagaaaatcaataataaaacagcagacttgaacaacaacacccaatagacctagcagtcataggcaaaacattctatccaacagcaacaaaatacacattttatcagccacaaacagaacattctccaggatatatcatatgttaggaaacaaaaaaaaattaacaacttttagaagactaaaattgtaagactaagattttctaacaatggtatgaaacaaatgttccttccccagtagtatgaaacyagaaatcagtagcaaagaaaattgaaaaattccaaatacttggaaattaacacactcctaaacaactaatgggtcaaggaagaaatcaaaaaggaaaaccagataatatcttgagacaaacaaaaacggacacagaacatactaaaacatatgggatgcagcaaaagcagttctaaaggaaaatgccaaatgcttacatgaagaaaacagaaagatctcaaacaaca

SEQ ID NO: 367434 - DNA, 555 bp, Homo sapiens
gaaaagagagaccaaatgaaagataataatggttggggacttcaatatcctcctttcagtaatggatagatcatccagacagaaaatcaataataaaacagcagacttgaacaacaacacccaatagacctagcagtcataggcaaaacattctatccaacagcaacaaaatacacattttatcagccacaaacagaacattctccaggatatatcatatgttaggaaacaaaaaaaaattaacaacttttagaagactaaaattgtaagactaagattttctaacaatggtatgaaacaaatgttccttccccagtagtatgaaactagaaatcagtagcaaagaaaattgaaaaattccaaatacttggaaattaacacactcctaaacaactaatgggtcaaggaagaaatcaaaaaggaaaaccagrtaatatcttgagacaaacaaaaacggacacagaacatactaaaacatatgggatgcagcaaaagcagttctaaaggaaaatgccaaatgcttacatgaagaaaacagaaagatctcaaacaaca

SEQ ID NO: 367435 - DNA, 555 bp, Homo sapiens
gaaaagagagaccaaatgaaagataataatggttggggacttcaatatcctcctttcagtaatggatagatcatccagacagaaaatcaataataaaacagcagacttgaacaacaacacccaatagacctagcagtcataggcaaaacattctatccaacagcaacaaaatacacattttatcagccacaaacagaacattctccaggatatatcatatgttaggaaacaaaaaaaaattaacaacttttagaagactaaaattgtaagactaagattttctaacaatggtatgaaacaaatgttccttccccagtagtatgaaactagaaatcagtagcaaagaaaattgaaaaattccaaatacttggaaattaacacactcctaaacaactaatgggtcaaggaagaaatcaaaaaggaaaaccagataatatcttgagacaaacaaaaayggacacagaacatactaaaacatatgggatgcagcaaaagcagttctaaaggaaaatgccaaatgcttacatgaagaaaacagaaagatctcaaacaaca

SEQ ID NO: 367436 - DNA, 608 bp, Homo sapiens
gtgcactgggaacattttctgtagaggatgtaaaaacagtaataaaactgactaaaaagtcgatctgctttttattatcaccatgtgctggcaattctaaacaatgtcaatgagaacctactgtttcctaaaaaaaatccttagttggtctaagttctaaacaattattacaatttccatttaattttaacactaatatgcaagcctcaaattagcacattttcatttgttatttaatattatcttatgcacgaaggttaattcagaaaactcctagttatacagccaaacctcaacgcatgcagactcagtgacacacatttgtttggagagtaggttggtcatagttcagaatctttcaagctcactttgggtacaattcagctctccagccctgtagttctacatattcctgtatttattcagtagattcaaaacaaacaataatagcacagtgattgtgaaggcacagaaatagagcttgaaatacttcaatttgacattctgtgtgactacgtaaagttcttacttttttggaacttcaagcaagagtagttcattcacttcagtatcacctygttgttggaaaattctgtgtaatgtaggta

SEQ ID NO: 367437 - DNA, 555 bp, Homo sapiens
ttaaatgatgtctcactaattaccatgtaacagggctaacatttatgattttaaatatgtttttcttttttgccttctgagtacatagcctttgcctgaatccagttaagtctccacctatctggctgtcgagtgatggtgggaatggtgatagagtagatattcaacagttataggagtaccaaaaragtaaaatggaattaatttttttaactgccaaaattgggttatgcagcaagataatagccttgcaagtgaggcttttgtctcaagaaggaattttctaaatttccttacctccctttagcctatcattcctgaacatggaggatatacattgtaggacctgtagtatgaagagggtgacagcttggtcagttctatggttgttaggtaggagaatatagaatggaacaagtaaaagagaacaggttttagttctggcaaggaaaattatggagagaaggagagagacagagaagtgtaaagccatcagaagtgggtcctgacttccctcacatttgggctttggcctggagaaggagaagtatatta

SEQ ID NO: 367438 - DNA, 555 bp, Homo sapiens
ttaaatgatgtctcactaattaccatgtaacagggctaacatttatgattttaaatatgtttttcttttttgccttctgagtacatagcctttgcctgaatccagttaagtctccacctatctggctgtcgagtgatggtgggaatggtgatagagtagatattcaacagttataggagtaccaaaaaagtaaaatggaattaatttttttaactgccaaaattgrgttatgcagcaagataatagccttgcaagtgaggcttttgtctcaagaaggaattttctaaatttccttacctccctttagcctatcattcctgaacatggaggatatacattgtaggacctgtagtatgaagagggtgacagcttggtcagttctatggttgttaggtaggagaatatagaatggaacaagtaaaagagaacaggttttagttctggcaaggaaaattatggagagaaggagagagacagagaagtgtaaagccatcagaagtgggtcctgacttccctcacatttgggctttggcctggagaaggagaagtatatta

SEQ ID NO: 367439 - DNA, 612 bp, Homo sapiens
gcgccctgtggcggcccacctccagcctgttgtctcccactgctcacttaggggctttagctggaactgtgtctgggctagacctggtcctcaagaatatgtatttagaaaggtgaacagctttaatctcattgtgctgtccttccctctgttacttccctgctcttccagtctgttggcttttaatttcttttttcttttttgagagagagtctagctctgttgcccaggctagagtgcagtggcacaatcatagctcactgcaccctcaacctcctaggctcaagtgatcctcccacctcaagctcctgagtagctgagactagaggtgcatgccaccatgtccagctaattaagttttatttatttatttatttatttattattattattattattattattwtttttttttatagagacaggatctctatgttgcccaagctggtctcaaatttctgtgctcaagcgatcctcccaccttggcttcccaaagtgctgggattacaggtgtgagccaccatgcctggccacctttcatttctgacttctttattttttagctgcatgtttgggaaagagagaacatagggaaggcctaccatacacttg

SEQ ID NO: 367440 - DNA, 529 bp, Homo sapiens
gttgtcctttcccttaacattccagcttaggtgttccagcagcattatttattgcagtcccaaaacagatgctagcactgtgaagttgggggatcttctctatgatgactgatgacccaagagattactgaagagtaaggaacgtagcattctaagaattcaggactccaatgtggatttagtccattgcattctcctacttctcctttaacaagcttaactctgcaggagtacatatcctggacatggaattgtaggccaagatcatcaaacattaactaatattatttttctttgatttaaggagccaggaagagaggctgccaatctttccaccccctgccagctttatagtctcatctcccsgcttagtgagagcagcgagcagcccaagggccaatttgtttctaagggaagtccccgttcacacaagagggaggtaattaggcctccccctgggaatccctagatgtacttttaaaaactttgctttggcaacagagaccagaaactgttcagactagaaatt

SEQ ID NO: 367441 - DNA, 479 bp, Homo sapiens
attaatatcgttcacagaaaacctctttcttccaacatcttaaaattcagaaagatatttctccttggaaggtataagagttatactgattttttaaaaattaacaaaaccatgagtttatacagtgcatgtgaaatgttcttattctgtaatttcagtacaaacatatcagcacatgtaaattttttagaaaatatctggcacacatttcatgtgaaagacatacatttgaagaatttctaraaaagaatatggtacatgagcataaaaactgctttttattctttgaactcttaaaaagcatttttaatacaaagttcacataaacaccactgtttctaaatttctggcagaacaagctgtagaagcaatttcaaagacctatgcctgcagtaaatacttgttaaatgaccaatgaaaaaaattatcaggcaaagcttttgcttctgagtgagaggcagttaaatagagaataacac

SEQ ID NO: 367442 - DNA, 620 bp, Homo sapiens
ctcacttttctagtagtgggttgaacaagtctggatagctttaaggcactctcaggctcataatctttacaataacaattcttaggcagcaaccatgttcttcccttgagatctatgtgatggttctagcactctggcatgatctgccatcttgtaggctacagccctcatagaaaaagccagacagctcagcctccagaaagaaaaatagytgaagaatagcaaatccaattcatattcatctgcccactggctatcaggtttaggtactagaagagcccttttttccatattctactttctagcccttttcccacttcaaatcagaggaaagagtgtgttctcatgctaacaaagggaaagggggattcaaatgtttagtgataacattataatattatttagcatgtctgttataatctgacactttcaaaagtgtttgcactaactttattagccttcctaagacttttaaagccattttaatggtgacaataaaagattgcttatattcaaatataagtattagataagtataccagggcttggaaatagctaaaatcaataaaattccatcaaaatcaacactttacaattgcctactttgctaataatctgtg

SEQ ID NO: 367443 - DNA, 620 bp, Homo sapiens
ctcacttttctagtagtgggttgaacaagtctggatagctttaaggcactctcaggctcataatctttacaataacaattcttaggcagcaaccatgttcttcccttgagatctatgtgatggttctagcactctggcatgatctgccatcttgtaggctacagccctcatagaaaaagccagacagctcagcctccagaaagaaaaatagttgaagaatagcaaatccaattcatattcatctgcccactggctatcaggtttaggtactagaagagcccttttttccatattctactttctagcccttttcccacttcaaatcagaggaaagagtgtgttctcatgctaacaaagggaaagggggattcaaatgtttagtgataacattataatattatttagcatgtctgttataatctgacactttcaaaagtgtttgcactaactttattagccttcctaaracttttaaagccattttaatggtgacaataaaagattgcttatattcaaatataagtattagataagtataccagggcttggaaatagctaaaatcaataaaattccatcaaaatcaacactttacaattgcctactttgctaataatctgtg

SEQ ID NO: 367444 - DNA, 574 bp, Homo sapiens
ttgctgggagtacatgcatggtattttcaaacatttgatacattgaagaaaacatagaattagtgaaaattgatttccaagatgcttcaccttttaatcatgatggggaaaatttaggtttgaaaaatgtggaatagtttagaagtacaatttaaagatctaagctagcaatattcaatgttttaaataaattagcttattacagttattcataaaggtagagaagtgcaggagtcagtccatcaggaggggtggtttggaacatggactccagtagacaaggccttggtttacagatttaacctttgaatctataataatggctaatttgttgcatatttgaggattaaatgagggaagcatccaaaaaaatatgactttcttctaaaagctcttagtacatttactcctaaattgaatcagcattcacattataggaactatttatcatagacattaattgcacattcatttttatctgtagaaaaatatcaggaggaaggatgatacgtaacttgtccccactgcttccacctccagcccacccrtatctaggaaagccctggttgaggaa

SEQ ID NO: 367445 - DNA, 534 bp, Homo sapiens
acataataactattctggggaggtgctatttcatattattcttcaaaccagagtggtaactgaagaaaaaaaaattaactgccaatttttctatatccaatgatcttcagacacaattcttattttctgagtattttacatctctgaggctatcacctaaaatctttttatgtataaaataaacttagttgatcattttatccctcagaaggctagcccactgcaataataacttggtgacagttgaaaggctaattgaatctattataacagcacagctcaattctaatccatttcctggtggaaaaaaattctagtgaaggtatttttccccgattataaaagtataatrttccctgtaaaatattggaaaataggaaaaaaactaaagaaagtcatccttaatcttatcattttaccacttttagaaatgatatgtatttccttccagaatttttttctgtgttggaaaatattttgaccttatggagcaagattattttttcaaagatgcttcactttttaatcatgatg

SEQ ID NO: 367446 - DNA, 494 bp, Homo sapiens
gaacaaattattttatttaatcctggtgacaagtctgtagtgtagttagcactgtcctcattttatgaatgagaaaatagaaaggcgaataacctgtccaaggtaatatggccagtagaaggcagaatcaggacttggccctggctctatgatcttgccactgcttctttatcccacactgccttctcggacatgccattctcatccccacctccatgcctttacccaaactsttgctcctctaggtgcccgctattttatttatctaggcctagcattcatcagggctagcctatttcttactttctacacccccgtgattcccagtacttctcatttggcacttgatcatggattgctctttttaaatattcatatacttctgacatctcttttttaagctgtaaaactctgaatctttttatagttttaacactcagcccaatgtctcatccttggtaagtcctcagagtatttgttaatgatggtgatgc

SEQ ID NO: 367447 - DNA, 580 bp, Homo sapiens
tgaaaacaagtgttcaaaccaaaacatgtacttgaatgttcatagctgcactattcacaatgaccaaaaggtagaaacaactcaattgtccatgaatgaatgaggaggcaaatgaaatgtagtatattcatatgatggaatgttatttagccatgcaaaaaaaatgaaatactgatgcatgctacaacatggatgaaccttgaaaacatcataataagtgaaagaagccagacacagaaggccactcattatatgattccatttatataaaatatccagaataggcaaatctatagagacaaaatgcagatttttggttgccaagagctaggaggaggggaaatgaagaataattgcttaacrgatgtgggggttccatttagggtgatggaaaagttctagaactagatagtggtgataggtgtacaacatcataaatgtacttactgccactgaactgtacactttaaaatggtcaaaatggtaaattttatgttacatgtattttactgcaataagaatttgttttaaatatatgactacatattctgtgataaactccatacttaatatgcagcat

SEQ ID NO: 367448 - DNA, 536 bp, Homo sapiens
ggaaactgaaatatagaaaacaaaatttgcttaagatcacataactggcagacctgagatagacctgaaatttgagcccaggttgtgtagcagcatggtgtttcctattagcccctgtactgtgggctgagctgaccttgtcctgtgataataaagcttatgtacaatggaagtgtgctctcagctctcagaacaatgttgataaagtttcagaccttaaagaacagaccattgttattcaaatctgcaagtacaaccatatttctatttatcttattatttatttgcctgattatcattgaacatacacaaaccatgaaagagctgcaagaagtgtaattctctctcagtgcaaatttactgtgctatgctaggctattgccctggccagaggtgtcctgcggtcctctgcagtcatcttctgttggaagaagagttaaatccaatttctcaaatatatcccsctctccctgtctttcattcctggtgctagatttagtaagtgaagtgaggtttggttgaatcgtaaagcagag

SEQ ID NO: 367449 - DNA, 558 bp, Homo sapiens
caactctgtttaatattaattatgatgattgatgtcatcatcattggattttaggtcacataaaaatgaaataagttatacatgaagacaacttgaaagaagcaataaatgaaactaagatttcaaagatatattgacctctatcatgtaaagcatgaatttatagaaaaataattttatgattatgacatttgcttttactgtagatgttctggtttccatggctaacctgacagaggcaatttatttccttgrgttgttcttcgattcctgttgccttcagttcaggtggttcccactggaaaacagtaatatcttgagctgggatttgatgggtcaatcacttgggcttctctcaagagaggtttgggcatggatgggaatgtgccacataactcattcagttatacgataaagataaaaactgcaataaataccaaaagcaaattatcaacaagtctctacatacagaataaatgaaagtgatatataatttataagatttaaatcattaaaaataaatgggtataaattaaatccctcttcgacttaaaaggg

SEQ ID NO: 367450 - DNA, 583 bp, Homo sapiens
gcagtggctcatgcctgtaatcccagcactttgggaggcggaggtgggtggatcacaaggtcaggagttcaagaycagatgatgaaaccccctctctactaaaaaaaaaaaaaaaaaaaaaaaattagccaggcacggtggcaagtgcctgtaatgccagctacttgggaggctgaggcaggagaatcgcttgagcccaggaggcggaggttgcggtgagctgagatcgcaccattgcactccagtctgggcaacaagagcaaaactccacctcaaaaaaaaaaaaaaaagaaaaaagaaaaaagtttcatttcatatgacaaaacaggtagactggtcacaagagcaaagctttcatttttaaacatcagagatgttattattccaaattgtgcaatacggcaagaagagatcaggtgtgaaaattgaactcattgggcccaatttgaaacttggcagaaggctggagtgggtggagagggaggtaggccatgggggagcagactctaagcagaggcagcagggcactgatgtggaaggactcatagtgcatttcagtattctgcatgaatgccatgcatgt

SEQ ID NO: 367451 - DNA, 563 bp, Homo sapiens
tcagtggttgctttgcaagaccatatggaactgtggtcacttcaatgttggctctttcgttcactaatatcacacttcattccactcctctgcttctgtgcttttctgtgtacatgataactttttgtttcaaagtcaaaccaaattgtaacctgtttaagacatagtaaacagcaattagcccgtgtgctgtcaactatccacatatctgaatggatgtgacaacacaaagagctaagatagyatttgcacatcaataggcaacaacagaaaccccatcacagccattcccactgcatagtgattgtaaaacatgtactaatttcagagatatttaaatgtgggggaagaaaatgtaaagcagttagcagaaggaagtattaagagttccacacaggtttgtttcacagtaatcaaaactgtatgttaacatttttgtgaacagtagagcatattgcaaatgtaacaaattttaaaacataatgattaaaatgcccccagtgcgcccatcctcaaaggtgtgaggtcagctttgcctatagttgcttaccctctcttttgac

SEQ ID NO: 367452 - DNA, 570 bp, Homo sapiens
agtttacagtcttgtaaatggcagtttactgtcttgtaaatggaagtttcaatgaatacgtggatgagttactcaaaaacagaagagggccaggtgcagtggctcatgcttataatcccaaaactttgggaggcagaaatgggaggatcacttgaggtcaaaagttcaagtccagcctgggcagcatggtaagaccccatctctacaaaaaaaaattaaaaattatccaggtgtgatggcatgcacttgtagtcctagttacttggggggctgaggcaggagaatcgcttgagcccaggagttcaaggttccagtaagctatgatcaagccactgtattccagcctgagcaacaaaagagaccctgtctttaaaacacacacacatgcagacagagagasagagagttcaccttccatttgagacacttggaattgcctttcatacctccatttttattaaaggtccaagttcaaagactgcaggagtccctctcttactctgaattctcttactattcctcacactttgatataggccattaggacatggtatttctaaaaccacctgt

SEQ ID NO: 367453 - DNA, 483 bp, Homo sapiens
ggggcatcttattcatttctagtcaattccaccgccaggagataaaaggatttttctctattctttagacccatggttttccccctctaactcctttctacccttcttccataataagggaatcaccaccatgtctgtagtacaaactacctgcaaattggcaagttgtaggcgtactttggtctagtcaaaagcagatctgtcaagaagaaaggtsatggcaagtgtttcaggatgcttgagggattttgcttgttgtctttctaaagggccaaagaatgacaacatctgcttattatgagagtgttttgagaaagctagcaaaagttttagcagaaaaacacccaggggctaggcacaggggctcatgcctgtaatcccagaactttgggaagctaaggtgggcagattgcttgagcccaggagtttgaggaccatgggcgacatggcctaaccccatttctacaaaaataaaaaattttt

SEQ ID NO: 367454 - DNA, 581 bp, Homo sapiens
tactacattatatattgtgtatttgctacagtagtggaggagaagaacagtaacagaggacagggatgaatgttgttgcctatggggttaatatggacacagtcagctctaatgtttcattcaaagtgtcactmtgggatggtgtttatgctgcttgtaattcagggacggtatttcttaaaatgaaagaatgagctttggtcagagcagcttattaagtgaatgtttgcctgccttgattggttgagctgcaagatgctcagaaatcctgatacccaatctacctattttcagctgaaaagcttcagatccgaaaaggtgtaaatgaaaagtccccttcattgacatctcatttacatgttcaggtaaactttgtcatagttcctgagactctgctttaatttgctcattttctgagcagccattacatacatgacactgtgctagatgctgcagatacaacagcaaacaaaaagacccggccccacagtgtccacagtctagcgggaagacaagcattagacagttactctaacagttgtgttggtaaatgcaataaatgttggtgttaggtgtggcaa

SEQ ID NO: 367455 - DNA, 581 bp, Homo sapiens
tactacattatatattgtgtatttgctacagtagtggaggagaagaacagtaacagaggacagggatgaatgttgttgcctatggggttaatatggacacagtcagctctaatgtttcattcaaagtgtcactctgggatggtgtttatgctgcttgtaattcagggacggtatttcttaaaatgaaagaatgagctttggtcagagcagcttattaagtgaatgtttgcctgccttgattggttgagctgcaagatgctcagaaatcctgatacccaatctacctattttcagctgaaaagcttcagatccgaaaaggtgtaaatgaaaagtccccttcattgacatctcatttacatgttcaggtaaactttgtcatagttcctgagactctgctttaatttgctcattttctgagcagccattacatacatgacactgtgctagatgctgcagatacaacagcaaacaaaaagacccrgccccacagtgtccacagtctagcgggaagacaagcattagacagttactctaacagttgtgttggtaaatgcaataaatgttggtgttaggtgtggcaa

SEQ ID NO: 367456 - DNA, 599 bp, Homo sapiens
ctgtagtttccactgcctcccttctgagaagctgccaggtacccagtcaggggtctcttttgtaccagtctgccttccaaaatcacagcaaggagaacaaacatgaaaaaatcagggcctaaggtttgagtagtaagagacaaccaaccaatgaagaaatttatggttagtaccttggttgttcaaggaactgcttaaactctgagcaggagagaaagggaatgtccatttctaaacattctattcaaagtaacataacctgagcattctggccaacagattaagggaagtaaaaaatcagaattcatatatttttttccatagagatgcttagtgtgaatatatgtggaaaaaacctatgccacacaaaaccataaaaaataytattttgaatttcctgcttatttcatgcccattgtatcacaaagttttcagtcactggtatgaaataaaaatagatttttgtggccccaaagcagaaagcatgttctggttaggaaaagaaacaccagcctctaaaattgtctgagagttagaatgagattgaataaggagcccacgccttccagccgagaaaaaccacatttgaatgtgggaga

SEQ ID NO: 367457 - DNA, 592 bp, Homo sapiens
agcccacgccttccagccgagaaaaaccacatttgaatgtgggagatcatctgaggacattattggagaatttcccatagaagcatctgacactaagcagagaagaaaacataatttccatatgaaacaggaaacaaaatatgaggaagagaaccaagagttaagagtgcacttaggtggcttaatttggtaattcatttcaaagatagacgaaaggaaagtgtttaaacagaattgctttatttgttctgacagctcccagcctgaatcagaaatctttaccatctcaatcccataaaggggaaaaaattctcttctttagggcaagaaacaaatgttttcccatttgctttagatggggtattgagttgaccatttcagattttggtacgtttgtctcrttcttcataattagtcttcagaaagaaaagaaaaacaagactgaatcctcaaagagaagatagaaagattccacaagtccaagagggacaaataaaatcatgaccccattttacttatagcatttaacatcacaagcttgaatctcttgtgcaattgctggtttctaagcagaatcccagaagagcagatg

SEQ ID NO: 367458 - DNA, 560 bp, Homo sapiens
atgaccccattttacttatagcatttaacatcacaagcttgaatctcttgtgcaattgctggtttctaagcagaatcccagaagagcagatgtgagatggagcggacacagtgatgagcatccctttcaggaaggcaggccttcagctgctgggggtgctggcagcactctgggaatcactttctgtctaaaagagccaaatcactcaaggtcaccccctctttctgggggcagcctgtgtctgatgactggtcaaagtgtggtatcaaagtccagcccctgccacttgagaaaattcaaaaagggcttcagtttcagcattccccatagggtcagctgagccctttgccaagacatcattaccactcaacttttcccttgcactctcttgctccctttcctgcatacccacaggtgtaaatccaaagaatcctccttgataaacttcctgcctwctggcttccatctcagagtccactttccagggaacattacctgagacactaccaaactggggtactttgtttgttttcctaaatgtagaggtgagggctgagtgc

SEQ ID NO: 367459 - DNA, 285 bp, Homo sapiens
tagctgctctttccaaaggaaagttcaactctgggagttgaatacaaacatcaccaaaaagttcctgagaatgcatctgtatagtttttatgtgaagatgattccgtttccaacgaaatcttcaaagaggtctacatgtccccttgcagatgccacagaaagagagtttcaaaactgcgctctcaaaaggagtgttcaactccgtgagttgaatgcagtcatcacagagaagtttctgagaatgcttctgtctagatgycatgtgaagatatacccgtttcgaac

SEQ ID NO: 367460 - DNA, 323 bp, Homo sapiens
gctccaaatgtccacttgcagatactacgaaaagcatgtttcagaactactctatgaaaagcaatgtgaaactctgggagttgaacacaaacatcacagagaagtttctgagaatgcttctgtttagtttttatgtgaagatattcccgtttccaaaaacatcttcggagaggtccacatatccamttgcagattccacaaaaagagagtttcaacaatgctctatccataggagggttcaactctgtgagttgaatgcaatcatcacagagaagtttctgagaaggcttctgtctagattttatgtgaagatgtacccgttt

SEQ ID NO: 367461 - DNA, 284 bp, Homo sapiens
tagctgctctttccaaaggaaagttcaactctgggagttgaatacaaacatcaccaaaaagttcctgagaatgcatctgtatagtttttatgtgaagatgattccgtttccaacgaaatcttcaaagaggtctacatgtccccttgcrgatgccacagaaagagagtttcaaaactgcgctctcaaaaggagtgttcaactccgtgagttgaatgcagtcatcacagagaagcttctgaggatgcttctgtctagatgtcatgtgaagatatacccgtttcgaa

SEQ ID NO: 367462 - DNA, 284 bp, Homo sapiens
tagctgctctttccaaaggaaagttcaactctgggagttgaatacaaacatcaccaaaaagttcctgagaatgcatctgtatagtttttatgtgaagatgattccgtttccaacgaaatcttcaaagaggtctacatgtccccttgcagatgccacagaaagagagtttcaaaactgcgctctcaaaaggagtgttcaactccgtgagttgaatgcagtcatcacagagaagcttctgagratgcttctgtctagatgtcatgtgaagatatacccgtttcgaa

SEQ ID NO: 367463 - DNA, 435 bp, Homo sapiens
ttttgtggaatctgcaagtggatatgtggacctctccgaagatgtctttggaaacgggaatatcttcacataaaaactaaacagaagcattctcagaaacttctctgtgatgtttgtgttcaactcccagagtttcacattgcttytcatagagtagttctgaaacatgcttttcgtagtgtctgcaagtggacatttggagcgctttcaggcctgtggtggaaaacgaattatggtcacataaaaactggagagaagcattgtcagaaacttctttgtgatgattgcattcaactcacagagttgaaggttccttttcaaagagcagtttccaatcactctttctgtggaatctgcaagtggatatttggacctctttgaagatttcgttggaaacgggagaatcttcacagaaaagctaaacagaagcattct

SEQ ID NO: 367464 - DNA, 406 bp, Homo sapiens
gttggaaacgggagaatcttcacagaaaagctaaacagaagcattctcakaaacttctttgtgatgcttgcattcaactcacagagttgaactttcctttcgagagagaagctttgaaacactctttttccagaatctgcaagtggacatttggagggctttgaggcctgtggtggaaaaggaattatcttcccgtaaaagctagatagaagcattctcagaaactactttgtgatgattgcattcaagtcacagagttgaacattccctttgacagagcagtttggaaactctctttgtgtagaatctgcaagtggagatatggaccgctttgaggcctatggtagtaaaggaaatagcttcatataaaagctagacattagcattcacagaaaactcttggtga

SEQ ID NO: 367465 - DNA, 406 bp, Homo sapiens
gttggaaacgggagaatcttcacagaaaagctaaacagaagcattctcagaaacttctttgtgatgcttgcattcaactcacagagttgaactttcctttcgagagagaagctttgaaacactctttttccagaatctgcaagtggacatttggagggytttgaggcctgtggtggaaaaggaattatcttcccgtaaaagctagatagaagcattctcagaaactactttgtgatgattgcattcaagtcacagagttgaacattccctttgacagagcagtttggaaactctctttgtgtagaatctgcaagtggagatatggaccgctttgaggcctatggtagtaaaggaaatagcttcatataaaagctagacattagcattcacagaaaactcttggtga

SEQ ID NO: 367466 - DNA, 406 bp, Homo sapiens
gttggaaacgggagaatcttcacagaaaagctaaacagaagcattctcagaaacttctttgtgatgcttgcattcaactcacagagttgaactttcctttcgagagagaagctttgaaacactctttttccagaatctgcaagtggacatttggagggctttgaggcctgtggtggaaaaggaattatcttcccgtaaaagctagatagaagcattctcagaaactactttgtgatgattgcattcaagtcacagagttgaacattccctttgacagagcagtttggaaactctctttgtgtagaatctgcaagtggwgatatggaccgctttgaggcctatggtagtaaaggaaatagcttcatataaaagctagacattagcattcacagaaaactcttggtga

SEQ ID NO: 367467 - DNA, 347 bp, Homo sapiens
gtgtttctccacatgctctttctgaggatagttttacctgtgttctgtcatgaacaggccctccctgctgtcctggcctcgatttgcttagtgtttcctgctccctctgcccttgtgtggctcccagaccaagtgaaasaaaatcacctgagggccacagtgttccctagccctggcgtttagggacagggttatgggtgggatttttgactctctaagttaacccctagggctttgaagtgtctgttgagaaattcagctgttatcatcctaggtggtcttgctctctcctgtcctcctacttcaaatgcagaacttcaatcgtgtacaaaagaagaccgagtcat

SEQ ID NO: 367468 - DNA, 347 bp, Homo sapiens
gtgtttctccacatgctctttctgaggatagttttacctgtgttctgtcatgaacaggccctccctgctgtcctggcctcgatttgcttagtgtttcctgctccctctgcccttgtgtggctcccagaccaagtgaaagaaaatcacctgagggccacagtgttccctagccctggcgtttagggacagggttatgggtgggatttttgactctctaagttaacccctagggctttgaagtgtctgttgagaaattcagctgttatcatcctaggtggwcttgctctctcctgtcctcctacttcaaatgcagaacttcaatcgtgtacaaaagaagaccgagtcat

SEQ ID NO: 367469 - DNA, 582 bp, Homo sapiens
atgctctttctgaggatagttttacctgtgttctgtcatgaacaggccctccctgctgtcctggcctcgatttgcttagtgtttcctgctccctctgcccttgtgtggctcccagaccaagtgaaagaaaatcacctgagggccacagtgttccctagccctggcgtttagggacagggttatgggtgggatttttgactctctaagttaacccctagggctttgaagtgtctgttgagaaattcagctgttatcatcctaggtggtcttgctctctcctrtcctcctacttcaaatgcagaacttcaatcgtgtacaaaagaagaccgagtcatataacagaacacacccttattcattggctggcttcaccaatcatctcatggctgaacttttaaaaatacactcttagccacatacctatgaaatgtatatgtgtgtgtatacatatgtgaatttgcttctgagattatggaggctgaaattcccaagatggaaggaaagctggatggatacccaggaaagcatttgtttcctattaggcctcttaattctctcctggcctttgattgattgtatgag

SEQ ID NO: 367470 - DNA, 582 bp, Homo sapiens
atgctctttctgaggatagttttacctgtgttctgtcatgaacaggccctccctgctgtcctggcctcgatttgcttagtgtttcctgctccctctgcccttgtgtggctcccagaccaagtgaaagaaaatcacctgagggccacagtgttccctagccctggcgtttagggacagggttatgggtgggatttttgactctctaagttaacccctagggctttgaagtgtctgttgagaaattcagctgttatcatcctaggtggtcttgctctctcctgtcctcctacttcaaatgcagaacttcaatcgtgtacaaaagaagaccragtcatataacagaacacacccttattcattggctggcttcaccaatcatctcatggctgaacttttaaaaatacactcttagccacatacctatgaaatgtatatgtgtgtgtatacatatgtgaatttgcttctgagattatggaggctgaaattcccaagatggaaggaaagctggatggatacccaggaaagcatttgtttcctattaggcctcttaattctctcctggcctttgattgattgtatgag

SEQ ID NO: 367471 - DNA, 416 bp, Homo sapiens
catgcacctgaatgacaaactgagctctggaaggatgaagaagcatctctgaaacaagctggagtggaggaggagggggtggcttagaaagtctggagggtcagggcctcactacagggtctccacggccttatttccagaaatgaccttccagcctgtcctctcctcccttccctgggtcaaagcagagaggcatagagacctaggggaggagtaatcctaaggtgtctgccctctgagcctcagtctcctkaactgcaaaatgctggagagtagggggtaggtgagtatcaaaggtaatgtgcgaaagtgcctggtacccaatggtgctcacaaaatgccacttcccacacagggcacatttctgaagtcgtctgcaggtgtaaggaccaggggatgtgaggttagtatcagca

SEQ ID NO: 367472 - DNA, 344 bp, Homo sapiens
atggacacaaggtgtctttccattgatttaggtcttccttagtctcctcgagcaatgttctgtagttgtctgtgtacaagtactgcamcttcttgaacaaatttattcccaggcatattatccttacaggtgctattataaatgaaatcattttgtcagttttcttctcagatagttcattgccatcacaatggattgtttgctgaaagtttgctgaattcacttattaactctgatagtgtgtgtgtgtgtgtgtgtgtgtctggtgtctgtgtgcatgtatgtgtgtttgcctttgtatgtattgtttgggattttctatacataggatcacaccatctgca

SEQ ID NO: 367473 - DNA, 344 bp, Homo sapiens
atggacacaaggtgtctttccattgatttaggtcttccttagtctcctcgagcaatgttctgtagttgtctgtgtacaagtactgcaccttcttgaacaaatttattcccaggcatattatccttacaggtgctattataaatgaaatcattktgtcagttttcttctcagatagttcattgccatcacaatggattgtttgctgaaagtttgctgaattcacttattaactctgatagtgtgtgtgtgtgtgtgtgtgtgtctggtgtctgtgtgcatgtatgtgtgtttgcctttgtatgtattgtttgggattttctatacataggatcacaccatctgca

SEQ ID NO: 367474 - DNA, 344 bp, Homo sapiens
atggacacaaggtgtctttccattgatttaggtcttccttagtctcctcgagcaatgttctgtagttgtctgtgtacaagtactgcaccttcttgaacaaatttattcccaggcatattatccttacaggtgctattataaatgaaatcattttgtcagtttwcttctcagatagttcattgccatcacaatggattgtttgctgaaagtttgctgaattcacttattaactctgatagtgtgtgtgtgtgtgtgtgtgtgtctggtgtctgtgtgcatgtatgtgtgtttgcctttgtatgtattgtttgggattttctatacataggatcacaccatctgca

SEQ ID NO: 367475 - DNA, 344 bp, Homo sapiens
atggacacaaggtgtctttccattgatttaggtcttccttagtctcctcgagcaatgttctgtagttgtctgtgtacaagtactgcaccttcttgaacaaatttattcccaggcatattatccttacaggtgctattataaatgaaatcattttgtcagttttcttctcagatagytcattgccatcacaatggattgtttgctgaaagtttgctgaattcacttattaactctgatagtgtgtgtgtgtgtgtgtgtgtgtctggtgtctgtgtgcatgtatgtgtgtttgcctttgtatgtattgtttgggattttctatacataggatcacaccatctgca

SEQ ID NO: 367476 - DNA, 584 bp, Homo sapiens
catgcattctgctacatatggtaaacatagcctacaaggtggaagagattagaaaataaacagggaaatgaaaatgtttttattaattcgcatcagtacccaccaaaaccaatcagcataacaaaagattataacgctgaatgtaaaaaacaatccaacagtccagagtgataggcaaaagtttttaattgtatagattaaaataactttggacaaaaattaaaactcaggcagagaatgtttttttttcaacaacacacactagcaaaaacaaaggcacagtaaacattgaggcagaaagtttccagcgtagagatatgaatataataatagacacaggcagggatgattaataaatgataaaatgtttacaggatgatcactggaatacaggacatttctacttttaaaaaccactctcccaaatacttcatcataagtaaggtgtctctaaaagggacagatctcctagacccctccttaaccaagtaaccagtcctgatatcatgataatgctgatggacaaactagacyttctctgcccacagatgggctgaggttggaaactcacagtatcgactctg

SEQ ID NO: 367477 - DNA, 598 bp, Homo sapiens
ggagtacaggacactctgagttagtgccctcagggcacacagcatacagtgatcatgaaaagactgtgctcaataattttccataaaatgtgctcaagtttccatgcagtcaccatgaggatacagcttttgaagtatggtcgacctacagtaggttagtaagtgataaggggaggaagaaacggaaacctaaatatctactgcaatgaaaaccaatagcaatgtgagtaggaataattcaggcttggttgaaaacatgtaatcgataatgtcggcctgctctgctttccctgaaccaggagtctccaggtgtcaacacagaattagctgttgacaattgctcaaacttacctggggcatggtgggccttggtcttcttcctcttcttggtcctttttmattcctgcaataaattcagacagggacagacaagataagccaattcacctacacccataacagtccactgtctaatccccacacagggacctcaggctcctcagcatgagaacaggacaatgtgagagatatacttcaggaggcctcaaagctggtcatgatagagattctttggtttgcatctcagaaccaagggtga

SEQ ID NO: 367478 - DNA, 598 bp, Homo sapiens
ggagtacaggacactctgagttagtgccctcagggcacacagcatacagtgatcatgaaaagactgtgctcaataattttccataaaatgtgctcaagtttccatgcagtcaccatgaggatacagcttttgaagtatggtcgacctacagtaggttagtaagtgataaggggaggaagaaacggaaacctaaatatctactgcaatgaaaaccaatagcaatgtgagtaggaataattcaggcttggttgaaaacatgtaatcgataatgtcggcctgctctgctttccctgaaccaggagtctccaggtgtcaacacagaattagctgttgacaattgctcaaacttacctggggcatggtgggccttggtcttcttcctcttcttggtcctttttaattcctgcaataaattcagacagggacagacaagataagccaattcacctacacccataacagtccactgtctaatccccacacagggacctcaggctcctcagcatgagaacaggacaatgtgagagatatacttcaggaggcctcaaagcyggtcatgatagagattctttggtttgcatctcagaaccaagggtga

SEQ ID NO: 367479 - DNA, 561 bp, Homo sapiens
gcatacaggcatccctctcccaccgtttccttcttgtccccactccaaagccttctccattttatttgtattaaytttctattgctgcatactaaattactgcaagcattagcggcgtaaaataagaatgatttattttcttgcagtgtccacagatcagaagttcaggcctggattcgctgggtcttcttctcagggcctcacaggctgaaattaggctgggtttctttctggaggttctggggaagaacatcctctcaagtttcctcaggttgtcagctgagttcagttccttgtgactgtaggactgagatctctgttttcttgctggctgtcagccaggggcctctcgctgctcctagaggcctcccatgttcccactgcatgcttcctccagccagcagaggaggatcgccctgcatggaaaccctcctgcacttcacatctctccaggaagtcctcagtccctccaaggaactcaccttcactaggtcaagctcatcagataatctgtctatcttaaatttgaccgatttgggatctcgattacatctgttaact

SEQ ID NO: 367480 - DNA, 561 bp, Homo sapiens
gcatacaggcatccctctcccaccgtttccttcttgtccccactccaaagccttctccattttatttgtattaactttctattgctgcatactaaattactgcaagcattagcggcgtaaaataagaatgatttattttcttgcagtgtccacagatcagaagttcaggcctggattcgctgggtcttcttctcagggcctcacaggctgaaattaggctgggtttctttctggaggttctggggaagaacatcctctcaagtttcctcaggttgtcagctgagttcagttccttgtgactgtaggactgagatctctgttttcttgctggctgtcagccaggggcctctcgctgctcctagaggcctcccatgttcccactgcatgcttcctccagccagcagaggaggatcgccctgcatggaaaccctcctgcacttcacatctctccaggaagtcctcagtccctccaaggaactcacsttcactaggtcaagctcatcagataatctgtctatcttaaatttgaccgatttgggatctcgattacatctgttaact

SEQ ID NO: 367481 - DNA, 617 bp, Homo sapiens
tggttcaacacaacaaaacaaacttctctaccaatcagcagtgggcagtgaatggtgagggtgagggaggatagggaaaacagcgcgtatttaaatgtactgctcttaccaaatgttataaaaataatatttaatattctactacctctgtcacaggagacatgaactaaagaaactctgcaatgtcagcgtcttaaaattctttagacaattccttttgtaatccattggcaagatacatgrtgtttacaaagttattcagcaatcacatgcattggaacaaattgtcatggagtatccaaatataggagccccaaatctaaatagtcaaggctctattatctgtaattccaattgctataggtaggtgtgtggattttggcagggctaatgtagtggaaagatgagatgtctggaaaatcatgaaatcacagagtaattcagtagaatattaaatgttatttttttctagtcacagaggtaatagcatattctttccctcagaactcacaagattgttgtgacactcatgtaaggcaacacaatttagaaactaaaatcattatttttttaacaactatttatctagcacgtactctgtttcaggtattggatca

SEQ ID NO: 367482 - DNA, 617 bp, Homo sapiens
tggttcaacacaacaaaacaaacttctctaccaatcagcagtgggcagtgaatggtgagggtgagggaggatagggaaaacagcgcgtatttaaatgtactgctcttaccaaatgttataaaaataatatttaatattctactacctctgtcacaggagacatgaactaaagaaactctgcaatgtcagcgtcttaaaattctttagacaattccttttgtaatccattggcaagatacatggtgtttacaaagttattcagcaatcacatgcattggaacaaattktcatggagtatccaaatataggagccccaaatctaaatagtcaaggctctattatctgtaattccaattgctataggtaggtgtgtggattttggcagggctaatgtagtggaaagatgagatgtctggaaaatcatgaaatcacagagtaattcagtagaatattaaatgttatttttttctagtcacagaggtaatagcatattctttccctcagaactcacaagattgttgtgacactcatgtaaggcaacacaatttagaaactaaaatcattatttttttaacaactatttatctagcacgtactctgtttcaggtattggatca

SEQ ID NO: 367483 - DNA, 572 bp, Homo sapiens
aatttctttcttttctaaaaaaaaaaaaagatggttcagtgtaggcaaatcaataaatgtgatacactacataaacagaataaaggatacaaattgtatgataatctaaatagaggcagataaagctttccacaaaatacaacatcttttcatgattaaaacactcaacgaattaggtatagaagaaatgtatctcaacataataaasgccatatgtgagtaacccacagctaatatattcgagggtgaaaaattaaaagcttttcctctaagatcaggagcaaagcaaggacactcactcttgccatctctgttcatttctaattctattatttttaaattctatattctcaaaaacttaaaggcatattatgtagtagcagcatatctttatttattaaaatagaaataattttattgggagcttaaagaactaggctataaatgttaaatcaagtaaaatcaaatggcccttgggaaatgtcatcctctctctctttcccctttcctcttctttccactcgcctgtcttctaccctctctaccttccttcgtttcttcatttctgggac

SEQ ID NO: 367484 - DNA, 627 bp, Homo sapiens
cacagatttatttatttcaattttaaaatatctttgaacatttaaatatttaaacactttgaataagcaaaaaatatacatgataccaaaattcaaaagagaagaaaatggtcatgcagtgaaaagttagtctctcccccactcctattccctagatacttaactattctcctgagataaccacggttactagtttataagtaaactccagcaaaccctcatgtagatactatgtgagtttcagaggtttaatttgcacagagtgcttcaagtgcccattatttgtgaaaaatgaggatcatctgtcctttagctattttctctctmtataaaaaaactgtcctttgtgaagctggcaaacctcattaagcattcttttcttaaaagcccaatcctccttcagtttatcaagcataaatgataaaccaaataatttattggtaaaaataactttggaatctattagtaattcatgaggcaaagaaaagtaggtctaaaattgtgttgatagaactgttttaagtcacgtaatccttagctaattcttcagcatgcatcagctatggttcctaggatttcaacatgagaaagaacgctgtgaaagtgcctcacccatcccaggagcat

SEQ ID NO: 367485 - DNA, 532 bp, Homo sapiens
cctcctgtgtgccccacgccaaagtgcccagagccatgtccacccccgaagtgccctgagccttacctgcctcctccttgtccacctgagcattgcccacctccaccatgccaggataaatgccctcctgtgcaaccatacccaccctgccagcagaagtatccacccaagagcaagtaacatcactagaattcatcaggaccatgaaacaacaagatccagtggctcttcttaytcccaggactccatcatcttcccttcagctgtagtgggaggctgcatcttccctaacctctgtctggcttgagcgttgacagagaaaaggcttagttctgaaaaccgatatgttgttggaagatgagcagccagatcattgcctaatctcgctttgctgtctgtgatgtagatggtggttcctatcctgagagcaagtgtgtttattcttttgcttctccccaataaagcacatgtttcatggtcaagcccacattgcttttgtttgcatttcgtgtctttaacctcttctgttaac

SEQ ID NO: 367486 - DNA, 589 bp, Homo sapiens
ttgggtttttaattaggatttggtttaaatccagacatcaacgtgggagaaagttgatgcttccacaattttgagtcatgrattcacacacatggttgtcactctatttctacacaagaaaatgttgcacaaattttgttagatttatttctatgtccttcacatatttttacacattgattcatattatacaattttattttctaagtgtttgctctaacatgcaggaacagagttgttttggttcctgattttgaatccagcacttttttaaaccctcatattaattataatagtttatttgtaattcttttacattttaatctacagattatcttttacaaatagtaataattatttttattttgttgtttttggttgctattattgtttacctttctaatccctattctttgcatttcttttctcttaccttaactgcattgttgagcaccttcagcacaattttgagtagacacagggagaacacccatgtggataaagctttcactagatgaccaataagaataatatttgtgataggctttttgtaggtgtctcttgtttagattaaataaaatcttttcca

SEQ ID NO: 367487 - DNA, 493 bp, Homo sapiens
gtttgctttctctacctctctttccaaacaggttttagtctttgaaagacagtattattttatttgtttgtatgttcttcctttgtcttttcccaaagccctctagccccacaacctgctagattatcaattcacatcccaatgtatacctctcatctgtccattttagtacacattgttcactcgatacgtatgttgtcaatgtgaatgtctttcacatctttttaaaactcttcctgcmatcaatggggcttactaagcatcatatattaaacacttaaaatactgctgctggagcttccttatctgggccaataatcaagaacctttccaagaatgtggttttataattggagaagaagaaggacaaggaagataagaaaaaaagaggaagaggagtgactcaaattctttggagcactcaccagctacgctccagatagagcaagagcgctgaatcaacccagcatcacacctctcagttaagcaagtt

SEQ ID NO: 367488 - DNA, 493 bp, Homo sapiens
gtttgctttctctacctctctttccaaacaggttttagtctttgaaagacagtattattttatttgtttgtatgttcttcctttgtcttttcccaaagccctctagccccacaacctgctagattatcaattcacatcccaatgtatacctctcatctgtccattttagtacacattgttcactcgatacgtatgttgtcaatgtgaatgtctttcacatctttttaaaactcttcctgccatcaatggggcttactaagcatcatatattaaacacttaaaatactgctgctggagcttccttatctgggccaataatcaagaacctttccaagaatgtggttttataattggagaagaagaaggacaaggaagataagaaaaaaagaggaasaggagtgactcaaattctttggagcactcaccagctacgctccagatagagcaagagcgctgaatcaacccagcatcacacctctcagttaagcaagtt

SEQ ID NO: 367489 - DNA, 450 bp, Homo sapiens
aacaggtgataaagataatagaacaaagtgataataatagtacctwctactaaattgtcatgagaaaaaaattaaatcagagactgcatttaaagtatttagcacaggctacagagagtactcaaaatagtaaagaaacacatggctaatcaaagagataggggcaaaatattgaagtcaagttgtttatggctgagaaagacatttgcttctctttaagaccttttatatcaccattatcttaagtgtgtgccagaagtttttaggacaaagcaaatgcaaatgtatgatttgaatgaagtgtgcagaaataataaggtagactgatcttgacatttattcttatgtgataaaaatgagttaacctaagcagaaatttagaacaaaggataatgtttctgtgttatttggactctctacagctttcctctgaattcagataataaaaaa

SEQ ID NO: 367490 - DNA, 487 bp, Homo sapiens
ctgcatgaataaaaacgatgtaagactcaaatagctaaaatcttaaaagaaaggaggaacattacactgattttacagaaataaaaaaatttgaagagaaagctataaataattctatgtcagcttattggataacacagttggaatgaacaaattcttagaaatatactgtctaccaactcgtgaagaaatagataatttgaatagatgtataataagtaaggaaattgaatcactaatgtaaaatctcacaagaaagaaaaatgttgaaccagaaggatttactggagaaatgtaaaacaatccttctcaaaatctttcaaaaaagaaagctgaaaatagggactacttcctgtcttattccatgaggcccgccaataccctgatacaaaagccagacaaagacaatacaactaatgaaaactacagaacaatattcctcrtgaatatgatgcacaaaagactcaaaaacatttagcataccaga

SEQ ID NO: 367491 - DNA, 608 bp, Homo sapiens
cgtaaacagaactaaagacaaaaaatcacaagattatctcaatagatggagaaaaggctatccataaaattcaacaccctttcatgttaaaaactctcaaactaggtattaaagaaacagaccacaaaataataacagccatctatgacagacccacagccaacatcatacagaatggggaaaaattggaggcataccagcacaagtgaaggggtggcctgcccctccacacctgtgggtgtttttagtcgggtgagacaagagactgagaaaagaaataagacacagagacaaagtatagggaaacaacagtgagcccaggagaccggcactcagcacaccaaggacctgcaccagcaccagtctctgagtyccctcagtttttatttattattattttcattatttcagcaaaaaggaatgtagtaggagagcagggcgataataaggagaaggtcagcaaaaaacatgtgagcaaaagaatctatgtcataattaagttcaagggaatgtactatgcctggatgtgcacgtaggccagatttatgtttctctccacccaaacatctcagtggagtaaagaataacaaggcagcattgctgcaaac

SEQ ID NO: 367492 - DNA, 599 bp, Homo sapiens
ttttctagaagtaactttagctactttccacacgtttgataaataacttaagatgccattttcattaaaataccccggtgttttcggtatctgtctgtcatcataactcttatgatttctagtctgttttaaaattgcattcccaagaagagaaagcctatttctccacacacagtaataaagtgagaaattttcaaaatacaaagtagtgttttagtcgtgagcaaaacaaactaatgactaacagagagtttagagagctgaaccaagacttgaactctgtagatctaaattctgtaaaggaatgtgggttttgtcttaaatgagctttgtgaacgctgaatataaggggcttcccctttaacttgcctctcattcttctccttccygccaccatatgaagaaggacatgtttgctttttccttccaccacgattgtaagttttctaaggcctccccagtcctgcagaactgtgagtcggttaagtcttttataatttctctttcctttataaattatccagtctcagctctttcttcatggaagcatgagaacgggctaatacaagacccaattaatacaaattaattaagcattt

SEQ ID NO: 367493 - DNA, 598 bp, Homo sapiens
aatatttgatagcagagtagggtgactacagtttacaacaacatattgtatttttcaaaatagctagaagagaggaattaaaatgtttccaacaaagacagaaatgataaatgctcaaggtgatgaatgccctaaatttcctaatatcccggctttatcattacacatttgatccatgtaacaatatatcacacgtatcccaaaaatgtgtataagtattaggaaccaataaaaacagagtcttcgatagcattaggagttatacctaatgctaaatgacgagttaatgggtgcagcataccaatatggcacatgtatacatatgtaacaaccctgcatattgtgcacacgtaccctaaaacttaaagtataataataataaaatttaaaaaaaaacagagtcttcttattttttatattagttacatccaagccactctattgctggaacaaatatggtagtggttgtcatggggagtgatgatgatgakgatgatgatggtggtggtggtggtaatggtggaaacaatgatgatatgttactgccaataaacttctaaaatgacagctaattatgtgtcaggcattgcgacaacaa

SEQ ID NO: 367494 - DNA, 574 bp, Homo sapiens
agtgttttagtcgtgagcaaaacaaactaatgactaacagagagtttagagagctgaaccaagacttgaactctgtagatctaaattctgtaaaggaatgtgggttttgtcttaaatgagctttgtgaacgctgaatataaggggcttcccctttaacttgcctctcattcttctccttcccgccaccatatgaagaaggacatgtttgctttttccttccaccacgattgtaagttttctaaggcctccccagtcctgcagaactgtgagtcggttaagtcttttataatttctctttcctttataaattatccagtctcagctctttcttcatggaagcatgagaacggrctaatacaagacccaattaatacaaattaattaagcatttatataatctattttccctaattctgaccaactctcctcttattcagtggtgccttcagttgttaaaaaaaaaaaaatccaattgatcctgctagagcatcttggcccacccagattatcagggctcacccctggaatgcagttttctaagaggagaaggaagaataggaggataaagggact

SEQ ID NO: 367495 - DNA, 621 bp, Homo sapiens
caatctcacaagctattcctatcatcattatctgttgtaaagcaccagtgggttgacttgggcacagagcaagggctgttcaggaagaagtactggctctcacacctgctaagacacaaacctttgaaaaggataccaggaaaatatggaaaagagaaaaatacttcatccctttcttcaaaccaaaactttcctattaacttctctgtccatatggacatataattgtacattttttaaaaatctgtgtaaaacactgtatcatgtartctaatcctgtagttccatcaactaagtaccatcaaacctatgatcacaggtttggatccaccaaacttgctggattcaggttaaattcaacacttcagggcacaaagaacagaggaactcaaggaagcagactcaccaggttctccaaagcagatcagtgctcaagtaccaggagtttaggagttgtagagcagagaacctctttatagggcctgctaccccacccagcaggaagtggaactacccaaaactgggctggcccagcaatgtcccaactaaaatgcaaatctatccataactggcatgacagggattctcaaactgggaaatatcctgttctgggatctttcc

SEQ ID NO: 367496 - DNA, 630 bp, Homo sapiens
gtgaaaccccatctctactgaaaatactgcaagctacacatcttataaacgtctaatatccagcatctataaggaatttgaacaaacttacatgaaaaataaacagcccctttgaaaagtgaacaaaagacaagaacagacactttcaaaaggagacatacatrtggccaagaagcatgtgaaaaaaagttcaatgtcacggatcactggagaaatgcaaatcaaaactgcaatgagatagagtctcacaccagtcagatggctattaaaatgtcaaaaaaaataaaaggtgctagagaggttgtagagaaaataaatgcttatacactgttggtggaagtgtaaattagttcaaacattgtggaatacagggtagcaattactcaaggaattaaaattgaagaactaccattaaaaccagcaatcccattacttggtatatacctagaggaatataaaccattctatcataaagacacatgaatgtgttatgttcattgcagcactattcataatagcaaagacatagaatcaaactaagtgcccattgataaaagaatagataaaggaaaagtggtacatatacaccatgaaattctatgcagccataagaagaaatgagactgtgtc

SEQ ID NO: 367497 - DNA, 590 bp, Homo sapiens
ttgtctctattcagaatctaatcaaaggagctgggtctatctgatacatgctattctcacggcagaggagacagagagcactttcccaaccccttgaatcagagctggcctgtgactttctgtggccaagagaaggtggtggatatgatgtgtgccagtagaagcccaagcccttgcaaacttctgccctctctccaaatctcaccaccatggaaacatgtggagactaaagtgtggaattaggagaagccacatggagaagagctttaacacctggaggccatccaggaccagctgatcacaagtgcatgagggggttgggctgagatcagctactgaggccagactggtacagcagaccttccagctaacactaagacctgtgagcaaaaataaatgcttattgataaatgctgctgtgrtttgttggttatttgtaatgcggtattaatatggtgatagatatctgatacttgtgatagcaagaattaaagatattctaaaattaataaatcaaaaccagaaatagatatgttatttagctgtatggaactaataatcaaaataactaaatgtaaaacaaaaacgaa

SEQ ID NO: 367498 - DNA, 565 bp, Homo sapiens
attatactaagggagtagaggtagagttgagttcatgtacaacaatatagaaatcagctaaagtggatcagagcaggaagttttacaattcagggaaaggttaagatagaaagggatcctttcccccaatcaagaaagacagccttggaccaccagttagagaatcccccaattttctctctgccataagtcactgaaactgagagctaaggcagggcctctgtgagtcatgagcacttaatccagcgggagacctcagaacaggatatttccttttttgagattmcctgtcataccagttatggataaatttgcattttggatgggacattactggaccagcccattttaggcagttccgtttccccctgggtggggcagcaggccctgtgaagaggttctcagcctcatgactcctaaactcctggtacttgagcaccgatctgcttcggagaacctggtgagtctgcttacttgaatttctctgttctttgggccctcaaaagttgaatttaatctgaagacagaaagtatggttgatccaaacctctgatgacagttttga

SEQ ID NO: 367499 - DNA, 565 bp, Homo sapiens
attatactaagggagtagaggtagagttgagttcatgtacaacaatatagaaatcagctaaagtggatcagagcaggaagttttacaattcagggaaaggttaagatagaaagggatcctttcccccaatcaagaaagacagccttggaccaccagttagagaatcccccaattttctctctgccataagtcactgaaactgagagctaaggcagggcctctgtgagtcatgagcacttaatccagcgggagacctcagaacaggatatttccttttttgagattacctgtcataccagttatggataaatttgcattttggatgggacattactggaccagcccattttaggcagttccgtttccccctgggtggggcagcaggccctgtgaagaggttctcagcctcatgactcctaaactcctggtacttgagcaccgatctgcttyggagaacctggtgagtctgcttacttgaatttctctgttctttgggccctcaaaagttgaatttaatctgaagacagaaagtatggttgatccaaacctctgatgacagttttga

SEQ ID NO: 367500 - DNA, 634 bp, Homo sapiens
attttgaaaagtaaaacaagaaaataaacatcatctgtaattataccagccaaatataatcacatttaatatgttgttttacatatttcctaacttttaacaaatacatgttaatgaaaatgttatcatcctttacataagtttttagtaaaatttaatgttttaaataatattaagtaatctttcaaaacatccttcttaattatcttcasaattctactatatctttatctgatacattgaattatggaaagacaatggagactaagccttccattcagaaataaaagcagaaggcagatatgcatgggggcttacagttaccatttctctgagcataagaagaatattttgccatgattcttgtttctttatttgtttacatatttaattttaaatcttcatttgctagcactatttggtttagtggaatgtatcatagtaaaatatgagataaaatgttgcatcaaatattagaccaaataaattttttgttctttcctgtcatttttatgtactagtaattcatacttaatgatctactagaaaatcaggaagtagaagtattaggaatgagcctaaggctatcagactcttaaagaacataaagctaagctctttagacatgaagata

SEQ ID NO: 367501 - DNA, 447 bp, Homo sapiens
ttaataggaaagctttgaattgaagaagaaaaaagaacaaagtattttttccccatgttttcctggtgtctttttcaaaggtttgtgtcttaacaggtgccaagagcctgcaatcyttcccaaacagccctttgttctgtgctcaagtcaacccactgggactttactacagataatgataagagaaatggcttgtgagattgctcatggtatctgaacttgtcactgcctttcctaaagatgttattttcacagaaataacatgcttggttcattactacagagatattttctttggaaaaattgtatgagaaaacacaagatttcccagggccaatgaagcaatttgctaaagtggaagggagaaacgaagtagtcttgaaaaggcagttaagagtttaaataatttcttggagatggggaaataatatttcatggtattacata

SEQ ID NO: 367502 - DNA, 447 bp, Homo sapiens
ttaataggaaagctttgaattgaagaagaaaaaagaacaaagtattttttccccatgttttcctggtgtctttttcaaaggtttgtgtcttaacaggtgccaagagcctgcaatccttcccaaacagccctttgttctgtgctcaagtcaacccactgggactttactacagataatgataagagaaatggcttgtgagattgctcatggtatctgaacttgtcactgcctttcytaaagatgttattttcacagaaataacatgcttggttcattactacagagatattttctttggaaaaattgtatgagaaaacacaagatttcccagggccaatgaagcaatttgctaaagtggaagggagaaacgaagtagtcttgaaaaggcagttaagagtttaaataatttcttggagatggggaaataatatttcatggtattacata

SEQ ID NO: 367503 - DNA, 564 bp, Homo sapiens
gccctttgttctgtgctcaagtcaacccactgggactttactacagataatgataagagaaatggcttgtgagattgctcatggtatctgaacttgtcactgcctttcctaaagatgttattttcacagaaataacatgcttggttcattactacagagatattttctttggaaaaattgtatgagaaaacacaagatttcccagggccaatgaagcaatttgctaaagtggaagggagaaacgaagtagtcttgaaaaggcagttaagagtttaaataatttcttggagatggggaaataatatttcatggtattacataagcattagcttctctctctggaggagtcccttcccacaaacactgttgtatcatttctttcagatcctgagactccagcaggatgtcttatcaacagcagcagtgcaagcagccctgccagccacctcctgtgtgccccrcgccaaagtgcccagagccatgtccacccccgaagtgccctgagccctgcccatcaccaaagtgtccacagccctgcccacctcagcagtgccagcagaaata

SEQ ID NO: 367504 - DNA, 509 bp, Homo sapiens
taaaacttttcatctccttagttaaatttattcttgggtattcttcttttttgtaggtgttgtaaatgggattgcctttataatttcttccttagctaatgcattattggtgtatagaaatgctattgatgtttattttgatgttgtatcttgtaactactgaatttatttataaaatctaagagttttttggtggtgtctttctgcttttctagatacaagatcatgtcatctgcaaagagtaaaaatctgacctcttcttttccaatttggatggttttctcttgtctgaatgtyctgactagaacttctagtaccttattgaacaggagtgatgaacgtgggcatccttgtcttgtttcagttcttagaggaaaggttttcaggttttcctcatttagaatgatgttgactgtgtgtttcccatacatggactttatcacattgaagtatgtttcttctgtgcttagtttgttgagtgtttgtatcatgaagagatgttgaatttt

SEQ ID NO: 367505 - DNA, 602 bp, Homo sapiens
attatcaagtcacaccccaatgtacacctctcatctattcattttggtacatattgttcactcaacatatatattgtcaatgcatatagtgactcctctttcatatcttttgtaaactcttccagcaattagtgaggcttactaaacatggtatattaaatatttaagttgatgttgctagagcttccttagaccagtagtcagaaagctttccaagaatgtggtttatagttggagaagaagaaaggaaaatgaggaagaggaagaggaaagactcaaaatcattggagcagtcaccagctatgctccaggaagggtaggagtgctgaatcaacccagcatcacatccctcagttaagcaggttaggttcccagagctgccattgctcccgtcaataaggaagggctttggggcaagatcactactggccaggacagtacagaaataaagacatcacgtcagcaccttraggccaggtatttacaaatggtgttctcaccaaattacccctacagactattacgcatgctaagcacatcaggggacaaagtaaagggcctttattcaataggtcacttactactccccaacagcctcacat

SEQ ID NO: 367506 - DNA, 605 bp, Homo sapiens
atgactacagatagtactcataatagtaatgtaatacattgttaatcaaagaaatagagccaaaacttcaagtttgagatgtgtttgatggtaagttatttgctttatctttaagatattttatatcatatttcttttaggtcagagccagaagattttagggggaagcaaatgaaaatattttatttgaatgaggtgtggtgaaataataagatgggctamccgtgacacttactcttatgtggtgaaaatgggagttaatcaaagaagaaatgtagaataaagtacagaaacaagataatttaattgttcttagttatttggactaagattgtcttctgactactgttaagtacaaaaataactaaatacaataaatgcaatatgttaactgtgttagtttgcagaaaattgacattgtaaatatttagcattctgtataaaaatatataatgtaatctctaatctagtttactattactatgattagctgttcaggacaataaaaaattctctcacttaaatatcatatttattctggtggcagattacttaaatttcagtctaagtccttataaggaactgaatcattcattagcattaac

SEQ ID NO: 367507 - DNA, 605 bp, Homo sapiens
atgactacagatagtactcataatagtaatgtaatacattgttaatcaaagaaatagagccaaaacttcaagtttgagatgtgtttgatggtaagttatttgctttatctttaagatattttatatcatatttcttttaggtcagagccagaagattttagggggaagcaaatgaaaatattttatttgaatgaggtgtggtgaaataataagatgggctaaccgtgacacttactcttatgtggtgaaaatgggagttaatcaaagaagaaatgtagaataaagtacagaaacaagataatttaattgttcttagttatttggactaagattgtcttctgactactgttaagtacaaaaataactaaatmcaataaatgcaatatgttaactgtgttagtttgcagaaaattgacattgtaaatatttagcattctgtataaaaatatataatgtaatctctaatctagtttactattactatgattagctgttcaggacaataaaaaattctctcacttaaatatcatatttattctggtggcagattacttaaatttcagtctaagtccttataaggaactgaatcattcattagcattaac

SEQ ID NO: 367508 - DNA, 563 bp, Homo sapiens
agatgtgccaagaacaaagacagcacttaacttttatacacacttttaaaaggggatgggctagcttgaagcaggcttacagtggcgtgaaagtgaggatacagaggcagaacaaagacagttaatcaaattttaacaggttcataactcaggattacacatgactgttgctatgtaaccaagatggccgttatctaggtttgccctagtgcctagcacagcttattccatgaccttcactacagcgcccaggtggccataattcaggcctgctcagacagctcatgtccttcactgttccacttagacaaaacagaatacttgaagttactagatacagagaacaggaatctataaacttataccataaaagaaaggaaaatttgtttttctcctccctgtgttgaaagagtgctgggagggtctccagagtasatttctttgtgtactagcttcttagataatgtttatcaaggcttttcctgggtctgggctgtgcctgttgctgcctctgagataagtcagcctaatacaggaaagcttatttctttttctttttaatt

SEQ ID NO: 367509 - DNA, 648 bp, Homo sapiens
gtcattatattttcctaggtatgtacctaacagaagtgtgtacatatagtcacaaaaggacaaatacgtaaatattcacattagcactatttttaaaaattccaaattggaaactactaaaataccttttagcaataaaatggatgcataaatggtagtatattctcatagagaaataccatacagcaatgagaatcaacratctatatctacaaaccagaaaatgaatcagtatcacaaacacaattttggggaaaaaaaatccaggcaccaaagagttcatactgtatgattccctttatatacagttcagaacatgaagaacaaatgtacagtgttagatgccaggaaaaagttaatgtttgggggctggtagtgactcggactgcttttgagaacctgcttcccaggtggactgcttctgagatgctggtaacatgttatttcttcatttgtgcattggttgcatggttgtttagcttatgaagctttattaagttgtatacctgtacttggtgagcttttattaatttatacttcaattttagtcagttaaaaggttactttaaagggaaggaagccaccagaatgccaatattcctgcaacttagtgaacaaggaaagaaagatatgatgaagtcagcataa

SEQ ID NO: 367510 - DNA, 555 bp, Homo sapiens
ggaactaacctcatctgaaagaatccatgagagtttgcctgaaccttgtatggaacatgaaagtccatcagggagagttcctggctgagagagcagcatgtgtgaaggctgggagggaagaacgaacctggcacatatcgggaatagagagaccagggcctgttaagccaaacccagggagaggagcgttgcatggactggacttacgsgaacagccaaacaattagaaccttacgggtcaatgttaaggcgttcaactattttttctaagtgtaacaggaagccattgaaggaaggacagcaggcaggataacacaactgcctttgtatttttgaaagatcattttggcagagtggtgtttagcttataggggattgggagttgaagaccagttaagaggttcttacgattagtccaagtgagagatgatggtacctggatgaaggtagaaagaatgaaatggagaaaagtaaatggaagatatagaggagatatcaggtggaattgttaagctcacaatattagctctgatcattctaacaattccctgggtc

SEQ ID NO: 367511 - DNA, 608 bp, Homo sapiens
tgttatttactctctttttgagttttagtgtttgtgtgtggtaagacacacctgtgtttcaagtagtcccaggacggccgggaaaagggtggaggaaggaagggtgtttacctgctcatattcagagaaactaattgcctgggaaaatttaggctaaaccaatgaagatgagagagtttcaacatttcagtcatactggcatttaaggcaggtgtgaacaaataaacaytagtgacaagaacagccttgccaagcaaagtactcttccgtgaaaagagggaggattgaccctcccatctgatgtcactgccaaggccaaagagggtggaatgagctgatcgtggatcctggatcttctaggtctttgagaatttctgtgtcagttgcccatgataccctgttcttcctcacttgttggccacctctctgagtcactgaccagccagtgctgatttacttaggtggatttgtggggtcctggcctgaatcaccatatgcagaggtggctctcagagggtggtgggcagccgtggggaggtgcagggaggtaggacctttgagtgggagaaaagcaagtgaggggcctggtatgtgggtctgtgggatcc

SEQ ID NO: 367512 - DNA, 608 bp, Homo sapiens
tgttatttactctctttttgagttttagtgtttgtgtgtggtaagacacacctgtgtttcaagtagtcccaggacggccgggaaaagggtggaggaaggaagggtgtttacctgctcatattcagagaaactaattgcctgggaaaatttaggctaaaccaatgaagatgagagagtttcaacatttcagtcatactggcatttaaggcaggtgtgaacaaataaacattagtgacaagaacagccttgccaagcaaagtactcttccgtgaaaagagggaggattgaccctcccatstgatgtcactgccaaggccaaagagggtggaatgagctgatcgtggatcctggatcttctaggtctttgagaatttctgtgtcagttgcccatgataccctgttcttcctcacttgttggccacctctctgagtcactgaccagccagtgctgatttacttaggtggatttgtggggtcctggcctgaatcaccatatgcagaggtggctctcagagggtggtgggcagccgtggggaggtgcagggaggtaggacctttgagtgggagaaaagcaagtgaggggcctggtatgtgggtctgtgggatcc

SEQ ID NO: 367513 - DNA, 567 bp, Homo sapiens
catctgatgtcactgccaaggccaaagagggtggaatgagctgatcgtggatcctggatcttctaggtctttgagaatttctgtgtcagttgcccatgataccctgttcttcctcacttgttggccacctctctgagtcactgaccagccagtgctgatttacttaggtggatttgtggggtcctggcctgaatcaccatatgcagaggtggctctcagagggtggtgggcagccgtggggaggtgcagggaggtaggacctttgagtgggagaaaagcaagtgaggggcctggtatgtgggtctgtgggatcctgagctgatttaccatatgctggttaatttttaaaatcaaaagtattttcttttgaagccatggaatacctctcttatctctctatcaagcccttcttccaccttttcttcttccctcctttcctctctcttgtcctcttgcccartagtcttctggagttgattcctaaacccaggtctaccttttctgcctgctctttgcaactcataaagcttttgttttctgttcatttttcattgccatacgctgttt

SEQ ID NO: 367514 - DNA, 551 bp, Homo sapiens
aatgagggcagaagttttatgatttagggaaggtgtaagacaggaaaatatctttgttcccaattaagaaagagatcccttgaccatcagttagagattcccccaagtccctctttgccataagtcactgaaactgagatccaaggcatggcttctgtgagtcaggagagcttaacccagaggagagatttcagaacaggatatttcctattttgagtatcctgctcatgccagtcatggataaatttgcatctggcttaagaaattactggatcagcattgttttgggtagtttcacttcctgctgggtggggtagcaggctctataaagagatcctctgctgcacgactcttaaacccctggtacctgagcactgatctrccttggagaacctggtgagtcggcttccttgagttcctctgttctttgtgccctgaaatgttgagtttaatctgaatatggcaagtttggtggatccaatcctatgaaaattgacttgatgctacttagtggatgaaaatttaagattagagcacaattatatgctatt

SEQ ID NO: 367515 - DNA, 466 bp, Homo sapiens
gtggaggcagccagcagtggtggtcactgcaggcaggggagtctgactttggggcatgtaaaaatgcatggcagtgctgctgctggggcagtgtgtcattgccaatggcttgtgtttcagctatggtggctgcaggcaactgcagtcatggctctagatgaagcatgtcaatgggactccagggaggtggagatgcaggggtggttgggcctgagggtaggaggtagtctaggggggactagactctcactatggtgccttgcttagctgcttatgacttgggggtgtgtgggatacagtgtgasattcatctctggagtggtgctgtttcatggtctccaggcagctccctacgttagtctcagggcctgagggcattgagaggttctcccatggctaggattgcaggagtctgcagaagggatgtgaatccctggggatctctccattaccctttttttgggtt

SEQ ID NO: 367516 - DNA, 459 bp, Homo sapiens
aattgccaaatttaccctacctagtttagagatttctttttctttttcttttttgtttttttttgagacagagtttcaatcttgttgcccagactgggtgcaatggagtgatcttggctcaccgcagcctctgcctcccaggttcaagcgattctcctgcttcagcctcccgagtagctgggattacaggcatgmgccaccacgcctggctaattttgtatttttagtagagatgggatttctccatgttggtcaggctggttgagaactcctgacctcaggtgatccgcctgccttggcctcccaaaatgctgggattacaggcatgagccaccacgcctggccagagattttattttttttccaaaacaaagggtctcttatttatttcttcagatcattaactgcagtatggcatgccaaggttattaggatccaaatatctcatatatattttga

SEQ ID NO: 367517 - DNA, 552 bp, Homo sapiens
tctttttctttttcttttttgtttttttttgagacagagtttcaatcttgttgcccagactgggtgcaatggagtgatcttggctcaccgcagcctctgcctcccaggttcaagcgattctcctgcttcagcctcccgagtagctgggattacaggcatgcgccaccacgcctggctaattttgtatttttagtagagatgggatttctccatgttggtcaggctggttgagaactcctgacctcaggtgatccgcctgccttggcctcccaaaatgctgggattacaggcatgagccaccasgcctggccagagattttattttttttccaaaacaaagggtctcttatttatttcttcagatcattaactgcagtatggcatgccaaggttattaggatccaaatatctcatatatattttgagccttctgtgatggtggtggtggaatcaaagtagattgcatcagggtccattctgattatgccatggttctggatctcggcccctcttctccattccaacttatgttccctttatagacctttgtca

SEQ ID NO: 367518 - DNA, 466 bp, Homo sapiens
gtggaggcagccagcagtggtggtcactgcaggcaggggagtctgactttggggcatgtaaaaatgcatggcagtgctgctgctggggcagtgtgtcattgccaatggcttgtgtttcagctatggtggctgcaggcaactgcagtcatggctctagatgaagcatgtcaatgggactccagggaggtggagatgcaggggtggttgggcctgagggtaggaggtagtctaggggggactagactctcactatggtgccttgcttagctgcttatgacttgggggtgtgtgggatacagtgtgacattcatctctggagtggtgctgtttcatggtctccaggcagctccytacgttagtctcagggcctgagggcattgagaggttctcccatggctaggattgcaggagtctgcagaagggatgtgaatccctggggatctctccattaccctttttttgggtt

SEQ ID NO: 367519 - DNA, 580 bp, Homo sapiens
ctttattatatattattttgtcttagacttttcattatttctgccacttccccaccagaatacatgctgtgttctcaacccattttatatatgttttcttaacctctggaccaaaggagttctgggagaggagataacataacactagatttgtatcccagcctcatcctcttgcagttttgtgttagaacaatggtccctgagtctctatttgatgcctctgaggagccagacttacattataaattaggaaaatgaagtcagaaagggcagaaaaaggattcaagttctggaacctgggaagttctgtctgtcataatctagctgtgggaaagttgttgtgaagtctgttatctactccaggttcagttttatgctctgtagtaggcttcctctgtkcttgaatcaatgaattctctttgatttttttaacttagaatatcctatttattgtattagttcaatatctatcaatatttagaatcacctatattttgatcaattaactgatccatccatccgtccgtccatccatccatccatccatccatccatccatccatccatccatccatgtttg

SEQ ID NO: 367520 - DNA, 482 bp, Homo sapiens
tatctttgatcaacttgatggatggaaacaaaaataatttcccaaaagtttgcaccagggagaggtgagaagtgtgtagggagaagagagaagtgtgtagaagttatcctgttatcctgctagtttccatctctagcctgaggagagtttataggttccttaaacatacagctgttactccatgtctgtgggttccacatttgtggattcaaccaactgtgggtcaaatgtattcagaaaaaaaattccacaaagttgcaaaaagygaaacttgaatttgcagtgtgcagagttctatgctgaacccaccccacacaatgaagtgatgtttaggaatcgtattaggtattataagtaatctaaagatgatttaaattataccagaggatgtatataggttatatacaaacactatgtgattttatataagggacttgagcatctgtggattttggtatctatgggagggtcctggaacaaat

SEQ ID NO: 367521 - DNA, 567 bp, Homo sapiens
actcaaaatcttagactttggaagacagaataggtgatgttgatatagagttytggtcctccagaagagcagcaaggttatgaagaatgggatgggttttgttttggatacactgtgctcaagagctgtgataatctaggtcgaaatgttaactggctgtttaggaatatcattcctatggcctcccaacagggctgagacacagatgccgtgcacagaagttacatggatggggtgaagactcgggaaaggaagagagcagtcagagggacaaagtgagtaggaaggactgagctgagaacagaatgccaaggttaagaggattgagagctgcatttttaggctccaaaaagaggatgggacacctcttttgctttgaaacttgctttggaattggtatgcactgctccccagctaacattttgaagacctcttacccttttcttatgtgtccccaaatataggagccccaaatataaatagtcaagtctctatcacccataattccaattgctataggtaggcgtgtgatgtttggcagggctaatatagtggaaagatgagatg

SEQ ID NO: 367522 - DNA, 570 bp, Homo sapiens
tcctccgaactctgtgaagccggcactttccccgtttttcaaaggagaaatctgagactcaaaggttatacagactgtaaatattacagctaaaattaacacggagacttcttcaaccctgaccctttgccctcaaaaagtcagatacaatgccctcattatggactgagttgcatctccctcaaactcacatgttgaaatcctaatacctggtgcctcagagtgtggctctatttgaagacagaacctttaaaaaggtaattaaagtaaaagagggtcatgagcatggggccctactctaatttgactgcagtgcttacaggaagaggagactagggcacggacagagacaagcgaaggtcacgtgaacccagtgagatggcagccayctaccagccaaggagagaggctcagaagaagccagtcctgacaacaccttcattcagacttctggcctccacaattgtgacagggtaacttctattgtttaaggctctgagtctgtagcactttgttacagcagccttggcaaactaatacagccccccaagaaacagaagacccaaagtc

SEQ ID NO: 367523 - DNA, 331 bp, Homo sapiens
actacaaaaaaaatctaataatcatataattggagtcctagataaaagaagaaggtggagttgaaaaagtacatgaataatgaccaacacttcacaaatttgataaaagacacagatctatagattaaagaaatgaacaaaccccaaacaagataaatccaaagaaatctccaccacgacacatcayagtcaaatttctaaaaattaaggaccacacaaacaccttaaaaacagagaaagaaaaatgacacattacctatactgcaaaaacaattcaaatgacaaagtattattcattggaaaccacagagttcagaatgaagaaaaacaa

SEQ ID NO: 367524 - DNA, 580 bp, Homo sapiens
aggtaaaaaaaagaaaaaaactctccttgacctccagtttgttggttttgttattctttctcccagttgcccttgattttgatcattcataaacgtgagggaggagaaagaggcttcatctctctgttcacctcttcatgttccgaggaggaagcagctggttcctctgcagccggttcctctgcagccagttttctctgcagattaatttttatcattttgagagggttgtcagacataatctgatttaatctatgagaaaaaaatgacagaagccatttcagtttctgaagagacatttgaaccatccagagacttacatttgcttttaaaacayctgtcttctgtcattttgcaattgtgaccattctcctggcatttgatgtcccagccttcctgggtccttctctaactttaacctcctaattctaattatggtactaatagcattcacaccatagatgataagattttaagctgttattttttctaaaatatttacctttttaatttctgcattcatcatcacttgatctctgacacatggaaatgccacgcttcctgtttacagacaagccgg

SEQ ID NO: 367525 - DNA, 607 bp, Homo sapiens
atggcatctcaaggtgaagagcgatgtgtcaatcattatgtctcaccaagagaagaaagcgtcagggtcagtggggtggaaaggctgctttcctccactaacaaaataatggacgggaataattttgaaaagataagtgttttctgacatcaaacgtgtgatgacttttctagcaccaacaaccaattttccaccagcaactgggggtccaccaattcaattcatttctcacattatctacctggagttgcatcagatcccacaggttaaagggctcagtctcacttcagataccagctgcaaatggtgtacccaggctacccacatgtctagcaggtgactgaaaattcgagggttcccatacccttctcccccaggttcaataactttctaagatgactgacagagctcaggaaaatactttgcttacttaataaaattttaaataatatacaaacttatttaatatatttataaataaaatatatttattaaataaatatttaatatctacttatataaaataccctggagaaaagaytacatggattcagagtttcagaacaggaattcagcaacatgaaactcgggaagagaaaaacccatg

SEQ ID NO: 367526 - DNA, 620 bp, Homo sapiens
gtgtgcacagtgtgggggacagggctccaggtgcattcggtcactgccgtacccacagcccctagttcactgtctcacctgtagcgrgcaccaaagaacttttgccgaatgagagaatgaagcaaaaactcaaggtgaaccttgaggtgcttgggtagcgtgacacaacataaagccatctcctgaatggccgtgcagcactttcgtactgtgtgtataaggccaggctccggagaatgaggcaagtgcttccctttttaattaaagttggacgtttgccatgccctctaaggaacaacgctgctgttgacatttttcttacagagagaaatgcatgttatggagaggtctctctccctggtgcctatcttccttagccctcagtaagtgactggtcttcagcaatgtatatgatttggcaattttatttaaaggatggtggtttccaagaaaaatgtaactggattattacttccagtatggaattcagatgctccacaaataaacatccttgcttcagagggtgtcaccagagacctctaaatttatttcaagcacagctaattttaattaaggcttacatttgcagaagcatctgcagcttcatttgtttgaaaact

SEQ ID NO: 367527 - DNA, 614 bp, Homo sapiens
aggggggatactgaactgtacaagaacagagtttttatatgctcttgaagctaatttgatatcaattcacactagattattttaaatttcagatttaaatgtaatccccatggtaascactaagaaaatatctaaaaatatacataaaaggaaatgaggtgggaattaaaatgacaaactagaaaaaaaatcaatctaacacaaaagaaagcagtattggaggttatcagtgagcaaagagataaaagacatgcaagaactaaattaaaaaatcaccagtagtcactttaaaggcaaacgattgaactcactagttaaaagacagagactggcagaatagattttgtttaaatggtccaactatatgctgtctaaaagagactcattttaaagccaaagacacaaatattataggttgaaaatgaaaggatataagaagatagtccatgcaaatagagctagagtggctacactaatatttgataaaatagactttgattcaaaaattgttgcaagagacaaaaaaggtattaaatattgatttaaaagatcaattcaccaaggagatataacaattgtaaatacatatgtaccaaacaatagagccccaaaag

SEQ ID NO: 367528 - DNA, 614 bp, Homo sapiens
aggggggatactgaactgtacaagaacagagtttttatatgctcttgaagctaatttgatatcaattcacactagattattttaaatttcagatttaaatgtaatccccatggtaagcactaagaaaatatctaaaaatatacataaaaggaaatgaggtgggaattaaaatgacaaactagaaaaaaaatcaawctaacacaaaagaaagcagtattggaggttatcagtgagcaaagagataaaagacatgcaagaactaaattaaaaaatcaccagtagtcactttaaaggcaaacgattgaactcactagttaaaagacagagactggcagaatagattttgtttaaatggtccaactatatgctgtctaaaagagactcattttaaagccaaagacacaaatattataggttgaaaatgaaaggatataagaagatagtccatgcaaatagagctagagtggctacactaatatttgataaaatagactttgattcaaaaattgttgcaagagacaaaaaaggtattaaatattgatttaaaagatcaattcaccaaggagatataacaattgtaaatacatatgtaccaaacaatagagccccaaaag

SEQ ID NO: 367529 - DNA, 648 bp, Homo sapiens
tcttctgtagtcacctctctttaaccacagccaggaaaggcataaaaggtcttccacttttaaagattcatgtgattagactgatcacaatcatataacccatctcaagctccatatctttaatcayatccacaaagtttcttcccaagtaaggatatagatagatagatagatagatgatagatagatagatagatagatagatagatagatagatagatagatgatagatagatagatagatataaaatttccttgctttctccatgtctagatgctgccttcattctttggctcctggccaccttcctccaccttcaaagcaattagcattgcatgtctctgaccattcttccacagtcatatgcccttctgaccacagccaggaaaggcaattttacacacatctctctctcgttgcctttctctccctccaacccccataacttctgtaatagagaaaaggtctgaaagaaaataaattgcatgcaaataacaattgaaattaaaatgaaacatttcatctatttttcccagctatttcttattgcctccagaggccccattagcctgaaaagcactgttcaataagtaaatttaaaaaaagttagtagcataaataaagtaagcatcacctacatacctgac

SEQ ID NO: 367530 - DNA, 600 bp, Homo sapiens
ctgacctatcagtgaaaaggaagtgatctcaagtagcctcccaaacaaaaatatttagatattttcaaagatattatcagttataaaacatccgagaatgaagagtaataggctgtgaatcagaagactctattccagcatctccactgctccttgactatgtgcccttgagaaagtcaactctacttggccccagcatccacaactataaaataaaggagctagattagacaattacaaaatgcccacaagttcygtggtttatttctcctagactactttctttgtagtgtaaatcatgtttagcatgaaagttacaccttccagataattattttaaagcatattgaatgccatatttacattgctctattctcccaaatcaaataatatctggtcaagatttttcaccagcatccccaagtcataaaaggatatgatcgtgggagcctgttttattgactgcaagaaaagattattcattattatgtaggaggacagtggagttgattgctccttagctgtcaggaaatggctcatctataagacttggagtatgggggtggtgcaaaaggaaaagtttactcataaatacaagtg

SEQ ID NO: 367531 - DNA, 577 bp, Homo sapiens
taaagtaagtctttctgaagattggatactgtaaaatccaaaactattctaagccaccaggtgaatatgatcaatctgagttgtgtaagcctcaactcaagacaataaaagctgtttgtagccttattgatgccaagtatatgtcaatataaaacaacagcaacaacaaatctcaaaacattgtgatgaaattagacttaagatatttaatttggatttttaaaaaaagatacacatttatttttttaaataattaaattgataaaaattatacatatttatggtacacagcatgatgttttgatatatgtatccattacctcacatacttatttctttgtagtgagaatatttaaagtctactctcttagcaattttcaagtamacaatacattgttattaaagagtcatcaggctgtgcaatagatctcctgaagttatacctcctgtttaactgaaattttgtaagcctttcaccagggtcttcccaatccctgtcacctgcccaccccagtccctggtagccatcattatactttctgcttctttgagtttgatttcttttttttagattcat

SEQ ID NO: 367532 - DNA, 471 bp, Homo sapiens
tacgaattgctatggcctgaatgttcgtgtctccctaaaattcacatgttgaaaacctaattaccagtgtgatggtattaaggggtgaggcctttgggaagttattagatcatgagggcagagctctcataaatgggattcatgtccttataaaagaggcccgagagagttgccatggcccttccacgatgtgaggacacaacaaggaggcgctgtctatgaaccagaaagcaggccctcaccagaaaccaaattagccagcaccttgatctcggacttcacaacctccagaaccctgagaaatgaatttctactgtttatgagctactcagatgatagtattttgtcatrgttacctgaacagactaagacatgaattctatctcaaagatgaggaaactaaagttgaaagtggttaagtttctgaaggttctgcagccagcaagagatatataaagtaccaaataataa

SEQ ID NO: 367533 - DNA, 528 bp, Homo sapiens
ggcattcaactaggtactttgtgctgggctcccttcctccccccaactcccaccacacacatcctggaaggcagcaatgcttctgtttcatcatacagcmtagtcacatcctttagaattcttccaatttttttgcctcaagattggactgagggtgtcaacatccggaggtcagtataaagacccccccagcccaccaccccatgcaagatcttgctctgtcacctatgctggagtggcagttgcacaatcacagctcactgcagcctcaaccttcttggctcaagctatcctcccacctcagcctactgagtacctgggattacaggcatgtgccaccacacccggctgatctttgtatttttttgtagagatggggttttgccatgttgcccaggctggtctccagctcctgggctcaagcaatcctccatcctcggcctcccaaattgctaggattatgtgggtgagccaccgcacctggcatatataaagacttctagacaagggttcattctggttcccttt

SEQ ID NO: 367534 - DNA, 528 bp, Homo sapiens
ggcattcaactaggtactttgtgctgggctcccttcctccccccaactcccaccacacacatcctggaaggcagcaatgcttctgtttcatcatacagcctagtcacatcctttagaattcttccaatttttttgcctcaagattggactgagggtgtcaacatccggaggtcagtataaagacccccccagcccaccaccccatgcaagatcttgctctgtcacctatgctggagtggcagttgcacaatcacagctcactgcagcctcaaccttcttggctcaagctatcctcccacctcagcctactgagtacctgggattacaggcatgtgccaccacacccggctgatctttgtatttttttgtagagatggggttttgccatgttgcccaggctggtctccagctcctgggctcaagcaatcctccatcctcggcctcccaaattgctaggattaygtgggtgagccaccgcacctggcatatataaagacttctagacaagggttcattctggttcccttt

SEQ ID NO: 367535 - DNA, 528 bp, Homo sapiens
ggcattcaactaggtactttgtgctgggctcccttcctccccccaactcccaccacacacatcctggaaggcagcaatgcttctgtttcatcatacagcctagtcacatcctttagaattcttccaatttttttgcctcaagattggactgagggtgtcaacatccggaggtcagtataaagacccccccagcccaccaccccatgcaagatcttgctctgtcacctatgctggagtggcagttgcacaatcacagctcactgcagcctcaaccttcttggctcaagctatcctcccacctcagcctactgagtacctgggattacaggcatgtgccaccacacccggctgatctttgtatttttttgtagagatggggttttgccatgttgcccaggctggtctccagctcctgggctcaagcaatcctccatcctcggcctcccaaattgctaggattatrtgggtgagccaccgcacctggcatatataaagacttctagacaagggttcattctggttcccttt

SEQ ID NO: 367536 - DNA, 506 bp, Homo sapiens
ttatgactaaacagcaatttttatgggggaaaaggaagaaatagagactaaaattgaatttcctcacatggagcaaaagaccatggagaaagctttgtaaaagatgcagtagccgtgagtaagtcagaccacaaaaaatggaagaatgttttagaagttctggactaaggaccaaatggaagatgggagatctctttctcatttatacaacatgttctcacttacaagtgggagctaaatattggatacacatggacatagagatgggaacagcagacactggagcctactagttgtggagagagggataggagcaagggctgaaaaactacctattgggtactgtgctcaaaaccaggatgatggttcagtcataccccaaacctcagcrttatacaatatacctctgtgacaatcctgcacatggacccacaattctaaaataaaagttaacaaagaagaaaagaaaaatacatttaatatttcaaaataaaaatctccaacac

SEQ ID NO: 367537 - DNA, 483 bp, Homo sapiens
gttgaaaccaaaagaacagttttcttgttgtgccagaaccatgctggcttcctagggaaaacatactctgattcagccagagaaacaattgtgtcttaggcagatagttacaaagctggcaccatggagttgctttgaataaaccaatgcaattatgtggtcatttaaaaacttctctattttataattgaatgcactaagatagaagtggtacctagaagagcagaactctcaaaggtaccacgrccttttaccacatctctcctgagcctctcttttatttttacagtatttgattcttctctttttgatatttcagggctggaggaaactcctactcatgttatcagacactgtatgccttattttacatatgtgcttagactcagcgtccaaagggtaccattgtggcttgttgggctgaacatgggtccttgacttgggaagcataggtacacgttccttgctacacttaattcattt

SEQ ID NO: 367538 - DNA, 575 bp, Homo sapiens
cacaaacaaaaattggtaaaggcaagatttgaatcgggaagtctatttatttctagagactgagaacccaagttcttcacaatgtggcctttaataataaattaatatctctcagaagtacctggcactgtcccaaacacacagaaagccttaaatattagtgagtattcttactattgcagggcagaccagaattatagtcagggcagtatrccattcattcattcacttaaccaaaatttagagaatatctacatatcctaggcactggactcagttctgaggtcataaatgtaagtaaaacgtggttcatgcccacaaggaactttcaacatataaaggaaatcaagttcataaataaataaccaaagtactctgaaaagtgtgctattgcaataatggcaataaaattacacctacctcactgaattgtcatgagaattaaattaagttgacacgtgttaaatgtttacactagtgccagaacacagtatttagcataaatgcattagctattattgattttattgtattgtaatcatctgagtggtggtatgctcataaagaaaaagcaa

SEQ ID NO: 367539 - DNA, 623 bp, Homo sapiens
attatcctatctctaaatgcacctgggaggaattactaaatgcctacattaactttttaaaattcttttcccttctttctttacctttttatcttccctttctcctttaaggcagctaaattgctctccctgaaagactcccaccacacaaaggagttaagagctcctccccttggtcccaatagcacctcgtgcctgttacagcagagatgttttatcctctaattcttatctgtttattgcttacctgagctcctccaccagactgagctcttaaaggggaaaactgtttttcatctctgtaatctgaacatagagcacagtgccaaacacaccgtggaatgttctgtaagattcctggaatgaccaggcggttctccatgaagatatacctgtttacccttcttctttgatagaatgacccatgagcatatgtaggggacaggcttgataaaagagaattgaagrgcaaagagaagagaagagagataggaaaaaagggactctcgggaaatcacttctgtgcctagggccgtccttgatcctgctgtctgttgtccactttttggtttcattcatggataaaatgccttgtgaattaaacatgctgttttcttttgttt

SEQ ID NO: 367540 - DNA, 621 bp, Homo sapiens
aatgccaagatttgtgctaggtactggcaataccatcatgagaaaacacaaatctgccctagtgatattaatttctaactgattactttccttctaacttgccctcatctaatctaacttcaaatgagttctctttccaacacatgaatcaaaccatgatattccctgcttaaaatcattactgacatttatcatctaaattcacataaggatgttttactacctgcttctgtttttatttctgacccctgcctgatttcttgtactttacgcttctacaaaaccaatgttaatccatgcccttgacttggcacatgacagaatcaggagaagtagaaaagggatgaagtaaagataaacttgagagacaggttgattcagtgtctaaatgttattatcctaactaaagtgtaaatatcacaaaacctaatattaccttaatatagtaaacatttgatatatttttgttagagtggattaaaaagtggcatttgtggttttatctggcttcagattcattaggaatgagtgagtgaaaggaacctaaaagggtgagttcattkgtacatgaacaatttaatcctttttcggtctcaatagctattattgtggctaacaaag

SEQ ID NO: 367541 - DNA, 601 bp, Homo sapiens
ttgcatttttcctctcactgactggattacacttgatatcatggttgacaattgtaactaaattattatttgtacaatttttatctctaatatatactcttccttaaactgaagaaggttacattgaagaggatgatgtggakgttaaagtttgacagctgaataatggtgtcaaagataatccaggcagcaagaaagaagtatgtgccgtagcagaaaagtagtatgtggaatacagtaggcacttgatatatatttatcaaacaaatgatgagttaatgaatgaactcaaacttcaccttttcttttaaattctctctaacctttgagactgaattaatgagtctcttcctgtgcttctgtaaaaccaccacaacaataatagctaagttactgagtggttattacgtctcaggtgctgctttaaaggtattaactcacttaatcctcacaacaactccatgaagtaactgcaataaatatctcattttagagatgcagatactcagacacagagaggtttaataactttcccaaggtcacatagtcaataattagaagagttctatccaactatccaatccataaatgcacactacga

SEQ ID NO: 367542 - DNA, 601 bp, Homo sapiens
ttgcatttttcctctcactgactggattacacttgatatcatggttgacaattgtaactaaattattatttgtacaatttttatctctaatatatactcttccttaaactgaagaaggttacattgaagaggatgatgtggaggttaaagtttgacagctgaataatggtgtcaaagataatccaggcagcaagaaagaagtatgtgccgtagcagaaaagtagtatgtggaatacagtaggcacttgatatatatttatcaaacaaatgatgagttaatgaatgaactcaaacttcaccttttcttttaaattctctctaacctttgagactgaattaatgagtctcttcctgtgcttctgtaaaaccaccacaacaataatagctaagttactgagtggttattacgtctcaggtgctgctttaaaggtattaactcacttaatcctcacaacaactccatgaagtaactgcaataaatatctcattttagagatgsagatactcagacacagagaggtttaataactttcccaaggtcacatagtcaataattagaagagttctatccaactatccaatccataaatgcacactacga

SEQ ID NO: 367543 - DNA, 599 bp, Homo sapiens
ttgccaactaaaacttggagctggctgcaaatatttttttttcaaaaagcacaagggggagacacagttgcatcaccacatgccaagaaaggaaagggaggtgggacaagagagagtggaggagggtgatatgagctgggtgtacagagctgggctcctaagactgctagtacctagtttccccatcccttctatagtcatacgtgtcatcataaagcacttgacatattattgagactttcctgtctaggtactcttctaaaacttttgccaacactgtctcattgaattctyaccataataacatgaaataggtttgaagaaataaagtctcattgcccaagataatgtagacagtttgtggtaaagcctcaaatcaaacacagatctgcctaatcccacagattgctcttaagtactaggtgacattgtaaagaaaggtgcgtagatgtgccatggaagggttcaatctgttgggcgcaccaattcacagcagacacagcaggacacaatccctgtcccagagaatcacaagatccggcaggcctggccatcaaaccccagcgagggcattgtcaaatcactgtacaagggcaaat

SEQ ID NO: 367544 - DNA, 532 bp, Homo sapiens
ccagcttgttagtagtctggagggccacctagctgcttgcactcctttcccccagaaatgttaagtctacaaactaaaattggtaaaagcattttagtagtagaatttctcttagagaaattataaggaaatatccacacatttgaaaaaatgttagcaacatgggtgaaaaatgttagcactaagaaaagagaaggaaagtycaaatcaaatgattttggaaatcagctgtcttttacacttgataatgatgtggatgtgtatcttttggaggggaaggttaattctacttagaaataaggacaccactcttttacttcaatgcttgctcattatttcttaagcagcctacatggtattcatggaccttcagaattttctttataggagaagcatgcagtgaatgatttggcttaaagcttcctgtgcatagtgagcggtttatgtgtgtacatgtacgtgtggtggcttaggggtagattaagagagatgaaggtgtaggctaaaacatagccaagccatgtcttggaga

SEQ ID NO: 367545 - DNA, 454 bp, Homo sapiens
tacggccatctcatttcaacactgctaattccaaatatagtatgtgctcaataaatgtgtgacctctactgggaaagacagaactgtagataatcagagccataaatctagaaaatagtataatgcaaaactaactgtagaaaatgctaaaggcagaagtataatcatatgctatggaagagctgagaaaagaaattaatrttatgataatcaattcatcttattggagagtgacaatttgagatttgctttgaagtttggttaggatttcatcctacagagataagtcaaggagggtatttcacaataaacgaagctttatgagtggcataaaataagagacaaaaagaaacagaggatgctcagagaaagacatgctttccttggatgtcaaagactcaataatgggaacatgattggaaaagtcaattggagttattggtcagactttgct

SEQ ID NO: 367546 - DNA, 600 bp, Homo sapiens
agcattctaataaagatgggaaagcaaagtgcagtgtccaagaattcagtaaaacacactgcaaccytaagtttccatagaggtatcaggaaacattagacttcagagtccaggaaaacagccctgaggaaaagagtcaatgagaactctactggtaaatgggctaaggaggaagctccacttggctttcatttggctaacagtaaataccagcaagaaattggagggcaaaagagagacagaccatagctacttattctgtatccctctctatctctggactgcctcctttttttccttttcttgtttttcctcatttctttatttttttagtagtgcagaacagctagtgacttccaattccacagctccattgagtgtcccttctcttctgcatcagctcctgccccagtaactctgttttactttctgcacctttactttttcagacctaggcttcccactgtcattagcttcttggcattgcatcaaccctggctttgtcccttaccttgactatacccctgtaattccttcattgacaacacttcattagcaccgttggaagcaaattctatttttgctgataaaggctaagaa

SEQ ID NO: 367547 - DNA, 600 bp, Homo sapiens
agcattctaataaagatgggaaagcaaagtgcagtgtccaagaattcagtaaaacacactgcaaccctaagtttccatagaggtatcaggaaacattagacttcagagtccaggaaaacagccctgaggaaaagagtcaatgagaactctactggtaaatgggctaaggaggaagctccacttggctttcatttggctaacagtaaataccagcaagaaattggagggcaaaagagagacagaccatagctacttattctgtatccctctctatctctggactgcctcctttttttccttttcttgtttttcctcatttctttatttttttagtagtgcagaacagctagtgacttccaattccacagctccattgagtgkcccttctcttctgcatcagctcctgccccagtaactctgttttactttctgcacctttactttttcagacctaggcttcccactgtcattagcttcttggcattgcatcaaccctggctttgtcccttaccttgactatacccctgtaattccttcattgacaacacttcattagcaccgttggaagcaaattctatttttgctgataaaggctaagaa

SEQ ID NO: 367548 - DNA, 406 bp, Homo sapiens
acttccaattccacagctccattgagtgtcccttctcttctgcatcagctcctgccccagtaactctgttttactttctgcacctttactttttcagacctaggcttcccactgtcattagcttcttggcattgcatcaaccctggctttgtcccttaccttgactatacccctgtaattccttcattgacaacacttcattagcaccgttggaagcaaattctatttttgctgataaaggctaagaaaaacttgagcgaaayctaaaatataagtaatattgaggtgtatgaaaatctacttccgtttaatcatacctcagtttttgttcacaacttatcttattactctccgaagaaaagcactgactcaattttgggtaactcactgactcattgttaattct

SEQ ID NO: 367549 - DNA, 615 bp, Homo sapiens
cccagcacccccaaaccttaagttgcagaagaaarcacaggagtaaattctcataaccttttgttaggtaatggtttcttagaagggacaccaacagcacaagtgacaaaagaaaaaaatgcaaatttgaccacatcaaaattaatgtgctacaaatgataatatcaagggagtaaaaagacaatccatagaataggagaaaatatttgcaaattatataatcaataatcagacatacttgtgtccagaatatataaataactcaatagtttaaaaatataataatttaaatggggatttagatagatgtttctcaaaaaaaatataaacagatggccattagcacatgaaaagatactcaccatcatcattcaagagcaatgcatattaaaaccacaattgtataccagtaacactcactagggtagctaaaataacaaaggcaaacagtaaaaagcattggcaagcatgtggagatatcagaatgctcattcaatgatgaagggattgaaaagcggtacgcgttctttgggaaaatttggcgattcttcaaaaggttaaacatagttaccatatgacctagcgatttctctcctagttatatacaaaaacttg

SEQ ID NO: 367550 - DNA, 554 bp, Homo sapiens
tgggggtggaggcggggcctggccagcggtgtggggtggcagagaggctttccctgtatgcctttttttggtttttgatttagcaagctatataaatgaatttcccattcaaaattaaataaatgaaatatataaagagagacatagaatatcatgaaacaatgttmtccatgtccttggaagaaataagtagagatagattttagtttgtggctttgcgtgattaaacataatttcagttacaaagaggagcaccacactgtgagacagagactccgcatcttaataaatgtgcatgaggctctgctgtcaaggtacattattttgatattattttcatttctctttgctttgtttttattttgcttgtcttgtttattgggacaggtaagtttatcactaaatcctttcctttcataaagatattaaagatatttagaccccttgctaaatgtgggatttttgtttgcagaataacgttatctttcagaagacatgctacaaagtcaggtgttatatgatgtctgtggctcctgggagtcaaattggctcac

SEQ ID NO: 367551 - DNA, 275 bp, Homo sapiens
acgctgaagacggagattccaggtggaatgatgcggccccaggtgtgcccgcaggtggcagtccacacagctgcagagrctgggaactgaagggaatctcagtaatgtcctgaattaaaataggggccgggagagcagcaaatgggaagtggagaggttgcagtgcttcatgagggagatgggccacaccccagagagcccctccctcccatcaaaatccagggctgacttctccagccccaccagcctggattctaggatctgaagaccagagc

SEQ ID NO: 367552 - DNA, 590 bp, Homo sapiens
acctgctatgcagtcagcccttgagaaatgtcagctgccatttatcacatggtattttgtgtttcctgtttcgtattctaggctgctttatgtagaggaccttgtcttattttgccctgtatttcatcagtgccttgcacaataaattctgattgattcttttccccgagggacagggatgggggtgaaataaaagcagaaatgcttgagaactggtgtctgtgacgttctgggcatggccgagcctgtctgcagtcagggctctgacagacaccccctcagctcctttcaggcttccctttagggtagggcttcagagacagcagtgcacgagctgacccagaggcaagcgtgctttggggtgggggcccaccatgcrcactcagtggatgttgtgattgcaatgaggagtgacactgagtccttgtccttgggcatccagtctgacgaggacaatgtttgtgtcagcagtcacaaaataacacacccaagctgtgaaatcagagaggaaggaacgcttagatcagaaaacaatgcttagagggccacacagccgacggcataactccaaagcacactaacttaacctt

SEQ ID NO: 367553 - DNA, 558 bp, Homo sapiens
catttttaatttagggaaacttatatgcccttttttaagaagccattctaataaaataatctgactaattggcccaaaatacaataagtatcactttctaacagagaccaaagggaagctgagaggctttccttttatgtactaccgttggatcgctgcagccgcctctcataacacccaacagaacccggtgaggctctgtgggcttcccgcggccctcagggaggctgcagagtcccctagtccatgtcagggagccgccatcccacatacctccaaagcctgtcctcgcctgcagtttttgcagagctcgcggttggaggtggaaatttagaagccctgtgttgcaggagaggcagtagcacccccaggcagctcttagcagggacagaccaccccccgcctcgctggtattttagggtcttttggtattttgccactgtgtggggctaggcgggtggctggaggacacggtgtaggccttgccgctgtctgggttcctcgccactgcaggagcaggrctgtttctggaaacactgggctgctggtgacccgtca

SEQ ID NO: 367554 - DNA, 553 bp, Homo sapiens
atctcacaactcaaaatgactgtgtttgtatcacaatcacaatctgtcccgcccagaatagcaggggctttgtcttgttcaccatccctgtgaatatttgctgaatccaccccttttactatgtgaatagtgaacaattactgagcccttgctgggggctaggcagtgaaatgcacattagatgcattaactcatcccctggtagacatccctactgccattttacagatgaaaatgaggaacaaagaagctaaggactggggccacttgggactcacgcccaggcagccagctgcagcgtctgcaatttcaaccctcccctaagtgygctgcctcctggagttgtagaaggctacagactcatcccccagagtggccagggctcctggagggcaggcatcacatcttaggtttctccaggctcaggccctccaacaggaggtcctgaataaaagctcaggaataactgcagttcaaggaagccttggctagaaaaccctacaataaaaggcaggcaagactggccatgagtagcgccatccctgcagtgctg

SEQ ID NO: 367555 - DNA, 545 bp, Homo sapiens
ctcccaccacggccaaaccctgacaaggccagcaccactggggcagtcctgagcagcagaaccgctcaagagagcactgccccatctcgggggcagaccccgctcggctcctctgttctcgactgagagcctgacactgacaactgggtaggccctaggagaagccaggcttggccgagagctcaggcccagagatctggacatggctagtctcacrgtggaattgcctggccccagtgtttagtctgtattaggttgaaccacatgaaaggctggttaattcaacccttttttacctaggaaaatggcaacttcatatggttcaacctaatggagggagggattcttacatttattaaggacctactggacattcagtcattcatctaacacctgtagagcaatggctgtgtcagggccagtgtgtaacactgcttcagcaccccaagactgagagccaggatttttcatcttccctcctaaggataagaaacaaacttaccaggcagaacaagggtaaccaactcgatctgcctgagctcagg

SEQ ID NO: 367556 - DNA, 636 bp, Homo sapiens
caactgtggcagcactagcagagtccccaaactaccctgacaccctccctggcaaggaaaatttccacgcgcctctccctggcatatttattccagaggaaaacttagcaacctacacactacacacaggctctgtgtcaaactctacaacagccatcagttgatctttcccttacacatccctccaggaagtgaaatatccgaaatgagtcatactcaggagtcggagctatacttccactgtagtttttttggataaccaattcactgtttacactccaaaacctctaattgctgaacacagaacagttcctttgcagagatcaaagcttacctggtgaacctggcgaaatgacaaaaattctccaaaaggagttagccatccagagtgccagaggagggtggctgtacaagcacattttaattggcaaagcagagtcgctgcccagcaaggaagagtatgcaggggtttattctgctgctcttctatttcccctttaaggcatatatctcttacccctgcacccaccaactytagtcactcctagcacacagctggcggccgcccacccgcacccgcacctgcacccgcacctcagagagcttgctgatccctgagccgtgcactgaagcttc

SEQ ID NO: 367557 - DNA, 579 bp, Homo sapiens
ggggatattgagtgcatacaaataaacatacagcttttaaatctttttaaaaattttaaatgattcccctgcccaacctccccgcccctcaacccagccstggatctctctctctctctcatgctccccttaaactagagctaatgttcaaactcaatacaaagctacgtattctcttggccaagcaagaatagaagaccctaaatgattcaagtcaaactcgttaaaaggtataaactagtatttctcaactagggatgattttgcacacgtgcacacacatacacacacacctccaacaaccctgccaggagacatctggcaatgtatggagacatttttgtcacaactgggagagaagaaactactgacatctaatgggtaggggccagggatgcttctaaacatcccaaaacgcgatacacagcctccccacaacaaagaatcacccggcccaaacgttaatagagttaaggctgagaagccctgggcgaaaaataattggtttgggggctgcagattcccagaatctgattgacaataaagtccccctcaggaagactgcacatgcaggcaaac

SEQ ID NO: 367558 - DNA, 497 bp, Homo sapiens
tgatcggcctcagggctgtatcaccatctatatgctgggacatctgcagccacatccccagcctaaacctctctcctggaactccacatggtacatccacagcctacctggtatctccactttgatctaatgggcctctcaagcttaaagtgtccctatgcctgctcctccccgagtcctcctcacctcaatcaacagtggctcaggtccgaagccttgtaatcacccttcacaccccacctcctcttcttccatccccacctacctgcagaggccgctggctctacttttaaaagtgacctcaaatctcaccacttctcaccatttcaactctagtctgtggtctgaaggagggcaaaatatawtctctacctaatttccatttaaagccaggaaagggacatgattataaaactgttgtctagtctcttataagtcagtattaaactttttaagtatatgacaatgtctgtgccattcaacatttcacgtgtgtt

SEQ ID NO: 367559 - DNA, 634 bp, Homo sapiens
aacccatgtctatcttacttcaaagcttgttctttttccatcctgctacagtgcttctcaactatttttacaatacagtgttactccagcttttatccaaagcccctaaggtcagaggaaggtgtgtgccttgggaatactagtactcaaactttgtaatgggttagggacaaaagtaagagagatgaaaagctggttgcctgagaataaaccaggatatgtagagcaaagaattattactttatcccaaatgccatatgcggtttcatttgacacttaatacttaactgtttctaattgctccctggtagacctgggtttttacctaagctgctggcccttgctcctcccctgcatactagtgaagtatactggtgaagatatgatcatgacagccctgggtagtctcccttatcatctgggtcctgatttcaagagcacgtagatgggcctttacctttggtgccaggaggctgcaggttgtctccagtcaaggaacaccagcccacagggaagatgtctcgggagtygaagcggcaccagtagtcaaaggcccctcgccacccatcaaaagtgacaagcacctctgagccccgaacctccccaatagtggctgggcaaatgaaatgagggt

SEQ ID NO: 367560 - DNA, 526 bp, Homo sapiens
attatttaaactacaccagtagtagttcttagtcacagatgttaatccaaattacctagggagccttggaaaatacatattctcaggccacacttggagcctactgaatragaacttctgaaggtgaggcccagaactttgtttaaagaaatgagactataagtatcacttgagagtcaatgatttataccagaggtctggcaaactactattgggaggtcaaatccagccctctgcctgtttgtgtaaataaagtttgagtggaacagccatgctaatttaggcacacatactgtctgtggctgctttcacactggagtggtggagctgagtagctatgacatagactgtatggcctagaaagcataaaatttttattatattgtccttaacagaagacttgctaactctggatctataccttggtgcctgtcctatttcttttgtggttactttagtgcttggagatatggcagaatattatgtctggcttcatcatgggcattacaataggtgtccaaacatt

SEQ ID NO: 367561 - DNA, 592 bp, Homo sapiens
tcatagtcctggcaaggatctaatgtaggggtcagacaattatggcccttaggtcaaattcagcctaccacttttttttttaataaaattttatgggagtacaaccattaccattcattagcctgttttttatgactgctttcactcaacactctacagaattgaatagttacaacagacaccatatggcctgcaaagstaaaaatattaattatctagccctttccaaaaaatatttaatgattcccatcctataatttaatgtaggcctgactttaatcacgaccctagtaggaaagaagagcaattctgagaactgtgctgaggacatttggggagatacatataaaatttttgaatttgtagattgcctgttccctctggtatctaataagctagcagattccctaattagagataaggcatcctatttcttggagactcaacaaagaccttgctttgggcagatgcttcaaaatgtaatcctcgaacttcttaaataactaggttcagatctcagcatgacctaggaagggctcagagtgttcttgatataaacaaaaatggaatatttaccaaaagatattcagga

SEQ ID NO: 367562 - DNA, 582 bp, Homo sapiens
ctttactgttacctctgttttctcaagcaggagtcttgccctgtagccacagctgggaatgtgctgagtttcacctgaagtcattaaatatcagagccacacccaagtccctcagtgtcgtatccgtgttatcactgctggttattcaagggccaatggcccttcagttagtaagttgttgtagatatctccttttggatagaattaaagatttcttaaagttctgcaaggactaatgctgaaactcacagctcaattgcttactggaaagaagctgcagacccaagtttatgctctattttcagggcaactgacaccaatrcttggtcaatgaagttagattataaaacttaattttttactttttccagccctgatttcctgagtagaaaatgaagctttagcctgatgaccagctcaggcacaggtacattagttttgggcaaagatattgagcagaaacctttctgacattacaattccactaatccccttgccaaattactttcccattctcttcttcttaaaaagtgacatccaaaggatttgcccattattttactggttatgtgcagacaggtc

SEQ ID NO: 367563 - DNA, 506 bp, Homo sapiens
gcagttttgtgtagtaaacagaacccgtatgttatagactcttgggattgaagcaataggcctagcttatctgtaaaaggcatgattatacattactaagctactcaaacgattgatttagtagaattacagagaatagaattactcatctaatatgtttgctttaaagatggcaaataaattggtttatgggaaaatgtttcattactcaaactgctgttttttmacgttatctaggaagattggtaacatacaaccagtgaaaaagaagagttgctaaaataactaatgaagtaaattttataaatgtgaataacttagtcaaagaaggttcctgccatcatcatcctgggattcaactgtttgtcaaagatctcaagagtacctccttcatgtatatgaaataaatttaaccgtgttatgaagttgcaaataatttacatactgacaaatatgatttttgaaatcacaaattctattatttaattaaaataatttatcaatac

SEQ ID NO: 367564 - DNA, 518 bp, Homo sapiens
tagagctcctctcagtggctttatttagaatttcacatggcatatacgtagaatactcttaaatttatggtcccacaaaagtttacagaaataaagtaggaaaaaggctcacttcaatactctgagagatattgagggacaactatttaggtttcttttgtatatctataaaatgttaaaacaaggctacttasaataatataaagtactccagatttttcagattacccaatcatgatcacggtcttttcacatcagagatataaaaacaaatatccttcaaactctgcttccactaatagcctcttgatgacttctagcaaatctcaccaaccttgccctaccccctaccattaatctaagaggagaactctttgaaactagagtttcattctcctaatcaaatatcactacagtgcttataggacttaatatactaattacagccctttacgtcctgcatatgctaatcacaacacaacaagggacacttacatattattttaacagtatgaaac

SEQ ID NO: 367565 - DNA, 559 bp, Homo sapiens
gagctcctataaagctcatcctgcagctacctcatctcagggaagaggaccaaggctagtggaaggagaggacttcccagggtctcccaactcgtcttcccattctctgactggttcaagctatgtgaccttgggggacttatttaatcttgctaagcctccatttcctcatctgtaaagtggagataacaatccagtacctgaggaggattgtcccgagaatcgatggagataatgcatgtagtgtacttagtacagaacctggcacattaagtgatcgataacagttagctgtggtggccatgatgataatgtacaactatctgggtgattcaactcctccaacattttctgcgtgcctggagaggctaggaaggtcttctatcccagccctggggsgagcaagccaggcagcagccccaaccttattctgcatagacacagccaagcccaggtgggaacacccagctcctctcctctggactctcaggaaggccctcccgaggtcactgggccttcctctccctctctgggaatcccattctttatcatggtcctc

SEQ ID NO: 367566 - DNA, 513 bp, Homo sapiens
gattctgacggtggcagacggaagctggcaagacaaagggccagggcagggcaccgacagactctgctacaagggtgggcctcgcacatggagggcatttgcatctcttggacggcctgataagcacagatttctgggccccacactcagagtgtcggcttcaggargactggggcggggcccggagtctgcatttttaccaagtgcctaagtggtatgctgctggttgtccagggtccacagtgaaaaccaccgtgctgcgcacacacacacacacacacacacacacacacacacacacacacacacacacaacctgccaaataaagtccaaatgtctccgcctagtgttcaagccactctgtcatctcctctaaatacagttgcaatgttatctcccgcaggccccctgcagatattgatggcttttttgtgctgtctctggaacctgctctcttctttctggcctctatatcttggcttgctctgttctctgctgaaatatcctttgtc

SEQ ID NO: 367567 - DNA, 579 bp, Homo sapiens
atctccttcagagcatcctccctcggaaaacctagactaagcctttcaatgagccggcagaaatcaagaaaaataattttattcaaataatttcagtttttggccctgtaactgaaatgaccctttcataaggaactgccaaagattggatactgactcaatgggggagataaataattagaatagcagaccccttaatatttcaaaaaattgtcctaaaaaaataattttgcaaggattatagaattaagaacttcagtttattttatttttcaatatgaaacaacttgtttgtaattttatacmataaaaataaatgttttagttttaattaaccccatttattattttgattcctataaaagaaaggaatctttttttttttttttttttttttttacaaaataaggatttaaatatattttgagtaaagactcaaactggagaaagagtttaaaaataaaatattgtatcaggacaaataaaaataagagattttgattctcctttttgaaattaaagaagagacttattccccctccttttttcttaggacatttactttagaaaagttgtaat

SEQ ID NO: 367568 - DNA, 563 bp, Homo sapiens
tacctctcatggtcagtacaaagtgattgttcgtggttctcagctatttttaattgtgtttagggcaatactgtaaactttgaataacaccatgggctcataggaagtgccaccagtgatgctagaagtgctcccgagaagcaaagaaaagtcgtgacattacaagaaaaaggtgaattgcttgatatgtactgcagattgagtctgcggctgtggctgctcaccatctcagacagatgatttatcttggaaacagatggtgtaaactttccatatcgataaatacagcacaatgctgtaaatatatttctattccttatgatttagtaataaagatttygggaatcaaaaattatatggggggtttttgactggacagggatcagtgaccctaacctctacattgttcaagtgccaactgtataataattttataatcctaaatgttaactctagtgcacaacctttatcgaatatgaccctctgcttaatattgtattagtggctcaaacaacaacaacaacaaaattccctaagaccgtgagttcagtaggataaacgtc

SEQ ID NO: 367569 - DNA, 563 bp, Homo sapiens
gcagcaataggaatctggattgactgtaaatttataactaataattgagttttaagtgctgtcccaggaatcctactgtattatcctactcaaaytactttaacactcaccagaggcaatttgttggattctctcttctcaaaattccacagattctctctcatcttcatattcatcccataaactcattttctataacactgtgaaaagagaagcattcagaagagaactggcaaaagctccctcttacagcactgacctttctgaaatccagctaattggctccaccctccttcctttaactgagaaggagctgtccttcttcccatctgagaccaaactactcttttgggcaataggtctcattctctttcacttaggaaagtaattcctaacaatggaactctctcctagcattgatacttttatccctttatgttacataattttgatcaacacaaaaactgacagtaatatacttcatctttcaaacaccttttcttgaactcatatccccctcaagctgccattttgtttctctgctcttgaaactgagcttcaaa

SEQ ID NO: 367570 - DNA, 591 bp, Homo sapiens
aataaaacagaagacatcctgaaaacaataaaatattcattagtttgtggaagatggtagagaattgttccaagaagaccattattgccagctattacaacatattggatattgatttcagaatgcatttgtataggtatctgggaatgtacctgtccagtcaaaggtctaatgctgagcagcatcctgggactgtcacactggagatgagagaatgtctttccagctgatctgcatcaactagtaacatggttttctcccaatttcctatgggctttcctgctagccagcctgagtttgagcaagttgagacagtagtattcatactactctgctgaaatgtcggtggacatactctagatccgttatggataaagcaatgctarctgctactgaggtccaagaccagaagggaaaaggaagcaaagaagaagaaaagacgtggagaggaagaagggtaaaagaagagagaaatcataagaaaaaacttgagtcagaaaaactatgtccattgagtaaaaaagacatgcttatgaggcacaaagtagttttaaaatatactgcttattaagaagctcaaaaagagaagaa

SEQ ID NO: 367571 - DNA, 567 bp, Homo sapiens
aaagaggtatttccatgaagtagtattraggaagcaaagtgatataaaaagaagttttctaaagactattttgtctgaaaaataaaaatgctacaactattagtgagttggtgttaaatatacacagaactgactgtttctgattatataacctggataaaagcattaaaatatacaaaaaaccaaaataaagggacacacatttgacttaactgaatatgctgccttgttttctgtgtatgcagtggtttaactttaaattcaacgactgaaagaagctaaaaccatgaaaagaaaaatattattcagccccccctcccctcaggttatatatgtggcatcattatactattgaattgatataaaataatttatgtgaacccatgcaaagaattatatctctatagcataaaagtccttttaatataaaattaatttaataacatttaaaaagtgccttgctgagtacttggtttacaataagtacttaataaattgcaatattgtatcagttttgtttataataaattactataatattactctaacagaagacaaagaaaaata

SEQ ID NO: 367572 - DNA, 567 bp, Homo sapiens
aaagaggtatttccatgaagtagtattaaggaagcaaagtgatataaaaagaagttttctaaagactattttgtctgaaaaataaaaatgctacaactattagtgagttggtgttaaatatacacagaactgactgtttctgattatataacytggataaaagcattaaaatatacaaaaaaccaaaataaagggacacacatttgacttaactgaatatgctgccttgttttctgtgtatgcagtggtttaactttaaattcaacgactgaaagaagctaaaaccatgaaaagaaaaatattattcagccccccctcccctcaggttatatatgtggcatcattatactattgaattgatataaaataatttatgtgaacccatgcaaagaattatatctctatagcataaaagtccttttaatataaaattaatttaataacatttaaaaagtgccttgctgagtacttggtttacaataagtacttaataaattgcaatattgtatcagttttgtttataataaattactataatattactctaacagaagacaaagaaaaata

SEQ ID NO: 367573 - DNA, 567 bp, Homo sapiens
aaagaggtatttccatgaagtagtattaaggaagcaaagtgatataaaaagaagttttctaaagactattttgtctgaaaaataaaaatgctacaactattagtgagttggtgttaaatatacacagaactgactgtttctgattatataacctggataaaagcattaaaatatacaaaaaaccaaaataaagggacacacatttgacttaactgaatatgctgccttgttttctgtgtatgcagtggttwaactttaaattcaacgactgaaagaagctaaaaccatgaaaagaaaaatattattcagccccccctcccctcaggttatatatgtggcatcattatactattgaattgatataaaataatttatgtgaacccatgcaaagaattatatctctatagcataaaagtccttttaatataaaattaatttaataacatttaaaaagtgccttgctgagtacttggtttacaataagtacttaataaattgcaatattgtatcagttttgtttataataaattactataatattactctaacagaagacaaagaaaaata

SEQ ID NO: 367574 - DNA, 589 bp, Homo sapiens
tgtgcttgcacaggtattttattcatccaaaaagtattaatatatatgctttgccccaagtttcctttttctatggtatcaaagctaagacaggagtggaagagagaaggayagtgttgaatagaatggaatcaaagctatataaaatgggtttagacaaaaattatttattttgataaagcatatctaacagaaaaaccataattggtttttgtttgtttgcttgtttgttttcttttttctttcttttttttgtgggggacagagtttccctcttgtttcccaggctggagtgaaatggtatggtctcggctcactgcaacctccgcctcctgggttccagtgattctcctgcctcagcctcctgagtagctgggattacaggcacccgccatcatgcccagctaatttttgtatttttagtagagacggggtttcaccatgttggtcaggccggtctcaaactcctgacctcaggtgatcctcccaccttggcctgccaaagtgctaggattactgacatgagccaccatgcccggccataattgttaatcattagaataatttctgaaacacagaaaaaggaaag

SEQ ID NO: 367575 - DNA, 589 bp, Homo sapiens
tgtgcttgcacaggtattttattcatccaaaaagtattaatatatatgctttgccccaagtttcctttttctatggtatcaaagctaagacaggagtggaagagagaaggatagtgttgaatagaatggaatcaaagctatataaaatgggtttagacaaaaattatttattttgataaagcatatctaacagaaaaaccataattggtttttgtttgtttgcttgtttgttttcttttttctttcttttttttgtgggggacagagtttccctcttgtttcccaggctggagtgaaatggtatggtctcggctcactgcaacctccgcctccygggttccagtgattctcctgcctcagcctcctgagtagctgggattacaggcacccgccatcatgcccagctaatttttgtatttttagtagagacggggtttcaccatgttggtcaggccggtctcaaactcctgacctcaggtgatcctcccaccttggcctgccaaagtgctaggattactgacatgagccaccatgcccggccataattgttaatcattagaataatttctgaaacacagaaaaaggaaag

SEQ ID NO: 367576 - DNA, 572 bp, Homo sapiens
aaacaaacatgccaagcaaggtagctcatgcctgtaattcccaactttaggaggctgaggtgggtggatcgcttgagmccaggagttcgagaccagactaggctaaatggcaaaaccccattgctacaaataatacaacaattagccaggtgcggtgactgggaagtctgaggtgagaggatcacttgagccagggaagtggaggctgcagtgagccatgctcacaatactgcacagcagcctggatgacacagtgagaccaagtttcaaaacataaacataggtagttaaataaataaataaacatgttatttaagcatctaatttaaaaggcaaaaatagtaaaaacaataaatttaaagaaatttaggaaagacaaatagaaaaaatactccttttcgaaatgattagctattgtgtcatctccatcctttttcttctaaaatgagaataaacaaaaatattttagaggtagatagtcacaatagtgaagagagctggaggggagccatcaagagatgttatctgagcacctctagaataaagaaagtggatggaaaagagctgatgac

SEQ ID NO: 367577 - DNA, 538 bp, Homo sapiens
aaaacaactagtagcagcatagctggctggttttagctcaggctctctcagtgactgccagggtgtggccacctaaagcaactgggcrgatgtatttctgagtttactcgcatggcttttggaaagcctcagatggtcaccctccaggctcatttgcatgggcctctccataggattgctcacactgtggtagctggcttctccagggcaagcaatccaatagaggtgactcagcatataagaagccacagtctttttataacttaattcaggaagaacactccatcacttctgctgtattcactagaagttggcggcggagcgggggtggggcgggaaagtccatcccacactaagaaggaggaattacacagggcccgatatcaagtcttagggcccaatttagaggctgcctactggagtaataaaatgttgaatagtatgcttttctttttttttttgtaagaaagacaaaaataggtacccatatatgtctttccttatattgtcaaaaaaaaaaaaaaaaagcagtgaaagg

SEQ ID NO: 367578 - DNA, 538 bp, Homo sapiens
aaaacaactagtagcagcatagctggctggttttagctcaggctctctcagtgactgccagggtgtggccacctaaagcaactgggcggatgtatttctgagtttactcgcatggcttttggaaagcctcagatggtcaccctccaggctcatttgcatgggcctctccataggattgctcacactgtggtagctggcttctccagggcaagcaatccaatagagrtgactcagcatataagaagccacagtctttttataacttaattcaggaagaacactccatcacttctgctgtattcactagaagttggcggcggagcgggggtggggcgggaaagtccatcccacactaagaaggaggaattacacagggcccgatatcaagtcttagggcccaatttagaggctgcctactggagtaataaaatgttgaatagtatgcttttctttttttttttgtaagaaagacaaaaataggtacccatatatgtctttccttatattgtcaaaaaaaaaaaaaaaaagcagtgaaagg

SEQ ID NO: 367579 - DNA, 538 bp, Homo sapiens
aaaacaactagtagcagcatagctggctggttttagctcaggctctctcagtgactgccagggtgtggccacctaaagcaactgggcggatgtatttctgagtttactcgcatggcttttggaaagcctcagatggtcaccctccaggctcatttgcatgggcctctccataggattgctcacactgtggtagctggcttctccagggcaagcaatccaatagaggtgactcagcatataagaagccacagtctttttataacttaattcaggaagaacactccatcacttctgctgtattcactagaagttggcggcggagcgggggtggggcgggaaagtccatcccacactaagaaggaggaattacacagggcccgatatcaagtcttagggcccaatttagaggctgcctactggagtaataaaatgttgaatagtatgcttttctttttttttttgtaagaaagacaaaaataggtacccayatatgtctttccttatattgtcaaaaaaaaaaaaaaaaagcagtgaaagg

SEQ ID NO: 367580 - DNA, 487 bp, Homo sapiens
tgactgtaccattttacaatcctcccagcaacttatggggactccacttyccccttatcctcatcagtacttgttactgtctgtctttttcatgttagccatcctggggggtctgaagtagtattttattgtttgcttgatttgtgttaccacaataattaatgatgttcaacatctttaaatgtgcttatcatccatttgcatatcctctttgaagaaacatttatttaaatcatttgctcctactatttgtccatttgttattgagtttatgagttcataaaaatgcaaagatagtgaatcttaagtgttctcagcacaaaaatgataaatatgtgaggtaatacatttgttaattagctagatttaactactccaccctatataggtactttaaagcatcatgttgtacgtgataactacatacaattttatctgcaaaacataaataagtacattaattaattagttaattaattttaaaaat

SEQ ID NO: 367581 - DNA, 557 bp, Homo sapiens
tattctatatatctatatgtttatccttttgccagtatcatgctgtcctgattgctgtagcttgtagtaagttgtttgtttgtttgtttgtttgtttgtgacaggttcttactctgtcaccaagggtgcagggcagtggcatgatcatgactaatttcagccttgacctcctgggttcaggtgatcctcccacctcagmctctcgagtagctgtgactacaggtacatgccaccacaccaagctaattcttatagtttttgtagagatgaggtttcatcacgttgctcagtctggtctcaaactcctgagctcaagcaatctacccacctcagcctctcaaagtgctaggcgccatgcctgtcctgtagtatgttttgcaatttgaagtgtgagacctccaaatttgttcctcttttctaagatcatgttggctattttacattcttgcgctgccataataattttagtatcagtttatcaatttctaccaaagaaaaaagccacccaggattttgataggaacttagagtctgtagatcaatttgtggagtattgc

SEQ ID NO: 367582 - DNA, 338 bp, Homo sapiens
cttttattatcagcttttggcaaattactttttaggctgagccttctcaaatttcatctaaagtaaagtttgtgtttgctggactggtgtgagatttctcttatttgaattgcagagttttctcagttgtcagaaagacaggtgttctctttttaggatgcaagcctagtaattcttttatgtaygctcacatatttgtgatatagttttcatgctagggaaagttaatacctggttttctgatttgtttggccatgggtcctcagaaagtactttgaaagtatagttggatcataacattacctattttttttctagtttttcttaacctgctgttt

SEQ ID NO: 367583 - DNA, 534 bp, Homo sapiens
tagatcatctcggtattgtacagcataatccacccaaatacctttttttcttccactttctctaacttcgaattctattgattcagagatcttggttgccaaagaagaaatgttttcacccacgtaacaatgattttatcgaattgaaagtaagactttctgctggctattttagtttcctcatgtcaaacaaacraacaagcaaagaaaggagttagtctactagatggggtgattaataccaattactaagtagaaattaatggggagaggaaagagtaggtctgttatgaaactgaatccaaaactaccacaacaaatagctgaaggcagaaacctttcaggaatgaagatttgggtcactctaccggtaatgtcttggcgtaaagcaaagaaaatgtggaagcgtagtgggaataaacaagttaaaaatacccattacagtctcatcgtaagttacagaaatgaatgctacagcagcaatgcttattctccctacatcatcatgtatgtgtgggtcaaccatttccttct

SEQ ID NO: 367584 - DNA, 540 bp, Homo sapiens
ctgtattttagatggaaataatttttatttccatcaacagtgtgcaaacattctctttcctttgcatcctcgccagcatttattattttctgtcttcttaatagtagccattctaattggggtgagataatatctcattgtggtttctatttgcatttcccaaatgattagtgatgttgaacatttttttcatatacctttgactatttggcttcttttaagaaatgtctatgtagaacttttgcccatttttaatcagattgtttgtttatattgctattgagttgtttgggttatttatgtatcccgtttattaaccccttgtcagttgaacagcttcacatataatttttcctatcgtgtaggytttctcttcacttggctgattgtttcctttgctctgcagaagcttttaaacttgatgtgatcccatttgcccatttttgctttggttgtctgcttttgaggccttactcaagaaatctttgctcaaaccagtgtcctggagcatttccctaatgttttcttcagtagtttcac

SEQ ID NO: 367585 - DNA, 596 bp, Homo sapiens
atacaggaagcccatgaagttaaggaagctragataacacaagcaggctcagatctgttacactgatttctagcgccttctcagaacacctgtttcaaccactgcacacaatttcatgacagtgtattccacccttaccccagaggaggttggcgtatctctgaggatgccgattggtgtgccatcctagactaggacatgataccctttttctatataatctacagtaattctaaggctcctattttatatagtttttccccaatttaattggaaccattggctgtatctatttcaattcacagtccctgatgagtgcctcaaccaatctcaaaggtaatgtcactaacgattcctcagatctcttgatcactttccctgttatgtgtgcagtctaccatctttgaaaccctaagatgcatgcatcactttaaatgtactcaaagattaagacaggttctcaattgtacttattttaaaacctgaaaaacctttacaaaaacattctatatgcagcagtatgattctgaaatgtcttttcttccatctcattgatgttggttttgataatgtgattttatgacttagctggagct

SEQ ID NO: 367586 - DNA, 615 bp, Homo sapiens
ataattacagagagctgtgtccagttaccccttatctgaatctctgcacctgagttgtcagttgctgtagcttctctgagtcaaagtaacttagcaactctaggcaagagtgggaggtttcattcttatttacataatttcaaacatcaaagtttctgacagcaaacaagatttctcagtgagtagaaaaacagtattcattcataaaagatkatccttatgctgcccttggttttataatagcttatctttgggagaaagggtgactcctgttaactttgcatcgggcgctacctgtctcattccagcccaagaatggcagggctgatttttacagtcccaattaatttttaatttctcaccataaatacaagtgtacacaattttcaatgtgtatgatttacagataatgcataatttgtttaattactgcctactgttgaaatctccccaccccatggataaagtcttataagtagaattgttgggtcaaagttatatattttgtaactttttaatttgagatagtttaaggcttacataaaagttacaaagatagtacagagaattctacatacccttcatctggcattcccttatgttaatatcttacat

SEQ ID NO: 367587 - DNA, 376 bp, Homo sapiens
gatgcagctctcccatcacagccgcccaaccagccagtggcttycgtttgcaccgcgcgttggagcgctttcccctgggcgaaatccatacaaaccctgaggttcggggaggctgtggttcctgccgcggtaagagcggagggacgcaggactttccggctgcacgcagcagccttcctcccaacaggtgctcagggacttcagccaatgggtggccgatagccggttacttaggtcggggttggggctgggccggaaaatctcatggctggagagcctaggacagtgactgggatgtgtgtgtgtgtgtgtaccccctcgccccagaggcctgagtcaaaatgtgggttgtatgtgcagtttgaaaaacaacgtg

SEQ ID NO: 367588 - DNA, 581 bp, Homo sapiens
accacatcatttactttgcctccaattaatgtgaacacttccaagccaaggaaaggcaagacatttaacctcaacactactcaatatttccctagcttcttatcctatctaacacatttctatatattctttccattcatgtcaatcctaaggtgacagatgtttattatcccttcctttcacagatgagaaatccaggattcagagaagtgaaatttcctgcacaaggccactggctgacagagccagcagcctaatgaggtcttctggcaccrgcctctgctcatctgactacctactatgattactcttaggcttttgctctgaataaaagtctcactaccctacatttcaactaaggtctgaaaactacctgtacaactttggttgtaactgacaaccttttactcaacaatgtagagaaatagcatatataagaatcttactccaaatcaccttttaatcccaaacaataataagaggctgaagctgcctgtaaaactactttctatccttttgattttataagccacagacaacatcaaaattccagagtccatttgctgatatgtagaagcctt

SEQ ID NO: 367589 - DNA, 581 bp, Homo sapiens
accacatcatttactttgcctccaattaatgtgaacacttccaagccaaggaaaggcaagacatttaacctcaacactactcaatatttccctagcttcttatcctatctaacacatttctatatattctttccattcatgtcaatcctaaggtgacagatgtttattatcccttcctttcacagatgagaaatccaggattcagagaagtgaaatttcctgcacaaggccactggctgacagagccagcagcctaatgaggtcttctggcaccggcctctgctcatctgactacctactatgattactcttaggcttttgctctgaataaaagtctcactaccctacatttcaactaaggtctgaaaactacctgtacaactttggttgtaactgacaaccttttactcaacaatgtagagaaatagcatatataagaatcttactccaaatcaccttttaatcccaaacaataataagaggctgaagctgcctgtaaaacyactttctatccttttgattttataagccacagacaacatcaaaattccagagtccatttgctgatatgtagaagcctt

SEQ ID NO: 367590 - DNA, 668 bp, Homo sapiens
aatcaccttttaatcccaaacaataataagaggctgaagctgcctgtaaaactactttctatccttttgattttataagccacagacaacatcaaaattccagagtccatttgctgatatgtagaagccttcttgtgtgcaacaaaacaattaaaaaaaacaaaacaaaacaaaacaaaaaccacaaagatcatgcagaaaaagtgctctgcaaaattgaggcaatatttcaagctgatgcaatgaataaagacagccaatgtcagtcaacagccagtggaaaaataaccctcaacttcagattcatttgaagcctaccagaaagacagagtgaaatacaacacaaaactgtcacaaaagtctgttatttatagagaattgaattaaatatgacaattgaccaatagaattataatagttaactcttcctttcaggcatcacaagatggtgtttaccttacattacccagaaaatggactgcagatgatgatgaacttccctcagattaagaagcagmcaacaaacaaaacaatcaaacttccaaattacagtctggctgaagaatcagaattattttgagagtttggcagctaaaacaaatgaactcaaagccatagggttagcaggatatatttggaatgagggtctaattgcagccaaagagaga

SEQ ID NO: 367591 - DNA, 379 bp, Homo sapiens
agtatcttggctgtttccatgtttttctcaccatatctcacatttttcttcatttggtagtttttttgttttttttttttttcaaacctccctccttctcaggaggtgaatagaaggtggcccctctataaatgactattatcccttcggggtgaggaatgtggaagaaccatgtcaggaattccaagcagcccaacagcattaagctgaggcagagttgtttgcagagggaaagcgagagagcctggacacacgaataatggagctgatgtcctcaraaatcattgcagcttatgtttcccatttaggttaaaaaaaaaaaaactgatagagtcacaaacaggcactatgaacttctagcatttcgcttagatacaga

SEQ ID NO: 367592 - DNA, 561 bp, Homo sapiens
tgcacagtatctaataaatcttctttttgtcctagttttgctttcttatatatatggttttggattcatgacyttaatacctgtgtcatttttaggaaatagtttaatttttgtgtgtgtcatgtgatgacaaaatggaaaagaaaagttaaatttgggggataaaatttaggaacctgcagttataaagagtaaggacagtgatactaatattgagggtaggggagagccatctcagatcccaagacttagagataaatggtgaaactctgagaaatcattaaactagcttgccctgttgagaccctctgtagtactatgtaaggaagaacattttgtattttctcagttaaaaatgatctattttgtctattttctttgcaaaactggctcaggtgagaggacacttaaaaaaattttccccatgcaaaagcacaattattggttttgtataattttgtataatttttgcaggcatgagtcttgatgcatgacagcccgagcttttgtaacccattctggtctacagcaaacacagtctctgtcttattgttcaccttt

SEQ ID NO: 367593 - DNA, 561 bp, Homo sapiens
tgcacagtatctaataaatcttctttttgtcctagttttgctttcttatatatatggttttggattcatgaccktaatacctgtgtcatttttaggaaatagtttaatttttgtgtgtgtcatgtgatgacaaaatggaaaagaaaagttaaatttgggggataaaatttaggaacctgcagttataaagagtaaggacagtgatactaatattgagggtaggggagagccatctcagatcccaagacttagagataaatggtgaaactctgagaaatcattaaactagcttgccctgttgagaccctctgtagtactatgtaaggaagaacattttgtattttctcagttaaaaatgatctattttgtctattttctttgcaaaactggctcaggtgagaggacacttaaaaaaattttccccatgcaaaagcacaattattggttttgtataattttgtataatttttgcaggcatgagtcttgatgcatgacagcccgagcttttgtaacccattctggtctacagcaaacacagtctctgtcttattgttcaccttt

SEQ ID NO: 367594 - DNA, 519 bp, Homo sapiens
tgagggctatatttcttcattttcagagacagtggtgaagatttgtaaatagatggtgtggccaaataaagtattgctttagtacattctacctttatgaaaatgactccttagtttggcattgctaagtgagtgttcagatttgagattttgcctgttttatttgttctaaaattttgttcaaaaagaaactacttttttacatcgttaygtcatcccttatactcccttctgttttcttccttggtttaaaaaaactttatagaattattattatgatcattactatttacagagcacctgtaacatgccaggcatatactagatgcttttcttccagtatttcatttaattctcactacagttatctgaagtagatttgactagttccattttattaatgggaaaaatgaaggcttagaaaagttactaatttgcccatggagcttgtaaatggcaagactgagatctaaacccaggccagagtgaatccagagtccatgcccagagtccacgctc

SEQ ID NO: 367595 - DNA, 575 bp, Homo sapiens
ggccagaacccaccaaaaccaagatggtgatggaagtgacctctggtggtccttactgctcattatacgcgcaccgtaatgcattagcatgctgaaagacactcccaccagcgccatgaccatttacagatgctatggcaatgtcaggaagttaccctmtatggtctaaaaaggggaggaaccctcaggttcaggaattgcccacccctttccctgaaaactcctgaataatccaccccttttttagcatataattaagaaataactattagtattattagttgatcagcccacgccgctgctctgcctatggagtagacgttctttattcctttactttcttaataaacttgctttgactttactttatggatttgcctcaaattctttcttgtatgaaatccaagaaccctctcttggggtctggattgggacccctttctggtaactgtttctccacattctcatcagcatttgatatttgttcaaattgctattgtttattttatttattctaatgggcttgtctgcaatagtctcagatgaagcttgttgtttcatcaaaattattaata

SEQ ID NO: 367596 - DNA, 575 bp, Homo sapiens
ggccagaacccaccaaaaccaagatggtgatggaagtgacctctggtggtccttactgctcattatacgcgcaccgtaatgcattagcatgctgaaagacactcccaccagcgccatgaccatttacagatgctatggcaatgtcaggaagttaccctctatggtctaaaaaggggaggaaccctcaggttcaggaattgcccacccctttccctgaaaactcmtgaataatccaccccttttttagcatataattaagaaataactattagtattattagttgatcagcccacgccgctgctctgcctatggagtagacgttctttattcctttactttcttaataaacttgctttgactttactttatggatttgcctcaaattctttcttgtatgaaatccaagaaccctctcttggggtctggattgggacccctttctggtaactgtttctccacattctcatcagcatttgatatttgttcaaattgctattgtttattttatttattctaatgggcttgtctgcaatagtctcagatgaagcttgttgtttcatcaaaattattaata

SEQ ID NO: 367597 - DNA, 572 bp, Homo sapiens
ttacctatgcctatctgctttttccacgtccctatcttaaaggaaatgccacagacccccaaattttatgtaattgtctaagagaytaatttggtgctttaatttcagaaaagtatagaaatttcttgctggaagggatctcagggatgcttcagacaagctaacatgtatctagcccttactatgtgtcagacactgttctaagaattttatgtgcaatggtcaattctcaccgaaaccctgaaaggaagttttatcattttcatttcacagacaatgctattgggggaatacagaggctaagcaacatgccaaggttttgtggctggggattagaaagtcgtgattcaacctgggcaaagtggctccaaggactatgcttaaccactgccccagtcacttcctctccgtggtgtcctgcaagtgtaccaagagaacccagcaaggttaataaatttaaagtggtgagggaggacccaacccaagttcctatattgtaacagctatatctggcaagttaaatggactgtggaataataaaacccaaatatttctgtgtgtggaaaacctgg

SEQ ID NO: 367598 - DNA, 552 bp, Homo sapiens
gatttgaacccagaatggatccagaaaatcattagatcttgaaggaatttaaataaaaactaaactgagaaagttattagcttctgttatttaactaccttttttttctaaagcatcctggtacaccgaaataatagaaaattaaagtaaaataaatgcatcggtgaagaaactgactcttattttaatgctgatgctactacctaagaggcaatatttatctaggaaagtcattaatacaacaccsacaattccctgtagaattaccttttgtgaaatttgtaaacttttgtgttttttcttatggttttattggaaccaaagacactatacacatgcgctcatgcgtgcgcacacacacgtgcgcgcacacacacacacacacacagtatggggaagatactgaaggcacagattggtgaatctatctttatataaagagcatgttaatttacaacttaagtacgcagtcaattgcttggcttcctagcaaatttaatatctaccatgagtttcaaccctaaggctagccaacttcacccttcacaatta

SEQ ID NO: 367599 - DNA, 609 bp, Homo sapiens
tcattaatacaacaccgacaattccctgtagaattaccttttgtgaaatttgtaaacttttgtgttttttcttatggttttattggaaccaaagacactatacacatgcgctcatkcgtgcgcacacacacgtgcgcgcacacacacacacacacacagtatggggaagatactgaaggcacagattggtgaatctatctttatataaagagcatgttaatttacaacttaagtacgcagtcaattgcttggcttcctagcaaatttaatatctaccatgagtttcaaccctaaggctagccaacttcacccttcacaattaggtacttggaatttatttcctctgtggataaagaacaaagaaaaatacagccaaagggtgtttttgttgttgttattcagttgtatgtatttttaatgatctctgtggtaatataattatggttttcagccttctggttgaatcaattgaaaggaattactttttggttatacaagatgatgaaatgctgaggaaaatggcctaagttatagaaagagaaaaataccacaaaaaaaagagacttggcatgaatatgggtatcagcctgtgtaatttttttaatgtgg

SEQ ID NO: 367600 - DNA, 234 bp, Homo sapiens
cattttcaccatgagaacattctgaatgtgggtattatcagaatatacaacaactggaggattttgaaagggaaaagtgttctccagggcataactccttaagccatcttaattccttgatcagttttctatacggaagaarctgttcctaattttttcatttttattcttattgcactgaaattatcttaagataaattctttttccatagagaaagttacaaaccaataact

SEQ ID NO: 367601 - DNA, 524 bp, Homo sapiens
tggggagtgtgttatgcagaacccaaatgttttagtccgttcttatgctactaataaagacataccaaagactgggtaatttataaagaagaagaggtttaatggactcccagttctacatggctggggaggcctcacaatcatggcagaaaacaaagagtaaggggcatcttacatggtggtgggcaagagagaatttgtgcagggggacccctcttaataaaaccatcagatctcatgagacttattcactatcacaagaacaacatgggaaagaacccccacccccatgatccaattacctctcaccaggtccctcccacaacatgtgggaattataggagctatgattcaaggtgagatttgggyggggacacagcaaaaccacatccccaaaggaggaagatatttctgaaggagaggaatggccaagagtaagaagcacaaaattcatcctctactcattcagcagcagtcaatcacagctatgacttgggaattttgataagtactggggggaaaaa

SEQ ID NO: 367602 - DNA, 668 bp, Homo sapiens
aattttaatgacatcaaaaaagttgttcatctttaaatttctattttattactctgttttcccctaggttccttccaccctacccttcctcccctacatacatccaggcactccctcacctttttgcatttagttttgaaggaaaactctccttccacttgtttaaagctaatttgagaccaatgaataaaccccgkgccctcctgccattgtctggtatcttgatccataatttagcccttctttacttaatttttgactccccctttctttagtcactatcttcaaatctctctcactttcaagcacctgccttttatctcatgtccctccctattgacttccctctctctctctcattcccatcagaatcaaggatctaggacatgtcaccttcagatttcatctcttataacttcttcatcttcaacacattctgaggaggtttctgccgctgccaatacactcaagcagctcacagagacatcacaaaagcctcctatgctgcaagacccaaaggacatctctggtgctgtattttatgtcagcttcccatgacatctcttgaccacttcattcttcctgaaattccaccctgattccaagcacctctctctcctgattctctccctacaattctctcatcactccttcagtctaacagtggg

SEQ ID NO: 367603 - DNA, 668 bp, Homo sapiens
aattttaatgacatcaaaaaagttgttcatctttaaatttctattttattactctgttttcccctaggttccttccaccctacccttcctcccctacatacatccaggcactccctcacctttttgcatttagttttgaaggaaaactctccttccacttgtttaaagctaatttgagaccaatgaataaaccccgtgccctcctgccattgtctggtatcttgatccataatttagcccttctttactyaatttttgactccccctttctttagtcactatcttcaaatctctctcactttcaagcacctgccttttatctcatgtccctccctattgacttccctctctctctctcattcccatcagaatcaaggatctaggacatgtcaccttcagatttcatctcttataacttcttcatcttcaacacattctgaggaggtttctgccgctgccaatacactcaagcagctcacagagacatcacaaaagcctcctatgctgcaagacccaaaggacatctctggtgctgtattttatgtcagcttcccatgacatctcttgaccacttcattcttcctgaaattccaccctgattccaagcacctctctctcctgattctctccctacaattctctcatcactccttcagtctaacagtggg

SEQ ID NO: 367604 - DNA, 604 bp, Homo sapiens
acattggggtttacttttggtgtgtattgtacagcttttgacaaatctataatgacttgtatccaccattacagttcatgcagagtagtttcactgccctaaacattctctttgctttgcctcctcccccgcaacccctgacaatattgatctttttcctatctccacaattttgcctttttcataatatcatataattgaaaccatacagcaagtagcctttccagaatgtcttctttcacttagtaatatgtatttaagtttccttcatatagtcagtggcattttatctttgctttcctcttatctaagatagttctggtcatagaacaggtatcaaataattttagttggattaaatctataatttgttgtgattgtatagtgatttgcatgttttcttccttgaaaatatattgttctataattgtctgacttctatctcttattttaaaagaaaaaagagtaccaagcaaaaaaggactttaaatctacttaatagtctcttttaggtttttawgcacaattttaaaagatgagggatagtattttccaaatgtaatcctgagatttgcaaatatacatttgtgctttcctttgaatt

SEQ ID NO: 367605 - DNA, 606 bp, Homo sapiens
ccaggtgattctgttgcagatcatgtgaggatctgatttctgaaatgccgtacttcatatcagaatacttggaagctagcggctactagcaacaagaaacttctcagtgaaagtaatgagattgatcatctgttaaatttaatgctctattctaaatgaaaattgcaggagcaaacctaattgatttccatgcattaacagggggaaaataatcaaaatgtctctaatacctcaatctgtaggacagtttgtacttaaaaagacaatttttttttttcactagtgtggctacactctgggtgagaaaattttcaagagtctgaaactcaagaaaattgtatcttctagaggtaggttggaaattttgagaatgtgttcaaaatctggaaagctckgatgttatttttcccacaagattagaaatatgcttactttgtcagagaatcagcaattgcatttaagtctacacagggaccagaaaggtttgtatggctgagaccgattaactgaaatccaaataacaaaactctttttgttacctcctctgctgaccccactccctttctcagcacgagctcagacacatataagtgacttcattcttag

SEQ ID NO: 367606 - DNA, 569 bp, Homo sapiens
atatttttaagaatcaaagtggttttgatttttctgctttgtatattctctagttcatttattgccactctaatttatattattttctttctgattgctttagttttagtttgcttttcattttctagtttcttaaggtagaggattagtttattaagttgagatctktctttttttcttttttaatatgggcctttacagttataagtaagaagtaaaaaagaaaatgaactggttttctaggagatggaagccttatgccaatgaggcttggttcctgagctcattcagctttgcattctcatttgctagattcctattgggacaaagggagaccggggaaatgtcttttcctaaaggcaagttcttctgcactagaaaggaaaccaaagttatttacttatggccaaggagaagcatcattttcacatgttggactgcaccttatgattttcagattaactactaattgaatagcagtaaccattttaccagtcttagtaatttcccagcagaaatcaggcagttttcttctttcttaacagtctgcctcactcactaatgatgcc

SEQ ID NO: 367607 - DNA, 580 bp, Homo sapiens
ctggcatgtttggaaatatttctgkttttgtgaaattgtacatcatgctatgtttactatacttatatctctgtattctgtatgacaattggctaaaagttaaaaggctccgtgtagtaaagccaaaattccatatatatatatatatatatatatatatatatatatatatgccaaataaagcatatttactttgagttgtattttgtcatgtgtgacagcaatggattccagctagacacagagtatatttttccctagtcctgatgttctttaatcttaacacagcaacagattgcaagatttattttccccagtagaatcgactgcaagttagaaccactttgttttcttgaattccacgtacagcagcactctgtcttgggaaacgaagctagaattgagtggggttgtggggggtgggggaaagcacatcttggtgaactatacagtcctcggcaaaagtggtttccacccaggctgatacaaatcaagatgggagtatgatccttcacaactaattgataaaagatttctcggtgcaccctatgaatcattggctcccataaacgaaaacagg

SEQ ID NO: 367608 - DNA, 593 bp, Homo sapiens
ctcatgtatgtaactgaagaatcaaaggtagttgtgatatcttttagggataggtgggctgggaggtcagatgatgtttttcgttccatcttcagctctgttttccactttattggcttttcctcaggtatgtttcacattctctttcctagacatgttttccttatagttattgacaccagagaagagagaaaccctcctctctgatagtgccagcaaaagcccttggacggacactctttggctcggtatggatcaaagtccttgccaaaaccaattgcttgacttgagaacrctattctctgattggttgaatttagccatgtgtttagccttatgccaggagaggggagtagaatcaaatcataaatacctggccaagtggaggagcaacacttgttaacaaacaaaaacaaaatgatgctgggtaaacaaaagtgttcaccaaagaggagatttttcttctcaaagcttcagtgatggtggtgatttttgagatgggttgattatgggtgaaaaagctaagaagtttgatggttggctgaggatacagtgctttaaaaagatgttgactgagaaagcagatgaaatca

SEQ ID NO: 367609 - DNA, 541 bp, Homo sapiens
aagtctcaatgtttcttttataactaatttgcagagtcagtcgtggtactgagtaagactagcagttggaatatctgtgtcctggatcatggctcactgttgtgtgtccttaggcaaacctttatctttttaagtgaaatggggttaaaaatacatttcttaaagaattattaagctaatcaattgaaagaatgcacgggacgctgtacccagctatawaacgtgagcgttgtcgtcacattgctctcagggatgggaaattcaggccaaaggtggggatataatagaatcatcaattttctttctttcaaattgttacacacaggatggaatctttctgcctacaccctgggtggcttctgccctttagcatgctccaaataagagctgggcttttacaattcagaattcaggcaaacctcctcatcccatgggtggttctatgaagagaccctcttacattcacttctctttgtttctgtaattgtcagtttctaatttatttcctttgagagagagtttatctccccatcaactcatt

SEQ ID NO: 367610 - DNA, 591 bp, Homo sapiens
atactggcatttggtgcccaataatacacctggatatgcctagctctttgctttgactggggtagctagtgtccaagtaggcatgcagatgatgtagcttaggtttcagcaagcatggcttccagggcctctgcagctgacattgaccaaagaaggcatactttggtttcatctggtaagggagatttttttcagtttcattgaagtataattgacaaataaacatatttaaagtgtgcattgtaaaatgagcaacacaagctaattaacatatctatcaccttacagttaccatttttttttgtggtgagaacacttaacatctattctcttaacaaatttcaagtagacaatacagtattaatagcttcaattgtggtcactttgctacagtccctttgttcttgattcccagaacttatttatcktataattgaaagtttgtgccctttgatcaacatctccccatttctttcccccttcctacccccaattcctggcaaccctactctgatctcttctatgagtttgattttttagatttcacatataagtgagatcatggagtatttctctttctggtgtctggct

SEQ ID NO: 367611 - DNA, 585 bp, Homo sapiens
tctctcctctgtctctttctttctctctctggaacactctcttgttctcaacctctctctctcaccaaatattgctttgcataccctttgttcaatgtctgaaaccgctaacattcatcattgatgccgagagtcccttgttacaagagaacttcttcccaggaaagaaaaacagccctcgactgtgaagataatgggtgcatttgatatgtttaaagtggggctaaatttctgcaggaactattcaaggagaaggcaagtcaaactgacaacaaagaacacgtgtatccattcatgatggtgactggaatgtgaaccaagcagagagaatgagtatctggaaccaaaaagattcgcctatgaaaaaggccatttgaatgtgatactgtaatgtccatctcacacacagtctttggggacctcaggctcttcacacatgtgatgtatgagtggacagtgacaaaaaaaaaagttgttctgtttaatatttgattctcacacttggttcttcgtgtgtgtgcaygtgcatgtgtgtgtagaggctaaatcaagctcttggtccttgtagcagagataggagaatgt

SEQ ID NO: 367612 - DNA, 566 bp, Homo sapiens
tgatgacaatacctaaagtaaatgatgcaytgtgatgaactctagcaaaccaaaataaatgaagtttcatatatgttaaatatgtgacaactaggacaatgtttctgtggcagaccttctcacatggctccccagagtccctgcttcctggtattcacagcctcatgtggttgcctctccttgaatatgggctgaacctagggacttgcttctaatgaatgtgaatatgaaatatggcaaaagtgatgagatgtcacttctgagattagataagaaaggagtgttctttgtgccttgctagcattctctctcccttgccatctgttcgctggctttgataaagcaagatgtcatgttaaacagccccatgtgacaaggagctgagggggcctccaatcaacagccagtgaggaatgaaggctctcaggccagcagcccacagcgtcctgaattctgccagtaaccatgtgagtgagcttaaaagcagagtttcccagtcgagccgttagatgagaacacagtcctggccaatgccttgattgtgagatgccgggagacagagaacc

SEQ ID NO: 367613 - DNA, 384 bp, Homo sapiens
tgatgacaatacctaaagtaaatgatgcattgtgatgaactctagcaaaccaaaataaatgaagtttcatatatgttaaatatgtgacaactaggacaatgtttctgtggcagaccttctcacatggctccccagagtccctgcttcctggtattcacagcctcatgtggttgcctctccttgaatatgggctgaacctagggacttgcttctaatgaatgtgaatatgaaatatggcaaaagtgatgagatgtcacttctgagattagataagaaaggagtgttctttgtgccttgctarcattctctctcccttgccatctgttcgctggctttgataaagcaagatgtcatgttaaacagccccatgtgacaaggagctga

SEQ ID NO: 367614 - DNA, 557 bp, Homo sapiens
gagtggtaatttgcttttgcttctatgcatgaacatatatgccttttcaatgaagagacagctcggcatgtgactttgaggctcactatctgttaaccatgtcatttgtgttattttggcaggagatgtttcgactgtcttattaatctaaatagttctacagtggaaataaagacaacacacacacacacacacacacacacacacaaagcacacatacacacaaacaatgtctgcattgtttcttaagtgaaccatatcctttcatctttcaactctttagcaattgtacaatgaatctaatcaatatagacaggcaacacaaataagtcagacataactgattttttatgaattaataagtatgtaatgagactttactgcttgttagcatgagttctgcagataattgacttcattctccatttccctttygtgtctagaagcagctcaaaacagcagccaaaggaaaaaggtatggcaagtatggtttggttggcaaccatttattttggagaccattaaagaaataatttgggctgtggtattttccacac

SEQ ID NO: 367615 - DNA, 609 bp, Homo sapiens
gggactcaaaatgcttttatataagaagacttatgtaatgaatgagtcttcctgcatgggaagtttcaatattctaaagatgtcaattcccttccaactataaatattagrtactccaaataaaaattaggcaatttttgttgtggagatgagggtagagagtgggatcttgacgaatgatccgaaattcattgaaagaataatcatgagttaacaaaacattttttagaaaaccaagagtaacagatatttttcaaatgacaaaatgtgttataaaagtacatgattcttatacttttcaagtaaacacaaatgacctttgttgtggactgtaaatgtaagtatgctcaaaactgaagcagcataaaacccaggcctacattcactccaggtcccagaatgatgacagtaggaagtgcacaggttatagtggaacagaacaaaggctggtttaagagactcaccttctcctgtagcacctaacatcactattttccaaaaggaatgactgatagggccagtctctccccatcctaggtgaactgtcccttatggacatacttcatacttaaccattcaaatggtcttttggcctccttcatgctcacc

SEQ ID NO: 367616 - DNA, 609 bp, Homo sapiens
gggactcaaaatgcttttatataagaagacttatgtaatgaatgagtcttcctgcatgggaagtttcaatattctaaagatgtcaattcccttccaactataaatattaggtactccaaataaaaattaggmaatttttgttgtggagatgagggtagagagtgggatcttgacgaatgatccgaaattcattgaaagaataatcatgagttaacaaaacattttttagaaaaccaagagtaacagatatttttcaaatgacaaaatgtgttataaaagtacatgattcttatacttttcaagtaaacacaaatgacctttgttgtggactgtaaatgtaagtatgctcaaaactgaagcagcataaaacccaggcctacattcactccaggtcccagaatgatgacagtaggaagtgcacaggttatagtggaacagaacaaaggctggtttaagagactcaccttctcctgtagcacctaacatcactattttccaaaaggaatgactgatagggccagtctctccccatcctaggtgaactgtcccttatggacatacttcatacttaaccattcaaatggtcttttggcctccttcatgctcacc

SEQ ID NO: 367617 - DNA, 553 bp, Homo sapiens
ctggccccagttgtcaccaagaaatatctgggacattcaaaaaaatagccatgaacgaaaagtagtgtccaatgctagccaaagtctggcgaaaagggtattttcatgcatttttctgccagtgttgtaaatggacacgactcttgttttaaaaagcacaacccaccccatggctgcggaacccactctgtgcgaatttccctgaagggaatytgtccttccaaaccaggaaagcactccccacatgcaggtgtttgcagcaatgttatttacagcatccacaattaggggacagtgtcagcgttccagagtggggctacagttcagttcagtcaggccacctcccgttatgaaccatgttaaatcatcagatataattttgaagaccagtgtggaacagaacttagcaatacatagacagctggatctagggagggcctcgggtgccctgcttaggaattttgacctttgatgtccaaaatcctgctagatgggacactcccaaagggcagcgtggctgggcctgcagctcctggcacctagcatgctgatg

SEQ ID NO: 367618 - DNA, 462 bp, Homo sapiens
gtgagctctgaccttggacgtatccccccatggtaaggcaagaggacctacccagcgctgccttccggctcccaggtccagagcctgccaggtacccgctgggggctcagccccctggctttctccmccaagaaagaccccccaccaccaaatacagccagccccagctcccagtgaaagagagacaacaaggtgcaggggtaagcatcagcgtaggattcaggagattggggcgagtcccagccctactcagaggctaccgtgcagccccggctaaggcccacacgtctctgagctcgtgtcctcttttggggtttctcttcatgtcacctctgcaaaagcaccagaggccatctgggagcttctgcacaccaaatcggggaagggcactaattaagtaagagagctctgctagcgtggggtggaaaagtgagagagagaaagagagagagaggagggcag

SEQ ID NO: 367619 - DNA, 514 bp, Homo sapiens
gaggagcctgcagaaaagcagagtacaggccccggccaaggtgggcagccacttgtccataaaagccaactgctaacatgtgtaacacagaaccaccagtgacagcaaaacttctatatttttaaagaagccattccagattttaggttaaatgtcatgtgttttttgtttttttagaggtggggtcttactttgttgcccagactggagtacagtggcatgatcatagttcactgcagcctcaatcttctggactcaagggatcctcctgcctcagcctccagagtagctaggaccacaagcatgcaccactatgcctaagttttttgttttttgtctttttttaatgtagagataggatctcactatgttgtccagactggtctcaaactcctggtctcaagcaattttcccaccttggcctcccmaagtgctaggattacaggtgtgagccaccatgcccagcctcatgcttttatgtgatggaaaatgccatgtaagtcagacgagacaa

SEQ ID NO: 367620 - DNA, 685 bp, Homo sapiens
gcttttccagctgttccttcttgcctgcytcattcattcattcattcattatttcctaggggtctgtgatgtgctgggcaccacgggaggtaggtttttgccaacatttaatttaaacctcaaagcaatcacccccacttaacagacgcagacactgaggctcatggaggtgaagcgcgctgcctggctggcaggtgttggagccacacctgaagtgcctttgtccagagggaaagagccaagatgaaaagccccccacctactccccagtgccctgcacctcctcatctgcagatggggccaacacccgccccacccaagggggcctggggacctggggagatgatgcagatgagcttggtgcgtgcactcagcagcaggatgacagcctcgtctgcagcccaaggtcctgtgcgccacccacatccccactgccttctgccctcccatctcacggagaggttgagagactccttccaggccagggcgctcagcagagccagagtcaaatccaggagctgccgccagcttctgtgggctcaaccagcaccccacgctgccaccagcagcatcgactggggaagtgacaaaaccgccctcggtttgaaaggaaaatgacagctcttgcacctccacttacacgtgatgggttttgtgtctttttcacccctggcttccccacctc

SEQ ID NO: 367621 - DNA, 685 bp, Homo sapiens
gcttttccagctgttccttcttgcctgcttcattcattcattcattcattatttcctaggggtctgtgatgtgctgggcaccacgggaggtaggtttttgccaacatttaatttaaacctcaaagcaatcacccccacttaacagacgcagacactgaggctcatggaggtgaagcgcgctgcctggctggcaggtgttggagccacacctgaagtgcctttgtccagagggaaagagccaagatgaaaagccccccacctactccccagtgccctgcacctcctcatctgcagatggggccaacacccgccccacccaagggggcctggggacctggggagatgatgcagatgagcttggtgcgtgcactcagcagcaggatgacagcctcgtctgcagcccraggtcctgtgcgccacccacatccccactgccttctgccctcccatctcacggagaggttgagagactccttccaggccagggcgctcagcagagccagagtcaaatccaggagctgccgccagcttctgtgggctcaaccagcaccccacgctgccaccagcagcatcgactggggaagtgacaaaaccgccctcggtttgaaaggaaaatgacagctcttgcacctccacttacacgtgatgggttttgtgtctttttcacccctggcttccccacctc

SEQ ID NO: 367622 - DNA, 685 bp, Homo sapiens
gcttttccagctgttccttcttgcctgcttcattcattcattcattcattatttcctaggggtctgtgatgtgctgggcaccacgggaggtaggtttttgccaacatttaatttaaacctcaaagcaatcacccccacttaacagacgcagacactgaggctcatggaggtgaagcgcgctgcctggctggcaggtgttggagccacacctgaagtgcctttgtccagagggaaagagccaagatgaaaagccccccacctactccccagtgccctgcacctcctcatctgcagatggggccaacacccgccccacccaagggggcctggggacctggggagatgatgcagatgagcttggtgcgtgcactcagcagcaggatgacagcctcgtctgcagcccaaggtcctgtgcgccacccacatccccactgccttctgccctcccatctcacggagaggttgagagactcctyccaggccagggcgctcagcagagccagagtcaaatccaggagctgccgccagcttctgtgggctcaaccagcaccccacgctgccaccagcagcatcgactggggaagtgacaaaaccgccctcggtttgaaaggaaaatgacagctcttgcacctccacttacacgtgatgggttttgtgtctttttcacccctggcttccccacctc

SEQ ID NO: 367623 - DNA, 612 bp, Homo sapiens
aaggacagtgagcaggggtgcgggcctccctcctggggatgccttgccagggtagcccctcaaatgtgagcgacgaaatgaagcttctgcaggcctggggtggggctgcctgtgggtctgcatttccaggagctcccgggaagctgcatggccagtccccactgtgagggggaggcccacggctgtgcagcttagccagggagacctcagtgacactgcgggctttcaggggccttggacactgaccttaagttctccctttttcaatggggtattgattttggagttggcaatcaacactaagttcttgcagtcttttagtrgtagtatttggtgctttatgtgtattgattgacaactgaattgggcctgagtctgtctgtctttttgatgattcttgagcctccgaaaggcagccatgtgtcaggctgcttcacaatcatttcccactggctgtgtggaagactcagtgtcctaagttggaggtgctcagaacgtttcttgcttcttgtcttaagaggggcacatttgaagaggcgatgccgagtgctcctgaagagcaaacctggtaaagacgaagcttgggggaactgggcgctcatgcagggccag

SEQ ID NO: 367624 - DNA, 612 bp, Homo sapiens
gcttctcctgcctgtgctgggagccacttgaggacttgggccayaggagcgagggatcctttgtgttttgatcttgccccttggcctctaggaatctgagtttgtaggatccttcactggcagccctgatgggatcaccagggatggggatgtacaacgttactacagcgtctgatctggggacacctggagtaaaccattttgagccatcacaaagtcagaggatcagcttgcaggattgcgcccagggaacctgtgaacacccacagagaaggcaggaccgcgcccccttcactcaagcacgaagctccttccctggccattttcaactgggacagggcaggagggcatcctactgaggaaggatgtacaatttccccatccagttgtttctttctccagagtctgggaggtgtgaagggaaagagccgaggctggggtcagacggtctgtgttcgggtcctggcttccctgcacacccactgcttggccttgagccactttatcaacctccctgagcctgtttccttgcctgtgagatgaagcaagctgtgcacagccttcagtacagtgcctgcacatagtaggtgctcaagaaatggcagccattca

SEQ ID NO: 367625 - DNA, 612 bp, Homo sapiens
gcttctcctgcctgtgctgggagccacttgaggacttgggccataggagcgagggatcctttgtgttttgatcttgccccttggcctctaggaatctgagtttgtaggatccttcactggcagccctgatgggatcaccagggatggggatgtacaacgttactacagcgtctgatctggggacacctggagtaaaccattttgagccatcacaaagtcagaggatcagcttgcaggattgcgcccagggaacctgtgaacasccacagagaaggcaggaccgcgcccccttcactcaagcacgaagctccttccctggccattttcaactgggacagggcaggagggcatcctactgaggaaggatgtacaatttccccatccagttgtttctttctccagagtctgggaggtgtgaagggaaagagccgaggctggggtcagacggtctgtgttcgggtcctggcttccctgcacacccactgcttggccttgagccactttatcaacctccctgagcctgtttccttgcctgtgagatgaagcaagctgtgcacagccttcagtacagtgcctgcacatagtaggtgctcaagaaatggcagccattca

SEQ ID NO: 367626 - DNA, 612 bp, Homo sapiens
gcttctcctgcctgtgctgggagccacttgaggacttgggccataggagcgagggatcctttgtgttttgatcttgccccttggcctctaggaatctgagtttgtaggatccttcactggcagccctgatgggatcaccagggatggggatgtacaacgttactacagcgtctgatctggggacacctggagtaaaccattttgagccatcacaaagtcagaggatcagcttgcaggattgcgcccagggaacctgtgaacacccacagagaaggcaggaccgcgcccccttcactcaagcacgaagctccttccctggccattttcaactgggacagggcaggagggcatcctactgaggaaggatgtacaatttccccatccagttgtttctttctccagagtctgggaggtgtgaagggaaagagccgaggctggggtcagacggtctgtgttcgggtcctggcttycctgcacacccactgcttggccttgagccactttatcaacctccctgagcctgtttccttgcctgtgagatgaagcaagctgtgcacagccttcagtacagtgcctgcacatagtaggtgctcaagaaatggcagccattca

SEQ ID NO: 367627 - DNA, 593 bp, Homo sapiens
cgccatctttgctttgctgtcttcaaaaatttcaaagcgtatatttcatatcatctaaaaactctcttggatgcactctaagttgcatcattactttattcacccctgaagaatggcgttgattataagccacactctgattttagagatgttaagttgtggaaaataaatggaggtcttagaatcaatgaaatgtggtaataatggaatgtacagatatgtgctatagcatgccagtttctttttgtaaatgcatccagtcaaatttatgttctgggggcttaagtgaaacaggctaggacctgctgtaaatcactaggcacgtgcccatgcaggcttcctcagaggtgagaccttccggttcattctggagagctggcctgggaagcatcttgcaggggagtggggcaccccaccagcgtgagatggggcttgggaatttccaggggatggacaatttgcgaaggaacaataccatccgcggcattgcagccatcaataatcgcaatcagatctcgygcttcagggcgtaagctgaactctggtggaggtggaaaggaatgtttcttcaaatagaaccctgcaaaaatttc

SEQ ID NO: 367628 - DNA, 580 bp, Homo sapiens
ttcagctgtcacttcctgttgctgcttgtgtacctggttctagaatttcttcccctggtgattttatgcttctgttgtcctgtggtccagaaacctggattgctattcttactagtgttgcaagcagactaagtaaacagtctgagtaaggaatggaggcagttctccagcaaggtgcatgagctttgatgtgtagtgtcgtgatgctactgcacttctatggagggtctgactctctcctgtctcatttattcaaccattcattcatcaaatttatatcgagtacacactctgtgtcaaaaacccgggactcctagtgtccgaaaaaagaatgcaaatgaagtgcatccaggcaagtgcctggaccgaggcttggagagtgtgagacggtagagtgaaaacttcgggctcagtggggagttgctctgctcataatgcgtaacgggggcagtttctgccagttactggaaggtaacacaggtccctctgtgtgagctgagcagccactgttscaagtttccttccagccaccagccccgctcatagcctccgtggctccatagaagccctgggaaggggc

SEQ ID NO: 367629 - DNA, 533 bp, Homo sapiens
aaggctattggctttgaatgtttggaaatcatccacagagtagtttactaagccacaaagcaattaccactagcacccatttttcataaagaaaccaagaaataatattctaaaattggtagctggtgtcatgacccaaccccagatctggacagagtggttctccatcccatggacagatcctaccaggaggtcttcacgtaggtgaaggcctttgtgctgacctttttggttgcaatgtttcaagaacaagagaaaagtgacaacgtttggtttactttagtatattaggcatttttctaatgtgaactatacgaaagcaattctcattcaatgaaagaggcgccaaaaaattagagattaataagtcatcggwttctagcacgttgactgaaagaccagtgagttgtgcttgttgaattctgccctcactgcagatgtgcaggtcaaacccaaagtggtcaatgggaaagatgaagaaagatggatttccagggcatgggctcccgactagaatctgcccctcgctcatg

SEQ ID NO: 367630 - DNA, 540 bp, Homo sapiens
gtgcttgtggctctggctgaactcagatcctttattctgcagcaaaatctattatagcaaaggaagtagaaaacataatccaataacatttggtttgtaatctgaatattcatatggctttcctgtggtgttacaaatttcagtttttctgattaggatcatgaactggaagttcatataagctgaatgcatcactggagcctctcttgccaggaagaatgaaaacaaatcctggctaaaatcccagccatgtttttttattctttgtccctagcaaaggtgactgtggaacaacgagatggattgatgtcctggaaagtgatgagggagatcggggcccagcttcacacatcgcagccaatgtcctccactctgacctggagggcaccaccttgcagtgtgaggggcctcaggcgccacatccattaactccttggyttctcgtttgaaactgacaatgaggtgacatgggcaactgtccacatggaacaggacagagaccatcaactcattccacatgggctaccagacagcacctag

SEQ ID NO: 367631 - DNA, 566 bp, Homo sapiens
ctccttggcttctcgtttgaaactgacaatgaggtgacatgggcaactgtccacatggaacaggacagagaccatcaactcattccacatgggctaccagacagcacctagaggtaataacattctgtcaatagtgacctgggttggattcaaatcagtgatttaggggtgaaaggctctggattctattatgaagtgcccttagctatctaagggctgaaaaaccattcctttaccacagttaatgatagaatctaaaaagtcagtctagtttttttccttctattctcctttaaaaattgaatacaactttggatgatctaggaatgactcagccagtagaacatggtggagaakattagtgaatatgcttcaattcaactaagtatacctgtgtggatgtccataacacacatccacattgcctttttccttcctttttccccttcttccttctttcctgcttttcttccttagcatagagttttctgaactgaatataggtacaggttgttattagaatcaactttttttaaattaaggccaaattaatgactctccaacaa

SEQ ID NO: 367632 - DNA, 566 bp, Homo sapiens
ctccttggcttctcgtttgaaactgacaatgaggtgacatgggcaactgtccacatggaacaggacagagaccatcaactcattccacatgggctaccagacagcacctagaggtaataacattctgtcaatagtgacctgggttggattcaaatcagtgatttaggggtgaaaggctctggattctattatgaagtgcccttagctatctaagggctgaaaaaccattcctttaccacagttaatgatagaatctaaaaagtcagtctagtttttttccttctattctcctttaaaaattgaatacaactttggatgatctaggaatgactcagccagtagaacatggtggagaagattagtgaatatgcttcaattcaactaagtatacctgtgtggatgtccataacacacatccacattgcytttttccttcctttttccccttcttccttctttcctgcttttcttccttagcatagagttttctgaactgaatataggtacaggttgttattagaatcaactttttttaaattaaggccaaattaatgactctccaacaa

SEQ ID NO: 367633 - DNA, 552 bp, Homo sapiens
attggccctggcctcatggtctggcacactagtgttttatggttctcaagctactgcataggtacttgtagaacactccactgggtttctctgtctactgatttaacctagttaacaaagtattttacatgtgaaatgcttggctaaaacagctctgtctgcaaatgtgtaaagatatttcaaagagcygagaaagactgaacagcagcactcagagaagcccttgaataataaagcatggctgttattttggcagagactggagagaaggcatttgtggttggaagctgtttgtagatgggaatccacggaggccatttgtgtaagacaaacctagagtggggtgcataccctttccatcctttgctcactctccctttccctcatttatatagtgtgcataattcacaaagcatacacattcattattttatctgagctacatagcttctgtatagaaaaatctggagagatttaagaaacaaataaacattccttcttgctttgttcatcccacaaagagacctgatctatctgttcagagccaaatgg

SEQ ID NO: 367634 - DNA, 638 bp, Homo sapiens
catcctttttttttttttttttttttttttaaccacactataggctcctttttgttttttaaccacactacaggatctcaatatatccagtcattgttgtcctattgttgctttgcctgctgtccggtgctaaaaatctttctactgtttatgggaaaaaattccaatggctttcaaaaccatgttgccaaagcaaacagctcaracccttaccttttctccataggtgacttttcagtaaggaaaataaaagtactaaatgttattacacatttgagagccagcccaaatgatttcaaaggcaacttattctactttttccaagttttaaaattttattagaaatattatgcatgcaggttgaaagaagaatatttgggtaagagaagaattgatgatagtataatctcataatttcaacctgacgttaactggcatttagagaacttcttgtcactatattttctctgggctcattttcttccatctagttataattatattgttgataatagttggcagttccctccacttaatattacagtagaggagcttctccttattatgttttctttatagtcttctatgacttataatagctcattatattgagtgaatatatcacaacttgatcattc

SEQ ID NO: 367635 - DNA, 638 bp, Homo sapiens
catcctttttttttttttttttttttttttaaccacactataggctcctttttgttttttaaccacactacaggatctcaatatatccagtcattgttgtcctattgttgctttgcctgctgtccggtgctaaaaatctttctactgtttatgggaaaaaattccaatggctttcaaaaccatgttgccaaagcaaacagctcagacccttaccttttctccataggtgacttttcagtaaggaaaataaaagtactaaatgttattacacatttgagagccagcccaaatgatttcaaaggcaacttattctactttttccaagttttaaaattttattaraaatattatgcatgcaggttgaaagaagaatatttgggtaagagaagaattgatgatagtataatctcataatttcaacctgacgttaactggcatttagagaacttcttgtcactatattttctctgggctcattttcttccatctagttataattatattgttgataatagttggcagttccctccacttaatattacagtagaggagcttctccttattatgttttctttatagtcttctatgacttataatagctcattatattgagtgaatatatcacaacttgatcattc

SEQ ID NO: 367636 - DNA, 519 bp, Homo sapiens
aggctgcatttagaaatactaacaggtttctcatttatcaaaaatgtagtcagtacctactttgtatcaggtagtttgcttggtaggcaagggagggaaaatgaatcagacatcagacttggattctgtcttaatggagttacttaactgaatttagaagaaaaattacatttacaaatttaagtacttgtaaatatttgaacratgtatgctgaacacagagctgatccacacaaagatttacataaagatgttaaagtcttgttaccttgtttcatctcattatggttacccatctcgacttacttcctctgtagatgcagacacacttgttcaagatcagaccttagcatgtaatattcttagtctgttcacttgacatgaaaggtcagcttgcatctttaactaaaatcctagtctcctgttcctacgaagaggtcttataaaagaagtcttataaaagaattgaagaaatgaataagacatgcagactatacacgtgtccagatgatggtaaat

SEQ ID NO: 367637 - DNA, 646 bp, Homo sapiens
acatggggtaaaagttcattgatattggtcatggcaataatttcttggatatgacactgaaaacacaggcaataaagtaaaaatggacgagagactacatcaaactaaagagcttctgcacagcaaagaaaacagtcaacaaaaatggaagaggagaagatatctgcaaaccacaagtctcataaaggataaaatttcaaaatgtatatggagctcctacaacttatagcaacttctccccaaacaaaccaaaataaaagatccaattacaaaaatgagcaaaggacctgaatggacattcctccaaagaagacatacaaatggccracacgtatatgaaaagatgcttaacaccattaattatcaggtaaatgcaaataaaaactaaaatgagatatcatctctcgcctgttaggatggtgattatcaaaaagacaaaagatagaaagttgacaaggatgtggaggaaaaggaaccctgatacgctgttgatgggaatgtaaattagtagagttataatggaaaactgtatggagggctctcaaaaaattaaaaatagagctaccatatgacccaacaatcccactattggttatgtatccagaagaattgaagacaggaccttgaagagatatttgcacactca

SEQ ID NO: 367638 - DNA, 383 bp, Homo sapiens
ccgtttccaaaaatttgactattttggaaactttaagtggaatcatgtaatatttgtgattttgtgactggcttatttcacttagcataatattctctagattcgttaatggcgcaacatatgacaaaatttcttttattagggtgaataatattgcattttatgtatataccacattttctttatccattcatctgtctatggatwcttgaattgtttgcatatcttagctattgcaaataatgttgcagtggacactgttgtgcaaatatctcttcaaggtcctattttcaattccttttgatataaaaccagatgcaggattgttggatcatgcagtaattttgtttttaaaattttcaaggaacctcagtacagttttc

SEQ ID NO: 367639 - DNA, 639 bp, Homo sapiens
ggactgaggcttcctgtcggtattcctaagcatctaaagaaaaataaaaccttttaccagtcattcaagtgttttgtgtctgcatgtcaagaaccaytcagaagctccaagtatctgaatatttggtgccctatagacaacatatctctgtgactgtctaaatttccctaatttaattttgatgtttggcctcacaaagatgcagccaaagcctgaccagctatatcactgaatatgtcaattacagtgggatctgagggttgtaagttaaagatcatgcgttttttttttttttgtttgtttttgttttcccagactgtgtttgatgaccgcagtcacattttggtgcatgttagcccatgttttgaaaacataagagtgtttttgaaaagataaggcctactttctgaagagtgggcgtgtgtactagaggtggtcggcagtgctgcagcctgtcagtcaaaatctgccggcaatgtcattcaaggtcagagacccagtgaaccaccaatcaaagtcagcagggctgctcatgttcacttgtcagtgttggaaagaggtcacacgctcagtggtgtggctagtgtgtgaacaatgagagtattttagtggtcagaagcacattctgctacctacccc

SEQ ID NO: 367640 - DNA, 639 bp, Homo sapiens
ggactgaggcttcctgtcggtattcctaagcatctaaagaaaaataaaaccttttaccagtcattcaagtgttttgtgtctgcatgtcaagaaccactcagaagctccaagtatctgaatatttggtgccctatagacaacatatctstgtgactgtctaaatttccctaatttaattttgatgtttggcctcacaaagatgcagccaaagcctgaccagctatatcactgaatatgtcaattacagtgggatctgagggttgtaagttaaagatcatgcgttttttttttttttgtttgtttttgttttcccagactgtgtttgatgaccgcagtcacattttggtgcatgttagcccatgttttgaaaacataagagtgtttttgaaaagataaggcctactttctgaagagtgggcgtgtgtactagaggtggtcggcagtgctgcagcctgtcagtcaaaatctgccggcaatgtcattcaaggtcagagacccagtgaaccaccaatcaaagtcagcagggctgctcatgttcacttgtcagtgttggaaagaggtcacacgctcagtggtgtggctagtgtgtgaacaatgagagtattttagtggtcagaagcacattctgctacctacccc

SEQ ID NO: 367641 - DNA, 633 bp, Homo sapiens
  misc_feature (1)...(633): n = A,T,C or G
cacctctattttaaaaaggatctcagtcctttgtaggagaaaataaagttgctcaatttcttctgttrtctgactctctgtccagatattcatcctttactttatccatcaacagacatttattgaacacaggtgctaggaattgagctaaatgtcacaggagacacaaggttgaatatacatggtttctgacctacttcagctggcattttagctaaggaaaatggatctgtctggctgaggcttagtgtgggaagagggcagggctgctgtgtgtggtcacacagagagcctacataacttgagggggcagcttcgacataggtaggatatatggtagcttcttatggagtagtgcccggtactaaggatctgtactagtacaccattttagcactttcctgttggggtttttggcttagctccaggaaatcatttgtaagtagagttagagcgggagaaatagtttctggtctgaacaacagaatcttacaggtaaagatggttgccatttattaaagtaactctgagctagtgagatgtgctggctatagacccagctttgaaatgtgactcaggatgttgaattttagctgtgacttggctccacacnnnnnnnnnnnnnnnnnnnnn

SEQ ID NO: 367642 - DNA, 558 bp, Homo sapiens
atgactggtttctttcacagatgtggggggctggccaagaggcacaagtcagccaattttcagctctgacagcagctgaggtcatcagcttcctaatggcaccccttaagtcctccgaggccagggtgtcctttgaactcagtggttgttacacttccaaagctaagtggagagggagagaaacctgcaaattttgctggcccctgagtacacaattacctggctattaagaccttaggctaaggatgtaggattctcttatcttctctgacctgcaaaccagtagttgttcctagctgacttatacatatgtgcacatacaatcacacatatatacactcaatgagatagaaaaagggaagggtagcctaacraaaagggcttctaggatggcagaaggacttttctgagaaaggctaatgccctggttcaaagggtgcttacaatggttagtgaggactgttgaactgggaagggttgtctgtgggggacttttgttatggctggatctagatctaagggctgggtgagagcaaggaggctaagaaatacaagtag

SEQ ID NO: 367643 - DNA, 618 bp, Homo sapiens
caagtagtcttgcaatatgcttttgaagggtgtttcagttcctggggattcattggtccagcatttgtggagcttcaacttcagtgggggagagaggagaggtgttgtctttactgttctataaccaaaccatttggcacgaggttatgatatggggagggagtggggaagacaggcttgggaactctgtgtcagtgagaattcccagcagargcagtatggtaaataaggaaggtacttggaaaacgtcactaggatggagcatggtgcactatttaaaaattatatatagaaagctatgttacatcaggcaataaactatgactagtgagaaacatgtgagtaatgtttaagatggtccttaagacaaagcctggaacatttaaattattgtgaattaaaattttcaggatccttaatctactgaatgtgttttggctcaagtggtaggcagttcaaataagagataagaaataaaatagttctatcaaacttctaattttatccattttttattttaattaattatctatatatagctgtgacagcagatgcaatttaaaccttgtcctatacacaagatgcatcctggactcacacagcgaatgtgagacaaga

SEQ ID NO: 367644 - DNA, 601 bp, Homo sapiens
cagcatttgtggagcttcaacttcagtgggggagagaggagaggtgttgtctttactgttctataaccaaaccatttggcacgaggttatgatatggggagggagtggggaagacaggcttgggaactctgtgtcagtgagaattcccagcagaggcagtatggtaaataaggaaggtacttggaaaacktcactaggatggagcatggtgcactatttaaaaattatatatagaaagctatgttacatcaggcaataaactatgactagtgagaaacatgtgagtaatgtttaagatggtccttaagacaaagcctggaacatttaaattattgtgaattaaaattttcaggatccttaatctactgaatgtgttttggctcaagtggtaggcagttcaaataagagataagaaataaaatagttctatcaaacttctaattttatccattttttattttaattaattatctatatatagctgtgacagcagatgcaatttaaaccttgtcctatacacaagatgcatcctggactcacacagcgaatgtgagacaagaagtcctacctggatgacaatatctggattctttttaccttt

SEQ ID NO: 367645 - DNA, 601 bp, Homo sapiens
cagcatttgtggagcttcaacttcagtgggggagagaggagaggtgttgtctttactgttctataaccaaaccatttggcacgaggttatgatatggggagggagtggggaagacaggcttgggaactctgtgtcagtgagaattcccagcagaggcagtatggtaaataaggaaggtacttggaaaacgtcactaggatggagcatggtgcactatttaaaaattatatatagaaagctatgttacatcaggcaataaactatgactagtgagaaacatgtgagtaatgtttaagatggtccttaagacaaagcctggaacatttaaattattgtgaattaaaattttcaggatccttaatctactgaatgtgttttggctcaagtggtaggcagttcaaataagagataagaaataaaatagytctatcaaacttctaattttatccattttttattttaattaattatctatatatagctgtgacagcagatgcaatttaaaccttgtcctatacacaagatgcatcctggactcacacagcgaatgtgagacaagaagtcctacctggatgacaatatctggattctttttaccttt

SEQ ID NO: 367646 - DNA, 601 bp, Homo sapiens
cagcatttgtggagcttcaacttcagtgggggagagaggagaggtgttgtctttactgttctataaccaaaccatttggcacgaggttatgatatggggagggagtggggaagacaggcttgggaactctgtgtcagtgagaattcccagcagaggcagtatggtaaataaggaaggtacttggaaaacgtcactaggatggagcatggtgcactatttaaaaattatatatagaaagctatgttacatcaggcaataaactatgactagtgagaaacatgtgagtaatgtttaagatggtccttaagacaaagcctggaacatttaaattattgtgaattaaaattttcaggatccttaatctactgaatgtgttttggctcaagtggtaggcagttcaaataagagataagaaataaaatagtyctatcaaacttctaattttatccattttttattttaattaattatctatatatagctgtgacagcagatgcaatttaaaccttgtcctatacacaagatgcatcctggactcacacagcgaatgtgagacaagaagtcctacctggatgacaatatctggattctttttaccttt

SEQ ID NO: 367647 - DNA, 633 bp, Homo sapiens
  misc_feature (1)...(633): n = A,T,C or G
cacctctattttaaaaaggatctcagtcctttgtaggagaaaataaagttgctcaatttcttctgttgtctgactctctgtccagatattcatcctttactttatccatcaacagacatttattgaacacaggtgctaggaattgagctaaatgtcacaggagacacaaggttgaatatacatggtttctgacctacttcagctggcattttagctaaggaaaatggatctgtctggctgaggcttagtgtgggaagagggcagggctgctgtgtgtggtcacacagagagcctacataacttgagggggyagcttcgacataggtaggatatatggtagcttcttatggagtagtgcccggtactaaggatctgtactagtacaccattttagcactttcctgttggggtttttggcttagctccaggaaatcatttgtaagtagagttagagcgggagaaatagtttctggtctgaacaacagaatcttacaggtaaagatggttgccatttattaaagtaactctgagctagtgagatgtgctggctatagacccagctttgaaatgtgactcaggatgttgaattttagctgtgacttggctccacacnnnnnnnnnnnnnnnnnnnnn

SEQ ID NO: 367648 - DNA, 633 bp, Homo sapiens
  misc_feature (1)...(633): n = A,T,C or G
cacctctattttaaaaaggatctcagtcctttgtaggagaaaataaagttgctcaatttcttctgttgtctgactctctgtccagatattcatcctttactttatccatcaacagacatttattgaacacaggtgctaggaattgagctaaatgtcacaggagacacaaggttgaatatacatggtttctgacctacttcagctggcattttagctaaggaaaatggatctgtctggctgaggcttagtgtgggaagagggcagggctgctgtgtgtggtcacacagagagcctacataacttgagggggcagcttcgacataggtaggatatatggtagcttcttatggagtagtgcccggtactaaggatctgtactagtacaccattttagcactttcctgttggggtttttggcttagctccaggaaatcatttgtaagtagagttagagcgggagaaatagtttctggtctgaacaacagaatcttacakgtaaagatggttgccatttattaaagtaactctgagctagtgagatgtgctggctatagacccagctttgaaatgtgactcaggatgttgaattttagctgtgacttggctccacacnnnnnnnnnnnnnnnnnnnnn

SEQ ID NO: 367649 - DNA, 611 bp, Homo sapiens
ccattaagttcaggcaaaaggaatgaaatgtcaattatgggaatttcaggcatcagtaacagtatgtgtgagtgtgtgtgtgtgtgtgtgtttacgtattgtgggagaggcagctgcacagggaagccaggaaatgggacctttctggctttggaatttatgccagtaggtgaccccttcccctcacaagatatgcataagattgtcccttttcggttatgtttttgctttcctttggcattctcctcccttgcaatgaaagtttcttgacattttgytggctaagaaatgattaaatgggaaacattaaaaagtggagaccctctttagtatctgtgattattttttctttcctggaacactaaagaaggactctagcctttgcttctgattcagtccccttccttagccagccacagtcagcgtttgactgtcttgttctttctgggatcatcatgtttcctggggcaggtcgaggagcacttgattatgtctaagatagcagctggcaaagcaccctgagcatagtcagtttattttagagtttgagttattttgttacctactctgggccctgtcttctggagggagttcacgatctctattcgcag

SEQ ID NO: 367650 - DNA, 604 bp, Homo sapiens
ttcctttggcattctcctcccttgcaatgaaagtttcttgacattttgctggctaagaaatgattaaatgggaaacattaaaaagtggagaccctctttagtatctgtgattattttttctttcctggaacactaaagaaggactctagcctttgcttctgattcagtccccttccttagccagccacagtcagcgtttgactgtcttgttctttctgggatcatcatgtttcctggggcaggtcgaggagcacttgattatgtctaagatagcagctggcaaagcaccctgagcatagtcagtttattttagagtttgagttattttgttacctactctgggccctgtcytctggagggagttcacgatctctattcgcagacttgacatttcctgccctttccttcagtcccagctcttctttctgtcattcgtaactctgattccagagtgacctactgtgtttaggtttttattcttgtacacttcacagtgacatcttttattttgatatatagaatcatccatctttaaaggatttctctagtatgccctgcatcttctgtggaatagaattctccaaaccacctcttcccttctctc

SEQ ID NO: 367651 - DNA, 500 bp, Homo sapiens
tgatacctctggttttttttttttttttggttttgggggcgcggttctagaatttaaaataattaactcttcttggcctttctgaacacatgcctgtccgaatgttatgtttggggtacacccatgagtgccttgggtttggggcagtgaaagttcaagttattaagtatgagcaggttgtgggatggcaataccccctttccaaatttgagcacatttgcttaaatgaagtgctggcaggggttgggggcaggcccggaggagaactgaggatggggaggcaaaacttgaagccacatatgataatgcaaaccacatttcctggctccaccacttagttctttcccttgggaaatttttactggtattttgccttactgcgagtctttgcacttcctgttatgaactggttaagaagataattataacgtggttatgggaaacrgtaatgaaatatacctcactatacagcaagagagattaagacctctgccatttgg

SEQ ID NO: 367652 - DNA, 583 bp, Homo sapiens
tgggcagctaggtggggaccagtgtcagaggaccagaccaaaaaaatgggtatcttaggagataaacttattgaacaatgttgtagtctacaggcaaccctgctatgcctggttaccaaaaaaccatgtccccgcccccaacaaacttagactccatcacaagaaaggggtggaggactatgtttctgctaacacagcaaaatgatggctcaaaagagaaattgagttataggaaaaaaaaaaaaaaacagagaaaagtmtgttttcttccaacttgggctgtggactgttacagaagctggccgcagttagcatcacatgccttagaattcctgcaatgaccatactgcacattcacacagattccaaaacttctggtctcaaaccagtcacagagatacccgtgttaagggcctcaaacattgtctgggctccaatatgatggccagtttcaccagttggttgcgaggggggatgtctccttcctcagaacagctaagacacaatgagttgagactcaaagccactcactccaagaatgtggtcattagagctatatcatctgtcacctttgggtggtaat

SEQ ID NO: 367653 - DNA, 596 bp, Homo sapiens
taccaagatttaaacaagttgtaatattgttgaacatctattgatgagtccaaatgtgccacaggctattgagcacaaggagggctttgatgggaggcttttcattattaatttgatgaggtgaggtttataggcatcacagcatacattgcatttgttacatgagccctggcctcacaaagccatcaaatctcatcaacgtctggtggggtgacacctaaggaagtgaagatgtctcagaaatctgtacctgagacttgcaaccccatgaaagaaaaagagccttgccttgttgttgactttgtcagatactttcctaagtgtgggaaatactctaggraagcaaaaccaaaaaaaacaaacctgtaatccttggaaagaataatttctgagatgggaatcaaaaagccttggttttagttaagctctgctaacaactatgcctgtgcccttaggtacatgcctgatgtcactttacctcttgatatggtttgtctgtgttcccacccaaatctcagcttgaacggtatctctcagaattcccatgtgttgcaggagggacctagggagaggtaattgaatcatgggggactggt

SEQ ID NO: 367654 - DNA, 596 bp, Homo sapiens
taccaagatttaaacaagttgtaatattgttgaacatctattgatgagtccaaatgtgccacaggctattgagcacaaggagggctttgatgggaggcttttcattattaatttgatgaggtgaggtttataggcatcacagcatacattgcatttgttacatgagccctggcctcacaaagccatcaaatctcatcaacgtctggtggggtgacacctaaggaagtgaagatgtctcagaaatctgtacctgagacttgcaaccccatgaaagaaaaagagccttgccttgttgttgactttgtcagatactttcctaagtgtgggaaatactctaggaaagcaaaaccaaaamaaacaaacctgtaatccttggaaagaataatttctgagatgggaatcaaaaagccttggttttagttaagctctgctaacaactatgcctgtgcccttaggtacatgcctgatgtcactttacctcttgatatggtttgtctgtgttcccacccaaatctcagcttgaacggtatctctcagaattcccatgtgttgcaggagggacctagggagaggtaattgaatcatgggggactggt

SEQ ID NO: 367655 - DNA, 423 bp, Homo sapiens
gccttgttgttgactttgtcagatactttcctaagtgtgggaaatactctaggaaagcaaaaccaaaaaaaacaaacctgtaatccttggaaagaataatttctgagatgggaatcaaaaagccttggttttagttaagctctgctaacaactatgcctgtgcccttaggtacatgcctgatgtcactttacctcttgatatggtttgtctgtgttcccacccaaatctcagcttgaacggtatctctcagaattcccatgtgttgcaggagggacctagggagaggtaattgaatcatgggggactggtcttkcccttgctattctcatgatagtgaataagactcatgagatctgatgggtttatcaggcatttccacttttgcttcttctccatttttctcttgctgttgccacgtaaga

SEQ ID NO: 367656 - DNA, 624 bp, Homo sapiens
ttaaactgtatctcccagaattcccatgtgtttcaggagggacctggggagaggtaattgaatcatgggggccagtcttccccgtgctattcttgtgataatgaatargtctccagagatctgatgggtttatcaggggtttctgcttttgcttcttcctcccttttctcttgccaacaccaagtaagtagtgccttttgcctcttgccatgattctgaggcctccccagccatgtggaactgtaagtccaattaaacctctttttcttctcagtctctggtatgtctttatcagcagcatgaaaatggactaatacacctctttgaacagagttcttcatatataaaatgacaatctgttaaggtaactttcaggcccaatattctattatttttctaccttgggttatcttccagtctcatagtttaaatagtattgatatgctggtactttctattttcatttccatccccagcctctctcctgaactccagacttattttacaactgcccttttgacaaattcacttggatggcatctcaaacttgacatacccaaaacccaaactctttatttctccctgaggcctgcttctccccaccccagctcacccctaccccac

SEQ ID NO: 367657 - DNA, 601 bp, Homo sapiens
tggccagtgtgacttatgatccgactttttaattgtatttaactagttaatatgaattcaaatacctatttgtggctagtggctaccctactggatagtgcagctctaagagtaggtacaaaattaaaaattgaggagggcaggtgtgaggggagtagatacatctactaaaaaggtagcaacaataccttttacttacagagtccttactctgtgttgatacttgtgcttcagcacatacactttgcacatattctactgcagtgggtgctgtatcagtgatttacatttttgtatatatgagagtgtgtatgttaatttttgtttgagaaatctttcctkattgttggattagacaggagcaaaaatcaccttaaacttgaacttccttgttttaagactactttttatggtctttttagtgaagtaactacagatcaggtaaggccttattgtcatggaagaaggctataccaagacttttggtgacttgagtgctttaaaagcaatctgttttaactctatgcctattgatgagcagattctaagatttatgtggaaatgtaaaccacctagaatagctaaaacaaatttgaaaaaa

SEQ ID NO: 367658 - DNA, 477 bp, Homo sapiens
atattgcctaggtgtgtgataggctataccatctagatttgtgtaaacactctataatatttacacaatgactaaatcacctaacaatacatttcttagaatgtatccccattattaaacaatgcatgactggtcccattggccatttgtatgtcttcttttcagaaatgtctattcaggtcctttgcccacttttaattgaatggttttcttactattgatttgtttgagttccttatacattttgtatattaaccccttattagatgtatggtttgcaaaaatacattctccattctgtaggttgtctgcycactgttgactgtttcctttgcaatgcagaagctatttagtttgatgtaatcccactagtgtatttttgcttttgttgcctgtgagttcgggttcacagccaaaaaattatctcccagataaatgtcatggagcctttcctctatgttttcttctggtttctgg

SEQ ID NO: 367659 - DNA, 550 bp, Homo sapiens
catggagcctttcctctatgttttcttctggtttctggtattatgtttaagtatttaattctttttgagttgatttttgtatatgatgtgagatgagggtctaattttatttttttgcatgtggaaatccagttttttagtggcgtttattgaagagrctgtccattccccattgtgtgtttttgttacctttgttggaaatcaattgatcataaatatgtagatttatttctgagctctgtattgttttctgttcatctgtgtgtctgtcttcatgccagtaccatgctgttttgattcctatagctttgtagtaggttttttaaatcaggtagtgtgatgcctccagctttgtttttttcctcaagattgctttgtgtatctgggtcttttgtgcttccataaaaatttttgttttttctatttctgcgtaatacgtcataggaactttggagctttgatagggattgctttactaaagatagctttgggtagtatgtgcattttaacaatattaattcttccaatccatgaacatgggatgtctctc

SEQ ID NO: 367660 - DNA, 550 bp, Homo sapiens
catggagcctttcctctatgttttcttctggtttctggtattatgtttaagtatttaattctttttgagttgatttttgtatatgatgtgagatgagggtctaattttatttttttgcatgtggaaatccagttttttagtggcgtttattgaagaggctgtccattccccattgtgtgtttttgttacytttgttggaaatcaattgatcataaatatgtagatttatttctgagctctgtattgttttctgttcatctgtgtgtctgtcttcatgccagtaccatgctgttttgattcctatagctttgtagtaggttttttaaatcaggtagtgtgatgcctccagctttgtttttttcctcaagattgctttgtgtatctgggtcttttgtgcttccataaaaatttttgttttttctatttctgcgtaatacgtcataggaactttggagctttgatagggattgctttactaaagatagctttgggtagtatgtgcattttaacaatattaattcttccaatccatgaacatgggatgtctctc

SEQ ID NO: 367661 - DNA, 589 bp, Homo sapiens
tttgatgtatttcttacaattctaaatatgcattaggtatttttgaaaatttgccatgccagagtgatgacccacattgcacttatagttacctcagctctcaggaagggcctttttcagggaggagaaggactgtgcaaaagatagtgggtgagggtccatggcatgatcagggaacactatggttatggcactgatagaatcaacaagtcctttaagtctgttaaagatttattgagcatgtctaatgtgagtctttatctaagttactataaaaatattgattacaaggggtaggcctaggtcccagagcatatcrttaaagatctcttttctggctgattttgattctgattaatactttgagaaaatacatttgttcagatataatttctcctaactctgctctcataatctcgaacttctttttctttatcacaaggatatatgaaaaaccatcacatatcatgctgaaatcaagataataataccctatacctgctttaaggcccagcaattccacttctatgtatttatccaggagaaataaaaacacgtctactaaaagactcatacaagaatgtttatg

SEQ ID NO: 367662 - DNA, 589 bp, Homo sapiens
tttgatgtatttcttacaattctaaatatgcattaggtatttttgaaaatttgccatgccagagtgatgacccacattgcacttatagttacctcagctctcaggaagggcctttttcagggaggagaaggactgtgcaaaagatagtgggtgagggtccatggcatgatcagggaacactatggttatggcactgatagaatcaacaagtcctttaagtctgttaaagatttattgagcatgtctaatgtgagtctttatctaagttactataaaaatattgattacaaggggtaggcctaggtcccagagcatatcattaaagatctcttttctggctgattttgattctgattaatactttgagaaaatacatttgttcagatataatttctcctaactctgctctcataatctcgaacttctttttctttatcacaaggatatatgaaaaaccatcacatatcatgctgaaatcaagataataataccctatacctgctwtaaggcccagcaattccacttctatgtatttatccaggagaaataaaaacacgtctactaaaagactcatacaagaatgtttatg

SEQ ID NO: 367663 - DNA, 583 bp, Homo sapiens
tatggaaaccatattcacaataaccccaagctggaaatgacccatatgtccattaataagagaacagatcaacaaaatgtggtatatgcatacaaggggatactcctcaggaataaaaaaggaacaaactactggtatgtgcaacacagatgagtcttgaaaacatattgagtaaaagaagctttatataaaagagtacctactgcatgattccattcatgtggagttctagaacagttamaaccaacctatggtgcaaaaaattagaacagtgaccatctctgcgggtgagaaaaggcaactttctaggatgatgatcatgttttctatcttgatagcagtttgagttagacagacgttatggaccaaattgtcttcccacaaaatatgtatgtggaagctctaactcccaatgtgaccatgtttggagacagggcttttaggagatagttaaatttatatgagattgtaagagtggggtcctaatccaataggactggtggccttataagaagagaatctctctctctctctctgtctgtctttctctctttatctctcatgagaacatagaaggcagaca

SEQ ID NO: 367664 - DNA, 629 bp, Homo sapiens
gaaaacacgagtgcatgtgtgtttttgatagaatgagttatttcctttggatatatagtcagtagtgggattgctaggttgaagggcagttctgttttaagttctttgagaaatctccagaatgctttccacagtggctgaactaatttgcatttgcaccaaaagtgtgtaagtgttctcttttctcggaagccctgccaacatctgttattttttgacttttaaattattgccattctgactggtgwgagatggtatctgttgatttggttgcatttatctgatgattagtgatggtgagcatttttaatatttttttatttttttattttttttgagacggagtcttgctctgtcacccaggctggagtgcagtggtgcaatctcggctcactgcaaactccacctcccgggttcacgccattctcctgcctcagcctcctgagtagctgggactacaggtgcctgccaccacacctggctaatttttttgtatttttagtagagacagggtttaaccatgttagtcaggatggtcttgatctcctgacctcaggatcggcctgcctcggcctctcaaagtgctgggattacaggcgtgagccaccgcgcccagtctcatattattt

SEQ ID NO: 367665 - DNA, 570 bp, Homo sapiens
acaattacagggctcttcaaagattcaggtgcagccctcaaatctatttcacaaggcagtggtcaagggtgtatcttctggaccctcccaactgggatgagtaggtctagttactaatccactccaccatctcagtctccctaagatgttggatcccctcctctatgttaaaccaaaggagatcagtcatatccagctttctcacagtgggccatcatttaatctgtatttcakctaatcaagcaaatagactgttagaccttttttaactccctgagctgcaacattaaatgcagagtccctacttagtggacctaaatcaataaattcagcctgatccaattctatgttcctcccaccattttcccatacccttaatatccattcccatgcctgttctccagatttctgtgtatagagattggagaactcaagcagttcttttctagtgtagtgcaccacctcttgggtcacaatctcaatctcacctctagaggcctgccaggactttagttatatgtctagaagtaaacaggggtgttggaggtggctcctgaggagaatcaacat

SEQ ID NO: 367666 - DNA, 570 bp, Homo sapiens
acaattacagggctcttcaaagattcaggtgcagccctcaaatctatttcacaaggcagtggtcaagggtgtatcttctggaccctcccaactgggatgagtaggtctagttactaatccactccaccatctcagtctccctaagatgttggatcccctcctctatgttaaaccaaaggagatcagtcatatccagctttctcacagtgggccatcatttaatctgtatttcagctaatcaagcaaatagactgttagaccttttttaactccctgagctgcaacattaaatgcagagtccctacttagtggacctaaatcaataaattcagcctgatccaattctatgttcctcccaccattttcccatacccttaatatccattcccatgcctgttctccagatttctgtgtatagagattggagaactcaagcagttcttttctagtgtagtgcaccacctcttgggtcacaatctcaatctcacctctagaggcctgccaggactttrgttatatgtctagaagtaaacaggggtgttggaggtggctcctgaggagaatcaacat

SEQ ID NO: 367667 - DNA, 559 bp, Homo sapiens
tttactgcatttaaagaaatggaattaggacatgcattatttctacagtgacttcaacaatcatagtttcagtcaaggttttcttaagttttaaasctggtgccttaaattcaaaatctaaatgttgcttatgagcagcttccatactcagcagctgttaatcttttccttctacaaaaaacctagagtatcaagtaatatactccataataattttccaagacctggctaagatgcagacatactctttttaaaaattaattacagacataaaggcaatgccagctattgaatgtgtatttgacaacagtcagccaaattgaggtaatggcaagtgtgatttattaatgaaaaaaattatcaggatattaccataacctcattttggaaataatcagaatttatgactatgaactaacataattaagaggatggaataaagagtgcctctgcaaaggacacaaaatcaaaaattttgttcaatgggtcatcttacaatagcagctgaattaaaaggcgatatggtttatggaaccattaataaagttattattgaacc

SEQ ID NO: 367668 - DNA, 575 bp, Homo sapiens
ttatttatttgatgttctgattttcttttttgatgtaggcacatacagctccctcctagtactactcttgctatatctcatatgttttgatatgttgtgtttccattattatttgtttcaagaaaatgttcaatttccttctcaatttcttcattggcccactgatcaatttaggagcatagtttttaattttcmtgtgtttgtatagtttccaaaattcttgattgatttttagttttattccattgtgatcagggaaatacttgatatttcaatttttcgaatgttttaagactttgttttttttactttgcagatgcagctgccactgggagccctgtgccttagccatggtcaacccaccatgttctttgacatcgccatcaacggtaagcctttgggccatgtctgctttgagttgcttgcagacaagtttctgaagacagcagaaaactttcatgctctgagcactggagagaaaggatttggttataatggttcttgccttcacagaattattccagggtttatgtgtcagggtttatgtgtcacttatttctacataccataatggc

SEQ ID NO: 367669 - DNA, 586 bp, Homo sapiens
ttttctgtgtgcagatagttgttaaactttgatgttccagcagagaactaactatgtagggtcctgttccgccagtttgctttgccccgttacaggtgtctttttgataaaatggtttattttcctttggacagatacccagtagtgagattgctagtttgaatattactgccatttttagtgcagaaatgtattttttaaaagtcacagatagtttcaacaaaactgatgactagattttaaggaaaagcatctgtagtaccttgaattctgaccctgctgcaatagtgctggggagtccgtcttcactaacatgggggctccaatcatctcccatccagtattatcataaatagctctgtagtgagaagggagactacatctcttaatcaaaatcaaagtgctttctctgtggattaaactaaccaaagggctacactatttattctcaagaaagtagaacttaatttatttgtgttaaagcaaagcrttgaaaaacttttcatgtgttggccatttatttcctttgtgtattatgtgttggccatttgtatatcttcgctagtaaagtgtctagttaagtctg

SEQ ID NO: 367670 - DNA, 472 bp, Homo sapiens
gaaatctcgaaatgggttgacagagtttgatactgaaatcctggagatggtaaaaatcagatctggactctgcagggaataataaaaacatggaaagtaaaatatatatttcaggtcattattagtggaatctgatcatttttagataatcaaayggaaacacttttagactttcaaagtagattagtagacccacaaaggattggaaggcaaatggacttggaggtagcctagctcagccctcttgttttgcagaagatggtgctgaacccaggagagattaacttttggataccggattataagtaaactctgccaattgttcagtctgatgtgcttttgaggatgcctcttcctggctaccgctctttagaatagtcaagaaagattacatccaatgttacaaaattatatccaatgttataatacttactgaatgcccactatatgccaggtgttgggtgaaatatga

SEQ ID NO: 367671 - DNA, 472 bp, Homo sapiens
gaaatctcgaaatgggttgacagagtttgatactgaaatcctggagatggtaaaaatcagatctggactctgcagggaataataaaaacatggaaagtaaaatatatatttcaggtcattattagtggaatctgatcatttttagataatcaaacggaaacacttttagactttcaaagtagattagtagacccayaaaggattggaaggcaaatggacttggaggtagcctagctcagccctcttgttttgcagaagatggtgctgaacccaggagagattaacttttggataccggattataagtaaactctgccaattgttcagtctgatgtgcttttgaggatgcctcttcctggctaccgctctttagaatagtcaagaaagattacatccaatgttacaaaattatatccaatgttataatacttactgaatgcccactatatgccaggtgttgggtgaaatatga

SEQ ID NO: 367672 - DNA, 593 bp, Homo sapiens
taataatgatttttctgaaataatgattagtttttggtaaagtttccagcaaatcaaagtgacactgttcttttttctttgtgtttgtatccctgaataattcagtttatataaaaactgtgcaaaaaatactttatatttgaaggtaaaatggactcagaccctaggctcagatacttagatgttttacttatgctaagtgttctgcrtaatattcaagagtggtgcaggacgtagaatgattttcaccaagcaagagtgttacttgttgtatttttaattgatatattatagttgtacatattttgggggtacatgtaatattttgatacatgtatagaatgtataatgaatgtgggatatccatcacatcaaacatttatctttgtgttggggacattacaattcttctcttcaagctttctaaaaaatatgcaataaactattgttgacatagtttctttattgtactgttgaatactagaacttattacttctatctggctgtattcttgtacccctcaacctacttctcttcatctccctcctcacttctcccctgatttggtttgcctctgtgtccccacccaaat

SEQ ID NO: 367673 - DNA, 573 bp, Homo sapiens
tttttttagttttttgagaaacctctaaactattctccataatgattgcactaattttcatttccaccaatggtgtatgagggttcctttttctccatatcctcaccagcatttgttattgccatcttttggatataaaccattttacctgggttagttgatatcttattgtagttttgatttgcgtttctctgataatcawtgatggtaagctcatttcatatgcctgttcaccatttctatgtcttctttttagaaatgtctattcaaatattttgcccatttttcaattgaattgaaattttttttcctatagagttgtttgagctccttatatattctggttattaatcctttctcagatgaatagtttgaaaatattttctcccattctgcgagtcatctattcactttgttgattgtattatttgctgtgcagaagctttttaacttgacatgatctcatttgttcatttttgctttgtttgcctgtccttgtggggtatcgctcaagaaactttttcccagatcaatgtcctggagattttctccaatttttttttgcagtaggtt

SEQ ID NO: 367674 - DNA, 542 bp, Homo sapiens
tccattgtccatgcagtagaataaagttggattcttatctcacaccatatacaaaaattaactcaaaaaaatacttaaatataagacctgaaactttaaaactactagaakaaaacatagaagaaagctccacaactttggtctggcaatggtttttttggatatgactttgaaagcacaggcaacaaaagaaaaatagacaaatgggaccaaaccaaaccaaaaagcttctgcacagcaaacgaaatgattaacaaaataaagagacaatctacagagtgagagaaaatacttgtaaatcatatatctgataagggattaatatccaaaatatataagtaacccaagcaactcaatagcaaaaaaacaaataacccaattaaaaaatgggcaaatgacctgaaaagatatttctcaaaagaacacatacaaatgaacaacaggttcatgaaaaaaagctcaacctcactaatcattagggaaatggaaactaaaaccaaaatgagttatcacctcatacctgttataagggctattattga

SEQ ID NO: 367675 - DNA, 613 bp, Homo sapiens
ttgtttccacttgtttatgtcgtctataatttctttcagcagtgtttagtagttttcgttgtagagatctttcacctccttggctaggtatatgcctaagtattttttattttattttattatttatttatttatttatttattttttgtagctgttgtaaaagggtttatttgattctcagtttggtcactgttggtgtataatagtgctaatgayttgtgtatattgattttgtatcctgatgctttactgaatttgttcatcagatctaggagtttttttggatgagtctttagggttttctaggtatacaattatatcatcagtgaacagcaatagtttgatttcctctttactgatttggatgcctttatttctttctcttgtctgattgctctggctaggacatccagtagtatgttgaatagaagtggtaaaaattggcatctgtgtcttattgtagttctcagggggaatgctttccacttttccccactcagtataatgttggctatgggtttgtcatagatggcttttattaccttaagatacgtcccttctatgccaattttgctgcaggttttaatcataaaaggatgctagactttcaat

SEQ ID NO: 367676 - DNA, 613 bp, Homo sapiens
ttgtttccacttgtttatgtcgtctataatttctttcagcagtgtttagtagttttcgttgtagagatctttcacctccttggctaggtatatgcctaagtattttttattttattttattatttatttatttatttatttattttttgtagctgttgtaaaagggtttatttgattctcagtttggtcactgttggtgtataatagtgctaatgacttgygtatattgattttgtatcctgatgctttactgaatttgttcatcagatctaggagtttttttggatgagtctttagggttttctaggtatacaattatatcatcagtgaacagcaatagtttgatttcctctttactgatttggatgcctttatttctttctcttgtctgattgctctggctaggacatccagtagtatgttgaatagaagtggtaaaaattggcatctgtgtcttattgtagttctcagggggaatgctttccacttttccccactcagtataatgttggctatgggtttgtcatagatggcttttattaccttaagatacgtcccttctatgccaattttgctgcaggttttaatcataaaaggatgctagactttcaat

SEQ ID NO: 367677 - DNA, 613 bp, Homo sapiens
ttgtttccacttgtttatgtcgtctataatttctttcagcagtgtttagtagttttcgttgtagagatctttcacctccttggctaggtatatgcctaagtattttttattttattttattatttatttatttatttatttattttttgtagctgttgtaaaagggtttatttgattctcagtttggtcactgttggtgtataatagtgctaatgacttgtgtatattgattttgtatcctgatgctttactgaatttgttcatcagatctaggagtttttttggatgagtctttagggttttctaggtatacaattatatcatcagtgaacagcaatastttgatttcctctttactgatttggatgcctttatttctttctcttgtctgattgctctggctaggacatccagtagtatgttgaatagaagtggtaaaaattggcatctgtgtcttattgtagttctcagggggaatgctttccacttttccccactcagtataatgttggctatgggtttgtcatagatggcttttattaccttaagatacgtcccttctatgccaattttgctgcaggttttaatcataaaaggatgctagactttcaat

SEQ ID NO: 367678 - DNA, 613 bp, Homo sapiens
ttgtttccacttgtttatgtcgtctataatttctttcagcagtgtttagtagttttcgttgtagagatctttcacctccttggctaggtatatgcctaagtattttttattttattttattatttatttatttatttatttattttttgtagctgttgtaaaagggtttatttgattctcagtttggtcactgttggtgtataatagtgctaatgacttgtgtatattgattttgtatcctgatgctttactgaatttgttcatcagatctaggagtttttttggatgagtctttagggttttctaggtatacaattatatcatcagtgaacagcaatagtttgatttcctctttactgatttggatgcctttatttctttctcttgtctgattgctctggctaggacatccagtagtatgttgaatagaagtggtaaaaattggcatctgtgtcttattgtagttctcagggggaatgctttccacttttccccactcagtataatgttggctatgggtttgtcatagatggcttttattaccttaagatacrtcccttctatgccaattttgctgcaggttttaatcataaaaggatgctagactttcaat

SEQ ID NO: 367679 - DNA, 454 bp, Homo sapiens
acatcaattattcttatgtttagtcatttaacatagtcccaaawgtcttgcaggctttgtcagttttttttttttaattctttttctctttgtctttgtcagaatgggttaattccaaagatttatcttcgagctctgaagttctttcttctacttgttcaattcttctacttgttgaaatgctccagtgtattttgcatttctctaagtgtgtcttttatttccagaagttgtgattctcttttctttatgatatctatttctctggaaactttttcatccatattctgtatttttaaaatttctttaagtcaatttttaccttttctggaacctcctttggtagctttttataatcaaccttttgaattctttatctggcttcagatatttcttagattctgtttcttagatttcttagattcacagtttttcagctgtctcacacagtttg

SEQ ID NO: 367680 - DNA, 454 bp, Homo sapiens
acatcaattattcttatgtttagtcatttaacatagtcccaaaagtcttgcaggctttgtcagttttttttttttaattctttttctctttgtctttgtcagaatgggttaattccaaagatttatsttcgagctctgaagttctttcttctacttgttcaattcttctacttgttgaaatgctccagtgtattttgcatttctctaagtgtgtcttttatttccagaagttgtgattctcttttctttatgatatctatttctctggaaactttttcatccatattctgtatttttaaaatttctttaagtcaatttttaccttttctggaacctcctttggtagctttttataatcaaccttttgaattctttatctggcttcagatatttcttagattctgtttcttagatttcttagattcacagtttttcagctgtctcacacagtttg

SEQ ID NO: 367681 - DNA, 605 bp, Homo sapiens
gttctcaggccaatggaggtatgttcccagggggattatggctacctctgctgcatcatacagatcaccagggaagtgggggaaatctagcagtgtcggtcctcacccagctcccatgcagccatcaatgccagtctcactcccatggtgccctgccaacagcagtgagtttatatccaggcagcagggctgagatcttgccccaggctacatacctccccactgagaaagcaagcagggcttgtcggtctcacccctccatgcttctggcatcttcagctgtggcttctgcacttgtattcacacttcccattcctcacacgagattctgctcaggaaaattcatgttcagtttaaattattacaaagtttggctagaagcttccttcaccctgtgatacctctccaattccgctggctgcctttcccaaggactcttgtgagataaagccagtgatggcttctgtaggcttgagctggggaycaggagtgcctacagggctcttcctgccacttcttctacttttatattttgcttagctccctaagtctgtttcagctctatggaaggttaaatccttctcctgtgatctggattttcaggt

SEQ ID NO: 367682 - DNA, 568 bp, Homo sapiens
tattgtttaatattttgtctggataggattttttatgccagataaaaacacagagcaatgcaacatgatattgaaacaagatcgaaggaactcacttctttttattgaagggcaaaattttaaaagaccatkatcagcttgaaagagaacatttggcttctaacaggcatgcatgtgcatgcatatatatgggtttgataaatacgcctccattttctgtgatagaaggaaaaaatttaaatgtaaaattgacagtttgtaactttcactagataagctaatgcttggatttttctgagctgaaatcttaatttgacagaaatgagctactttttaatctcatctttacagttcctttcaattgacataattgcacatatttatggtatacatcacgatattttgttatatgtgctcattgtgcaatggttaaatcaatctaattagcatgtccattacctcatatacttaccttttttcatgatgagaacatttaaaatcgactttctcggcagtttttacagaaaaaaatacagtattaactgtagtcaccatgttgtacaataaa

SEQ ID NO: 367683 - DNA, 568 bp, Homo sapiens
tattgtttaatattttgtctggataggattttttatgccagataaaaacacagagcaatgcaacatgatattgaaacaagatcgaaggaactcacttctttttattgaagggcaaaattttaaaagaccatgatcagcttgaaagagaacatttggcttctaacaggcatgcatgtgcatgcatatatatgggtttgataaatacgcctccattttctgtgatagaaggaaaaaatttaaatgtaaaattgacagtttgtaactttcactagataagctaatgcttggatttttctgagctgaaatcttaatttgacagaaatgagctactttttaatctcatctttacagttcctttmaattgacataattgcacatatttatggtatacatcacgatattttgttatatgtgctcattgtgcaatggttaaatcaatctaattagcatgtccattacctcatatacttaccttttttcatgatgagaacatttaaaatcgactttctcggcagtttttacagaaaaaaatacagtattaactgtagtcaccatgttgtacaataaa

SEQ ID NO: 367684 - DNA, 404 bp, Homo sapiens
agtcaccatgttgtacaataaagcttatgaatctttggccacatattctgagttagaagagtgaggtgacagaagtaaattaaacccttgtccaatctcattaactaatgtgatgagggctcacacaccactgggagaacactcttacctagaaatgacaatgttgttaatgatgataataaaggaatgaatgtcacttttcaagtatcaaggacttacaaaaacttctccaggctagtaaccctttaaatcactggaaaataagacactagaatttttccccaagaaaaattcagcagattaacttcaattataattagacaaaacaacttagagctttctaaactaataatggtraagttaaaatcaaatctttaagctcccatcaaaacaacatcaactaa

SEQ ID NO: 367685 - DNA, 550 bp, Homo sapiens
gccctcacaatagggcaaacaaattcctgtggtcctataatggcacatattatattgcctcccaaaaggttttatctcctaatactatcactttggggattaagatttaatatataaatttttgggacttaaacattcagctcacagctgctattatactattcatcatcttgtggttgaaagctcaaatagcattttagtttccattttttagttttagtttttttgttctattatatttagtaactgtgtgtgtgcatgtgttgtgtgtgtgtgtgtgtgtgtgtgtgtgtgtgtgwgctagttttggattaaaatgcctaagttaaaatagagccctgaatcatatcatctgtgaaaatacatagtttgatgtcctctcttcctactcggatgactttcatttctttctcttgcctgattgctctggctaagacttctaataatatgttgaataggagtggtgagagagggcatccttgtcttgtgttggttttcaggaggaatgcttccagcttttttgcccattcagtatgatgttggtttgtca

SEQ ID NO: 367686 - DNA, 550 bp, Homo sapiens
tgagaactttgcttctatgcttatcaacaatattggcctaaacttttcgttttttattgtgtttcttcccgtttttggtatcaggaggatggtggcctcatagaatgagttagrgaggagtcactcctcccaaattttttgaaatagtttcagtaggagtggtactagctcttctttatacatacggtagaatttgattgtgaatctttctggtcctaggctttttttggtaggtaggctttttattacttattcaatttcaggactcatcattgatctgcccagggattcaatttcttcctggtttagtcttgggaggttttatatatccaggaatttatccatttcttctagattttctggattatgtgcatagtctctcatggattttgcatttctatgtcatcagtcataatgttccttttgtcatttccaattatgcttatttggaccttctgtcttttcttattagcctagctagctgtgtatgtattttattaattttttcaaagtacaaactcctggatttgccattcttttgtatgtttat

SEQ ID NO: 367687 - DNA, 550 bp, Homo sapiens
tgagaactttgcttctatgcttatcaacaatattggcctaaacttttcgttttttattgtgtttcttcccgtttttggtatcaggaggatggtggcctcatagaatgagttagagaggagtcaytcctcccaaattttttgaaatagtttcagtaggagtggtactagctcttctttatacatacggtagaatttgattgtgaatctttctggtcctaggctttttttggtaggtaggctttttattacttattcaatttcaggactcatcattgatctgcccagggattcaatttcttcctggtttagtcttgggaggttttatatatccaggaatttatccatttcttctagattttctggattatgtgcatagtctctcatggattttgcatttctatgtcatcagtcataatgttccttttgtcatttccaattatgcttatttggaccttctgtcttttcttattagcctagctagctgtgtatgtattttattaattttttcaaagtacaaactcctggatttgccattcttttgtatgtttat

SEQ ID NO: 367688 - DNA, 547 bp, Homo sapiens
tttgctagtttttctgttgagaactttgcttctatgcttatcaacaatattggcctaaacttttcgttttttattgtgtttcttcccgtttttggtatcaggaggatggtggcctcatagaatgagttagagaggagtcactcctcccaaattttttgaaatagtttcagtaggagtggtactagctcttctttatacatacggtagaatttgattgtgaatctttctggtcctaggctttttttggtaggtaggctttttattacttattcaatttcaggactcatcattgatctgcccagggattcaatttcttcctggtttagtcttgggaggttttatatatccaggaatttatccatttcttctagattttctggattatgtgcatagtctctcatggattttgcatttctatgtcatcagtcataatgttccttttgtcatttccaattatgcttatttggaccttctgtcttttcttattagcctagctagctgygtatgtattttattaattttttcaaagtacaaactcctggatttg

SEQ ID NO: 367689 - DNA, 578 bp, Homo sapiens
tatcattcttagatttcttggattgggtttcaacatgctccatcttgataacctccatccctatccatatgctgaattctatttctatcatttcagccattacctcccagttaggaacccctgtgggggtactagtgtcatcgtttggtggaaagaagacacaggctttttgagttataagagttcttgtgctagttctttctcatctccgtgggcaggtgttcytttaactgtggtataaattgagaagtcagtagacttctttcttgatgttttcagagtgtcaaggctttctaccaggtctttatttatagctgccttcttgtctttagtttcacaggggggtatgttaacaaagtatttttgttattgaactttcaattgtgatccagtacatggtgcttaagcataatggtctggttggtagataggctcttgctcagtcaagtggctcttctgtatttcctcacaattgcagccatgctccttctcagtgctttgaaagtgtgcgctcctctctctattaaagagctggctgccaatctcagctttgctctcctgggctgcccaccacagct

SEQ ID NO: 367690 - DNA, 578 bp, Homo sapiens
tatcattcttagatttcttggattgggtttcaacatgctccatcttgataacctccatccctatccatatgctgaattctatttctatcatttcagccattacctcccagttaggaacccctgtgggggtactagtgtcatcgtttggtggaaagaagacacaggctttttgagttataagagttcttgtgctagttctttctcatctccgtgggcaggtgttcctttaactgtggtataaattgagaagtcagtagacttctttcttgatgttttcagagtgtcaaggctttctaccaggtctttatttatagctgccttcttgtctttagtttcacaggggggtatgttaacaaagtattttkgttattgaactttcaattgtgatccagtacatggtgcttaagcataatggtctggttggtagataggctcttgctcagtcaagtggctcttctgtatttcctcacaattgcagccatgctccttctcagtgctttgaaagtgtgcgctcctctctctattaaagagctggctgccaatctcagctttgctctcctgggctgcccaccacagct

SEQ ID NO: 367691 - DNA, 596 bp, Homo sapiens
tcatactccccagtttgttgtttgctactaaacacttcttagcttttgctgattatttcttctcttttttttttttccccaatgtcttaattttggaatgtcccaaagctaagtctttgttctctccctctctccatacactgacttggtgattgatggcatcaagttccatagatataaacatcatgtatatgctgacaattcccaaatatatatctccattccagacctttctcttgagctccacacttctgtatcccattgtctgtctacctgacccctacacttggatgtctaatctcaaaccgaatgyatttgtaagtggtcttctgctttcttttgtgtatcacaggcccctggtgcctacatcaatcctgtctgctcgcatttgatttcaacttcagctgcagtgaatggttttatgtaggctcactctcattttgcgtcgacagtgacccatctcaagcaagcaccacagcttttttcatttgccccagtgccttttccagtgccacaggaatttgtttattctgtgctctggagcatcccagaaatgaaatatgctagggacaaacttcaagtaatagggactggaa

SEQ ID NO: 367692 - DNA, 560 bp, Homo sapiens
acttatttaatttcagtttttaaaataacctgtgttcctttttgtggttacttctaatggctgaaaatgaaaactgtttcactctttaagaattgcctatgtaattcaattttgcagaggaatgcagtgtgcatgccaattcagatccaactacatttattgagcacctgctacatgttagacatgggctrgttgcatcacatccattacctggggattggatagggcagatgctacagctggtaacagctattttgagtctgcttgacatagaaagagtgtcttagtttgtgtttccccagaaggagcccatgacgtaaggatttgattgcatgtttttttattttggaggtgatttcagtaaacaacagtagggcagtggagaatgtagacagggaagagaagaaagctgataaaagcttcaatcaaacagctccaactgtgagcaaatggagcttaattctgctgggacctctgggaaacagattgtgtgcctcagaaagatctcatcatctatcagactattccatggtggctgctcccagggatgaagagtccct

SEQ ID NO: 367693 - DNA, 587 bp, Homo sapiens
gttgttttgacctaagggcaggatttatggtaactgtagataaagtggatatcttacagacattcccagaacaggaattaattagaaggcaacatggtgggttagcatccaagatgcagttgctttagcctccacactgaaccatagatcttatacctctgatagtgaggaaaggtggccaaggcaagtaagtgaggaaagagccccatacccaatgcggaaagcraggcaacacagagccattggttagggcccgggagctaggctggttctgatcctggctcagtaactaagtggctttaaagtgtttaactgcctgtgagttggttttctcatcactaactacctcaggactggtgtgaagattgcaggaggtgagaacttaacaggtgtctgtaaggggagccattcttgtgcaagctgcctgtcaccaacagggggcagcctcagggccatcttactggacctcattaaggaagacaagaaagaagcaatttaaagagggaaatctagagttagtacaagtctctagttccaggatcagtaagtcttgatttgaacctattttttggaacagtgagagaaga

SEQ ID NO: 367694 - DNA, 552 bp, Homo sapiens
tcccaccaacagtgtgtaagagttccctctaccactgtttttctctgatgcacagatataactatctcactccaaatgttttactyttttttatttttaagatccaaggtcttgctctgtcattcagggtggaatgcagtgtgaaattatagctcactacactgccacatcgatctcctgggcttaagtgatcttcttgcctcagcctcttgagtcgctgggactataggcatacactactgtgaccagctattttaaaaataatttttaaaaaaaaatttaaaaaataattttaaactatgttgcccaagtcggtcttcaactcctggcctcaagtgattttcctgctttagcttctgaaagtgctgggatttcaggtatgagccatcatgcccagccccaaacattttattttgtaatcaacctccagttatgtatacatggccttggcttacttcaggatttcaatgtagtttagaggtgtttgcattcattagaatcccccagacatcttagatacctacttacccccagtacaaatggagccctgct

SEQ ID NO: 367695 - DNA, 552 bp, Homo sapiens
tcccaccaacagtgtgtaagagttccctctaccactgtttttctctgatgcacagatataactatctcactccaaatgttttacttttttttatttttaagatccaaggtcttgctctgtcattcagggtggaatgcagtgtgaaattatagctcactacactgccacatcgatctcctgggcttaagtgatcttcttgcctcagcctcttgagtcgctgggactataggcatacactactgtgaccagctattttaaaaataatttttaaaaaaaaatttwaaaaataattttaaactatgttgcccaagtcggtcttcaactcctggcctcaagtgattttcctgctttagcttctgaaagtgctgggatttcaggtatgagccatcatgcccagccccaaacattttattttgtaatcaacctccagttatgtatacatggccttggcttacttcaggatttcaatgtagtttagaggtgtttgcattcattagaatcccccagacatcttagatacctacttacccccagtacaaatggagccctgct

SEQ ID NO: 367696 - DNA, 552 bp, Homo sapiens
tcccaccaacagtgtgtaagagttccctctaccactgtttttctctgatgcacagatataactatctcactccaaatgttttacttttttttatttttaagatccaaggtcttgctctgtcattcagggtggaatgcagtgtgaaattatagctcactacactgccacatcgatctcctgggcttaagtgatcttcttgcctcagcctcttgagtcgctgggactataggcatacactactgtgaccagctattttaaaaataatttttaaaaaaaaatttaaaaaataattttaaactatgttgcccaagtcggtcttcaactcctggcctcaagtgattttcctgctttagcttctgaaagtgctgggatttcaggtrtgagccatcatgcccagccccaaacattttattttgtaatcaacctccagttatgtatacatggccttggcttacttcaggatttcaatgtagtttagaggtgtttgcattcattagaatcccccagacatcttagatacctacttacccccagtacaaatggagccctgct

SEQ ID NO: 367697 - DNA, 645 bp, Homo sapiens
ctcttctgaccactttaaagaatgtgctaaaacaaatgcactgggcagtgtcaaagaaacacaattggacattagttaaattgatgaaaaaagattgtgttcagtaactactgacagcattagtttgtttcctaatcagaagtacactcatgtttctctattaaatgattaccagtgttgataaggggtgagttaggctagtcacagtcatttctaaagttataaaaagccatggggatatagttttagaagtacatctagaatctgtatgacattaaatctctaaggaatctttgaagtactctagtatagtctagttctgtctgaatagcgttggcttccccaagagcacttatctattaggggtgagtgggattggtggaagtctggttttgatagccatcttgacacaatacacatggtccataaagagcactgttctttggaaatgaacatayggaaaaacacaggtgttctgacatgttggccagggtgatttgccacttcatcatactgtgggtaggagtttgaaatatccactgctgaacattttgaggttttaaaattaggatggaaaccaagttttctatcagtggaatatctgtattcttccagaaattgagcttcatattcttgcttccaagt

SEQ ID NO: 367698 - DNA, 566 bp, Homo sapiens
tgcataatgtcacaaaggaagagtatgaatagcaacaacgctcagtattataaaactgtcattggtcatttatttttataatcctaattaatttccatggggawttttttatgttatcaagaaagaaaagcaaaggttaaaccttgggaaagtatgctaataatttagctacaggaaagctgagaaggaagcacacctaagaccgtaaaactctaggctcaggatctactgattttaattttgtgataattcccgtaggatttgactgaattgtttttacatcaacaatttgcttaagcaaacccattcatggttgacaaaggttcagggttgtttactagcagggtcctttatatacataattgacaaacactaatcataaaggactatgtgtctgtttgttgtaggagattttctaaagatctttgccagcagacttttgctagttcagatccagttgctgtgtgtatttgagaatagcagctgcttttccttcaagatattttgtttatttattatttcatcaaataaacatttgactacttacaagtaaatttattaattta

SEQ ID NO: 367699 - DNA, 566 bp, Homo sapiens
tgcataatgtcacaaaggaagagtatgaatagcaacaacgctcagtattataaaactgtcattggtcatttatttttataatcctaattaatttccatggggatttttttatgttatcwagaaagaaaagcaaaggttaaaccttgggaaagtatgctaataatttagctacaggaaagctgagaaggaagcacacctaagaccgtaaaactctaggctcaggatctactgattttaattttgtgataattcccgtaggatttgactgaattgtttttacatcaacaatttgcttaagcaaacccattcatggttgacaaaggttcagggttgtttactagcagggtcctttatatacataattgacaaacactaatcataaaggactatgtgtctgtttgttgtaggagattttctaaagatctttgccagcagacttttgctagttcagatccagttgctgtgtgtatttgagaatagcagctgcttttccttcaagatattttgtttatttattatttcatcaaataaacatttgactacttacaagtaaatttattaattta

SEQ ID NO: 367700 - DNA, 553 bp, Homo sapiens
attctaatcttatgggaccactgttgtatatgtgatctctcattgactaaaacatcattatttagtgcatgactgtatttgtatttgttgtgtgctatgaacaatgtgaccaaaatgattttaaaagtagcatagacatccattatgccccgttgagagataagattgatgtcttgaatgtagacttttcctgcttttctgaaagaaattgatacctgtggctacattcacataagccatgaatatatttacagaatgatcaaattcacggcatttgtaaatatgttttagcaagcagagtgggtagaccaagaaaggctatctttctcacctcacccttgttcaaatgtcccaggaactacaggatttatgcaggtgaaatcacactgagtcctgagggcacagctgtgctgccccatgagataagcacttatgcgctagagtattgcattagtcatggttctccagagaaacagaatcagtaggatgtgtgtgggtgcctgcmcagtgatcgttatcttaaggcattgactcacatgattatggagatgca

SEQ ID NO: 367701 - DNA, 547 bp, Homo sapiens
caaatctctcagacaaaaaaagaatttcaattaatttatgtctcaccctcaaggaggtagctcaaaactcttcactctttaagtgtgagctatgcattgtgactttcttcctaagagtacagtattgatagaggggaaaggttgcctttatagtgtagagccctggcaagcacttcctcagctaggtgattaaggtcaacatgaactttgaaaatcatactgatatctactacccttggtgtgatggaatgaaaatggtactttacctctgtgatcttccttcagaaactcataaccgtagtctaaycgtgagaaaaatatcaaacaaatcccaatggaggaacattctacaaaatagctgacgagtgttctcaaaattgtcaaggtaatcaaaaacaggggaagtgtaaggatttaccacagcaagaagagcctaaggacataggacaaatatgctagactggatgggatcctggaacagtaaaaggatgtgaggtaaaaactaagaaaatctgaatacagaatggacatcagtaaataacaatga

SEQ ID NO: 367702 - DNA, 552 bp, Homo sapiens
taacccctcaggtgtagttgagaagacctcttccttactgttctcgcctttgttctgttcctcattataaagcatctttgtcaaggactccttaatsctgaactcccaaggaattatctacacccctaaacaattatttctctattaaagtttaactgcccccataccagattcacttttttccaccggggtgtaacagctctagccacaacattgttatcagaatagtctatttttttccttttagctcctttttgtataacactcctatttggtagatgtatacttagcctccttctaaaatttgtttattctcaagaggctatcaaactccaagcatcattcaattagaggctcagacaatggctccgttttttactaaggacccttagatagacctctgagagagatctgactcccgtattcaccaaaacaatggcccctctcagcatgaagcagttaagagcagttattgtccctatcctaacagcagttagttgtacctcttcagggggggggattgatggcagcggcagcccatctggagtggcc

SEQ ID NO: 367703 - DNA, 520 bp, Homo sapiens
ataattgataaagcaacattctggaatgagtaggtcagaatcagttctagaatcctggtgaagaagttggccttagccagaatggagatacctgatcatcagaggctggaggaaagcaggtaaagattgatgagagtatatttgtstatttgtattggactgggtagagagaataaaagaaggtcatgcttgatggactctgtgttttctatggagtcagaagcaagctcatctttctagagtcagggcttgaagcagagaaggatacaagagaataatgcaaatttggaaatggatctgatatatgcggggcaggaaggtgaccaaaagcaacaaaaggtttatcagatggtgctaagtttcctgccacatttgaagacatacatatgtagctgaaccaatctccatggttgcagatttctctccaacagtgctcagctgtctggggctgggtgtaaaaaagaaagtagattcagagtttaaattttgctaggaagatggaaagaaaagtatgcaagaa

SEQ ID NO: 367704 - DNA, 548 bp, Homo sapiens
tgtaacaaacctgcacgttgtgctcatgtaccctagaacttaaagtataataagaaaaatacaggtcataaagaccttgctaataaaacagkttgcagtaaaggagccagccaaaacccacaaaaaccaaaatggcaagagtgacctccggtgatcctcagtgctacactctcaccagcaccataacagttaataaatgctatggcaatgtcaggaagttaccctatatggtctaaaaataatccactccttgtttaacaagaaataactgtaacaacaaagcatcatcaagaaataaccataagaatgggcaaccagcagccctcagggctgctctgtctatggagtagccattcttttatttctttactttattaataaacttgctttcactttgccctggggactggccctaaatttttcctgtgtgagatccaagaaccctctcttagggtctggatcgggacccctttcctgtaacattctgactccaaaagtccagactccagtacaaatacaggacccaaaaaaatgattaggttacaaca

SEQ ID NO: 367705 - DNA, 521 bp, Homo sapiens
cccttggtgctatttatgttctgatttgactttgaatcctctgttcaccacacacaccacatacactggtttcacttagaatttttcacctttatagtggtgctaaagtgacctgcggtcagtagaaacaatattttgagtatccatacaatcattatgtttttcacttttagcatagtattcaataaattacatgagatattcaacactttattttaaagcaagctttgtatgagatgattttgccaactgtaggctaatgtaagtgtgctgagcacgtttaaggaaggacaggctaagctatgatgttcagtagatcaggtgtattaaatgcattttcaccttacagtgttgtttatcaggactcattgcaagtcaaggagckcctgtatatatggtattaatttgccctattatatggtggtgacattgatggctagtcccaatgtaatgatttgacagaagatacatattactcaacaaaatgtctcattttaaatattaggttggtgcaaaagtga

SEQ ID NO: 367706 - DNA, 584 bp, Homo sapiens
tatcaggggcctgctcatggggattgcagttttcagagtggtccctgcctgaggccctgaagggatacagaggagcctctggtttstaccatagagaggagtggagctgcaggcacgccttgctcttcagccagggctagtcccccattttaaaatagtattcctcaagtcttccttgggaaaaggactctgtttcttagaaaaagaaaaaatttacttggaaactcactggtgtggtgaagaatcagctttagttctgaaatgatatggttttacaattcaaatctcagttctcccacttatttctaactgtgtgatcttgggcctcagttgccttacctgctaaatgggaagaataatagtgctacctcgggatactgttttgaggattaattctgttaacatacattaagagctgagaatcagtaagcttgggctatttacgttagtcccagcctgctcgtcaccggccctgtgacttaggcagctcacccccttgacagtgaatctcctcatcagtggaagaggtatgataatacgtgcctcaacattaagaagagtattggtcgggcatggtagctcat

SEQ ID NO: 367707 - DNA, 584 bp, Homo sapiens
tatcaggggcctgctcatggggattgcagttttcagagtggtccctgcctgaggccctgaagggatacagaggagcctctggtttgtaccatagagaggagtggagctgcaggcacgccttgctcttcagccagggcyagtcccccattttaaaatagtattcctcaagtcttccttgggaaaaggactctgtttcttagaaaaagaaaaaatttacttggaaactcactggtgtggtgaagaatcagctttagttctgaaatgatatggttttacaattcaaatctcagttctcccacttatttctaactgtgtgatcttgggcctcagttgccttacctgctaaatgggaagaataatagtgctacctcgggatactgttttgaggattaattctgttaacatacattaagagctgagaatcagtaagcttgggctatttacgttagtcccagcctgctcgtcaccggccctgtgacttaggcagctcacccccttgacagtgaatctcctcatcagtggaagaggtatgataatacgtgcctcaacattaagaagagtattggtcgggcatggtagctcat

SEQ ID NO: 367708 - DNA, 576 bp, Homo sapiens
ataagtgagattgtgcagaatttttctgtgtctggcttgatttactcagcrtaatgacttctagctccatccatgctgtcacaaatggcaggattttctttttgtggatgtagctgaatatttcattgtgcatatatacaccacattttctttaatcattcatctgtcaaaaaatatttaggttgtttccatatgttgactattgtgaataatgctgcagtgaacacaggagtgcagatacctctttgaagcctatttttaaagcctttggatatctatatctatctatatctatatctatagagaggagtgggattgctgggtcatatagcagttctatttttaatattttgaggaatccctatactgttttccataatggctgtaccaatttaaattcccaccagaagtataaaagagttcacttttctacacatcatcaccaacacttttttgtatatttgatactaaccaccataacagatttgaggtgatatttcattgtggttttgatttgcatttccctgatgattatgaatgttgcacactgttttatatgctttgttggccatatga

SEQ ID NO: 367709 - DNA, 580 bp, Homo sapiens
aggttttcgctggaatgaagagtaaattattttgtcagcattgagctttctcagacaaggacttaagtggggctggggtccttatcctaagggtgtgcccttgagctgttaggagctatactrgtgtttgctcaagcctcctagtgtggggagtggacaaaattgtttgtggtgagagtgtaagttctcaaaggcctagtctgaggcctacttgagaagagggctcagagcagcctgacttgatctccttggtcaaggagagtctttatcagtactctcttcttctctcttcatgtaacctgctgatttccatatttacggcacaaacgctggccttttccatgactccaaactcacatatttgaatagtcacttggatatttgcttgatagtctgtaagcatctgaaacttaacttggccaaaacaaacccgttgattcctagcctgatgcatcctttcccactatgaacttgctcttgccccactctttctgccttagtgaataacacagccaatcatcaaacttaatctggactaaaacctcggaaaattttcctgtatcttcccaattcaacccat

SEQ ID NO: 367710 - DNA, 580 bp, Homo sapiens
aggttttcgctggaatgaagagtaaattattttgtcagcattgagctttctcagacaaggacttaagtggggctggggtccttatcctaagggtgtgcccttgagctgttaggagctatactagtgtttgctcaagcctcctagtgtggggagtggacaaaattgtttgtggtgagagtgkaagttctcaaaggcctagtctgaggcctacttgagaagagggctcagagcagcctgacttgatctccttggtcaaggagagtctttatcagtactctcttcttctctcttcatgtaacctgctgatttccatatttacggcacaaacgctggccttttccatgactccaaactcacatatttgaatagtcacttggatatttgcttgatagtctgtaagcatctgaaacttaacttggccaaaacaaacccgttgattcctagcctgatgcatcctttcccactatgaacttgctcttgccccactctttctgccttagtgaataacacagccaatcatcaaacttaatctggactaaaacctcggaaaattttcctgtatcttcccaattcaacccat

SEQ ID NO: 367711 - DNA, 581 bp, Homo sapiens
cctggttatttgtgattttgctgtattaattctgtgttaacttatttatagaggacaactacttttttacttgcatgagtgagttattaatggaaccagtgtaacattgtgaaagtagtacaggactgagtcatgcatgatgtgtttgaccagtggttcaattacttaattagctttttccctttaagtatgaagtgtaataatgtgttaatatcatgtgcattaacttgaatatctgcttacagaccttgaaatgcctatgtgcagtgaaatatttaaacaaacagtgtctaagcatgatgtatcttgttctactaactttcatggtcagtttttcctggtccctggcttctatttattggctctctttttgccatggctgggctgccttagatcrcattcacatctctgagtgaattcatcttttacatagtgattaatcagagcaagaatattaaatatcttgttggtactttcatgctctcctccaggcaaaatatgttaatgagctttgagtttctccacatagatatggtctctcaagccttgtcaagcctttgtgtttctgactcaatcaccag

SEQ ID NO: 367712 - DNA, 580 bp, Homo sapiens
tcagatatttttctcttatcaatttgggaaactaaccttttgtcatatgatacagatgctttcctccaattcattatttaattctcaactttttttgttgccaaatgcttaaaagccttaccaaaaaaaatcaattatttccttataatttttagttttttagttatgctaagaaaaactttccctctacatcaagattacaagaaatactcctgtattaattctagtgtttttatgtatttttctaaacaatgagtgaagctgtctaccttggcaaaagaagtgaagtggaaaacttcccccgacccttcctcgctggtcagtagtgttcagcagttgtccaaatgagatcaactcaacagttgcccttttctttgaaaatctgaaatcttatctttaccacagataccttctatacttgaattttcctctcttccactyacccatatgcaggtccaatctggtgtaagtaccaaagatctgtcatatgtttttctaccaagcaaggcaaatactcccttgtttctttctacagcattttcctgactgctcttgcatgtggattctttcacattgacct

SEQ ID NO: 367713 - DNA, 559 bp, Homo sapiens
cacttaaattgactgaaatggwtcaaatcttatatcctttctgcatttttgtcttcttgttagttatgttttagtactcttatgagaggaacattaaaatttgcaattataatgcaaagaaacaggagacgatcgtgagaataagcaatgtcacacacatttctctccaaactatatgtatcttgtcctttaaattctttgacgtgtgtgtgtggggcctgggtggggggtgtgggtgtgtggtgttctaagggccttttctactaattccaataactgggttatctgtgaggctgcttattctcactgtattttactgcttctttgcctttcttgtttttttttttaaccatactcaggtatggttaaaatgtaaatgaaagaacagtgggagcgaagtataatattgtgttgttctgtttcttttatggaggatacaaactctttccactgtctgatggttagggtgaggcaaattaacaagagaaaatgtaccagacaggacctgaaaactctgaagacacatttctataaagtctatttagtttctccataagct

SEQ ID NO: 367714 - DNA, 600 bp, Homo sapiens
acatcatcaactctcctgggtctctagcttgctgactctttgcagattgtggagcttctcagccatgtgtgagcccatcagtatgaatgaatgaatgaatgaatgaatgaatgaatcctgtttgttctcttctctggagaaagctaatacagcaagcatggaatctgatctggtggcttctgtgacctatcccctgcaggagtaagggtggctgatgagggtgactccgtgaagccacatagggagctatgaggcctgccaatgacaayagcagcttctgctgtgggcacagtaaatcccagccagccacttcatgagaggactacagcccacttggtgcaggtactcttccacagtacttcatacccataatagcttggagaaggtgcccctaaccacatttcactgaggaagaaatcagtcaggtacttgtccagggtctcgcagacatattcctgggacaaagtaacactgaatatcttaagtcaaagtgcttaatgatttcccatcgtccagcaaggagcttgacctggtggcctgttgggcagattaactgacatgcactgacatgtgcaatcagtgactcaaaaggaaatgagg

SEQ ID NO: 367715 - DNA, 600 bp, Homo sapiens
acatcatcaactctcctgggtctctagcttgctgactctttgcagattgtggagcttctcagccatgtgtgagcccatcagtatgaatgaatgaatgaatgaatgaatgaatgaatcctgtttgttctcttctctggagaaagctaatacagcaagcatggaatctgatctggtggcttctgtgacctatcccctgcaggagtaagggtggctgatgagggtgactccgtgaagccacatagggagctatgaggcctgccaatgacaatagcagcttctgctgtgggcacagtaaatcccagccagccacttcatgagaggactacagcccacttggtgcaggtactcttccacagtacttcatacccataatagcttggagaaggtgccccyaaccacatttcactgaggaagaaatcagtcaggtacttgtccagggtctcgcagacatattcctgggacaaagtaacactgaatatcttaagtcaaagtgcttaatgatttcccatcgtccagcaaggagcttgacctggtggcctgttgggcagattaactgacatgcactgacatgtgcaatcagtgactcaaaaggaaatgagg

SEQ ID NO: 367716 - DNA, 529 bp, Homo sapiens
taggcatgagtaggtccaaggtcaagtttcctgaccttcggtgcaaaatgttttccagtataccagcattattcaaacttgagcaatatgtgttttgctcaagaaaagaatctccattgtaattatatctattataatattatgatggacagtataattctggtattagcttttcaactcttatcggtaaaasactggggaatctagtttaaattttcttttgttattaaggtttcacattgtgtgcctgctctgtgtcctttgattttgtttcatgccatgctgaactgtgctcacagcttcctcttatcattggcttttcatatcaattgtagagaattcacagcttttccttagcaattgtgctgggctcagattttaaactgatttttggctgttccacagctctgactgctggtgtttctacttccacaatctatgatatcagaacagaaacctgggcttttaaaaatacccactctagtaaccttattcatctgttgttccagtgttacaattttagtttcct

SEQ ID NO: 367717 - DNA, 529 bp, Homo sapiens
taggcatgagtaggtccaaggtcaagtttcctgaccttcggtgcaaaatgttttccagtataccagcattattcaaacttgagcaatatgtgttttgctcaagaaaagaatctccattgtaattatatctattataatattatgatggacagtataattctggtattagcttttcaactcttatcggtaaaagactggggaatctagtttaaattttcttttgttattaaggtttcacattgtgtgcctgctctgtgtcctttgattttgtttcatgccatgctgaactgtgctcacagcttcctcttatcattggcttttcatatcaattgtagagaattcacagcttttccttagcaattgtgctgggctcagattttaaactgatttttggctgttccacagctctgactgctggtgtttctacttccacaatctatgataycagaacagaaacctgggcttttaaaaatacccactctagtaaccttattcatctgttgttccagtgttacaattttagtttcct

SEQ ID NO: 367718 - DNA, 595 bp, Homo sapiens
aagctgttgaatgtagctctggctttgatttacctttcccaccaagctgctgtacacaagatctgagtgagagaacgcccctcatgctcacttcctcttgtcacmtgaggggcaagtttctaggcattcaaactctgtgcagctctatctaaaagaccaagtcaatggggtggaaaaacgaaagtgtacttaaattaatgaaccattcactcatgcattctcataattttaaccacagactcctttttcatgacactttccagaagtttgtcacagcaatttcaaatacattttcctcagcacctcagcactcactgtgtctacacagagccatgctcacagcagaccatgaagaaatgaatgagagaatgaaggcatgttaagaaagtgagcctatgaatggtagctatgaagaaaggaggttcagatttccctatgttgacaacacattttaatttccccgaatggctgagtctaccccaggaaattctctaccatttttccccctgaagattcttttgaaaaagtctttaaaaagaaaactttaaaaaatcatctttcttaaactgacttagatatattctccaccaaaatc

SEQ ID NO: 367719 - DNA, 595 bp, Homo sapiens
aagctgttgaatgtagctctggctttgatttacctttcccaccaagctgctgtacacaagatctgagtgagagaacgcccctcatgctcacttcctcttgtcacatgaggggcaagtttctaggcattcaaactctgtgcagctctatctaaaagaccaagtcaatggggtggaaaaacgaaagtgtacttaaattaatgaaccattcactcatgcattctcataattttaaccacagactcctttttcatgacactttccagaagyttgtcacagcaatttcaaatacattttcctcagcacctcagcactcactgtgtctacacagagccatgctcacagcagaccatgaagaaatgaatgagagaatgaaggcatgttaagaaagtgagcctatgaatggtagctatgaagaaaggaggttcagatttccctatgttgacaacacattttaatttccccgaatggctgagtctaccccaggaaattctctaccatttttccccctgaagattcttttgaaaaagtctttaaaaagaaaactttaaaaaatcatctttcttaaactgacttagatatattctccaccaaaatc

SEQ ID NO: 367720 - DNA, 590 bp, Homo sapiens
attaaactggcatttgcaccatggtctttaagtcactaattcttgctgggggaacagggggcaggtggaagagaagacttgaaattggccaatttggggtcattgttggttaacaccgatatatttgtgtcaagagtcaggaaaggatttagccctctacttgatctgtggatgtgcctgaggggcagtgaagttttgaaggaaacaaaccaacggaggaattscgtttcactccatcagtttggacctaagaatctaagaagatgctcgtagcactgccttctctcttagcagatttttttctctgaatcatcacaacatgtaaagctctgacacctaggatatcctgagggggaaagcaagagagaaggatgtaattgtgccaattcatctggccaggagactgagggcacaatgtcctttgggcagaataaattgttattttgggaccttgtgttgatcattttggcagtagtatcctggagggacaaatccagagttgcagaaagaggtttgggtgcctggggcagggagtcaattagttatagggctctcctttttcgcacccatatttatacagggcgaatatc

SEQ ID NO: 367721 - DNA, 565 bp, Homo sapiens
tgagacacattaacttccatgagtcgagatgaaaatgtcataaaatatgtgctttgaaaacattaaatgtgctaaaatgtatactaataaaaacctctttgagcgcctatttagttcttggcaatgcaaagagaatatgaaagagtccaagcaatataataaaaatttggttaaatgctctcattacttggcacaaaatgattttaattgaaaygtttagcagcattaaatgttaacaacaacaaaaacatatcagtttgcatgtttagaattttccacagcattagcagttttgttctgggttttttgttttggtttgtttttgcgttgatgtacgttgaggttttattgtgaggtcttcattggattgatgcatgctgagttttttattttttatttattgtacataacatttgctattttaatcattttaagtgtgtagttcactgtgcatgagacagatatgtttatctcttttatgttttgttcattatcttgcctacgttatccttggtaatttttatttattttgaataggtattcaaagatattcaaatattcagat

SEQ ID NO: 367722 - DNA, 565 bp, Homo sapiens
tgagacacattaacttccatgagtcgagatgaaaatgtcataaaatatgtgctttgaaaacattaaatgtgctaaaatgtatactaataaaaacctctttgagcgcctatttagttcttggcaatgcaaagagaatatgaaagagtccaagcaatataataaaaatttggttaaatgctctcattacttggcacaaaatgattttaattgaaacgtttagcagcattaaatgttaacaacaacaaaaacatatcagtttkcatgtttagaattttccacagcattagcagttttgttctgggttttttgttttggtttgtttttgcgttgatgtacgttgaggttttattgtgaggtcttcattggattgatgcatgctgagttttttattttttatttattgtacataacatttgctattttaatcattttaagtgtgtagttcactgtgcatgagacagatatgtttatctcttttatgttttgttcattatcttgcctacgttatccttggtaatttttatttattttgaataggtattcaaagatattcaaatattcagat

SEQ ID NO: 367723 - DNA, 565 bp, Homo sapiens
tgagacacattaacttccatgagtcgagatgaaaatgtcataaaatatgtgctttgaaaacattaaatgtgctaaaatgtatactaataaaaacctctttgagcgcctatttagttcttggcaatgcaaagagaatatgaaagagtccaagcaatataataaaaatttggttaaatgctctcattacttggcacaaaatgattttaattgaaacgtttagcagcattaaatgttaacaacaacaaaaacatatcagtttgcatgtttagaattttccacagcattagcagttttgttctgggttttttgttttggtttgtttttgcgttgatgtacgttgaggttttattgtgaggtcttcattggattgatgcatgctgagttttttattttttatttattgtacataacatttgctattttaatcattttaagtgtgtagttcactgtgcatgagacagatatgtttatctcttttatgttttgttcattatctwgcctacgttatccttggtaatttttatttattttgaataggtattcaaagatattcaaatattcagat

SEQ ID NO: 367724 - DNA, 565 bp, Homo sapiens
caggtaagactcctccactccgttcaaccagagaaacctcatgtttacctgtttcattttgtgtttccgtttagctttcttttgctgtaaaagaggaaccttgtctaacccccttatttcagttaagggacttcagggacaaagagtcccaaagttaacagctaactgctgagtgagccscagtgagatctcaggactccaggtttccatccaaggattcagcccattcacccactgcactaaaaggcaattgtgtttgttctgccaagagaactcagattacagcccaaggccagtgggatgtgggtagatgggcttcagagccaaccctaaaggggcttcctaggatgctgctcattttctccgagatatgcaagggacacttaaaacccttattattagtccttccaggtctctgtagcaggacctgaatgaaaaagaaatagagcaacattcaggagttatttatttccctatttaactgaggtagtttattttctttcttaaagaagaggcatcttgttccctttaaatccacttagacaaaaactagatgttgttgaca

SEQ ID NO: 367725 - DNA, 591 bp, Homo sapiens
tattttgtgcctgtgtgatcctgactactctgcctgtcactttaaatttaagtttgtaagcctactcggaagtaggtattaaatgtatctccatttttaaatatggggcttaaaaattttaagaaacctgccccaaatctacagctagaaagtagcagtaccaggtattaaaaatggctgtggtttcaaaggaaattctactgttgctatttttaatttaactcacacaaactgatatggtttgggtgtgtccccacccaaatctcaccttgaattgtagctcccataatttccatgtgtcatgggagggacccagtgggagataattgaatcatgggagcaggtctttgctatgctgttcttatgataaagactaagtctcacaagatctgatggttttataaaggtgagtttccctgtacacactctcttgcctgctgccatataagacgtgactttgctctccaccatgattgtgaggtctctgcagccatgtggaactatgagtcaattaaacctctttctttgataaattacccaggctcgggyatgtctttattagcaacgtgagaacagactaatacacaaacc

SEQ ID NO: 367726 - DNA, 528 bp, Homo sapiens
tactagtaatttcagattttactttggtagagttagaaggagaatattcaagaagaaaaaaaaagcaagcagcatccagactattttccttagattgctgtgttttttcttgtaatttyagtactctttgagttaaatttttcccaggagaatgtacttccatattcctaatggattgtaacttttcctttctaacaaatgaatattcattattcatattcataaataatcccaacaaaattactttttctgattacaaaagttgcatttgtttattttagactacctgaaaaatgtataagatcgcagattacttttagctcagggaaaattactatttaaaaagcaagagatcgttttatcttctctcatgcatctgtagttgcaactgcagtcatgatgtaaaaatatttccattggtgaatcaaatgttaataaaacactcggctatttggctagaaaacttggtttaaccttgcatgtggattcagggtgaagcaaaggtctctaattctaaatatttgttgg

SEQ ID NO: 367727 - DNA, 592 bp, Homo sapiens
gcatctaagctaacaaaatgaaatgtgttctgttccatgaccgtgctgatcatcaaaatatggagacatgctattttacaatgaggccatctgctgaaccatggacttcttacataaaacaaaagttaagcaccatgggggagatgcttttataatgttttgatgtcgagtggtctttagtctctttggcaaacatttgtamgtcatctagaccaagaatctcatgtgtgtgaaacaagtattttcaacatgcacaactctggaggtaaccaaaatataacttcacgtctttctttctgctatgctttacatacattttatttaatgtgagtaacttgtctctgcccacaaaagaaactggaacgagttcctgactttatggctcactctaaagcagcagactcagagtctatttaaatcacacagtctcaaatcagaaagcagaatgtccaagaacatataataataaaatctccaaatgcaagttactgtcccctcttcatgggtgagccttggcctgaatgcccaaagtggacaaggaaagggaaggtcctcctccctgctcacttctttctcagcaatagtcagtgct

SEQ ID NO: 367728 - DNA, 518 bp, Homo sapiens
gctgcaacaaatatgtcacttcaccttgaaaaagactttaagcttgcgggtggacatgagcagcagaagggctgcagcctggggtgattgtgaagtggcaggagaaaggttaggtcaaatcacatggaaaactgcagcacctggtgtgggtgggtgtggctcctcacacccccagggaactggggtagctgtcagatatttgtggtgtgtgcaygtgctggtgttattatccttatgcagctcattccagcaagcagcagttttctgcattcaccacagtgtttcttgtttataagcaaatgctaaattggtgtcatgctcggattattccctaatatatcaatcatgctggaacaaattcatgtctttaaaacaagtcttgtagcaaaactgactatgcctatctttcaaaagatggaggaaggacaggaaataagcaaaatgagcttggggcatcttggagtgccagtcggtaaaaaagtgctcaaagcaacacaaaacaggaaaagaacagaaaa

SEQ ID NO: 367729 - DNA, 518 bp, Homo sapiens
gctgcaacaaatatgtcacttcaccttgaaaaagactttaagcttgcgggtggacatgagcagcagaagggctgcagcctggggtgattgtgaagtggcaggagaaaggttaggtcaaatcacatggaaaactgcagcacctggtgtgggtgggtgtggctcctcacacccccagggaactggggtagctgtcagatatttgtggtgtgtgcatgtgctggtgttattatccttatgcagctcattccagcaagcagcagttttctgcattcaccacagtgtttcttgtttataagcaaatgctaaattggtgtcatgctcggattattccctaatatatcaatcatkctggaacaaattcatgtctttaaaacaagtcttgtagcaaaactgactatgcctatctttcaaaagatggaggaaggacaggaaataagcaaaatgagcttggggcatcttggagtgccagtcggtaaaaaagtgctcaaagcaacacaaaacaggaaaagaacagaaaa

SEQ ID NO: 367730 - DNA, 518 bp, Homo sapiens
gctgcaacaaatatgtcacttcaccttgaaaaagactttaagcttgcgggtggacatgagcagcagaagggctgcagcctggggtgattgtgaagtggcaggagaaaggttaggtcaaatcacatggaaaactgcagcacctggtgtgggtgggtgtggctcctcacacccccagggaactggggtagctgtcagatatttgtggtgtgtgcatgtgctggtgttattatccttatgcagctcattccagcaagcagcagttttctgcattcaccacagtgtttcttgtttataagcaaatgctaaattggtgtcatgctcggattattccctaatatatcaatcatgctggaacaaattcatgtctttaaaacaagycttgtagcaaaactgactatgcctatctttcaaaagatggaggaaggacaggaaataagcaaaatgagcttggggcatcttggagtgccagtcggtaaaaaagtgctcaaagcaacacaaaacaggaaaagaacagaaaa

SEQ ID NO: 367731 - DNA, 390 bp, Homo sapiens
gaacagctaccaaacccaaaaaactataacaggtagctcaaaagactgttgttcctctgtcatctgactgaatattcrgaaacttcatggtgagattaccattttaaaacagcaattaattttacagggaagttatgtctttgttgaatttcatgtatatgagaaatatcaaatcataatgatgtttacttttaagtatgcataaataaataatctccaactctcctcagaggctgacatgacacagaagactcaagcataaggtgagaagttggactaaatggtctttaaattaggtcccttccaacaagaggagacctgattctaagattctgcataatctatagtctagatatcatatagtatatgtacagtcagggttctttagaa

SEQ ID NO: 367732 - DNA, 390 bp, Homo sapiens
gaacagctaccaaacccaaaaaactataacaggtagctcaaaagactgttgttcctctgtcatctgactgaatattcagaaacttcatggtgagattaccattttaaaacagcaattaattttacagggaagttatgtctttgttgaatttcatgtatatgagaaatatcaaatcataatgatgtttacttttaagtrtgcataaataaataatctccaactctcctcagaggctgacatgacacagaagactcaagcataaggtgagaagttggactaaatggtctttaaattaggtcccttccaacaagaggagacctgattctaagattctgcataatctatagtctagatatcatatagtatatgtacagtcagggttctttagaa

SEQ ID NO: 367733 - DNA, 580 bp, Homo sapiens
cctttggtggattggatgatgcctatacacattggtgaaagcagatcttctttactcagtctattgattcaaatgtaaatctcttctggaaacaccctcacaggcacacccagaaattakgttttgcccactgagcatcccttagtccagtcaaggtggcacataaataaaattgagcatcatggtagatctgaattgaaatttgaggcaagttcaggaaaaggtaatattttgacattgaaattggtgaaaatagagcacatagataagaatgtcaggggtcagcagaggtgacctttattggaagacaatttgtagatgggaccagaaaccagtgtgtatcccattctattgcccagaaacttataaaataaatgtaaatgtgtgttctggtcaatagacaggtgtgttgttaggtagactatactgtgaataaactaaaacagctttaattaactgaggattcattgacattgaacaaggcactgtagggataagaacgtatagaatgccttgatgccatttgatgatccttgctctgattccaaaataaagaaacaaacttcaagttaattattct

SEQ ID NO: 367734 - DNA, 432 bp, Homo sapiens
gttggttttagctggagcaaaagcaaagctattgctacaatgkcatggccatcttaatttttgcctaagtgttccagagcctgttgctattcacaattacagagcacaatggagcccttcttttacttaaccaacattctatattctgaagactataaatatcagttgccacttaaatgttatttgacttttcaaaagaaaaaggggtctagtcaaacgagttattttttccccatataaatgttatctgatgacagcaccagcgtttgtcacccccacaatgacataagatgtttagcatttcatcaagcatctgaattgcatctctgtggccaactttaactcagttggttcattaagaagttgtcatgtaattttagtcattaagtttgatcagatcatgttcatggcatcacagttgctctttagttt

SEQ ID NO: 367735 - DNA, 517 bp, Homo sapiens
aatgcccaggtccaagctttgccctaccgcagaagcacctggtagggacagagataggtattgaactacataagtcaaaacagataggatacactatagctgccatccccagaatgctgtcagactactaaggatgaggaggcatttggatatgtgccaggccactcacacttagtcctagatattggaaatgaacgtctctatataaggaaacatgtgtatgtgtatcatagttatacaaggaagcaggctactgttttcacgccagtgcacttttgtgtctaccaatcaccccgatagaagtcctaagtatttgagctaaggcagagatttaagtagagggttgtgcacagatacattaagggggcaagatctaccagactgggtgactgactgggtggaggtacaatggagagaaacrtgtctatactattaattataaaatgtcttgagtgtgcttctattgaatcaaataagtgtttaaaaatacaactaagttgccttcaccttttctgaa

SEQ ID NO: 367736 - DNA, 548 bp, Homo sapiens
gagagtccacctcagtcaagaactccttcctctgaaatggcttggaaaaatcaatttgccttcctgtctgagatttcttggtcacttttcacggacataggtgtccttggtatgcagtagctcttccacaggtctttcaatatcagaatcaatcccaaagcctgggtctggctcccactcaggggttcgtgtcatrtgaagagctctccagcaggccagagggcacaattcacccatgcgcctgccagccattgagctcctcttatgcaccggctctgtgctcaggctggagatgcagacaaggacaagacatagcctctgtgctaacaaagttcacagtcttatagaaggcagacaagcaagtcaatattatggtgtgtcacgtgtggaggcctggtacaggctgcctggaaaacagaagagagcctccaaccctttgaggactggggggccttcaaaatagctttgtaggggaggtgatgcttggactgagccttcaaggaagtaggaattagtcagaaagacaaaacctcaattgcattgttaat

SEQ ID NO: 367737 - DNA, 393 bp, Homo sapiens
ggaacaaggattttgatttccttgtattctaaccctcttgcagctaatagatattttaattgtatctttcaaatgcagcataatgccatgttcaaaagtgttttaattagttatcaaaagtaggaattaattacatarctttctatttggaacagtttagtggaaggaaaagctgtccattttactgaaagaagatgaaaactagagctaacagacctggcctatatacctggttttttccttaagaaattaattttactactctcagctaatgtttacagatctgcaaaatggaaatacaatatttcccttataggtatcaactaataagatatgaaactgatcataaaagttgcttacaaatagtaactataattatccaactaggaaatt

SEQ ID NO: 367738 - DNA, 452 bp, Homo sapiens
tgtgacctctcccagaagtacaaaatgtcttctcttactttctaacaaaatctsgtcatagtatccaaaaagatgaccttagaaaccacagttaacaatctaaaatgctatcattccaattagtgctcgtatttgccacccttagttttagactgaatgttttttggataatggagcaataggaattgaagatcgttgggcaggggaagatggcaatgttgagtcttactgttcagaaatcatagttatctgagggatttttatctttctacatcctacctggtacttatacaaatgacaaatctcataagctttcagtgctggtcatctttgatatatgtaaactaaatgaaaactaaatgaaacaggaacagaaaaccaaattccgcatgttctcacttacaagtgggatctagatgatgagaattcatgagcacaaagaaggaaacaac

SEQ ID NO: 367739 - DNA, 452 bp, Homo sapiens
tgtgacctctcccagaagtacaaaatgtcttctcttactttctaacaaaatctggtcatagtatccaaaaagatgaccttagaaaccacagttaacaatctaaaatgctatcattccaattagtgctcgtatttgccacccttagttttagactgaatgttttttggataatggagcaataggaattgaagatcgttgggcaggggaagatggcaatgttgagtcttmctgttcagaaatcatagttatctgagggatttttatctttctacatcctacctggtacttatacaaatgacaaatctcataagctttcagtgctggtcatctttgatatatgtaaactaaatgaaaactaaatgaaacaggaacagaaaaccaaattccgcatgttctcacttacaagtgggatctagatgatgagaattcatgagcacaaagaaggaaacaac

SEQ ID NO: 367740 - DNA, 569 bp, Homo sapiens
gtttggctaattcccaccagcccagagtaaaatgtcattctttaattgatatttcagtgtccagactcaatgctcccacttggtgaaatcagcaggaagacccatctgatatgtcaaaaagtccctatggatcccaacttcccagctgcttgttaatagaacagaaatcccaacycatcctagaggctcgaggagtccttgcccgggtgggcaatggcagctctcaggctgccagcacacaagagaacctcctgctgctcaaagggcaggaaatcacggagtccaccgttgctgaattcagaatgtcccctactgtatctgggtattctctgtgatctcagagctacttttgttatacttggctaagagggcaggagggaaagatgagccctaaaccagatctatgatgtcagcaaagtgtaggcctacttgtacttgcaagtgctatagacggaaagtttatgttctcaaattcttacattgaaacataatcatcagtgtgatgatacttcaaggtggggccattgggatgggattaatgtccccagaaaagagatcccaaagagctt

SEQ ID NO: 367741 - DNA, 579 bp, Homo sapiens
aattggcaggcactagaggaaaaacagcaaaacaaaacaaaaacagtgcatccagtcagagaagactgatgcagttctgggaagagatttttttccctctgcttcacagattgactatcaaggagaagtcagagttgaagaattgggaagcagccaaattgtcagttctctttaaggagggactgaaggatccttcattttgtttaaataaattttatttacaaaatgccagctataagtttaattgattttwgtggaacaaaagctcatttaggctatttttatttttcgagttatgtaaactaattttcctaagccaaataagtaacaaacaatttatttgcgtagtggattaaaaagaaatgagactggtcctataagccactagaaaattgagtctcatttttttacattcaaacttcaaatatgaattgcagctaaagactaaatcaggaaacaccatcccccaaaagatgaattaacaaatttattaacagggtattctttatacttttggtttttttcagattaaagacttctttagttttatgtatttggcatcaaagatgttaaaatacc

SEQ ID NO: 367742 - DNA, 579 bp, Homo sapiens
aattggcaggcactagaggaaaaacagcaaaacaaaacaaaaacagtgcatccagtcagagaagactgatgcagttctgggaagagatttttttccctctgcttcacagattgactatcaaggagaagtcagagttgaagaattgggaagcagccaaattgtcagttctctttaaggagggactgaaggatccttcattttgtttaaataaattttatttacaaaatgccagctataagtttaattgattttagtggaacaaaagctcatttaggctatttttatttttcgagttatgtaaactaattttcctaagccaaataagtaacaaacaatttatttgcgkagtggattaaaaagaaatgagactggtcctataagccactagaaaattgagtctcatttttttacattcaaacttcaaatatgaattgcagctaaagactaaatcaggaaacaccatcccccaaaagatgaattaacaaatttattaacagggtattctttatacttttggtttttttcagattaaagacttctttagttttatgtatttggcatcaaagatgttaaaatacc

SEQ ID NO: 367743 - DNA, 640 bp, Homo sapiens
aataaattttatttacaaaatgccagctataagtttaattgattttagtggaacaaaagctcatttaggctatttttatttttcgagttatgtaaactaattttcctaagccaaataagtaacaaacaatttatttgcgtagtggattaaaaagaaatgagactggtcctataagccactagaaaattgagtctcatttttttacattcaaacttcaaatatgaattgcagctaaagactaaatcaggaaacaccatcccccaaaagatgaattaacaaatttattaacagggtattctttatacttytggtttttttcagattaaagacttctttagttttatgtatttggcatcaaagatgttaaaataccaaatttgtgaaatattcatccatgcgattaaaggcaggcatattattaaaaataattcatatttctgttttaggtagaagttgacataaaattacagcccatagaattactagtcctgtttcctttctataaatataagcaaatatggattcagtctttgaatatatcacacacagttctcacatttgatattttctttaacattatgcagctagttttaatttccttgaaaagttacatttttacaacgacttcaaaaactattat

SEQ ID NO: 367744 - DNA, 633 bp, Homo sapiens
attaagcgtctagaaattgatgatgattttatgtagaacctttttgggagattaaaaataagtaaggattctatataaaatgtaaattatgacaaattgtacatagatatagtattttaacattataaaacaaaaatagatccatgttggtgacatcagcaagatggccaactaaaagcttctagtgctcttcccacttcccacaaaaaactaaaaataatgaataagcaactacatcttgatcaaaataactaaaggaaagctctggagaacagcagcagaaatcctgtagaccactgaaacacaggatggccacataggaaacaggaggaaacaccttgcctctgccatcccatttccctagttgggatcaactcaaaaccagaagagacccctwtctgcaggaaaaaggtaagcaagaggaccccaacaacctccatcatctccacagatacatgcagtctttgcactagagacttctgcagtccttatagggtttgagcccagctgagggtgctccccagagtctacatactgagctatccctagagaaggagctgatgctgtggccctccctcctcttctcagcccctacctcttgtctcatggctcctgctgctactgccctgtaca

SEQ ID NO: 367745 - DNA, 586 bp, Homo sapiens
tttaataaaataattgctgaaaatttcccacatcttaaaagagatatagacatttggattcataaagctcaaaggccctccaaaatatacaacccaaagagatcctctctaagrcacattataaccagactcttcaaagtcaaagacaaagagaaatttaaaagcaacaagagaaaagcatcaagtcacatgtaaaggaattgccattaggttatcagtggatttctcaatagaaaccttgcagatcaagagagattgaataatatatttaaagagctgaaagaacaaaagcattgctagccaactatactatgttcaacaaagctctccttcaaaatggggaaataaaattgttcccagacaagaaaagctgaaggaattcatcaccactagacctgccttacaagaaatgcttaaaggagttcttcaaatgggaatcttaaaaaatgacaattactattataaatacatatgacatatctataaagtataaactcactgaagaggtaaatacatagtaaaatcaggaacactctaatactgtaatagtggtgtgtaaatcatgtgtatctctagcatgacggtt

SEQ ID NO: 367746 - DNA, 526 bp, Homo sapiens
ctcttgtattttgaagcacataacacatttgctttcacaggttcacagctaaaggagaatttgcctcagaatgaatgataccttgaatctcacccatatccgatgtagacgatatttaggtgagattttggactttagacttttgagttgatgctggaatgagttaagacttttggagctgttgagatggaatgaatgtattttgcatgtgagaacatgaattttggaagcaagaggtagacttacagactaagtgtttgtgtcctcccaaaatttgtatgttgaatcctaacccccaatataatrgtagttggaggtgaggtctttggtagctgattagggcatgagggcagaacattatgaatggaattagtgtccctataaaagaggttttggagaatttccttgctccttctgccatgtgaggacacagcaaatggccatctatgaacatggagaagggccctaaccagaacctgaccatgctggcacccttacctcagacttctagcctccagaacatgag

SEQ ID NO: 367747 - DNA, 526 bp, Homo sapiens
ctcttgtattttgaagcacataacacatttgctttcacaggttcacagctaaaggagaatttgcctcagaatgaatgataccttgaatctcacccatatccgatgtagacgatatttaggtgagattttggactttagacttttgagttgatgctggaatgagttaagacttttggagctgttgagatggaatgaatgtattttgcatgtgagaacatgaattttggaagcaagaggtagacttacagactaagtgtttgtgtcctcccaaaatttgtatgttgaatcctaacccccaatataatggtagttggaggtgaggtctttggtagctgattagggcatgagggcagaacattatgaatggaattagtgtccctataaaagaggttttggagaatttccttgctccttctgccatgtgaggacacagcaaatggccatctatgaacatggagaagggccctaaccagaacctgaccatgctggcacmcttacctcagacttctagcctccagaacatgag

SEQ ID NO: 367748 - DNA, 536 bp, Homo sapiens
caaataaaataaagtactgtttccatatttgcatcaaatagtcttcataaaagacctggcaccaacttctttttgattattaatttcatattaacacggttgtacactaatggtgmtccttctcttttgatatgggagaggtcactttgatccatggccaaccacattaaatgcagcaaattttttcagttaaaagaaaaaaattattatgtgatgatgcaacctggataatttcttctgtttgccttcctccaaaaattgtaagatatcatataaaaatgtataagtaactcattagccaagagtcatttgcctcaataaatatttattcagcatcaatttcaacaggtgttaagcacaattttaaaatgtgtgtttttcctagagtaacttaaaagtttttttctgatgcttaagctataaatacatgtgaaacaactagaagattatgcttgcagttgtgccatataaaaatggtgttatataattagtactatacatagctggttctacacaatattaagtgaaatcaaagt

SEQ ID NO: 367749 - DNA, 619 bp, Homo sapiens
aggttgttttaagttacagaaaatgtaacttaaatgactggcattccaagaaaacaagcacatataacaataattacttttatttacattatttgattctaataacaattttgtgaaacagttgaacaggcactacttgtatctccattttatagatggagaaacctggtaaccaattttgacttttgaagatgcagtcagaaagtgttagagccttgttcaaattcaggtgatctagtctcagcttccatgttctctttctctacattggctataggtttagaactgtaatatgaaattatgctgtttgtggttgcaktattcccatgctactactttagtactctgatgactttaaagagttcatttttcccttatgctattcctaatcattatgaaaataaatgtaacaaattagggtatatgatcttatggtaattctatttttaattttttgaggaacctccatacagttttccacaatgatggtagtaatttagattcacagcagcagtgtggagtcatgtgacacataacaccatttcagtcagtgacagaccacatatgcaagagcaagatgataaaggagctgaaaaattcctgttgtctaatgacatca

SEQ ID NO: 367750 - DNA, 503 bp, Homo sapiens
actgtgcctccctgaaatcttaaacagagagtactaagaatgatggaatcttttgttattaactcagggacattataaggcagtaatgcaggaatgccctctggagagattgagatctgtgtatccctgcctaagcaggtcctagactgcagtgctttctgcactcttgtgtgcttttggaaattrttgttttctttattccctgacagactctcagctgttagcttttattagacctcagcctgcccggctttaccgggcatcattcgctcttctaattgccatttcaattcaattaaacaaatttaaaatgaataaccaagcaacggttcatacctttgtttacaacaaaagcgaaaagactgaaagagtccatagagtttcctgctttagtaacatgtaggagctttagtgtctacctttcactaatttggttaacttagtggccaatgttttttttttttattacaggatatgttatacaataatctttgtccatgttt

SEQ ID NO: 367751 - DNA, 527 bp, Homo sapiens
ctctaaccctttattccatagcttccagtacagtgatcaatgatcttcatggccctacatccaataacactttttaatcctcatcttatttgacttttcagaatcatttgatgtaaattgacaattttcttccctaggcaatttctgtctttgtctttcaagacagaaacttctgattttcctcctatctttctgcttgctgttttyatgtattgtcccatactgtgatttttttaagtgatagggatcctccaggctggacttagtctttctttacttctctctgtacatgctcttctttgatatcttatctattccatggctttaactgccatgtataatctagagctgcccccactaaaatctttgacctcaccttttcttctgagccccattccatctgttggtaggcttttttttttttttgagacaggttcttgctctgtctcccaggctggagtccagtggcagtgtgatcacagctcaatacagtcttgacctcctgggctcatgtgaccctcccatcc

SEQ ID NO: 367752 - DNA, 527 bp, Homo sapiens
ctctaaccctttattccatagcttccagtacagtgatcaatgatcttcatggccctacatccaataacactttttaatcctcatcttatttgacttttcagaatcatttgatgtaaattgacaattttcttccctaggcaatttctgtctttgtctttcaagacagaaacttctgattttcctcctatctttctgcttgctgtttttatgtattgtcccatactgtgatttttttaagtgatagggatcctccaggctggacttagtctttctttacttctctctgtrcatgctcttctttgatatcttatctattccatggctttaactgccatgtataatctagagctgcccccactaaaatctttgacctcaccttttcttctgagccccattccatctgttggtaggcttttttttttttttgagacaggttcttgctctgtctcccaggctggagtccagtggcagtgtgatcacagctcaatacagtcttgacctcctgggctcatgtgaccctcccatcc

SEQ ID NO: 367753 - DNA, 468 bp, Homo sapiens
tcttgaatatccttcaaattgaaatgtaattgtcacttttccaggaaagccctgacatatcttcctaactggataaaatctttcacttatacaaattctactaaatcaaattttcaaataatattttgtcatagcatatcaaatagagtttaaratggacaattactgtgcatacttgattaatatctttttccagccccaatccaaccaaacttctcatgaatattgccagcctcatgagaagaactttgctggtgctcaccattttgtccctagtgcctagaacaataatgaacatataatagactgttaagatatgctggataaacaaatgaatgaaagtatatagaatattccttaggggcttctctctttttgaagatttagatattactgaaaacttcaaaatatggatgactcgaatgtcctctacacaatcccagtgaaattactatactggttaaaagc

SEQ ID NO: 367754 - DNA, 468 bp, Homo sapiens
tcttgaatatccttcaaattgaaatgtaattgtcacttttccaggaaagccctgacatatcttcctaactggataaaatctttcacttatacaaattctactaaatcaaattttcaaataatattttgtcatagcatatcaaatagagtttaaaatggacaattactgtgcatacttgattaatatctttttccagccccaatccaaccaawcttctcatgaatattgccagcctcatgagaagaactttgctggtgctcaccattttgtccctagtgcctagaacaataatgaacatataatagactgttaagatatgctggataaacaaatgaatgaaagtatatagaatattccttaggggcttctctctttttgaagatttagatattactgaaaacttcaaaatatggatgactcgaatgtcctctacacaatcccagtgaaattactatactggttaaaagc

SEQ ID NO: 367755 - DNA, 515 bp, Homo sapiens
acaccagcaactcactcccctgcctagaagtcttttctgaaatctcttggcccttaatataaagctcaaggcaggttacatgacctggctcatgctagtctttctgatctcatattgtgctaccaccctcctgctcatttctctgtagccacaatgacctatttttctctgccttgagtgcaatgagattttgctgtttcaagtccttcacaatttcccaactctctcccrttgcctgtttaagactcaatcatcctctgggtctggatttaatatctattcctcagagaagtctcaattactagaattgatttcccttgttatatagtttcattgcataatatacatttctctaataactcatcacaactgtaattaaataatttttaacaattgtttataactatatttctatattttaattaaatagttacatattgttacttaaataagaaaggtgtatgtctgccctgttcattgtttcatacttacttccttagagtccagttaatgag

SEQ ID NO: 367756 - DNA, 609 bp, Homo sapiens
gcttataagttgatgaaaccaatgattagaagaattatccacaaactagcatatgattctacacatttcaaactttttttgcttccacagcccatagaatcccagtaccaacaaccgtaaaacacatttatattacaatcagacaactggtcttactcatttacacacaaagcaagtgctgtcagtgcagtaagaagtagacatgtccctgaaagtgctagtagtacactgtaacagttagccataacttaatgagacatagaggtgactatataccacataattttataccaccaaatcctaactaaatttcccaactcaatttccccttagccatatacccataatatccacttcttatgctacccagcagaagaatggcgacagtggagaaagmgaaagtaatcttaactgatttcgttaaaggcatcttcattttgcaaatcttacagaaaaaaaataaaaacaatgtatgactccatgaatacattgctaggtcccaccagatgacctcagaatgagcaaatgcaagtgaaagactcaagcctaaatttcatgagctttgtggtaattctgtctttgcccccagatctgcctctggtgaagtct

SEQ ID NO: 367757 - DNA, 503 bp, Homo sapiens
ttccgtttcaagatggccaaataggaacagctctggacttcggctcccagcacaatcaacacagaagatgggtgatttctacatttcaaactgagcctctgctggtgatacccaggcaaacagggtctggagtggacctccagcaaactctgacagacttgcagctgagggacctaactgttagaaggaaaactaacaaacagaaaggaatagcatcaacaccaacaaaaaggacgaccacaccaaaaccccatctgtaggtcaccaacgtcaaagaccaaaggtagataaaaccacaaagatagggagaaaccagarcagaaaagctgaagattctaaaaaccacagagcctcttttcctccaaaggatcacagctactcaccagcaacagaataaagctggatggagaatgactttgatgatctgacagaagtaggcttcagaaggtcggtaataacaaacgtctctgagctaaaggaggatgttggaacccattgcaagg

SEQ ID NO: 367758 - DNA, 520 bp, Homo sapiens
gtttttgaaaagctccatggggtaattctgatactaagatttgaggttaaacatgggcaaaactgccagtgttatagtgttaggacaggatatcagaattcaaaacctaatgggacaggaaatttggattctatgattggaaatgtgctcagatgcagcactcatctgcttgtgaaagccattactatgtcatttcctctgaccaaaggctggatttgaaagaatgggttgggttgggtcccagctttgttgttcatccaagatgtttttatgtttagttatatataagggatgggaaattactaagccagtgctagtttaataaagttgaaaacatttgtaaatagctttatttggtgatgaaatgaaaataatttatttcragaagttggatggaaaatcaatttgcattttactaaaattgtttgcattctagcaaggcagggaatttgataatggccatgtttttaattattaacaccctgtttctaagttcctgagatttcaggccagcccaaga

SEQ ID NO: 367759 - DNA, 539 bp, Homo sapiens
gaggggccaaatagctcagtaagtcacataaaactaaggcagagacaggatttgaactcaagatcatgctctttgccagttcatgaaattacttcttggctttcctctcattttagataattttattcagggtaatgagctggctaagaggaagaaggcaagtatggaaagggagtttaatttggggccctagtaatggtgctatctgaataaatcttttcagtgccacataagctaacataaatcatgagtgttggagtcttcattatacaatttcttcagtgtcaaagatgtcaatgacaggccttgatatgcatttggaaagaattatgagattgctcttgcatgacctcctarcagctactttttctttcagcaagcaattcggaagatgaattgtgaaaaagaaacaaacaacaacaacaacaaattaaagagcaaagacatgttttcatctctcaggttagagtggttcagttctcttcacatattttcttctattaaagtgcttttaaattatacacttcctaataatgaaa

SEQ ID NO: 367760 - DNA, 584 bp, Homo sapiens
acccaggactatggcagtgttatcaccacgttttaatcagtcacaactgacatcaacgtgacccctgctatatagattatccagcctggttggcattccagtcttaaagagtcaacctctcccagcttcactgatgtgtgatggcatttcacccactgccattccaaccctgtcccctaaagaagagcattcatgaggtgttataagtaattgttccttattcatcatcaaagttctttagtaaaaaccaggagtgaycaatagacattcacatgtctttgcttaattctattaaaaaagactgaaaaacttctctgtacaccctttggaagtctttttgcttactcaagagcagagcataatctatttaatacaatttttcacttatatccaaaaggtggccttctctaatctggctttcaagttggaaagagaaaagttaagttgattcctgatggattttgctctaaaatttaaccctcgggcagtgaaagcctctttatcccaactgagtagctgctaaatgaggcccctttataaccacttcagaatgcactttcaaaacaaaagttagaaggccctat

SEQ ID NO: 367761 - DNA, 584 bp, Homo sapiens
acccaggactatggcagtgttatcaccacgttttaatcagtcacaactgacatcaacgtgacccctgctatatagattatccagcctggttggcattccagtcttaaagagtcaacctctcccagcttcactgatgtgtgatggcatttcacccactgccattccaaccctgtcccctaaagaagagcattcatgaggtgttataagtaattgttccttattcatcatcaaagttctttagtaaaaaccaggagtgaccaatagacattcacatgtctttgcttaattctattaaaaaagmctgaaaaacttctctgtacaccctttggaagtctttttgcttactcaagagcagagcataatctatttaatacaatttttcacttatatccaaaaggtggccttctctaatctggctttcaagttggaaagagaaaagttaagttgattcctgatggattttgctctaaaatttaaccctcgggcagtgaaagcctctttatcccaactgagtagctgctaaatgaggcccctttataaccacttcagaatgcactttcaaaacaaaagttagaaggccctat

SEQ ID NO: 367762 - DNA, 584 bp, Homo sapiens
acccaggactatggcagtgttatcaccacgttttaatcagtcacaactgacatcaacgtgacccctgctatatagattatccagcctggttggcattccagtcttaaagagtcaacctctcccagcttcactgatgtgtgatggcatttcacccactgccattccaaccctgtcccctaaagaagagcattcatgaggtgttataagtaattgttccttattcatcatcaaagttctttagtaaaaaccaggagtgaccaatagacattcacatgtctttgcttaattctattaaaaaagactgaaaaacttctctgtacaccctttgraagtctttttgcttactcaagagcagagcataatctatttaatacaatttttcacttatatccaaaaggtggccttctctaatctggctttcaagttggaaagagaaaagttaagttgattcctgatggattttgctctaaaatttaaccctcgggcagtgaaagcctctttatcccaactgagtagctgctaaatgaggcccctttataaccacttcagaatgcactttcaaaacaaaagttagaaggccctat

SEQ ID NO: 367763 - DNA, 539 bp, Homo sapiens
taaagtggaatagcatcaatagaagtagcctgcaatacctggccttaagaaagacatgaagatgaaggacaatccagagatgtactggcaggtttttctgttatggtcattttgggaaaatacaaamctccttttgctcactggtaatgagctcaacctgttaacagttcttctttctaatgaactgttaacccctgtaggataatttccatttgagcagagacaatagttacataataactatctccttcaagtcagccaacaagtctacttgttaactgaaggccagtatctgtaaacaaacaaacaaaccaaacctactccatttgtcttagagaggaggctatgctcaagagtataaattgaccatttgagtggagcatgaaaggattggaagataatttcccatctacatgtatgattttgttgtacctggttctgcctgtttttttgtttgtttgtttgtttgtttgtttttgcagattgggcacagggaagaaagcatttcctaagctgactgagtacctttatttttcctt

SEQ ID NO: 367764 - DNA, 533 bp, Homo sapiens
atggcataagctgtctctctctctttctctgcttcggctgccaggcagggaagggccccctgtccagtggacatgtgacccacatgaccttacctatcattggagatggctcacactccttaccctgcccctttgtcttgtatccagtaaatatcagtgcagcctggcattcggggccactactggtctccgcgtcttggtggtagtggtccccgggcccagctgtcttttcttttatctctttgtcttgtgtctttatttctacaatctctcatctccacacacrgggagaaaaactcactgaccctgtggggctggaccctacaaagcctgcactgcttgatgttgccagggaaagaggtattggactgtttcctgtgggccaaataaaagggagagagaatgagagtgtgggcttagggttatcctgaattccattccttagctctgtctggagaactgggaacatgaggaagctctcggttaacaaggatgaccagtgctttggaaggggtaaccagtgaactcccaga

SEQ ID NO: 367765 - DNA, 578 bp, Homo sapiens
acttggcacttgtgttcagatattcatgacactctggtatgatttgaacagtcactataattcaaagttaagtattttctgctatttatacaatagtaagagggtaggtcaacttcataaagcaaatcaaataagtttagccaaccaaacgagtattccaaaatacacttactgcttccsctctacagaggccagggataaaaataaatattgccctcaagtaactgaaaacaaatctaggaatgccttgggtattttcaactcttctgacttttgaagaaacagaattctccaaattaaagcaagggctagctacgaaatatcacctatgtgcccaaaaataggtcttgggaaacacacacaaaaatagtcacttagaaattgtccttgcttcctatatacagttaagttgtaacaaaacctaataatagatgtctaaatgattttttcttctcctttgtataccttaagaattttaaactttaattgatataaaacttgtacccaacaaatgaggctgtcaaaaaatgaaaaggaaagagaaaaaataaaaagttcactgatcacatcatttaatt

SEQ ID NO: 367766 - DNA, 527 bp, Homo sapiens
agaaatgatacaatggcagttaaaggcccaactagtaagggaaaattctgaaatttatggaacggtttcctatttctctcttgattctgtgagttaatgttaacttatacaataatagctaatgttttagtaatttatgatgtgcacagtatctaaaatgggtattcccattgtcatgtaacaccaataccatgtcaatatgtatctttcttctcattttttacatgcagaaactgggattaagaaagatttaatgtctgggccaatttgaacatacttagaagctagactcaaacttaagttttcacattaakaccgtgtttccttccactaacatattcaacctctcagattaagcaacactcaatactttatgagagtagtaacaatatttgaggatgttgactattttcagactaaaaagagttttaattaaatacaaacacaattttgcttattaatttgagtgattagtttatagatgaaggtaaataacataaatctgaaagatatttgagaaaatacac

SEQ ID NO: 367767 - DNA, 549 bp, Homo sapiens
ataattgccttagaacagaatctgtttagaatattgttaagcttatgtaacaaaagattgatcaaagatatttcattttctttgaaatgaaaaggaagaagggtagtacatattaatkagagtgtcagagaaaccaaaactaatctttacttagatatacactaccatctaaactaaaatgttctcatcaagaaaaataataaatcctgggttttcctaaatagcagagcctgaaacaagggcttctgttcagacagtttataaaaaaaaaaataggaagaggagaaaaggactaaaacaatgaaactggagcaggaatataagagaaaagcatttatgtattcagtgactccattccctcttttgtcaggagctgtctcatagaatgctaatgctcctgcacttctagttcaggcatctgataatgccagattctgaaatgcacctttataacagaatagcaccagaaagaaagcaggatatatgcattaaagtgaggcaagcggctgtcaggttacacccgtgcgtagctggttgccatagcaatgg

SEQ ID NO: 367768 - DNA, 596 bp, Homo sapiens
ccccaatttttggctactttgggtggccatcctactttctgctgttactaagaggaatgtgactggtgacattctgtaactcctaggcatagggacaaaaaaagggaaccagatccaggtcctgcatgataaaaaagggraaaaatctacgggaagtgagtcgggagtgtaaagagtgccaaaacatacctctgatttaattcttcagctgctcagtgaattacatatcttccattctgcagatattacacatattttcctgtttttagtgtttcctttttccactttctgtcaaagataggggaaaatggaaatatttatccctgcacatatggcaatcaattttgccagtaagcacagatcttaaaaccatgttgaccctctcataaaataaggtattttcaattgcttgctcatatcttggaagtacacgtcattttgcatactcatactcatatccttagtaatctgccatgtgtctgaatatcttattatcaatgatactttactatctatctctgctctttcaagtgcctgtatagactttaatcagttaataaaagaacatcgcaatatgtggtgattaaagaatatgt

SEQ ID NO: 367769 - DNA, 596 bp, Homo sapiens
ccccaatttttggctactttgggtggccatcctactttctgctgttactaagaggaatgtgactggtgacattctgtaactcctaggcatagggacaaaaaaagggaaccagatccaggtcctgcatgataaaaaaggggaaaaatctacgggaagtgagtcgggagtgtaaagagtgccaaaacatacctctgatttaattcttcagctgctcagtgaattacatatcttccattctgcagatattacacatattttcctstttttagtgtttcctttttccactttctgtcaaagataggggaaaatggaaatatttatccctgcacatatggcaatcaattttgccagtaagcacagatcttaaaaccatgttgaccctctcataaaataaggtattttcaattgcttgctcatatcttggaagtacacgtcattttgcatactcatactcatatccttagtaatctgccatgtgtctgaatatcttattatcaatgatactttactatctatctctgctctttcaagtgcctgtatagactttaatcagttaataaaagaacatcgcaatatgtggtgattaaagaatatgt

SEQ ID NO: 367770 - DNA, 596 bp, Homo sapiens
ccccaatttttggctactttgggtggccatcctactttctgctgttactaagaggaatgtgactggtgacattctgtaactcctaggcatagggacaaaaaaagggaaccagatccaggtcctgcatgataaaaaaggggaaaaatctacgggaagtgagtcgggagtgtaaagagtgccaaaacatacctctgatttaattcttcagctgctcagtgaattacatatcttccattctgcagatattacacatattttcctgtttttagtgtttcctttttccactttctgtcaragataggggaaaatggaaatatttatccctgcacatatggcaatcaattttgccagtaagcacagatcttaaaaccatgttgaccctctcataaaataaggtattttcaattgcttgctcatatcttggaagtacacgtcattttgcatactcatactcatatccttagtaatctgccatgtgtctgaatatcttattatcaatgatactttactatctatctctgctctttcaagtgcctgtatagactttaatcagttaataaaagaacatcgcaatatgtggtgattaaagaatatgt

SEQ ID NO: 367771 - DNA, 596 bp, Homo sapiens
ccccaatttttggctactttgggtggccatcctactttctgctgttactaagaggaatgtgactggtgacattctgtaactcctaggcatagggacaaaaaaagggaaccagatccaggtcctgcatgataaaaaaggggaaaaatctacgggaagtgagtcgggagtgtaaagagtgccaaaacatacctctgatttaattcttcagctgctcagtgaattacatatcttccattctgcagatattacacatattttcctgtttttagtgtttcctttttccactttctgtcaaagataggggaaaatggaaatatttatccctgcacatatggcaatcaattttgccagtaagcacagatcttaaaaccatgttgaccctctcataaaataaggtattttcaattgcttgctcatatcttggaagtacrcgtcattttgcatactcatactcatatccttagtaatctgccatgtgtctgaatatcttattatcaatgatactttactatctatctctgctctttcaagtgcctgtatagactttaatcagttaataaaagaacatcgcaatatgtggtgattaaagaatatgt

SEQ ID NO: 367772 - DNA, 382 bp, Homo sapiens
atatgtggtgattaaagaatatgtactctagcataagataacttggtttaaatgggcaatttatttaatgtctctaagccttggcaatagggaacgtgctagtaactacctcataaagttatgatgaggaataaatccattcatatgtttagcaatatttattgagcacctactatgataagaactatgaagaaaaacaatgcaagatgagggaaaagagaacgacggggtgctacttcagatataactgtcagagaaatctgctctaggaagattatatttgaggaaagatttgaatgaagtgaggaagtatgtcatgcaaatasttgggtctgaaggttctagacagaagaaagaataattataagaatgctgtgttggg

SEQ ID NO: 367773 - DNA, 533 bp, Homo sapiens
gagaacacaaacattcaaaccatagcaatgagtaaaagatacttatcatagaaaattttaaaggcacaaacataaagaagagtagaaaagaaaaagaatgaagggagaaagaggagaaagaaatcatctgttaagctgccacccaaacataagtacarttgttttatttgttcctttttggcaaacttctataagctctataaacctgtacataaatttttagatcgttttaaacatatctttttattagctatgtgtacttattcttaataaagttgagccataatttacccaatgattgtaaccttatgataacctctcttcataatgtttaaacattctttctcttcatatgacagcaattgtgcttccgatatccatgaaaggagagaacacataataataaaaatgttccattaattcagtgatacgttcaatgagtttgtagatcaataaccagaacaatatgtatacacatttgaaaaattagttagtttaccgatagagagattgatagataataggatgtaaag

SEQ ID NO: 367774 - DNA, 533 bp, Homo sapiens
gagaacacaaacattcaaaccatagcaatgagtaaaagatacttatcatagaaaattttaaaggcacaaacataaagaagagtagaaaagaaaaagaatgaagggagaaagaggagaaagaaatcatctgttaagctgccacccaaacataagtacagttgttttatttgttcctttttggcaaacttctataagctctataaacctgtacataaatttttagatcgttttaamcatatctttttattagctatgtgtacttattcttaataaagttgagccataatttacccaatgattgtaaccttatgataacctctcttcataatgtttaaacattctttctcttcatatgacagcaattgtgcttccgatatccatgaaaggagagaacacataataataaaaatgttccattaattcagtgatacgttcaatgagtttgtagatcaataaccagaacaatatgtatacacatttgaaaaattagttagtttaccgatagagagattgatagataataggatgtaaag

SEQ ID NO: 367775 - DNA, 433 bp, Homo sapiens
tgtcagtcattgtcctgcgagttttgctatggytgtagcttataaattgttctaccttcatcccacacttacccctctgtagtctattttcaaccaggcaagtggagtgatactgttggaatttaagctaaactctatcgatgactacccatgtctcttagaatgaaatccaaattctttacagtaacctgaaaaaccctacttcatcaggccttctctacttgtatgatgtcttccctgaccccactgcacctaactgcttcttgctcacttcattgcaacaacattggcctccttgtacttcacacctgctgaacatgcttcagcctcaggacatttgaatttgctaacccttctgcctgaaatactcttcccttagatatctgaaaagttttcttcctcatctatttatgcgtctttggtttaaaatttt

SEQ ID NO: 367776 - DNA, 433 bp, Homo sapiens
tgtcagtcattgtcctgcgagttttgctatggttgtagcttataaattgttctaccttcatcccacacttacccctctgtagtctattttcaaccaggcaagtggagtgatactgttggaatttaagctaaactctatcgatgactacccatgtctcttagaatgaaatccaaattctttacagtaacctgaaaaaccctacttcatcaggccttctctacttgtatgatgtcttccctgmccccactgcacctaactgcttcttgctcacttcattgcaacaacattggcctccttgtacttcacacctgctgaacatgcttcagcctcaggacatttgaatttgctaacccttctgcctgaaatactcttcccttagatatctgaaaagttttcttcctcatctatttatgcgtctttggtttaaaatttt

SEQ ID NO: 367777 - DNA, 535 bp, Homo sapiens
atatatcactctaaaattttaacgtctccattttacagacrataaaactgaggcacagaaattttaaataacttgtttttagtcacaacgttaatgagtggaagcagaaacctaaaacccatgtttatattactttaaagctcatgttaagaccactgctaataatgctagttaatgtaaagcattaaacattaaagtgcataaataatttccacttcaattttatttctgtttataaactcaaagccttcctagtaagaaattcaaaagctcagaagtataaattataatatgaaagagggtttggagtttgctataattctagtaaaaattttcatcctaccgcaaatattcctctgaactcagaagcaagtatgtttataatgattattattatcttcttatctctgctcaggtaatcagtatatgacagcaacttaccttgaaagtgtcattattttttagtgtaaaaaacagatctgtcatggccatcaattcagaataccatcactatgatgaaaacaaactaagccat

SEQ ID NO: 367778 - DNA, 535 bp, Homo sapiens
atatatcactctaaaattttaacgtctccattttacagacgataaaactgaggcacagaaattttaaataacttgtttttagtcacaacgtyaatgagtggaagcagaaacctaaaacccatgtttatattactttaaagctcatgttaagaccactgctaataatgctagttaatgtaaagcattaaacattaaagtgcataaataatttccacttcaattttatttctgtttataaactcaaagccttcctagtaagaaattcaaaagctcagaagtataaattataatatgaaagagggtttggagtttgctataattctagtaaaaattttcatcctaccgcaaatattcctctgaactcagaagcaagtatgtttataatgattattattatcttcttatctctgctcaggtaatcagtatatgacagcaacttaccttgaaagtgtcattattttttagtgtaaaaaacagatctgtcatggccatcaattcagaataccatcactatgatgaaaacaaactaagccat

SEQ ID NO: 367779 - DNA, 535 bp, Homo sapiens
atatatcactctaaaattttaacgtctccattttacagacgataaaactgaggcacagaaattttaaataacttgtttttagtcacaacgttaatgagtggaagcagaaacctaamacccatgtttatattactttaaagctcatgttaagaccactgctaataatgctagttaatgtaaagcattaaacattaaagtgcataaataatttccacttcaattttatttctgtttataaactcaaagccttcctagtaagaaattcaaaagctcagaagtataaattataatatgaaagagggtttggagtttgctataattctagtaaaaattttcatcctaccgcaaatattcctctgaactcagaagcaagtatgtttataatgattattattatcttcttatctctgctcaggtaatcagtatatgacagcaacttaccttgaaagtgtcattattttttagtgtaaaaaacagatctgtcatggccatcaattcagaataccatcactatgatgaaaacaaactaagccat

SEQ ID NO: 367780 - DNA, 623 bp, Homo sapiens
aattttctttttatcaaaactaagcttgagtccagtctggtgcagaaaatacagaagtattagctcagactgtaggatgatatttgaagtcagatggacagaagtgacccctcaagtctagaatattgacaactattgatgagcaagaatggtaaaagcaggagagtactgtcttgcacacacaattttgccaccctttctaatcagctcagttctttaaataaagatttctattgcattgtcatagtgtagccaagagctctatctacaaagtctcagtaatacatgagacattgtacacctccttctactataatktcaagttcatcatgttggacacccttaccttgatggacaaacatctcataaaacaaatgttactcatggttgttcttactattattttatcctgaaaattagtggggaccatttttaacactgttctgccatacttcttataactcactggacccagtttttttcagtgcattatctttctggaattaaaaattcagcttaaaacagtgattagcttaggtgtttttgttgttgctgttgtaagaataaagcatacaccatctactggaagacacgtcagagtagacagactgtagtaacaatat

SEQ ID NO: 367781 - DNA, 623 bp, Homo sapiens
aattttctttttatcaaaactaagcttgagtccagtctggtgcagaaaatacagaagtattagctcagactgtaggatgatatttgaagtcagatggacagaagtgacccctcaagtctagaatattgacaactattgatgagcaagaatggtaaaagcaggagagtactgtcttgcacacacaattttgccaccctttctaatcagctcagttctttaaataaagatttctattgcattgtcatagtgtagccaagagctctatctacaaagtctcagtaatacatgagacattgtacacctccttctactataatgtcaagttcatcatgttggacacccttaccttgatggacaaacatctcataaaacaaatgttactcatggttgttcttactattattttatcctgaaaattagtggggaycatttttaacactgttctgccatacttcttataactcactggacccagtttttttcagtgcattatctttctggaattaaaaattcagcttaaaacagtgattagcttaggtgtttttgttgttgctgttgtaagaataaagcatacaccatctactggaagacacgtcagagtagacagactgtagtaacaatat

SEQ ID NO: 367782 - DNA, 579 bp, Homo sapiens
tctgaaacccatctctctgtttgtgctggtgccatgtctctctaaggctgctcccagccaatgagtggacctgccaggaatattaaggccggcttgtcctgggaggaatgtggactggaggattccctgatggtcttgctgaacctcccctagaatgcatggcagcctagatgcttctgctcagcatccccgttctctctccctatcaccatgtcagatgtgcatttcagtctggtggctcttctagactttccttgtcccctcacaggcattttttctctcataggcattttcccctaataaaatccttgtacttttaactgaatcttgaactctscttctctgaacattcagattaaagcagtctccctggcaagtatttaaaaggccacttcttattgggagtagaaatgaagcctcaggaattttaaactggacttggaagacttgggcactggttcataagggaaatatctgtttgtttaaaccttttattttccattttttttgggaagcctaactcttcctatggaaaatcaccccttccccacttcatgtggtcatgaggtgccccttttt

SEQ ID NO: 367783 - DNA, 611 bp, Homo sapiens
gatccctgaactagataagaaaccacttagccatacccagaatctgtacaatttcttaaggagaagtttgtaccagacacgatcacatatacgttgatatatttcttattccataattgaattcttttattctcaattaattttctaaacatcctaaaatcctatgttaaaaaaatctagatattactctgctagaggtatatttctagcttgagtggatcctaactaaacgacaatagcaggattctgtcattcaaagttagaaaacttaaataaactaccccctatagaatggttcatgtttcactttatataagttcctagagggtcagcagccaatgcccaaaaataagagtgtcaaacacagtgaatatgctcagacaggatggagcatcctcttttccaaaggcctttggtcagatttggtgggacttctaatacctgttctggctttgtttttctatcagatgtaatgacmacaatgcaactgagactctgaaacacagttaaggaaagtaaaaaagatatgtatgatgagatctttcaagttacgctagttgctgtaggaatattgtgatgattaattttatgtgtcatattgaatgggccac

SEQ ID NO: 367784 - DNA, 225 bp, Homo sapiens
ctttctcatcttttaaaaccagcctttttttttcacccaatggatacctcaaccacagccaaaggaaagaaacgaaaaataaaaattactctatcctctgatcttacataagattatctgaagttcacccatgacatattactttatacctacatgactactagaattattatagttatgtrtaatattgacttgtgtccttagtaactgctaatggcaggttcc

SEQ ID NO: 367785 - DNA, 625 bp, Homo sapiens
gagttccttatatattttgtatgttaacctcttaacatttgtatggtttgcaaatattttcttccattttataggtgtattagtctgttctcacacttgtaataaagacatacctgagactgggtaatttatgaaataagaggtttacttgaatcacaattccacatggcaggggaggcgtcacaatcatggctgaaggctaatgaggagcaaagtcacgtcttacatgatggcaggcaagagagcttgtgcaaggtaactgccttttataaaaccatcaggtctcatgaaacttattcactgtcacaagaacrgtatggaaaagacctgccctcatgattcagttacctccctccaggtccctcccatgacacgtggaaattatgggagctacaattcaagtgagatttgagtggggacacagccaaaccattatcaataggttatctcttcaccccgttgattgtttccttttctgcactgaagccttttcatttgatacaatctcatttgtctaattatgcttttgttgcctttgcttttgatgttatatctgaaaaatcattgcacagactaatgtcaagaagcatttctcctaggttttcttctagtaggtttacaattt

SEQ ID NO: 367786 - DNA, 611 bp, Homo sapiens
taacatattaattttggaaggacacaaacattcaattcataatgggggtcaaaccaggagtaagatgaccagttggaggctattgctgctgtacagagagatgcatytgtggtttagaccaggcagtaaaggtggaggtggtgaggaattgtcatttgagggacattttgtgaaggtaaaaccaccagagttggctgctggaatcagatgtaggacatgaagccccttgatatttgatctgaacaactgaattaatgttaatactaggtggaaaagacaaaggaatgagtcagtttgaaggagaaaaggaagagttttcttggattttgcaagtttaaagaacttgacagctacttggacatttatagatgtgttgggaactgtgtcaactgctttcatatacactataccatttgttatattatcctactgatcctatgaggtttgtactaatattattccaaattcatggatcagctttagagaatgaataacccatccaaactcatatagtgagaaagccacagtggcaagatttgaaccaaggctatctgactaaagaactcgcaatcactgttctatacaacttaaaatccttctgatcaagtgga

SEQ ID NO: 367787 - DNA, 496 bp, Homo sapiens
cctgttgtgagaaaactggaactggaaagctgtcagaaattatgggagttctagcttctacttgtctctctgcctcgcacaaacattttaattttgctcacagggtattcctatctcccaatatactctccattcttttctgtcaatttgtttactcataataactgcttctggatgccataggtatgcacatgaattgccakgactaccgcagactcccactactaaacttcgcaccttcaattcccgtagctaactctgctgtttgtttgttgggttttctagttcaaactactcagaaagaaaatttgattggctaagctcatcattttctttccttctgtttttcaacaaagctttataaaaaatatgatttacacaccattaaatgcactcattttaagaatacaagtaataatttttagtaaatttgtagagttgtgcaaccatcatcataacataatctagttttagaacagctccatcaaatgaaaaa

SEQ ID NO: 367788 - DNA, 611 bp, Homo sapiens
taacatattaattttggaaggacacaaacattcaattcataatgggggtcaaaccaggagtaagatgaccagttggaggctattgctgctgtacagagagatgcatttgtggtttagaccaggcagtaaaggtggaggtggtgaggaattgtcatttgagggacattttgtgaaggtaaaaccaccagagttggctgctggaatcagatgtaggrcatgaagccccttgatatttgatctgaacaactgaattaatgttaatactaggtggaaaagacaaaggaatgagtcagtttgaaggagaaaaggaagagttttcttggattttgcaagtttaaagaacttgacagctacttggacatttatagatgtgttgggaactgtgtcaactgctttcatatacactataccatttgttatattatcctactgatcctatgaggtttgtactaatattattccaaattcatggatcagctttagagaatgaataacccatccaaactcatatagtgagaaagccacagtggcaagatttgaaccaaggctatctgactaaagaactcgcaatcactgttctatacaacttaaaatccttctgatcaagtgga

SEQ ID NO: 367789 - DNA, 314 bp, Homo sapiens
acccatccaaactcatatagtgagaaagccacagtggcaagatttgaaccaaggctatctgactaaagaactcgcaatcactgttctatacaacttaaaatccttctgatcaagtggatccatgttttgtgatgtcgaatgcacatgtaatttgggaggactctttaagagaaagatcacaaatttacaactacaaatgagaaaggaaatcatcataaactgtgtayttttaaaaactggcaaatattttaagcattaaagtatctagaaaattaacattccttaaatgttagcaaatggatgaagttttataa

SEQ ID NO: 367790 - DNA, 535 bp, Homo sapiens
tagaacctctccctaggtattccaaagtagccatgtaaggcaaggaccaggagcttcagtttcattcacctcaccatgaattcacctcttaaactggcttctctccaggtagttggggacaccaaagcagggcgaggaggcccatgaggacattaatcccatgtggtgtaacataagagttatctttcctgagtagtcattgaggaaattggttgtctcctcagatgatggaactcacagctcttcaactgtgaggtgagagccaggaggtgaaaaaggacaagactggagaaaatgaccttttctcacaaatttcttaacaactgtttcatraacataataaaactggcattacatttttcttatctctcaatgagtcaataaaataacatactaaatatctattttgctcagctttctattattttaaaatattttcttttgaagtccaagtgtaggtagaaatttaaaatttttctttataattaactaatcaatatttgaaagacttgccgtggctgttctcctactgagg

SEQ ID NO: 367791 - DNA, 535 bp, Homo sapiens
tagaacctctccctaggtattccaaagtagccatgtaaggcaaggaccaggagcttcagtttcattcacctcaccatgaattcacctcttaaactggcttctctccaggtagttggggacaccaaagcagggcgaggaggcccatgaggacattaatcccatgtggtgtaacataagagttatctttcctgagtagtcattgaggaaattggttgtctcctcagatgatggaactcacagctcttcaactgtgaggtgagagccaggaggtgaaaaaggacaagactggagaaaatgaccttttctcacaaatttcttaacaactgtttcataaacataataaaactggcattacatttttcttatctcycaatgagtcaataaaataacatactaaatatctattttgctcagctttctattattttaaaatattttcttttgaagtccaagtgtaggtagaaatttaaaatttttctttataattaactaatcaatatttgaaagacttgccgtggctgttctcctactgagg

SEQ ID NO: 367792 - DNA, 545 bp, Homo sapiens
tctcatctagaaaggtattgttaaagtttctggcaaataagtagaaggttcaaatagagtctctattgaagtcactacttttaaagagtcataggcagagctacaaaacaaacacaggatatagrggggcggtgaggcacttagaaatcgacaatattaagttcctgtactctgaaggaagggccatatacaggaactacgttcatggagagtcacagctcttgcaagagacacagcaccaaagcaatgaggaagtgaggaaaaaaacaccacaacacaggatctcactccttctgccttttgatctcctgctagtgcttttcactagccatctcaactagaagccagccaagaagggaacctgggcggttcagtctgctgtggtcaacacctggggcatagagaaggtcagaggaaggatctggataggaggcaaatacagtggagagttgtcagcacaaaaatagattaagctgcaaatggacacactgcattatttgcatgttaataaagggatgtacctgtttgtggtttaaatatataac

SEQ ID NO: 367793 - DNA, 545 bp, Homo sapiens
tctcatctagaaaggtattgttaaagtttctggcaaataagtagaaggttcaaatagagtctctattgaagtcactacttttaaagagtcataggcagagctacaaaacaaacacaggatatagaggggcggtgaggcacttagaaatcgacaatattaagttcctgtactctgaaggaagggccatatacaggaactacgttcatggagagtcacagctcttgcaagagacacagcacmaaagcaatgaggaagtgaggaaaaaaacaccacaacacaggatctcactccttctgccttttgatctcctgctagtgcttttcactagccatctcaactagaagccagccaagaagggaacctgggcggttcagtctgctgtggtcaacacctggggcatagagaaggtcagaggaaggatctggataggaggcaaatacagtggagagttgtcagcacaaaaatagattaagctgcaaatggacacactgcattatttgcatgttaataaagggatgtacctgtttgtggtttaaatatataac

SEQ ID NO: 367794 - DNA, 481 bp, Homo sapiens
tgagttttaaattagactctttctctgcactcactcactaatccacctcatttcctacatgtatttttatctgcatgagaaattcatgacctcagaatccgacataagccatgtgttttttgtgtaatcccagaagtctcgtaatctaatatctcataaacttgctttgcttttttatatttttgaactattttagatttgcttaatgaacaatgcaaagatatcaggattcgatggcctattaatgcagaaattacgactttattatctttaaaaayattttcaagtttgaaattcaagatttttttaaatgcatgtaacaagaatagattgtaatatattctgtataagtaagaattattttcacttggaagtagggtaagaatacttcacactaaatttcttgcaagttacggagtatggcagatttcagtcatggctagatcccggagctccttcacatcctgtccctctcatcatc

SEQ ID NO: 367795 - DNA, 506 bp, Homo sapiens
tcttgaccttttattttcaggctaggtgcaaattattggatatttatcctgcttggttttctctgtgcttcctggatctgtggtttggtgtctgacattaatttgagggaaattatcagttgttattacttcaaatgtttcttctgttcatgactcttctttctagcattctcattacacatatgctacatcttttgtcattgcctcatagttattcgatattctgttccatttattcagtaatttttctcttcacattttggttttataattttctattaacacattctcatgctcagagattctttcctcagccacgtccagtctcctaatgaacccatcaaataattcttccttctgttaaagtgttcttgatctctagcatttccttttgattctttcttagcatttccatctctytgtttacctgacctatcttttcttacatgttgtgtactttgtccattagacaccttagcacattaatcattatcattttaaattcc

SEQ ID NO: 367796 - DNA, 555 bp, Homo sapiens
tagacaccttagcacattaatcattatcattttaaattcccagtgtgatgattccaatatcgcagccatgtctgagagtggttctgatgacttccttgtctacactgtgttttttgccttttagtatgccttgtaattattattttttttttagcattagggcatttttactttccttttcttcacctttttattttaggttygcagggtacatgtgcaagcttgttacatgggtaagctgtgtgtcactgaggtttggtatacaaatgattttatcactcatgttgtaagcatagcacttggtaggtagttttttgtccctcattcttctcctaccctccacactcaagtagtccctgatgtttattgttctctgtgtactcaatgtttagctctcacttataagagggaacaggtggtatttggttttctattcttgcagtaatttgcttgggataatggcctctagctgcatccatgttgctgcaaaggacatgatttcatgcttttttatgagtatgccttataatttcttgtgatgtagtgggtaaaagg

SEQ ID NO: 367797 - DNA, 429 bp, Homo sapiens
atcaaccaagttcagatgaactgctggagatgaaaaattggcacaaatataggaagtaagttgttttgaaaactcttgagtagcaacttacattttcatttatctattaataaattatcacaacctttcttatattctaacacttattatgcccaaagcaaaaagcaagtggctttctttagctacagctcacattaattccttgtatcagccctgtgaagtargacttggtatcctaatcctaccaataaaggcgggaaattctgccagcgcaagtcccacagctaagaagaagaaagccaagattcaagatcaattttgtctttcttttctactattttaccagttatcctgaaaactgcttttaactttgaaatataaagcatgttgatttgtgaaaattaaaaactgaaccatagtcatcatcct

SEQ ID NO: 367798 - DNA, 425 bp, Homo sapiens
tcttctctcatagtccctacagcctctagtaaagttcaagatacactgctggcatttgcctctgatgtgtgaattgatgtcctaccttcttcagtgctgaacctcaaacttgctttgcacactatatctggcataaactaagaataagagataagagcctttgsccaagtatatcattcaggagactggagttagaaaaaaacaagccactacatcaacaaggctggagttttttattattaaaggagtgtgtgcatacacgtatgtgtgggtagtcatatttattaaatactacccatatgcaagcccagtacataaataactttattattaataataaaaactaatactaatttataactaatactagggttatattttttattatacacacacacacacacacactcacacacatatatata

SEQ ID NO: 367799 - DNA, 508 bp, Homo sapiens
tctatctttattagacttatttttggtaatttttacatatgccaagagcctcagaaatttgaactgatccaagcctcactccacctgaaaggccctgtttatgccagtcagcctgaaactcttctttagaaatagtcactgcaaatgcctagatgccaccacgagggggcctctgtgtcacagataaaattaaggaaatgttcaagacctcacaaattcctttatgtagtgaaagacctgctctgcaggatacttttttttttttttaattatgaagttattgtagaattagagggaataatttcacctatggccaatatactgtcaatgcaatagtacattattttgtggctaatgtagtgttctaatgttctgaaatgtctaatttccattcactgtraagaaacaaagtactatctacaagaactggtgcattatagaggtctttacattacagtgtatcttctgtttccttaatcaaagcaactgtaatgatgacatatattat

SEQ ID NO: 367800 - DNA, 379 bp, Homo sapiens
tgctccattattcattggtatttacaattagaatgccytatttccagatctgattttctttctttttttttttcattttaacttgttacattgaattatatgtcttcattcaagaaaacaatcctactttctctttgtttagtaacattgtttcaattgatgtcttaaattgcgtttatagaagcaatgatggcttggcttggcttggtttggcttggggtttccaatgttttgaatagcatgtaaacaacttaaactgccactccaatcctaatcatttaatggaatgtgatctctctctctctctctcttttttttttcttttttgagacagggtctcgctctgtcaaccaggctggagtgcaatagcgtgatcttg

SEQ ID NO: 367801 - DNA, 379 bp, Homo sapiens
tgctccattattcattggtatttacaattagaatgccctatttccagatctgattttctttctttttttttttcattttaacttgttacattgaattatatgtcttcattcaagaaaacaatcctactttctctttgtttagtaacattgtttcaattgatgtcttaaattgcgtttatagaagcaatgatggcttggcttggcttggtttggcttggggtttccaatgttttgmatagcatgtaaacaacttaaactgccactccaatcctaatcatttaatggaatgtgatctctctctctctctctcttttttttttcttttttgagacagggtctcgctctgtcaaccaggctggagtgcaatagcgtgatcttg

SEQ ID NO: 367802 - DNA, 575 bp, Homo sapiens
aacaaaatcaggctactaccaatcatggaagcagtgtagttctgtagctttgtttagctcagatctttgcttcaaacccatgcacatttttttatgcagccagctttatattttgcttcttcattattttttcagttgcttgcttcttagaaaatcactctttcataacatcaatctctttatagttttttcaaggggaggggggattgataaatttctcagtccttgattggacaaaagaagacagctttaggcccctggtaaccagatggatgaattcaaataactccaaagaatctaaggagtggagacagatagaaggaaggggcatccaggaatgtgtacagatataaagtgggcaaagatctagatatttcagaaaatataaatggaatatatatggaagcagtgaagaaaaattatcaaaagcagtctggaatagataaatctgatttctaaatgcatgtctctatcttcattttttacctactaaatgggcaaagtaggtgcaccacatgaggttgccatgaggattaaatgaygtaatgcacataaagcacttcaaacatgcaagc

SEQ ID NO: 367803 - DNA, 553 bp, Homo sapiens
ccctttttctgtgtgctttgggaatactggacctagggaagaacagaaattaatcatccccgaatttttgcttaatcctcctgtcagtccttcaaggtgcttactattttctcctttggtcaactgaaaragccacatgaagggccaggaatcaaatgtgcaacagtctttttaaaaaacctgtgtccattatttctacattgagatacctccttccaaggcttatagagaaagcttcagggaaggaaacactctaccaaggctccacactcctatgactgttctcactattaccaacattctactcctctcaaagtagttggttctcaaacccagtcctacaaatgcctctcacattcacccccttgatttcatgtattcgctcagcaaacattgaacaggctttctgcttagtgctgaaaatacagcaatgaacaaggcagacagggccctgttgtcttgcagtttacaatctggtaggaaaaagaacaaagtaaataggcctttgtcattttccctttaccctatcacttaatgatagacttttaattca

SEQ ID NO: 367804 - DNA, 553 bp, Homo sapiens
ccctttttctgtgtgctttgggaatactggacctagggaagaacagaaattaatcatccccgaatttttgcttaatcctcctgtcagtccttcaaggtgcttactattttctcctttggtcaactgaaagagccacatgaagggccaggaatcaaatgtgcaacagtctttttaaaaaacctgtgtccattatttctacattgagatacctccttccaaggcttatagagaaagcttcagggaaggaaacactctaccaaggctccmcactcctatgactgttctcactattaccaacattctactcctctcaaagtagttggttctcaaacccagtcctacaaatgcctctcacattcacccccttgatttcatgtattcgctcagcaaacattgaacaggctttctgcttagtgctgaaaatacagcaatgaacaaggcagacagggccctgttgtcttgcagtttacaatctggtaggaaaaagaacaaagtaaataggcctttgtcattttccctttaccctatcacttaatgatagacttttaattca

SEQ ID NO: 367805 - DNA, 514 bp, Homo sapiens
agttgagtttgaagagcaagttataaaagaatatattcaatatgatttattttatccaaagttcaaaaactggcaaaactaaacattatattgtttgggaataaccatggcaaaatcctcaggacagatagagaatgattaacataaaatttatgatagtagttttttttttttaatgagagagtttaagacggtgatgtaatccattagacatacacagagggcttcacctgtgctgacaatgttctatttgttaaactgcacggtgaatactgggctttttatattgtttttatttttaaattataagtatgcattctattgttacagtaggtagctagtcagacgtgagcagggcaggagagggctccccaccaccaggaatgtcaggcggagtgtgaatcttttgttttggagagaggggatgccatttgccctgatcacttaacagccttagctcctgtcctccttattccgctytcagttataaaagactgaagaggctaacctgagg

SEQ ID NO: 367806 - DNA, 622 bp, Homo sapiens
gagactgggtaatttataaaggaaagaggtttaattgactcacatttccacagggctggggaggccacaggaaacttacaatcagggtgaaaggggaagcaaacacttccttcctcacatggtcgcaggaaggagaaatgcagagcgaggtggggaaaaccccttataaaacaatcagatctsataagaactcactcactatcatgagaacagcatgggagaactgcccccataacctagtcgtctcccacgaggttcatcccaccatatgtgggtattatgggaactacaattcaagatgagatttgggtgtggtacagccaaaccatatcagtgtgtatgtatgtatatataatacatgatattacactacctgtgttatactaaaatatggcattacatatttacactagaagtctctcctgctggaaccccttgtgggcaggaactttcttatcatctggtttattagttccagattgtcaagcagaaacatgaactgtacaaatgggtctttggtaacctcactctgacatactctgctgtctctcctagcccagacatgaggagtctacgtgtttagaaatgcccctctggagaatagatgtattgaaaggaaaag

SEQ ID NO: 367807 - DNA, 622 bp, Homo sapiens
gagactgggtaatttataaaggaaagaggtttaattgactcacatttccacagggctggggaggccacaggaaacttacaatcagggtgaaaggggaagcaaacacttccttcctcacatggtcgcaggaaggagaaatgcagagcgaggtggggaaaaccccttataaaacaatcagatctcataagaactcactcactatcatgagaacagcatgggagaactgcccccataacctagtcgtctcccacgaggttcatcccaccatatgtgggtattatgggaactacaattcaagatgagatttgggtgtggtacagccaaaccatatcagtgtgtatgtatgtatatataatacatgatattacactacctgtgttatactaaaatatggcattacatatttacactagaagtcwctcctgctggaaccccttgtgggcaggaactttcttatcatctggtttattagttccagattgtcaagcagaaacatgaactgtacaaatgggtctttggtaacctcactctgacatactctgctgtctctcctagcccagacatgaggagtctacgtgtttagaaatgcccctctggagaatagatgtattgaaaggaaaag

SEQ ID NO: 367808 - DNA, 622 bp, Homo sapiens
gagactgggtaatttataaaggaaagaggtttaattgactcacatttccacagggctggggaggccacaggaaacttacaatcagggtgaaaggggaagcaaacacttccttcctcacatggtcgcaggaaggagaaatgcagagcgaggtggggaaaaccccttataaaacaatcagatctcataagaactcactcactatcatgagaacagcatgggagaactgcccccataacctagtcgtctcccacgaggttcatcccaccatatgtgggtattatgggaactacaattcaagatgagatttgggtgtggtacagccaaaccatatcagtgtgtatgtatgtatatataatacatgatattacactacctgtgttatactaaaatatggcattacatatttacactagaagtctctcctrctggaaccccttgtgggcaggaactttcttatcatctggtttattagttccagattgtcaagcagaaacatgaactgtacaaatgggtctttggtaacctcactctgacatactctgctgtctctcctagcccagacatgaggagtctacgtgtttagaaatgcccctctggagaatagatgtattgaaaggaaaag

SEQ ID NO: 367809 - DNA, 447 bp, Homo sapiens
ggaggagtgcttgaggccaggagttcaagacaagcctgggcaacatagcaagatcctatctatctctacaaaaaattcaaaaaaaaaattaactgggcatggtggcatgtacctgtagttccagctactaaggaggctgaagtgggaagatcacttgggcctaggagttcaaggctgcaatgagctatgattgctactgcactccagcctaggcgacagagcaaggtaccctgtctcaaaaaataataataataaaatcctgtttccaggttactgaggatactaaatctgccaaagaaaatccttctttgcctacctagcatggagaagggctatttctttctttgacatggctcctcagaatgcatrgagatttggagctgtgttgtctacactggatgtgtgagagtgattggtaatctggaggctgactacacttcaggcctg

SEQ ID NO: 367810 - DNA, 493 bp, Homo sapiens
atgttggaaggccaccctgccagatgttccacattattagttgagttgaatgaactcattatgcctaatgagaatgaatttgtgtcattttattgacataaatttaccagtaaaatgtagatctaagtaacagaatggtccctttgcacatagttttagaagctttcaacatgtttccataataaattacttaattggcaccttctgtcattctggtgacattttgcgtactgaacatgtaactagttttgattgttgatgctttatcattgaatcataaggtagacattccaaaacactgtaccatgtttaagtcatttttatatgatcttagagcatattcattctttctacaaacattaggagcatactgtgttaattcagagaaacagagaatggaacaaaaccaatttcacttccctaacagaaattttaacaagtgtgarcctcctgcatgcaaagtagtacactcggccttcttccattctttggg

SEQ ID NO: 367811 - DNA, 410 bp, Homo sapiens
aattgaattatcaggcctggccacactggggcaatccagcctgttgcatttgaggcttcggttcacttatttacaaaagggcccagagcctcccccttctttctctaaatccggaaagagtttggaagtggctgacagctgtgtcttccttctggcagcccttatattttctctttacacgaaactcaaaagaaatcctctgtcagaaggaaaaagtggaggcagaggaggtgggataatgtgaccaacagctaagctcccatccttgacacaggcttaggcggtgatccgggctgagacaaggrttggtgagttaccttagagaagcctcttctaaatgctcagactcactgccaactggaaggatttgactttgaatacttctggaatcctcccctccttgttcttga

SEQ ID NO: 367812 - DNA, 549 bp, Homo sapiens
tcagagtgcagtggggaggtagtgggatgcgcaggtgaacatctgaaattccaaagggggccaaagatgaccaaacctcacagcagctggacacaagcagcagcaacaatttctctggggtgtttatgatggcattttaaaaaaatgtttgcctgatgcctgagaatggaaatgtgaatgcaaatcttctgggagacaagaagaggaccaacctatggagagagaagtctgaatggagaggatatgccttaaggctcctgaggagtctgcaagtattttgggaagacaatgtaaatattcttttttccccatcatcatcacaccttctttagcagagagatttatagtattctttgcaatcattgtcttgactcccaaggctgaaaatgttacccaacctgtggatgccrgtggcacctaatttaatgtttagtaattatctactaatccatttcctgtctggaggacagaaactgtgtctcattcaccaataaaaagcgatcatagcaatagatactgggtatttccagtaccctaaaccctgcctgg

SEQ ID NO: 367813 - DNA, 591 bp, Homo sapiens
gcccagtcaatgcaaacgctaactgggcaagagcaaaggccatgacaatagttttttggaatgttcaatgtgctttgcttgtaggctttctgaaagcccaaagaatgataatatttgcttattatgagagtgttttgagagttagtcaaagctttagcagaagcagggaaccttcaccaaagagttcttctccaccacgacaatgttcctgctcattcctttcatcaaactagggcaattttgtgagagtttcaatggaaaatcattaggcactcaccttacaggtgaatgatttgggttattcttttattttttcmtttcttaatcttaaaaaatttttaaaggacacccatttttcagctaatcatttaaacaaagatggcattgacatggttaaattcccaggatgctcagttctttagggctatactaaatggctgatatcactgcttacaaaagtgtattgaacttgatggatcttatattgagaaataaagtttatattttttattttatcttttattcaagttttccgtgaattttttgagatcctctcatatacatgtctatattacagtggtgatattatac

SEQ ID NO: 367814 - DNA, 539 bp, Homo sapiens
aacccttgctcttaacctataggcatgctgatctgtatgttgtagccatcaggatattttgctgtgtcagtgattacccatttacaatggatgaattcactaagttctaagtattagccttccctgattttcaaagatcctttttatctttattaggtagaagacttgaaggagatgccatttatgtgggagcttgaagggatcctgcaacaggcactgaagttgatttggtttcagattttktcagtgtctggatgaattattttcttgaatgaaacactctaacctcaaaagagcaactcacagtagttcacaaagcatatagagcctaggtagtagatcgtctatgccctacctgtaggccaacacgctcagaggggacccctttgcatctgatcccaccttttactttatctgtttgtgcttacaagaattttcatccttcagtttctaagtgcagatgtctttcagttgcattgatatgtctgggctcagaaccacatggtctaatacaatgaacactgcactagaagttccaa

SEQ ID NO: 367815 - DNA, 559 bp, Homo sapiens
ttgctttttaatgcgaaattttcctagttctaactgataactaaatattttcttaaaaattatacagtctaaagaaagtacatctgtaggttccgtttcttgttggtaatgatctggggaccatggtctggatgtctcaagatcccatgcagctctgacttctatgtttctatgagcatttgatatgtgggtaataaaaaaattgaagttccctggggagagaccactgtgggctgtagtctaggaagacttcctggaggagsagaggcctggagtgagttcttggatattcttaccagtaagcatgcccttatacaatacccttagtccatcactggcagctttttcctttgcttgcccccatgtgtctgcaaatactggtcggagagtgccagcattgtttataatcaagggtggggtttgcctgggccaaaagctgagtttgtttagacccaaataaggcatcccattgacagcctctccagagtaacttggaggcaagtcatgactttcagatgcgggtggtgttggggggatcttgaaactgctcaagaaaaat

SEQ ID NO: 367816 - DNA, 636 bp, Homo sapiens
gatgtcctccctaagtcatttctgtaaaacataaaatctccattctaggcagggtgccatatttttccttctctgcacccaatgagagagtgcttccttctccctggccatttgcagggaaaatgaagccaagatcccattttagtacaaatgctcaacttttatggaaatgtgtttggataatttacaaagracacccctcctcttccactccagttgagaggttttagaaactcagggggttcttttcactgcttcctaccccaattctttgtagactggcaaagaagcttcctctccctcactcctcagcaccccactgattctacaatgtctgggaggccatcagcatttaaacaaaaaatggtcctcatctgaaaccacagaaaccctatttagcacaatcaggactagagagtcatttagagagcaagcgccttcattataatgtgtgaagcagagtctcaactgactatggaagccttcagccttgaaggaagagaggggctgggaagacagaaagcaggagggacagtagaacatataagccattttcccaacttgggaggtatatttaacatcggcagaaagcaatcattgcaaaatgtgtatgtgtttatttatttattggattga

SEQ ID NO: 367817 - DNA, 636 bp, Homo sapiens
gatgtcctccctaagtcatttctgtaaaacataaaatctccattctaggcagggtgccatatttttccttctctgcacccaatgagagagtgcttccttctccctggccatttgcagggaaaatgaagccaagatcccattttagtacaaatgctcaacttttatggaaatgtgtttggataatttacaaaggacacccctcctcttccactccagttgagaggttttagaaactcagggggttcttttcactgcttcctaccccaattctttgtagactggcaaagaagcttcctctccctcactcctcagcaccccactgattctacaatgtctgggaggccatcagcatttaaacaaaaaatggtcctcatctgaaaccacagaaaccctatttagcacaatcaggactagagagtcatttagagagcaagcgccttcattataatgtgtgaagcagagtctcaactgactatggaagccttcagccttgaaggaagagaggggctgggragacagaaagcaggagggacagtagaacatataagccattttcccaacttgggaggtatatttaacatcggcagaaagcaatcattgcaaaatgtgtatgtgtttatttatttattggattga

SEQ ID NO: 367818 - DNA, 569 bp, Homo sapiens
gatgaaaaaggcagtattactgtcctcaaggagattcatctaatggtggactcaaacatagcaaagacygttgacagcttactcagcatctgtagccccttcctccttcttaacagacccctgctcttgttcagttatctgccttctgccacttatgggtccaaggacaaggtgaccccattcctggcttgaagattgtgcatgacagttctaaggggaaccccttagccttgccagggattagtgcaggaacccaggcctgagagggtcagcacccagccttcccaattaaaagactgactcagaagcagccacatgacctctaagagttcaatgagataaagagggaaagtctgctgtctctttctctggccactggatgtagtaaaatcattacagccaacttggagatgaagccagcacctagaggatggcagggcaagagaatcacagagaaactcagcagaagcacccagattaggtcagccctgcagcccaatcaacctgtgcaatcccagcaacaagagtctagattttttgcccattatttaaacccctttgagctggtc

SEQ ID NO: 367819 - DNA, 569 bp, Homo sapiens
gatgaaaaaggcagtattactgtcctcaaggagattcatctaatggtggactcaaacatagcaaagaccgttgacagcttactcagcatctgtagccccttcctccttcttaacagacccctgctcttgttcagttatctgccttctgccacttatgggtccaaggacaaggtgaccccattcctggcttgaagattgtgcatgacrgttctaaggggaaccccttagccttgccagggattagtgcaggaacccaggcctgagagggtcagcacccagccttcccaattaaaagactgactcagaagcagccacatgacctctaagagttcaatgagataaagagggaaagtctgctgtctctttctctggccactggatgtagtaaaatcattacagccaacttggagatgaagccagcacctagaggatggcagggcaagagaatcacagagaaactcagcagaagcacccagattaggtcagccctgcagcccaatcaacctgtgcaatcccagcaacaagagtctagattttttgcccattatttaaacccctttgagctggtc

SEQ ID NO: 367820 - DNA, 569 bp, Homo sapiens
gatgaaaaaggcagtattactgtcctcaaggagattcatctaatggtggactcaaacatagcaaagaccgttgacagcttactcagcatctgtagccccttcctccttcttaacagacccctgctcttgttcagttatctgccttctgccacttatgggtccaaggacaaggtgaccccattcctggcttgaagattgtgcatgacagttctaaggggaaccccttagccttgccagggattagtgcaggaacccaggcctgagagggtcagcacccagccttcccaattaaaagactgactcagaagcagccacatgacctctaagagttcaatgagataaagagggaaagtctgctgtctctttctctggccactggatgtagtaaaatcattacagccaacttggagatgaagccagcacctagaggatggcagggcaagagaatcacagagaaactcagcagaagcacccagattaggtcagccctgcagcccaatcaacctgtgcaatcccagcarcaagagtctagattttttgcccattatttaaacccctttgagctggtc

SEQ ID NO: 367821 - DNA, 605 bp, Homo sapiens
tactgagggtctgaaaaatgtaagtgaaggacaaagaattcaagattaggatggagctggggtgtactcacgtcacgggccacagatacctacagtcatcccagtagcattctcaaaaatcagggttgtgtggtcgccccttgtcgtcggcactkctttcctgtctgactctgcctgccactttctcttgccattgggactgcagtggatactgtggtgtgatggcaagagccatggatgtgccaccctcttgtaactcaatctgtgtgacttgaagtaagtcgcggtggagccaagatggccgaataggaacagctctggtctacagctcccagcgtgagagtcacagaagacaggtgatttctgcatttccatctgaggtaccgggtttatctcactagggagtgccagacagtgggtgcaggacagtgggtgcagcgcaacgtgcgcgagccgaagcagggcgaggcattgcctcactcgggaagcacaaggcgtcagggagttccctttcctagtcaaagaaaggggtgacagatggcacctggaaaatcgggtcactcccaccctaatactgtgcttttccaacgggcttaaaaaaacag

SEQ ID NO: 367822 - DNA, 605 bp, Homo sapiens
tactgagggtctgaaaaatgtaagtgaaggacaaagaattcaagattaggatggagctggggtgtactcacgtcacgggccacagatacctacagtcatcccagtagcattctcaaaaatcagggttgtgtggtcgccccttgtcgtcggcacttctttcctgtctgactctgcctgccactttctcttgccattgggactgcagtggatactgtggtgtgatggcaagagccatggatgtgccaccctcttgtaactcaatctgtgtgacttgaagtaagtcgcggtggagccaagatggccgaataggaacagctctggtctacagctcccagcgtgagagtcacagaagacaggtgatttctgcatttccatctgaggtaccgggtttatctcactagggagtgccagacagtgggtgcaggacagtgggtgcagcgcaacgtgcgygagccgaagcagggcgaggcattgcctcactcgggaagcacaaggcgtcagggagttccctttcctagtcaaagaaaggggtgacagatggcacctggaaaatcgggtcactcccaccctaatactgtgcttttccaacgggcttaaaaaaacag

SEQ ID NO: 367823 - DNA, 605 bp, Homo sapiens
tactgagggtctgaaaaatgtaagtgaaggacaaagaattcaagattaggatggagctggggtgtactcacgtcacgggccacagatacctacagtcatcccagtagcattctcaaaaatcagggttgtgtggtcgccccttgtcgtcggcacttctttcctgtctgactctgcctgccactttctcttgccattgggactgcagtggatactgtggtgtgatggcaagagccatggatgtgccaccctcttgtaactcaatctgtgtgacttgaagtaagtcgcggtggagccaagatggccgaataggaacagctctggtctacagctcccagcgtgagagtcacagaagacaggtgatttctgcatttccatctgaggtaccgggtttatctcactagggagtgccagacagtgggtgcaggacagtgggtgcagcgcaacgtgcgcgagccgaagcagggcgaggcattgcctcactygggaagcacaaggcgtcagggagttccctttcctagtcaaagaaaggggtgacagatggcacctggaaaatcgggtcactcccaccctaatactgtgcttttccaacgggcttaaaaaaacag

SEQ ID NO: 367824 - DNA, 582 bp, Homo sapiens
ccattgttagagagtttacagtttcacctccccaagcctcaggtttttcctccatgagggaccaaatatagattctctggcctctgagtcctttatttttcattgcttcctttctaagtgaatcaggtatccatggaaacaaccgaagattaatactcaaaatagacaatcattcatttctctctgaaccatacagcaaaaataaagattgttttagccacartttgaattcttgcaacaaattatgaagttcagttgcacaatataggtagaaaggaagaggctatccctctaaacatttttttaaaaaaatatctgagtgtaaaaatcacagaaggccagaaacagtatgtttatcttaggtagaagcatcagctttcatgaacactggatctggtcacttaatgaaaccttttaaaattaggtgctgtttgacttcaatggaactgaggtgccaactgtatttttgtgctagtggtgacccagcttgccaaagctcccctactgtgacctgggccctgtacctacagcagttgtaggtaggttctagcctgctatcttgtttgcactctttgtgaacca

SEQ ID NO: 367825 - DNA, 582 bp, Homo sapiens
gcccatgctattaaaacaatttcatgctcatttgtgaatttttgaagatctctyttacggcattaatgctttcactagaacatgacagaggagtttgtaaaccccaaaagagtaaactacttgtaacaaataattgaaagagagagaatgactttttattactggattgacctaaatttggaatcagagaacagggctgaagatagagcatgtcagctctggaaggcatcaaaaggagaaccagtttgcttatctgaggaatttttttttttttttttttttttagacagtctctatctgtcacccatgctggagtgcagtgtcacaatctcggctcactgcaacctccacctcccgggttcaagtgattctgctgtcttagcctcctgagtagctgggattaccgtacacaccaccacacccggctaatttttgtatttttagtagagacagagtttcgccatgttagccaggctggcctcaaattcctgatttccagtgatctgcctgccttggcctcccaaagtgttgggattacaggcgtgagccactgctcctggccaggaatggatattttcagga

SEQ ID NO: 367826 - DNA, 540 bp, Homo sapiens
tatttaatgaaaggggtagaatctgtaattgtctactctgaatatgatcagtattgtaatgtatgtgagacaagaagacttgcaggatatgtatcaaagtattagtattgatcacattagagcaatgagattactttcttattgttcctctttgttcaaatgatgtacaatgagcatgtattactgtacaatcagagggaaaaagcctagcaattttttcttatggaggatggaggggatattccattataaaatgaatttcctaaggttgctgcaaatcctgctttagggaarttgatcttgatggccttgttctcacagcaccccaccccacatagcaccaatgtgagttgtgttatcctattgcattaaatgttcaccccaaggttaaagagaaatagagaaagaaaggatttcctgcaggactgggccacttatttataagtcccttgtcagatgcccttgagatttcaaggtgttaaaaaggggcctccctgcttgtgccattaccaggtaagcagagtcttgacctctgatgta

SEQ ID NO: 367827 - DNA, 615 bp, Homo sapiens
catattcttactcataagtgggagctgaatgatgagawcacgtggaatcattgtgggtggggaggaaaaatacacactggagcctgtcagaggattggggatgggaggagggagagcatcaggaagaacagacaatggatgctaggcttaatacctgggtgatgggatggtctgtgcagcaaaccaccattgcacacatttacctatgtaacaaactggcacattctgcacatgtacccctgaacttaaaataaaagttggatattttaaaaaagaatacatgattagagagagagagagagacagagagttcatacacacattcacacatgcatccacacatgtacatgcattgtttattgtagctcttaccatggaaatagtagcaatgagcacctctagaatccatattatgatcactaattcaattccacagtgaaaggaactagagattcctagaaaaatggcaaatttcaggtctgaggcaatcacccccctccccccaaaaaaatgataatacaagatgaactaaaggcctttcattgtgctaaaaagcaaagaaactttcaaagtttactactgtaacataaaaaagacccaggagccaacttacaa

SEQ ID NO: 367828 - DNA, 622 bp, Homo sapiens
ggcctagtgctccgtccagctttcttacaaagtaagcatagttgggattgggtttttgtgctatgcagcttcatctactttggcaaataacaccttgaggcttatttgcaaggatctttcccaagtcacaaaggatagcagcacagtgcagtggttagaaatgcacgttttttattattccttttacacaagttcaactcccagttctgttgcttcttacttgggaccatagaaaaagcatctaagctttctacacatcggtatctttgtttacatatggtgataataataaaacctgcttcatagaggagatgctctgtggaattgcccagyatagggcttagcataatgaaagcattcagtaagtgctactactattgtttactattattgtccagcatttactagagtcactaactaaaccatctggtcccagttctgatatgtttttctcccaggaaggctttgccaacacagccctcccaccctagtctggattgagtattcttccttggtgtattccgcagcccgtgttcttcccccataagagtgaaaatcacccaggcttgaaggaagggactatgtctgctttgtttattgtatctgacatagaacctggcac

SEQ ID NO: 367829 - DNA, 506 bp, Homo sapiens
cctgtaaatacagattgggcaagctcagaaggacacatctaacactggtgatcacccacgtgtctaggtgacttgcacaccacttgaatttttggttgccttcagacctcctactagagccattaacatttttattaatttttgtattctttattttttgctgccctttagcaaaatattttgtaactcttacagagaagaactggtatgttcatgggagtctrttatattcgtacttctgatctgagcttaatggcaccaatttcatgaggaagtaacttctctaatcctttccaggggcagatagtatacactgagagtacttgggtttttaatctgggtaacattgcaggtctttcaacagaggtgcgccttggtctgtcctagtttgagcaggaaggccccactgctgtgttgagaatagacagaagctggataaggggagaaataggaaggccagtcaggagactattgcaaaaatccagacagaagatgatgagggctta

SEQ ID NO: 367830 - DNA, 459 bp, Homo sapiens
aataatagtttttatatcacaaacatgttgaaataatatttttaaactattgggttgaataaatatattatgaaaattaatttcacctatttcattttactctttcaagtgcttactagaaaatttaaagttcacacgtggttcacattatatttattttggacagcagcactctctgcccagtgcctttctccccacctcagaatgaaaagctaggggaacaggagggagcatgtgcagggaagccccctcccatcaggcctgaagtgcaagtaggcctgtcyctgttcctgcctcactcttcctggaaagcctggatctctgcatctgagcaccttgctgccctggtctgttgcgagcatgtcaaggaggtaaacagggttactacattgtgagccaatgtcttggtcttatttattgttaatgttctctctggttttacagatgagggggccaaag

SEQ ID NO: 367831 - DNA, 623 bp, Homo sapiens
ggtacaagtggtttattgggtgaaatgcctcagaaagaaaaaaggaagagggagtagaagtagacagggaaggcctttagactgccatgttgatctgatccctgtaaaaggaaagagggaggacaggaggcgcgaagagcctcagtctgcaatgcaaatgtgagaaatttccggtcgtccacactggtgagtgttgttaaaataatcgcctatataggtgtctcaatctcgcccaacacagcaagcccatcctcagccaccattgtgctcagtgctgggacttgtctgtgagtgcacagcctcaggtttaaagctgaggccaattctgaagacatctccagcttactgcactccccattggacggttctcactttgagggaagacctaagtagtatactttatggctgctacaaaggacaaagtgccaaaatcagccaagacacttttgatgatgamgtccctacccaggtgcagtggagacttgcccttctgaatatcaaggcttattataatgaagctaaagtaatcaagatattgtaattttgatacatacatagataggcagggcaatgggacaaaacagggagccagcatcagatctacacatgtatggaaacttgct

SEQ ID NO: 367832 - DNA, 606 bp, Homo sapiens
cgatcaagttggcttcatctccaggatgcaaggttggcacttgaacttatatcttctaagtagagtttaaattagagattttgatattatacagtcaacttgttctttgcaaagaggaaggttttaagtctggatgaactcaytggttgtcctaaggtgatcgacataagcaaaacattaccttattctctcttattctgtggtgctgataatcatacaaatcttactcctgtaagtcacctaataatttttctcacacatgatcctatcccctgtgagcttaggaatacgtatttttgcagaaatatattctatagtttcaaaggcatatcttctaatcagtaacagtagggtgatccactctgcaaaatgtgttaaacttatccacaatcctcaatcttacaacgtttctgtgacatttcctgcagctgagccaacacttggaggccacagatgatcaattatcaaagtccctgcatcattttctctgcatggagtctgaggccaggccctccaagctaattggattttcccacctttcctcagtgtctgtgctaggaaggatgacagtgaaaaccagagagtggaggaaaaatcagcccctag

SEQ ID NO: 367833 - DNA, 626 bp, Homo sapiens
cttgcctccttcttatggggtatcctactacaggctagacactgactcaggagctagaagtgcagtaatgacaggttaaccctgttcaggttgtcaggacacagtagagtcaaataaggaaaaaggcaaatctaataaagtggcaaaatattagaacagaggaaagcacagggttatctgggattgaaatggaaggcttctgcacagggatagaagcagagaaaaccatccttgaccagtaaggaaagaactgggtctcaagatgagcacgagatcagcatgggaggaaaatgaaagaagcagctgtgagaagaaagggtgctccagtaagtaatccaataagtaagattgcacagcccatgccagagcatcacagtgttgaggggtgggcatatcaagattatccacccatccccctgcctgtaccaggaaagccacctaattagggatgtaattgttcccgctccacccttcccttcttctaaatatactttctccatctgtggtgagaaacagccactgtatttggtaccacatagcttgatctcagctagccacagccatgtagacaagcrtgcacatctgacccacaggcagaatattcaatgacatcgaaagtatgactt

SEQ ID NO: 367834 - DNA, 635 bp, Homo sapiens
gagacacaaatgtaaacggtaatatgagaaaaagcaaaaaaaaaaaagactatctagaattaccagtagaaagcataagagatgtaggtagacaagtagacaaagccataggtcagacatagttagcagggagaaaggaacacaaacaattaaagaaactaagctggtagagagatgaaagtaaaaatataagcaatgacagatgtcaaagcttcatgcaagagagaagtctactttcttggtccctgttattgttttttggcattatatgctayttgagatgtagtaaaaaaaaaaaaaaaaaaaaaggatgataacagcaggtaattctgagtcagcatttttgacagtcttctaatcagaatccatattttgaatgtagactaaaccacctcaaaaagggtatttatctagtgatgtgaaaaaaaaacaaataaatgaataggaagcaaataatttaagtaaaaagattaatatctaatttgtctccaaactttctggcagccagagcaaaaagaaaaaccatggtgagttactaaattttattgtcacagtaagaaaagtctcaatggcccagaggagttgagacaggataggaaaagtctcatttcaaacttcaaaatgaatttccacat

SEQ ID NO: 367835 - DNA, 545 bp, Homo sapiens
ttttctcaaatgaaatcctttaaatgtgtgtggtatcacagcagggactgatcagggtgagagtaggggaagcaaaggagtttgctgtttccactatccgcactttctcttcagagtggccatgccaatcctgggggacatgctgaagccaagggcttggtgagtgtgattatcctctccctctgctaattaacccctgcaactgaccccaaagaaaaggcccgagggaagccaagggtcagatcagccaaaggccaagataataaggctgacctttsaagaggcaatcagacttgcatagtgatttgtaaagagggtaggcctgtcttacaaaggtcagctacctcttctgagcagaaatggcaccctaagcatctaacaacgagtgaaggctgcaggggccctaacaggtgggtccatgtgacactggtgagccaggtggctgtcgtacactgacaccctgctggagccccatacaggaatctgacagaatgaaacttccctcaataaaaagacttagaaacttcctccaggtaaatatatac

SEQ ID NO: 367836 - DNA, 556 bp, Homo sapiens
attgtacagggtggacattaygaaatttacagaaaagctcattgctctccaaagtagttataccagtgtgcactacaacaggtagttataagcaatctctttttcagccactggtatttgtcagacttttaaattttgccagtctgatgatggtatttgatatctcactgctgttttcttttgcattgctctcattatgagtgtcgtttctaatatttggtgattgtctctgcctccctcctcaaagtcatcccctaccacccaaccccattactgattgtgcctcagcaaccctgtccttctttaatctccttgttgagtcatagacggttcctgccttagggtttttttattttatattccctctactcaccctctctgtttgaattagtctgtcctccagcagtcagagaactggcctttcttatcctttgggtttcactatatcctcaaagaggcattttataattgtcttcatgtcacctttttacacttttaaaatatggtttatttctctctgaaacagcagaaaaaatcttgatgattttgtgtttaa

SEQ ID NO: 367837 - DNA, 556 bp, Homo sapiens
attgtacagggtggacattatgaaatttacagaaaagctcattgctctccaaagtagttataccagtgtgcactacaacaggtagttataagcaatctctttttcagccactggtatttgtcagacttttaawttttgccagtctgatgatggtatttgatatctcactgctgttttcttttgcattgctctcattatgagtgtcgtttctaatatttggtgattgtctctgcctccctcctcaaagtcatcccctaccacccaaccccattactgattgtgcctcagcaaccctgtccttctttaatctccttgttgagtcatagacggttcctgccttagggtttttttattttatattccctctactcaccctctctgtttgaattagtctgtcctccagcagtcagagaactggcctttcttatcctttgggtttcactatatcctcaaagaggcattttataattgtcttcatgtcacctttttacacttttaaaatatggtttatttctctctgaaacagcagaaaaaatcttgatgattttgtgtttaa

SEQ ID NO: 367838 - DNA, 556 bp, Homo sapiens
attgtacagggtggacattatgaaatttacagaaaagctcattgctctccaaagtagttataccagtgtgcactacaacaggtagttataagcaatctctttttcagccactggtatttgtcagacttttaaattttgccagtctgatgatggtatttgatatctcactgctgttttcttttgcattgctctcattatgagtgtcgtttctaatatttggtgattgtctctgcctccctcctcaaagtcatcccctaccacccaaccccattactrattgtgcctcagcaaccctgtccttctttaatctccttgttgagtcatagacggttcctgccttagggtttttttattttatattccctctactcaccctctctgtttgaattagtctgtcctccagcagtcagagaactggcctttcttatcctttgggtttcactatatcctcaaagaggcattttataattgtcttcatgtcacctttttacacttttaaaatatggtttatttctctctgaaacagcagaaaaaatcttgatgattttgtgtttaa

SEQ ID NO: 367839 - DNA, 592 bp, Homo sapiens
cattctgtttgcacaaatgaataggaaagcctgtataatttggagtttaatgaatcccactttctcacagatgcatgccactatttcaaatatcacctttatcaagaataaaaataatattttgattgttcatctcctttactttccttgtttcattttaatataaaggcacaaaacttgaagagaaaagagagatgttgtttattgaggtctttggaatcctcaacactggctccagccataaaagcaaaaaaggaggagctgtcaattcccctctgtctataaaaggtaattgcatctttaaggcccccaggttgagaaaggccagtacaccaggcttctgcccatggattatctacccacaagggattaaaatgggagcaaaaccaggtgaactgktatcttaaaaaaagagtagtttttctatttatttaactcactggacttttaaaattatatataccagaaactaaatctcagtcctgacaaatgtgttccatgaattaaataattttttgttgagaattacaatgtagtaaaggtgtaaagaattcccagaatttcttgtagaaagccagggaagcagttgtgt

SEQ ID NO: 367840 - DNA, 597 bp, Homo sapiens
cacaattaagccactaaattcacacagtattaatttttcttatgttggtctcatggatactaaatttcttgacaagttaacatttctgctggtcttcctgacactttgatgtttgataagtccactccagtggacttcttagaatgcatgaactcaagaaaagttagaggtctctcatttagtttcacacgtctgttttctagagaattttgcccaacttcacctgaagaactcaaaaaatattacccagcaagtaacgtttcacttcaaatgacagtattaagyccttccttttttagcaattaatcatgtgatgacgagaggagaaggaagtagaatgtgttgagtgcatggggatatgaggaagccctggtttgaagattgaaaattttaaagcagaagagacaagtgtccctgttttttttcctgtagccattgagagtgggaagaccactgttctatcccacatagccaagatgctggacatgggattatgatctgactggacacaactatttcttgaggcagcccacatcgtcttctcctgagtttccctagaagcctagaggagataaaaaagatgacagtggctaagca

SEQ ID NO: 367841 - DNA, 597 bp, Homo sapiens
cacaattaagccactaaattcacacagtattaatttttcttatgttggtctcatggatactaaatttcttgacaagttaacatttctgctggtcttcctgacactttgatgtttgataagtccactccagtggacttcttagaatgcatgaactcaagaaaagttagaggtctctcatttagtttcacacgtctgttttctagagaattttgcccaacttcacctgaagaactcaaaaaatattacccagcaagtaacgtttcacttcaaatgacagtattaagtccttccttttttagcaattaatcatgtgatgaygagaggagaaggaagtagaatgtgttgagtgcatggggatatgaggaagccctggtttgaagattgaaaattttaaagcagaagagacaagtgtccctgttttttttcctgtagccattgagagtgggaagaccactgttctatcccacatagccaagatgctggacatgggattatgatctgactggacacaactatttcttgaggcagcccacatcgtcttctcctgagtttccctagaagcctagaggagataaaaaagatgacagtggctaagca

SEQ ID NO: 367842 - DNA, 509 bp, Homo sapiens
catgagagcttttatctctgccagagaattaccccaggaaggaaacagagttagagagagctaaaatctcagagtagcagcagctgcagccatatcaaaggtgagaattgggccaacaaaggaaaagcagccaaatactccagtgagtgtcagaggataccgtagaacattctgatgtcaagggcagaattatgctttttgatggacacttcccatcagcaaccttggctgctataacccatgatctatgaatcacataatggacaacatactacgatgcctactgggaaatttgagtcaaaactgagttttaaaataacamgtgattgaattaaaggctcatatgagttggagaacaactggattggtctgacagttttccagagttggtgaggcttaattggattctaacagagctacaatctcagcttatattgattctgatgttatccacatctattgagctaagataataaaatatattccactactcagaagagagagtgccc

SEQ ID NO: 367843 - DNA, 604 bp, Homo sapiens
tctgctttaaattccacttcacatctctctcagaatatgctcagatgtatttcctcttatttgttattttttctttgttttatttttaatgagtgttttaaagcaatacattaggtccatttcaacctcaggatcttggaaaaacaaatatatcattcaattttattcttttctaagtattcttatactatcccaaaacaaacaaagcaaaacccctcaacttttaggtcagattttgattttctaaacttagaattttatctctgtcttattgttattctccatatacaaataaaacactttcatatcctagctatcattgttattagtccatttgcattgctataaagaaatgtctgatgctgggtaattcatgagaaaagaggtttaattggcaaacggttctgcaggctgtacaggaagcatagagacatctgcttccggagaggcctcgggaggctgataatcatggcggaaggcaaagggggagcaggcacctcacatggcaaaagcaggagcaagagagagaggggggaggtgccacacacytttaaatgtccagatcttgtgtgaactcagagcaggagctcacttattatcaagg

SEQ ID NO: 367844 - DNA, 602 bp, Homo sapiens
ctcattctttcttatggttgcatagcattctacggtrtatatgtaccatatttcctttatccagtctatccttgatgggcatttaggttgattccatatctttgctattgtgagtagtgctgcaataaactgtttttaaatgcaatactataaggatgcattgctttcatattatgaaaaaataatacatcttttaaaataaaacatatgcaatataaccctaaaatacaaaactcagaccagagggagcagctgcacctataacccaggaaaattccctcagcacttttacttccctcctgagggcctcttcacataggtaatgaacaactatttagggggcttcatagtttacaaagtactctctcaaccattgccttattaagcattcatagcaattcaatacgattatttatttccattttgccgatgagaaactgagacttagagggttaaatgacttaatttctgttgacagtcacaatctgaaatgctgagggcaaaacagagtctcagatgtggctatgatgcagaggagcagcacagagagggcagctcaggacccttgggcagggagggtggaggtacaaaatggagatagc

SEQ ID NO: 367845 - DNA, 566 bp, Homo sapiens
tttaatccttcttgagtggatcagcactttctatccatgagcatggaatattttgccgtttgtttgtgtcatctctgattttttgagcagtggtttgtagttcttcttgtaaagagctgtgacacaatgcctctttggaggtgaaagggccagggaaggaattaataattttgttttcagttactgctgaatgatccagaggaggtaatgagaaattggttggaaatacgtatctgtagctgagaaragagttttaaagttgtagattaatgtaataataaacacattgagggtagataatatggtcaaatgagagagaagaatgtgggagagagagagagaatgaacagactaatctgggaacatcatgagaatgaacaaacaaagaaataagtaaacttgacggagattgagaagaaataatttcaaatgtataaggagaagtagacaaaagcagtatcattaatgccccacaaaaggaatagcttttgaaggaacttgtaaaactggaaaatagctggctgaggcaattgctaaaggatgaaaaaacctactgaggaaaagtt

SEQ ID NO: 367846 - DNA, 566 bp, Homo sapiens
tttaatccttcttgagtggatcagcactttctatccatgagcatggaatattttgccgtttgtttgtgtcatctctgattttttgagcagtggtttgtagttcttcttgtaaagagctgtgacacaatgcctctttggaggtgaaagggccagggaaggaattaataattttgttttcagttactgctgaatgatccagaggaggtaatgagaaattggttggaaatacgtatctgtagctgagaagagagttttaaagttgtagattaatgtaataataaacacattgagggtagataatatggtcaaatgagagagaagaatgtgggagagagagagagaatgaacagactaatctgggaacatcatgagaatgaacaaayaaagaaataagtaaacttgacggagattgagaagaaataatttcaaatgtataaggagaagtagacaaaagcagtatcattaatgccccacaaaaggaatagcttttgaaggaacttgtaaaactggaaaatagctggctgaggcaattgctaaaggatgaaaaaacctactgaggaaaagtt

SEQ ID NO: 367847 - DNA, 618 bp, Homo sapiens
gtgttttccacgcattccttgtcactgaatattctcagcaccaccattttcttcattttgtggtgaagtttaagtaaaataatcaagaaatgaaagtagtcatagaagaattaggatttgaggtttcatttgtaaaaaactaatgcctgtttattacatcttgctttttctccagaaaggaaacactttttaaagggtttatggatcatttaagcattttccaawacagttgtggaaataatttgtgttgtgttaacaaattttccagggtatttttaggaggagccatggaagagttttataaaaataagaagtttcattataatttaaaacatacctttaagccacaaggaaaatactttctcagacccttaagaactatacaggacctatttctgaattgaatataatagtattctattatttttgttcatttagttttgtgattgccaaactttttagcatcttatattcagaaattgaaaattctcagcaagttgtataaaataatattttattatcactctattgaaaagtgggcagtgtcctaactgatggtggctttcacatattgggaatcttgtttagatggtatacttggttggcaaagaaaaatta

SEQ ID NO: 367848 - DNA, 622 bp, Homo sapiens
atgctgaactttaagttgctctctaagtctctgggatagaagtgggcttcatgagtaattatctaatatttattatgaataattaatccaataaatattatgcactatacttttttttgttttgttttttagacagagtctcgctctgttgcccaggttggagtgcagtggtccratctcggctcactgcaatctccacctcctgggttcaagcgattctccagcctcagcctcctgagtatctgagactacaggcgcacatgaccatgcccagctaattttttttttttttggtataattattagagactgggtttcactgcattagccaggatggtctcagtctcctgacctcatgatttgcccacctcggcctccccaggtgctgggattataggcatgagccaccgcacccagccctgcactgtacaatttttgtctttttttcatttgatgccactaaccctttatggaagaagattaagctttgccaagtaatatgtaaatgtatatgtaaaatttctgattccaatgccctcaactatttcaatggttttatatgcctctaaatctctgtattgtataatattttgttcaaaatttattgagtggtattttccta

SEQ ID NO: 367849 - DNA, 622 bp, Homo sapiens
atgctgaactttaagttgctctctaagtctctgggatagaagtgggcttcatgagtaattatctaatatttattatgaataattaatccaataaatattatgcactatacttttttttgttttgttttttagacagagtctcgctctgttgcccaggttggagtgcagtggtccgatctcggctcactgcaatctccacctcctgggttcaagcgattctccagcctcagcctcctgagtatctgagactacaggcgcacatgaccatgcccagctaattttttttttttttggtataattattagagactgggtttcactgcattagccaggatggtctcagtctcctgacctcatgatttgcccacctcggcctccccaggtgctgggattataggcatgagccaccgcacccagccctgcacygtacaatttttgtctttttttcatttgatgccactaaccctttatggaagaagattaagctttgccaagtaatatgtaaatgtatatgtaaaatttctgattccaatgccctcaactatttcaatggttttatatgcctctaaatctctgtattgtataatattttgttcaaaatttattgagtggtattttccta

SEQ ID NO: 367850 - DNA, 603 bp, Homo sapiens
cctgaagtactatgtcttggtaggtaaataacagtgttctagatatggcttcacaatttattaactgcattatcttagctatggtgctgaactgctcctgagtcttggtttaataaaatacaggaggtcaagtaatgcccatctcatggaaggattggaaattcaatgagataatgcatggaaaaaatgtgtgcaaattcgaagcctggagatatactaaagaatgtttttatctttggatctgagtccatttggtgttcctataacagaacatctgaggctggataatttataaagaaagaggtttatttggttcatrattttggtgactgaaagtccaagagcatggcattagcatctgcttggcttctagagacagcgtttttctgtgtcacaatgtggtgaacaggcagaaagaaaagtaggtgggagcaaagtggccaaacatgagacgcaacctcaatttgcaacaacacactttcaccaggactaatccattcctcagaaaactaatccaatctcataaaaagacagtaatctctctttatgacctaatcatctctgtagagtatcacctcccaacattgccacaatggaaattaa

SEQ ID NO: 367851 - DNA, 607 bp, Homo sapiens
aattgacagtgtaaatgacatgatttattactgcctaaaatatctgaattcaaatcctggctttgccactcacacaatttttgagtaaattgcttagcttctctttatctctttgttaatttaaaactattcttttctccattactcatctgtrgaatggaggtacgaatagttttctcagggagttttcaaatggccaaatgatttaaggtatgtgaaatacataacacagtgctttgcttagcacaaaatagttgaacaataaattcttcttccccttatctcccttctgccaatgttgtctcttcccttgaaggatgcgagagcatggatgatctcactacctgattattgatggcctgctttcctgtaaccatctctgaatttaaggattatagatatagaggaggtatgtcacaatgagactagaaggttttctttttagagttaatatattgttataaaaaataggcttggttgtccctgcttgataattcccacagcatcctcctagctacagataaaaggactttctacttcataacaagaagaaggttgtttgatgtcatttgaaaatttttaaagaagcctatggaaggaagtctac

SEQ ID NO: 367852 - DNA, 607 bp, Homo sapiens
aattgacagtgtaaatgacatgatttattactgcctaaaatatctgaattcaaatcctggctttgccactcacacaatttttgagtaaattgcttagcttctctttatctctttgttaatttaaaactattcttttctccattactcatctgtagaatggaggtacgaatagttttctcagggagttttcaaatggccaaatgatttaaggtatgtgaaatacataacacagtgctktgcttagcacaaaatagttgaacaataaattcttcttccccttatctcccttctgccaatgttgtctcttcccttgaaggatgcgagagcatggatgatctcactacctgattattgatggcctgctttcctgtaaccatctctgaatttaaggattatagatatagaggaggtatgtcacaatgagactagaaggttttctttttagagttaatatattgttataaaaaataggcttggttgtccctgcttgataattcccacagcatcctcctagctacagataaaaggactttctacttcataacaagaagaaggttgtttgatgtcatttgaaaatttttaaagaagcctatggaaggaagtctac

SEQ ID NO: 367853 - DNA, 607 bp, Homo sapiens
aattgacagtgtaaatgacatgatttattactgcctaaaatatctgaattcaaatcctggctttgccactcacacaatttttgagtaaattgcttagcttctctttatctctttgttaatttaaaactattcttttctccattactcatctgtagaatggaggtacgaatagttttctcagggagttttcaaatggccaaatgatttaaggtatgtgaaatacataacacagtgctttgcttagcacaaaatagttgaacaataaattcttcttccccttatctcccttctgccaatgttgtctcttcccttgaaggatgcgagagcatggatgatctcactacctgattattgatggcctgctttcctgtaaccatctctgaatttaaggattatagatatagaggaggtatgtcacaatgagactagaaggttttctttttagagttaatatattgttataaaaaatagscttggttgtccctgcttgataattcccacagcatcctcctagctacagataaaaggactttctacttcataacaagaagaaggttgtttgatgtcatttgaaaatttttaaagaagcctatggaaggaagtctac

SEQ ID NO: 367854 - DNA, 614 bp, Homo sapiens
tgcctatggttatgagagagagactgatgatggataagtgtcagagagatggaggaaatgaggccacataccaaggagtataggcagtatctaaaagatgcaaaagggaaggaaagggattctcccacagagcctccagaagagaatgtaaccctgcagataccttgcttattagtccaggtaaatccatgccaaacttctgrtctaatgtactgtcagataatatatttgtgttgttttaagccattaagtttatgttaatttgttagagcagctgtaggaaaccaatacacgtgatatacaaagcctttgaggtttcatgtttgtcttcttctcagcctactttcagggccctggagaacaagatgagagagaaggtctgcggctaatggccaagcttgtttgtgtatagacagtattcacatgggtctgctggtgtatttccaggaaagagacaatgtaattataaggataatgaatacatatctggcgcgtaacttctctaagtctgagtctgcacacatggctgtgaggaggattaaatgaggtgattcccataatagatttttcctgattcctggtgcacaaaaagagtttggtcaaaggtagaaagg

SEQ ID NO: 367855 - DNA, 614 bp, Homo sapiens
tgcctatggttatgagagagagactgatgatggataagtgtcagagagatggaggaaatgaggccacataccaaggagtataggcagtatctaaaagatgcaaaagggaaggaaagggattctcccacagagcctccagaagagaatgtaaccctgcagataccttgcttattagtccaggtaaatccatgccaaacttctggtctaatgtactgtcagataatatatttgtgttgttttaagccattaagtttatgttaatttgttagagcagctgtaggaaaccaatacacgtgatatacaaagcctttgaggtttcatgtttgtcttcttctcagcctactttcagggccctggagaacaagatgagagagaaggtctgcggctaatggccaagcttgtttgtgtatagacagtattcacatgggtctgctggtgtatttccaggaaagagacaatgtaattataaggataatgaatacatatctggcgcgtaacttctctaagyctgagtctgcacacatggctgtgaggaggattaaatgaggtgattcccataatagatttttcctgattcctggtgcacaaaaagagtttggtcaaaggtagaaagg

SEQ ID NO: 367856 - DNA, 614 bp, Homo sapiens
tgcctatggttatgagagagagactgatgatggataagtgtcagagagatggaggaaatgaggccacataccaaggagtataggcagtatctaaaagatgcaaaagggaaggaaagggattctcccacagagcctccagaagagaatgtaaccctgcagataccttgcttattagtccaggtaaatccatgccaaacttctggtctaatgtactgtcagataatatatttgtgttgttttaagccattaagtttatgttaatttgttagagcagctgtaggaaaccaatacacgtgatatacaaagcctttgaggtttcatgtttgtcttcttctcagcctactttcagggccctggagaacaagatgagagagaaggtctgcggctaatggccaagcttgtttgtgtatagacagtattcacatgggtctgctggtgtatttccaggaaagagacaatgtaattataaggataatgaatacatatctggcgcgtaacttctctaagtctgagtctgcacacatggctgtgaggaggattaaatgagrtgattcccataatagatttttcctgattcctggtgcacaaaaagagtttggtcaaaggtagaaagg

SEQ ID NO: 367857 - DNA, 560 bp, Homo sapiens
ctcattgccactgtgttagaatttgggctctgagtmtgctggatgaggagctgttcatcattgctaagcagaggaggagcacagtctggcctatattttgacagcatcaggctggatgctgtgctacatatcgatgcaggaggatgagatctgaaccattgagacaagttaaaagaattgagtagtatatcaaatagtactataaacgtttaaacttcaactacaggttttaaacaaaatgtttgttttggaaatcaaaatctgctttccccaatgaataatttaatacattttgtatagctgaatgtcttttttttctctctctcttgaaataatacaggtaatagatctttcttattcacagctctttgtaaattatctgaaattctgccagcatttaaagctggattaaaatgctggctgcctcgtcctccgttaacatttgctttgttcagaacgtgactactggatagatgaaggatcaggatgattcagaaaagaaatgtatagcatttgcaaaggacttgaatgataaattactgagcattccccaaatgcca

SEQ ID NO: 367858 - DNA, 560 bp, Homo sapiens
ctcattgccactgtgttagaatttgggctctgagtatgctggatgaggagctgttcatcattgctaagcagaggaggagcacagtctggcctatattttgacagcatcaggctggatgctgtgctacatatcgatgcaggaggatgagatctgaaccattgagacaagttaaaagaattgagtagtatatcaaatagtactataaacgtttaaacttcaactacaggttttaaacaaaatgtttgttttggaaatcaaaatctgctttccccaatgaataatttaatacattttgtatagctgaatgtcttttttttctctctctcttgaaataatacaggtaatagatctttcttattcacagctctttgtaaattatctgaaattctgccagcatttaaagctggattaaaatgctggctgcctcgtcctccsttaacatttgctttgttcagaacgtgactactggatagatgaaggatcaggatgattcagaaaagaaatgtatagcatttgcaaaggacttgaatgataaattactgagcattccccaaatgcca

SEQ ID NO: 367859 - DNA, 581 bp, Homo sapiens
tacgccttattcttcaacactttatttttgtttccactttctacagcttgtcttggcagaataatttttagcagaattattcttgattgactgtcaactttattttaagccagtatcttatccatgcctagagcaaaagttatataatgtttcgctaggataactgggagttcagctattggaattcaacaattaataatgaaagtatcaagtcatgagattttccattctctatagggtctcctgtttgtctgactttgaactttgaagattttttagtagacaccagatttcacacttgagtgggttcctgccctcaggtttaaccaatatgctttttctctcagctatagcagatactgttctattttatttgaattcaagtaaaatagggtttggttgggtgtacacattcatcctatgggycttttgttctttttctactatttttaaaggaatatccatatttttgtacggttttatcacagagacaactgcttaagagtaaggattagagcgtgaatcaagggaaagccacaggttctatgaaaactgaaccaccaaacatgattctaggaaat

SEQ ID NO: 367860 - DNA, 528 bp, Homo sapiens
aaccaaggaccctcacagagtccatttcactcccctgttatctctgctggagcaggwgccggtatccatagctgcaagacctgaagacatcacatcgcagaactctttgcagacactccccagtaccagcccggaggacagtagctccactgggtggctagacccagaagagcaaaagcaattactacaatttggctctcaggaagccccattcctaggaaaagggggaaactaccacatcaagggaccaccccatgggacaaaagaatctgaacagtagtgcttgaatcccagatgatccttctgacatagtctacccaaatgagaaagaaccagaaaaacaattctggtaatatgacaaaataaggttatttaacaccccccaaaagttcataccagctcaccagcaatggatccaaaccaagataaaatctctctctgaattgccagaaaaaagaattcagaaggtcaaatattaaggtaatcaaggaggcaccagacaaaggtgaagtccaacttaaagaaacc

SEQ ID NO: 367861 - DNA, 528 bp, Homo sapiens
aaccaaggaccctcacagagtccatttcactcccctgttatctctgctggagcaggtgccggtatccatagctgcaagacctgaagacatcacatcgcagaactctttgcagacactccccastaccagcccggaggacagtagctccactgggtggctagacccagaagagcaaaagcaattactacaatttggctctcaggaagccccattcctaggaaaagggggaaactaccacatcaagggaccaccccatgggacaaaagaatctgaacagtagtgcttgaatcccagatgatccttctgacatagtctacccaaatgagaaagaaccagaaaaacaattctggtaatatgacaaaataaggttatttaacaccccccaaaagttcataccagctcaccagcaatggatccaaaccaagataaaatctctctctgaattgccagaaaaaagaattcagaaggtcaaatattaaggtaatcaaggaggcaccagacaaaggtgaagtccaacttaaagaaacc

SEQ ID NO: 367862 - DNA, 528 bp, Homo sapiens
aaccaaggaccctcacagagtccatttcactcccctgttatctctgctggagcaggtgccggtatccatagctgcaagacctgaagacatcacatcgcagaactctttgcagacactccccagtaccagcccggaggacagtagctccactgggtggctagacccagaagagcaaaagcaattactacaatttggctctcaggaagccccattcctaggaaaagggggaaactaccacatcaagggaccaccccatgggacaaaagaatctgaacagtagtgcttgaatcccagatsatccttctgacatagtctacccaaatgagaaagaaccagaaaaacaattctggtaatatgacaaaataaggttatttaacaccccccaaaagttcataccagctcaccagcaatggatccaaaccaagataaaatctctctctgaattgccagaaaaaagaattcagaaggtcaaatattaaggtaatcaaggaggcaccagacaaaggtgaagtccaacttaaagaaacc

SEQ ID NO: 367863 - DNA, 528 bp, Homo sapiens
aaccaaggaccctcacagagtccatttcactcccctgttatctctgctggagcaggtgccggtatccatagctgcaagacctgaagacatcacatcgcagaactctttgcagacactccccagtaccagcccggaggacagtagctccactgggtggctagacccagaagagcaaaagcaattactacaatttggctctcaggaagccccattcctaggaaaagggggaaactaccacatcaagggaccaccccatgggacaaaagaatctgaacagtagtgcttgaatcccagatgatccytctgacatagtctacccaaatgagaaagaaccagaaaaacaattctggtaatatgacaaaataaggttatttaacaccccccaaaagttcataccagctcaccagcaatggatccaaaccaagataaaatctctctctgaattgccagaaaaaagaattcagaaggtcaaatattaaggtaatcaaggaggcaccagacaaaggtgaagtccaacttaaagaaacc

SEQ ID NO: 367864 - DNA, 470 bp, Homo sapiens
ttgggatagttctagcatgctctggggtatgggkgtggtctcttgttgcctggtatctgatgctggaggcagaggaatattgcctgctggggtacataggtttagtttacatatcgaaggcatgctccttgctggaccatttgttatctctgaaaattggctaggtataggggaagaggaggtagtctctctcccatcccttcaaaggtttttttaagatcataatatatagagaattttaaacacacacacatatataatatttttaaatgctttgcttttaaaaaatgcttttgctattgtgctattgtgcttagcaaaagcaaaacatttaaaaataattcttgagtcaaagagaaaataatataattgtgaaatatttaggaataaatggcaatgaaaacaccacatataaaaaagttgaggaatgcagtgaatgctatacatgtaggggagggcacagttagaca

SEQ ID NO: 367865 - DNA, 545 bp, Homo sapiens
ctcattatccccagctttattgaggtcttctcacacatccctcttcaaatttttggtatccttttctttcgcaatcaatgcccycactttaacgttagacaccctgtaaggtgggaattcaacttgcattgtaactcagccagtcactaaatgagattctgggtttggttttcaggaatctcaccctgtggctgtaggagaaaaggatcttcttcagggtacacatagaagatttcagatcatttatgggccacttgagttgggaatttgagtttctgagctcattcttcttttccaacactttgtccaatgaccataggagcaatcatctagcctcgttacagttgttagtttgattaaaaaaatgtttaaaaatatcatgtataccatcattcacatccttgcctctcataagtggttattaggaatgtccaatggtgatatgttgcatatttctattgccagatgacatcatggactattagttttctgcttactataaaaatagagtaatttatgtctttaaatataatcacattagacag

SEQ ID NO: 367866 - DNA, 618 bp, Homo sapiens
ttccaataggacaccattatgtctacatcaaaaatctgttgttgagtgtagtcaccttcaccaataatcgtagatcgatcttcttgataatttgctgcagctagtgcatcagaactttcagcttcaccttgcacttttatgttaaggatagtgtctttccttaaacmtcatgaacctacctctgttagtttcagacttttcttctgcagctctctcacctttctcagtctttacagaattaaagagagttagggccttgctctgcattaggccttgcattaaggaaatattgtggctggtttgatcttctatatagaccatatcagcaataggctttttgaatttccttcaagaacattttcttttcacttataacttggctgtttggcacaagaagcccaactttcagcctatctcagcattcagcatgcttcctgcatatttaaagtgagagacatgcaactctttcacttgaatacttagagtccattgtaggatttggttggccaaattttaatattcctttgtctcaggtaatagggcagcccacgttgaaagaaagagatggaaaatggtcagtcagtgaatggagcagtcagaaaatgtacaatatttatc

SEQ ID NO: 367867 - DNA, 545 bp, Homo sapiens
ctcattatccccagctttattgaggtcttctcacacatccctcttcaaatttttggtatccttttctttcgcaatcaatgccctcactttaacgttagacaccctgtaaggtgggaattcaacttgcattgtaactcagccagtcactaaatgagattctgggtttggttttcaggaatctcaccctgtggctgtaggagaaaaggatcttcttcagggtacacatagaagatttcagatcatttatgggccacttgagttgggaatttgagtttctgagctcattcttcttttccaacactttgtccaatgaccataggagcaatcatctagcctcgttacagttgttagtttgattaaaaaaatgtttaaaaatatcatgtataccatcattcacatccttgcctctcataagtggtyattaggaatgtccaatggtgatatgttgcatatttctattgccagatgacatcatggactattagttttctgcttactataaaaatagagtaatttatgtctttaaatataatcacattagacag

SEQ ID NO: 367868 - DNA, 626 bp, Homo sapiens
agctacaagccatcaataatccctggagcttaggtgaatgagcttttcagtcttgagtaggagtgggaaagctgatagtatagcagctcatcctccactccctattgcagttctttgccaatcatatcaagatatgaatgggatgcwaatgtgtggttcagttcataattatgcatcaaataatctggtagaagttccaacctggagagcaatgccacagtgttggctaaaacagccttggagctgtgattatggtcaccttttccctgatgtttgactgaaagagctaaaggaggcctgtttccatgtagtcacaaaaacatgacacagagttcagtgaaagggcaggataaggttcggcttggggaaaagttttagctccataaagtcattcaagggtttaaacgccttccattttgtgactccatcctgttcaagatcattagagtttttttttgtcccctactggaaaaaaataggtcattttaatgaacaggactgcacatggcttttatcacttttggtcatattttattgggcataagtaagtttcctgggcttactgagctaaataaggaagtttgtaaaacgtactccagctgtttgttcaggaagtaaagaaccct

SEQ ID NO: 367869 - DNA, 626 bp, Homo sapiens
agctacaagccatcaataatccctggagcttaggtgaatgagcttttcagtcttgagtaggagtgggaaagctgatagtatagcagctcatcctccactccctattgcagttctttgccaatcatatcaagatatgaatgggatgctaatgtgtggttcagttcataattatgcatcaaataatctggtagaagttccaacctggagagcaatgccacagtgttggctaaaacagccttggagctgtgattatggtcaccttttccctgatgtttgactgaaagagctaaaggaggcctgtttccatgtagtcacaaaaacatgacacagagttcagtgaaagggcaggataaggttcggcttggggaaaagttttagctccataaagtcattcaagggtttaaacgccttccattttgtgactccatcctgttcaagatcattagagttttyttttgtcccctactggaaaaaaataggtcattttaatgaacaggactgcacatggcttttatcacttttggtcatattttattgggcataagtaagtttcctgggcttactgagctaaataaggaagtttgtaaaacgtactccagctgtttgttcaggaagtaaagaaccct

SEQ ID NO: 367870 - DNA, 569 bp, Homo sapiens
ataatccctggagcttaggtgaatgagcttttcagtcttgagtaggagtgggaaagctgatagtatagcagctcatcctccactccctattgcagttctttgccaatcatatcaagatatgaatgggatgctaatgtgtggttcagttcataattatgcatcaaataatctggtagaagttccaacctggagagcaatgccacagtgttggctaaaacagccttggagctgtgattatggtcaccttttccctgatgtttgactgaaagagctaaaggaggcctgtttccatgtagtcacaaaaacatgacacagagttcagtgaaagggcaggataaggttcggcttggggaaaagttttagctccataaagtcattcaagggtttaaacgccttccattttgtgactccatcctgttcaagatcattagagtttttttttgtcccctactggaaaraaataggtcattttaatgaacaggactgcacatggcttttatcacttttggtcatattttattgggcataagtaagtttcctgggcttactgagctaaataaggaagtttg

SEQ ID NO: 367871 - DNA, 626 bp, Homo sapiens
agctacaagccatcaataatccctggagcttaggtgaatgagcttttcagtcttgagtaggagtgggaaagctgatagtatagcagctcatcctccactccctattgcagttctttgccaatcatatcaagatatgaatgggatgctaatgtgtggttcagttcataattatgcatcaaataatctggtagaagttccaacctggagagcaatgccacagtgttggctaaaacagccttggagctgtgattatggtcaccttttccctgatgtttgactgaaagagctaaaggaggcctgtttccatgtagtcacaaaaacatgacacagagttcagtgaaagggcaggataaggttcggcttggggaaaagttttagctccataaagtcattcaagggtttaaacgccttccattttgtgactccatcctgttcaagatcattagagtttttttttgtcccctactggaaaaaaataggtcattttaatgaacaggactgcacatggcttttatcacttytggtcatattttattgggcataagtaagtttcctgggcttactgagctaaataaggaagtttgtaaaacgtactccagctgtttgttcaggaagtaaagaaccct

SEQ ID NO: 367872 - DNA, 484 bp, Homo sapiens
cccctaagggccaatcatgcttctactttctctagcatgataagttgaccaacatacgtatgttttttcaaatgtaggataaaatgaagaactgacaaaatactcaattttagaggaaatcaaattaagycagttgtatcataaaatagcacagaagtaagctcaaatagaagctctgccttcaactgcctttgggtaaatcatttgaatttttgagctttaagttactcattgtaagatgtagaagaaagtgctcaccttgcagattacgattgaagttagtgctgtacagtgtcaagcatagaggcagcaaatttgcacaactgctggttttcactcccacacccactgcccaccaattaatgccagattttcttcccaccctagatgtggctctggaatccttcccacactgggcagtaggcaaccactactataagaggaaatctccatttgggataaagtgcagctgacatcctgttac

SEQ ID NO: 367873 - DNA, 484 bp, Homo sapiens
cccctaagggccaatcatgcttctactttctctagcatgataagttgaccaacatacgtatgttttttcaaatgtaggataaaatgaagaactgacaaaatactcaattttagaggaaatcaaattaagtcagttgtatcataaaatagcacagaagtaagctcaaatagaagctctgccttcaactgcctttgggtaaatcatttgaatttttgagctttaagttactcattgtaagatgtagaagaaagtgctcaccttgcagattacgattgaagttagtgctgtacagtgtcaagcatagaggcagcaaatktgcacaactgctggttttcactcccacacccactgcccaccaattaatgccagattttcttcccaccctagatgtggctctggaatccttcccacactgggcagtaggcaaccactactataagaggaaatctccatttgggataaagtgcagctgacatcctgttac

SEQ ID NO: 367874 - DNA, 420 bp, Homo sapiens
tggctctggaatccttcccacactgggcagtaggcaaccactactataagaggaaatctccatttgggataaagtgcagctgacatcctgttacactcccattttctgtctgtawaataagaatagctgtagactgaattgtgtcccccccaaaaaaaaattcatatatagaagcaataacttccaatgtgactatttggagacaggacctatatggcagtaattaaggttaaatgagaattgggccctgatctaataggaatagtgttttgtgagataccagagagctcactttctctgctatgtgatgagacagtgagaaggcagctatcaccaagccagaaagagggtcctcatcagaactcaatcttgttgtcaccttgatcttgaacttccagcccccagaactgtgtgaaaata

SEQ ID NO: 367875 - DNA, 420 bp, Homo sapiens
tggctctggaatccttcccacactgggcagtaggcaaccactactataagaggaaatctccatttgggataaagtgcagctgacatcctgttacactcccattttctgtctgtataataagaatagctgtagactgaattgtgtcccccccaaaaaaaaattcatatatagaagcaataacttccaatgtgactatttggagacaggacctatatggcagtaattaaggttaaatgagaattgggccmtgatctaataggaatagtgttttgtgagataccagagagctcactttctctgctatgtgatgagacagtgagaaggcagctatcaccaagccagaaagagggtcctcatcagaactcaatcttgttgtcaccttgatcttgaacttccagcccccagaactgtgtgaaaata

SEQ ID NO: 367876 - DNA, 578 bp, Homo sapiens
tttgtcaatgaggcacaatgagaaaatgaaggcacagagcaattaaggaaatcaccctgaatcagacagcaatttaaaagtggttgcttcactgcaaagtgttttccaatactttttagaattagtgtgtctttaggagtaaaaaaaaaaaagtcatctgcctaacaaaaaggtgctccccaacctaccctgtgttttaaattgctttagtagcaaaaaacatcattcattttacagtcctgattcaagtcaactcctgcctgactgtcatagtctctaactggtctcctgtgtccagccacaccacctaccaatccattctgctcacatttgcccatgtggtttcttcagaatacagacttaagcccactatccttcaagggtctcctgggtgttagaataagtccctaaygctttcatgtgattcctaagattctctataatccggcctttaccaaatccctttctggactcatctgctgctgctccccttcctgaattttttattgcaggaccacggactctattcttttaaagtaatattggtataaatgtatgagttacaagcacgattttgt

SEQ ID NO: 367877 - DNA, 548 bp, Homo sapiens
aatacatgtatatatattataatattatatataaaatacataaatgatatatattctatataatgctatattatatataatttaatttaattatatttataatatatatttatatattatgtgtgtgtgtatatatatcacaatggggctggcacataaagagtcatataatcgtagctcttgtaattatctatgatatactgcttttaaatgatttgaggtctttttcaaaatattttcttccttgtttttgtaatattttatctaatgtttttcctcctagtttcgtccacatttttcagtctcatttacaaacttctcttttccttagttcttccttcagaatcccgcctccttgtttttatcaccttcagcatctttttgagggctctgagaaacaacaatgcctttccctttccccacagtatcctaagcgcttctagaggataagctccctgcagactttaatagattaatttcaactgaaaaaaaaggtaaaytttaaaaacaatgggataaattaaagtgaagatagtatttgggcccta

SEQ ID NO: 367878 - DNA, 447 bp, Homo sapiens
ggacttaaaacctagatgacgagttgataggtgcagtaaaccaccatggcacatgtatacctatgtaaccaacctgcacattctgcacatgtattccagaacttagagtaatataaattttataaaaaggacaaacagctatttagaaaggacagccactggtcctctgcagcagaggcaaaaagaggtgtgagaatagagaaagggtcaggaacacacacagggactgttaggctgatggaccactcagccaaacaccatgagactgatcctctggctctgaagagttcaagtgagcttaggtgagtcatttctcctgggtcccggtagctgtcctaatgtcaaattcaaatggtacaactgtgttcctttattcttctggcrgttgagtggggctcctcctgtaacaaaagaacctgtagactattctattttccaaatataacc

SEQ ID NO: 367879 - DNA, 541 bp, Homo sapiens
aggttgcagtgagccaaggtcgcttcactgcattccagcctgggctacagagtgakactccatctcaaaataaaaaaataaaataaaaaagcaatttatgtaaccaaaaatgagtaccagctgatgagggaattgcttgagatgagcagggcatgatgaactgatcaaggtgggagctactgaaaggaagttggatctaaacttcaattgagttgggaaggtcaagatacctaaattctaaggtgttttgatggaagtctggtagaatgacaggtggacaagagaatggaagggaagttataatgtgctattcttatgaccctgataaaaccctcccctcttggattgtaggcgatgcaatctaacagcactgagcccatggaaaattttctatagatacatgtcaaatggctgcagggacctccttttcctctgtttggcttctcagtggcaacagagtataatgaaatagtcgtctggtaagttctgaggaggagaggaagaagggctgtgagagtctgggtgcctcaaaagcaaacct

SEQ ID NO: 367880 - DNA, 541 bp, Homo sapiens
aggttgcagtgagccaaggtcgcttcactgcattccagcctgggctacagagtgagactccatctcaaaataaaaaaataaaataaaaaagcaatttatgtaaccaaaaatgagtaccagctgatgagggaattgcttgagatgagcagggcatgatgaactgatcaaggtgggagctactgaaaggaagttggatctaaacttcaattgagttgggaaggtcaagatacctaaattctaaggtgtttygatggaagtctggtagaatgacaggtggacaagagaatggaagggaagttataatgtgctattcttatgaccctgataaaaccctcccctcttggattgtaggcgatgcaatctaacagcactgagcccatggaaaattttctatagatacatgtcaaatggctgcagggacctccttttcctctgtttggcttctcagtggcaacagagtataatgaaatagtcgtctggtaagttctgaggaggagaggaagaagggctgtgagagtctgggtgcctcaaaagcaaacct

SEQ ID NO: 367881 - DNA, 614 bp, Homo sapiens
actgacaggcattttaattgtggctagcataagtaaagctgctataaacattctttcaaaatctttgtgtgaaaataacttttcatttatttaggtaaattactaggtgtagaaatttctggatctttaggtagatggatgttcaaatgccaaatagtgttccaaattggttgtagtattctacaaacctcccccaaaccttcaggacgatatgagaatcccacctgctacacatcgtcaccaatgttgttttgtcagcgtttctaatttgagctcttctggagaatgtatgctctatttaagtttataatttgtatttctctgatgactaaygatcttaagcagtttctttcaaatttttactggtcatttatatatcttctcattgaagtgtatgtaaaaaaaattgtccatttttaaattgaggaattagtcttgttattgatttgtaaaagtttattacatattctgaatgaagtccttacagatatatttactatatattaatgatatattatatattatcaaatatatacacataaacatttaagaagaggttaaaaaagaaaaagtagatataaaatagtctaaaaatgtttaaaactctgagtcat

SEQ ID NO: 367882 - DNA, 563 bp, Homo sapiens
ctttcactaaccctcctttgacctcatatactcctcaaggcttctcagaggtggaaaaaaaaaggaaaaaaaattttgcaaaagttgttgacacctgctgtctgtgcttcccagtctccaatttatttttccagtctttcctatctggtttctgccaaccacatgccatggatattactcttgttaagtccrcagaatgcaaaatcaatgagcagttctgtgtcctagccttacgtgggcatctctgcagcacttatcaggactgggtcaatataacaaagtggtttatgtgggagcaggaaaccacactgcacggattgggatgtcagctctgctgcttattcagacatcctcctctggcggtcatattatctttgtcattccttgaaagttgatttttttcttccccacttggagcctttgcattcgttctttttgcttagaatgttcctttccattttgtctcaatgagatgagccaggtacctcagttggaaatgcagaaatcacccaccttctgcattgatctcactaggagctgcagaccacagctgttcctatgcg

SEQ ID NO: 367883 - DNA, 563 bp, Homo sapiens
ctttcactaaccctcctttgacctcatatactcctcaaggcttctcagaggtggaaaaaaaaaggaaaaaaaattttgcaaaagttgttgacacctgctgtctgtgcttcccagtctccaatttatttttccagtctttcctatctggtttctgccaaccacatgccatggatattactcttgttaagtccgcagaatgcaaaatcaatgagcagttctgtgtcctagccttacgtgggcatctctgcagcacttatcaggactgggtcaatataacaaagtggtttatgtgggagcaggaaaccacactgcacggattgggatgtcagctctgctgcttattcagacatcctcctctggcggtcatattrtctttgtcattccttgaaagttgatttttttcttccccacttggagcctttgcattcgttctttttgcttagaatgttcctttccattttgtctcaatgagatgagccaggtacctcagttggaaatgcagaaatcacccaccttctgcattgatctcactaggagctgcagaccacagctgttcctatgcg

SEQ ID NO: 367884 - DNA, 532 bp, Homo sapiens
agaagacactactttctgcatggcgaacttacaaacaaaataaaataaacaaataagggaggcagcgggccatttgatgaacctcctcagaagactcacagtaactggagaatcaaaattaaccagctgtgcctattcacttttaatttctatctgggttgargtttaatttctgcctgaacacatgctatcttttttattatgaatttttccctgaagaaacatgtgtcctagtcttctgtctcctgcattttttcatagaacttgtgatcccagcatatgaagaggtgtgtgcaaggcagtgtggcattatggctaagcataaagctgttatcagaccattctagacaatcatttgaacaaggcctgactcagagagattttcctaatgtgttaagcctcattttgaaactgaggaaagtattgtcacccatcccatagagttgtggaaaagtttaaattagatgattcatgtaaagcccttgaagcttacctggtctggaataagcaatggttcaatatttgattgctt

SEQ ID NO: 367885 - DNA, 532 bp, Homo sapiens
agaagacactactttctgcatggcgaacttacaaacaaaataaaataaacaaataagggaggcagcgggccatttgatgaacctcctcagaagactcacagtaactggagaatcaaaattaaccagctgtgcctattcacttttaatttctatctgggttgaagtttaatttctgcctgaacacatgctatcttttttattatgaatttttccctgaagaaacatgtgtcctagtcttctgtctcctgcattttytcatagaacttgtgatcccagcatatgaagaggtgtgtgcaaggcagtgtggcattatggctaagcataaagctgttatcagaccattctagacaatcatttgaacaaggcctgactcagagagattttcctaatgtgttaagcctcattttgaaactgaggaaagtattgtcacccatcccatagagttgtggaaaagtttaaattagatgattcatgtaaagcccttgaagcttacctggtctggaataagcaatggttcaatatttgattgctt

SEQ ID NO: 367886 - DNA, 532 bp, Homo sapiens
agaagacactactttctgcatggcgaacttacaaacaaaataaaataaacaaataagggaggcagcgggccatttgatgaacctcctcagaagactcacagtaactggagaatcaaaattaaccagctgtgcctattcacttttaatttctatctgggttgaagtttaatttctgcctgaacacatgctatcttttttattatgaatttttccctgaagaaacatgtgtcctagtcttctgtctcctgcattttttcatagaacttgtgatcccagcatatgaagaggtgtgtgcaaggcagtgtggcattatggctaagcatwaagctgttatcagaccattctagacaatcatttgaacaaggcctgactcagagagattttcctaatgtgttaagcctcattttgaaactgaggaaagtattgtcacccatcccatagagttgtggaaaagtttaaattagatgattcatgtaaagcccttgaagcttacctggtctggaataagcaatggttcaatatttgattgctt

SEQ ID NO: 367887 - DNA, 532 bp, Homo sapiens
agaagacactactttctgcatggcgaacttacaaacaaaataaaataaacaaataagggaggcagcgggccatttgatgaacctcctcagaagactcacagtaactggagaatcaaaattaaccagctgtgcctattcacttttaatttctatctgggttgaagtttaatttctgcctgaacacatgctatcttttttattatgaatttttccctgaagaaacatgtgtcctagtcttctgtctcctgcattttttcatagaacttgtgatcccagcatatgaagaggtgtgtgcaaggcagtgtggcattatggctaagcataaagctgttatcagaccattctagacaatcatttgaacaaggcctgactcagagagattttcctaaygtgttaagcctcattttgaaactgaggaaagtattgtcacccatcccatagagttgtggaaaagtttaaattagatgattcatgtaaagcccttgaagcttacctggtctggaataagcaatggttcaatatttgattgctt

SEQ ID NO: 367888 - DNA, 596 bp, Homo sapiens
ttcatgtaaagcccttgaagcttacctggtctggaataagcaatggttcaatatttgattgctttcctctgcccccatatcattaggatgagtctgactatgatgtttaccactactagarggagcatccaggagggctctctcctctccagtcttgtcacttagcgttccagtttctgactcttcctgaaacttggatgaccatacttcatggaagacatccagggagagactgggctgcccttgttggggaggtggaagaatagagagtgaaccatgtacatatgtttgaaggtctcttccacctttgcgactcaaagacaacaaaaatctgaacaatggtgattaatatatcagctgtttaaaaatctacttcatgtcttgatttcttcctccttgcaaatttcgaactactcctaactaaccaaatgactctaggttggttgggaagagcttggtgtcttcccatcatagaagggacatgtgaagtcagattacatcagctctaaaactcattagagcaccaagaaaccatgatccttcttcccttgctacaaacaaacaaagaaacaaaagaacaagacaatgtgctcgtg

SEQ ID NO: 367889 - DNA, 616 bp, Homo sapiens
gctcaaaatatacgttttaaatactaagcctctatcagttaatttcttctttaaaaaagctttacttccttctaacatgctggttgttgatctatctgttaatgaaaatgaagatagtgctactgctcactgctgtgctggtcagagagttgtgcctgagttctctatataattaattgtttagcctttgttatggcatcagaagtattttagctagctcctcaagttttataaatttttttattctgaaataattttagatgaacatagaagttgcaagaatagtgcagaaagttcccatgtccacttcatttggttttctccaatgatagcatctttcattgccatggaaaccattggcactataccaataacaaaactacagatcatattcagaattcaccagttttcacgtaaactcatttgtacgtgtgtatagttctgacattttactgcctgtatggattcatgtaactgctagcacaatgaatactacctctygatagttacatattcctccaacacttgaaaacctcccaatctgttctccatctctataattttgtcattttgagaatgttgtcatataatatgcaacctttagagattggtattt

SEQ ID NO: 367890 - DNA, 561 bp, Homo sapiens
agcaacacaaatggagtaagaaaggaaccatctgtactataacctctatccgtgccaccagaactgcaytgaaatttatccaccatttcttggcattaagtattactgtcaagaagtagaagtccagacaactctttccccatgtaggtggctcactatttctgcaagggtatcagaaatatgcttttctatttctaccaaacaatcggtaattttattaggacatgacccaatgtagatcaatcagaattttatttctaactatgaatttacttctttcttgctttcaggaaactttcctgtattatacctttaaatatgttttgttctgcacattgaatttactaataaggacaccatttatccttatgttttctaccctttacatttaccctctcctatttgcttaatctcttcatctttttttctgtgcattcttttgtgattatcccaaaactctgttccatgacaaaagaaaaaaattttcagccattttatctctcactctttgtcatttattatttgtcctgtggtgtctgctttaataattgacaaatgtat

SEQ ID NO: 367891 - DNA, 590 bp, Homo sapiens
tttctccctatccttctgatatggtttggctgtgtycccacccaaatctcatcttgaattgtagctcccataatccccacgtgtctgggagggacctggtggaaggtaactgaatcatgagggtgggtttttcccatgctgttctcatgatagtgaatacgtctcacaagggcccatggttttatacagggcagtatctctgcacatgctctgttgcctgctgccatgtaagacatgcctttgctcctccttctccttccaccatgattttgaggcctcccgagctatatggaactgtgagtccactgaatttctttttctttacaaattagccagtctcaggtatttcttcaaagcaatatgaaaatggacaaatataccttccttcatttttctcttctttctctgctgttccttcttcttttcctgccttccatcaccttttcattctttaccatattaatataggcagttattcaaaatataagattctaaatagtgtttgcagaatgccaccttttgtgtaaaatccagggagaataagaatatatacatttgattttgcttatatttctatcaaggttctagaa

SEQ ID NO: 367892 - DNA, 590 bp, Homo sapiens
tttctccctatccttctgatatggtttggctgtgttcccacccaaatctcatcttgaattgtagctcccataatccccacgtgtctgggagggacctggtggaaggtaactgaatcatgagggtgggtttttcccatgctgttctcatgatagtgaatacgtctcacaagggcccatggttttatacagggcagtatctctgcacatgctctgttgcctgctgccatgtaagacatgcctttgctcctccttctccttccaccatgattttgaggcctcccgagctatatggaactgtgagtccactgaayttctttttctttacaaattagccagtctcaggtatttcttcaaagcaatatgaaaatggacaaatataccttccttcatttttctcttctttctctgctgttccttcttcttttcctgccttccatcaccttttcattctttaccatattaatataggcagttattcaaaatataagattctaaatagtgtttgcagaatgccaccttttgtgtaaaatccagggagaataagaatatatacatttgattttgcttatatttctatcaaggttctagaa

SEQ ID NO: 367893 - DNA, 591 bp, Homo sapiens
tcatttattctctggatctcccttacactgctctatttttttttctttttcttgtttccaacataatacataatttattttgtttattgtctgatttctcccactagaatttaaacttgccatgagagcaaagacttatgttgttattatttgtcttattcactgatgtatcccactgatggtacatactggtgttagaccagtatttgttgaatgactaaaacttgaagacaagtaactccattctcaacttttttcttctcctggacaaatgactatttgtgttcatcttttcyccacggagctctcatttaaccctttgacgccctactgccatcttctggattgagtcttggttcgctacacccctcagcctctggcctcacatatggtttacagtgaaacacctatacaacaccctttcatcaagaccataaagtacagcaggagagaataaggatgagatatagtaagaggtatgagatactctaacagctgcattttcaagatagctcaggatgtgaagaggtgtggattttggcaagaatgagaagagggagaagagatgcgtaaagtgggcaaaagagacag

SEQ ID NO: 367894 - DNA, 550 bp, Homo sapiens
ccattatgtcaaatggggaaatacttccatctcctcctacctgacctgttctataagcaaagtagcccaggctatctctaggggaggactctctgggatggcaacagtgagagasaaggacaagaggaagaaagaatttggctaaagctatatgctagatagtctgcctaaaacaatgggtttgattttaatgcttgtaataattcaagagtgatggcctctgaagacctagctacctatgctagagttgggatactgagccccagctaagggcaactagggttgacctaaaattctctgttctgctcctgggagaaaacaggcagtggtggccaggtttctgccacagtgaggacttctgccccacctggagctcagggcacaaatagtctcagaggacaaaggaaaaggtacatggggatagagcaacaaatgttcccatagtcaatccaaggatggggaatagaaatgcaaatagattcaaatatgtgatgaagtgtggaggaaggtcatccccatatttaaaatgaacacatttcctgggcgctgg

SEQ ID NO: 367895 - DNA, 576 bp, Homo sapiens
aggtgaccttgggatttgagttccagttctacctctttacctttctgaacctcagtttactcatctataaaatgaggataactaccacccacctctgagataacaatacttacttaacccaatagtgacagcttattatatgacaataaatggcaatgacagtaatgactattaaatggcagtgaacagtattgtgttgtaatacagcaatggctgtgaggcctcaagcctgcaagacagccagccctcatcctcagactgcaatgccttgaatcatctgccggaatggattcactctcattttccttcccaggcagcaacaaagggagaatgcacgtctctcttctaagcagatttaaagcgctctatgccctttactcacttttataacctactactcatcagtcacagatgcagaagcatcctagctagtgcaaatacatgtatacactcataggtgtgtctggcaagcatgaacacatgagttgcatgacatayttaggacttccacaaactcaggtcagagacccccaaactatcaggctcacatggaagaggggatttatgtggctgata

SEQ ID NO: 367896 - DNA, 530 bp, Homo sapiens
ggctgggggtgtaaaagtttccttcaatctgtctggccgggttattttgaagctctagrataaggaggccagagtagctgatgtggtagttggcggggagtggggtgcggggagtaggctggctcttcagatctgaggacatgaaaggcgggccagggaactgtaggtttgaggaaggaaaaaagtaccagctctggccgctcaaacttcccagagccaggagtggacactccagttgagtctcaggaggaaatctgcccaggccattcccgccacaccccctgaaaagtgaatttctggccaaagcacagaatcttccacgtcctcttcggtcgggatctcaatgttttcaaagtcagaagtgctggagagcaaagtcctttgttagcacaccttagacgtgcatggtgctcaaagggttacacatcactgtataaacacctgtacacttggagctgtgcaactttccagaggaacttggggctcagaaaggctaactggccagcagtctcatagctggcggtatccaa

SEQ ID NO: 367897 - DNA, 530 bp, Homo sapiens
ggctgggggtgtaaaagtttccttcaatctgtctggccgggttattttgaagctctagaataaggaggccagagtagctgatgtggtagttggcggggagtggggtgcggggagtaggctggctcttcagatctgaggacatgaaaggcgggccagggaactgtaggtttgaggaaggaaaaaagtaccagctctggccgctcaaacttcccagagccaggagtggacactccagttgagtctcagraggaaatctgcccaggccattcccgccacaccccctgaaaagtgaatttctggccaaagcacagaatcttccacgtcctcttcggtcgggatctcaatgttttcaaagtcagaagtgctggagagcaaagtcctttgttagcacaccttagacgtgcatggtgctcaaagggttacacatcactgtataaacacctgtacacttggagctgtgcaactttccagaggaacttggggctcagaaaggctaactggccagcagtctcatagctggcggtatccaa

SEQ ID NO: 367898 - DNA, 551 bp, Homo sapiens
ttcaaacagaaaaggacaagttcctgtggctctgttaaaggtgaaggggctgcagggatggagaggaatagagagttgtttactgggtccactaaagaatttctgtttgcgatgatgaaaacgttctggaaatggatagtggtgatggtggtataacattgtgaagggacttaatgccattgaaccrcacactcaaaaatggttaaaatggtaaatttttgttatgtatattttactacaaaacataaaaataaataaatgaagaggttaactaaatgtttcccaggttctgtttattctgaaagtgtgattcttactccaatggggaatttcctccaaaatcagcttcaccttcccaagtgctttctctctctaatctttcagagccctctcccagaagatcccaacactgtttttaactccccaagctaaatatctggtggctggtatatgactgaggataacgtctgcacttagtctgtgttgtggatgaggccagtggcatgttgaatggctggggcagaggcagggtctttttggaatgatgacaa

SEQ ID NO: 367899 - DNA, 557 bp, Homo sapiens
taccagatttagctctgtggtaatacccacatctacaggggactactctatcctggcagaactcccattgtcagccgattgcctcgggcctgattcaactcagttggctccttctgcagctgacttaccggctcttaggcctcatgatctctcttgggttttgtggtggctgaaacaacatggtgctggacttctctgggattaggtcaaattagaataagaataaaagtctatctaattaagtgaaatgtttgggaygatataaatttctttttaatgttgtctattttgtacttagaagaaatctctaaacttgtacccattactggagatggatgcacagatctggagaaaaacattctctgaatgaaaaaatggcaaggaaagtcagctccatgtttgccctcattgtctagggtttgtaaatttatcatggttgttactcagtggcaagccacgtaagagccacgtttctataacccaacagactgggagttggaagtggaatggatgttcttgttgatacaggcgttggttccactcccacatccctgtaa

SEQ ID NO: 367900 - DNA, 557 bp, Homo sapiens
taccagatttagctctgtggtaatacccacatctacaggggactactctatcctggcagaactcccattgtcagccgattgcctcgggcctgattcaactcagttggctccttctgcagctgacttaccggctcttaggcctcatgatctctcttgggttttgtggtggctgaaacaacatggtgctggacttctctgggattaggtcaaattagaataagaataaaagtctatctaattaagtgaaatgtttgggatgatataaatttctttttaatgttgtctattttgtacttagaagaaatctctaaacttgtacccattactggagatggatgcacagatctggagaaaaacattcyctgaatgaaaaaatggcaaggaaagtcagctccatgtttgccctcattgtctagggtttgtaaatttatcatggttgttactcagtggcaagccacgtaagagccacgtttctataacccaacagactgggagttggaagtggaatggatgttcttgttgatacaggcgttggttccactcccacatccctgtaa

SEQ ID NO: 367901 - DNA, 599 bp, Homo sapiens
ttttacatgctgcttttataacttgctttcatttaatcttctgaacatctttccctatggatgcatttccaggaattttttttggagacagagtctcgctctgtcaccaggctggagtgcagtggcgcaatcttgactcactgcaacctccgtttcctgggttcaagctattctgctgtctcagcctcccaagtagctgggactacaggcgtgcgccaccacgcccaactgatttttgaatttttagtagagatggggtttcaccatgttggccaggatggtctcgatctcttgaccttgtgatccrcctgccttggcctcccaaagtgctgggattacaggtgtgagccaccgcgcccagccttccaggatattttcaatgactataaaagtgtttcattgcagacaagacttaaacttgacaactattagtattagtttaatataatggttaagagttcggtgggaagatcctgggaagagtcctgggttaagaaatagatctttccaggatcagattatataaacagactaattcttgtcctgggactgacatatctccagtcccacttcccaccttgcctttctgcaggaccagt

SEQ ID NO: 367902 - DNA, 583 bp, Homo sapiens
gaaaatgctcataatagcattttttcaaatgaagaaaattttacaacaataacatcacccgcccccctgccccaatactaaaatataaaaatctacccagtgggaagtggatgagggttaaaaagctacctattgggtactatgctcactatctaggtgacgggatcatttgtacccaaaacctcagcatcacacaatatacctaggtgacaaaactgcatgtgtaacccttgaatctaacatggaagttgaaattacttaaaaaacctaacaggaagggaatggttaaataattatgatatatctactaagtgagtaattaattatgcagccattagattatttataaagctttgtaatagcttaaatacttatataaagtaaaaaattttttaagaggacaagacgtacagttgtatawataactgtgtgaacatcatcaacaacttagcaaccctattcataggaaacagaaggaaaattcgttgaaatgttaacactggtattgttgggtggtgcactctgggtaattttccctctggctttctgatctccagtattgcccagtgtttctcacataagt

SEQ ID NO: 367903 - DNA, 524 bp, Homo sapiens
ctcttattccagctggctgcctgcttggcaaaccgccttttcttctctcagcagtaatttgtctccagtgggtgctttaccttataagttatgcacaactagattgagaataaaatgttcctctgggggttgtggaataggacagagtggtctcatctggtgtcaggaggttggaatcaattcctttttcaattcccataagagaactggtcctcttagcatttgcagagagcaccaagtcagcactcttgcaggctgtgtgaagcagggactatgtgtgagggctaagcaccttgtgagtgctcaggccatgactatcaccccagaaatggggacaaaagaaccacaggatggttcttratgatccactagcacagggttcccaacgctggctgcacatgagaatcatctgggagcttttccaaatgacaatgcccagaccccacctagaacaaatggaatcagaatctctggatggggcctgagggtcagtatttttaagtgttccataggtgaatctaagg

SEQ ID NO: 367904 - DNA, 564 bp, Homo sapiens
agaaattggaacccttgtacactgctggtgggaatgcaaaatggtacagctgccgtggaaaacagtatgggattcctcaaaaaagtaaaaataagattatcatatcatctagcaatccaacatctgagtatatatccaaaggaattgaaagcaaggacacaagcagaaatttgtacacccatgctcatagcagcattattcacaatagtcaaaaggtgaaagcaaccccagtgtccagcaacaggtgaattgaatatatacatacaatgggatactcttcagccttagaaagttaggaaattctaacacatgccacaacatgaatgaaccttgaggacattaggataagtgaaacaagccagacacaaaaggacaaatactatatgattccatttaaatgaaataccttgagtagtcaactttttagatgtaraaagaatgatgattgccaggggctggagggaatggggaattagtgcctgttgggtacagagtttcagttttgcaagatgaaaaatgttctggagatggatggtgatgatggttgcatgacaatgtgaatgg

SEQ ID NO: 367905 - DNA, 598 bp, Homo sapiens
caggtttccacactagcccacaacattttcctttatattagcatagctgaattaccctatgtttgcaatgaaaaggtgtggtatggtgtttttawaaattataatactgttgggtaagaatagctgaaacccaaaaataatgcatttgaataagaaatgttgtaatttatttgagtactgatactttttgaagaaaagtatgtttaaagatagatggagagagtctaaaaggagctccttgacatttttcagaatcataaaaagttagagttgaaacttactctttttataactggataaaaccggttcttgaatagatttaatttgactccagaacattggcttcttttggctcctgggatcttagaattgaaaagcaggtgaaaggtgttctagctcactctctttccaaatacaagaaaccccttccacaatgtccttgacaagtggtcagctaagcattacttgagcacttctagggactgggagcttattacttctagagcctgttggattttagtgtaattctaagggctagaatattcctcatatattgcactgaaatccaaacactttctacccacgtctccttctattc

SEQ ID NO: 367906 - DNA, 605 bp, Homo sapiens
taatttatttgagtactgatactttttgaagaaaagtatgtttaaagatagatggagagagtctaaaaggagctccttgacatttttcagaatyataaaaagttagagttgaaacttactctttttataactggataaaaccggttcttgaatagatttaatttgactccagaacattggcttcttttggctcctgggatcttagaattgaaaagcaggtgaaaggtgttctagctcactctctttccaaatacaagaaaccccttccacaatgtccttgacaagtggtcagctaagcattacttgagcacttctagggactgggagcttattacttctagagcctgttggattttagtgtaattctaagggctagaatattcctcatatattgcactgaaatccaaacactttctacccacgtctccttctattctcccccgtccgagccccgagtgtaaatccaccagtgctaattattattctccctctccttctgatctgtatctagaagaaagtaatacaatttgcagataaaatgttaaacacttctttcctaagctatataagcctagcaatttctccataaatccttttattaaacg

SEQ ID NO: 367907 - DNA, 598 bp, Homo sapiens
caggtttccacactagcccacaacattttcctttatattagcatagctgaattaccctatgtttgcaatgaaaaggtgtggtatggtgtttttaaaaattataatactgttgggtaagaatagctgaaacccaaaaataatgcatttgaataagaaatgttgtaatttatttgagtactgatactttttgaagaaaagtatgtttaaagatagatggagagagtctaaaaggagctccttgacatttttcagaatcataaaaagttagagttgaaacttactctttttataactggataaaaccggttcttgawtagatttaatttgactccagaacattggcttcttttggctcctgggatcttagaattgaaaagcaggtgaaaggtgttctagctcactctctttccaaatacaagaaaccccttccacaatgtccttgacaagtggtcagctaagcattacttgagcacttctagggactgggagcttattacttctagagcctgttggattttagtgtaattctaagggctagaatattcctcatatattgcactgaaatccaaacactttctacccacgtctccttctattc

SEQ ID NO: 367908 - DNA, 593 bp, Homo sapiens
aatttttaaatcatagatgcaaaaacattcgcaaccaaatgtggtatattcacacaatggaatattattcagcctttaaaagagagaaaattctgatatatgctacaacatgggtgagccataataacattatgctaagagaaaaaagccagtctcaaaaagagatcctgtatgattctgctgatataagactaatcaacaccacagagatagaatgtacagtggctgccaggggctggggggtgggagggaatggagagttattgtttaataggtgtagattttcagttttgcaagatgaaaagagttacagagatggatggtggtgatgaatgcacaacaatattaatgtacttaataccactgaactgtacacttaaaaatggttacaatggcaaattttacgttatgtgtattttactacagaaaataaaaaatggagggaaaaaccatttgcaggccaggcacagtggctcatgcctgtaatcctagcacttyggaaacccaaggcaagtgaatcacctgaggtcaggagttcgagcccagcctgaccaacatggtgaaaccccatctctactaaaaatacaaaaatt

SEQ ID NO: 367909 - DNA, 632 bp, Homo sapiens
gttttctcttttcttttgtcgttctttcttttttttttttttttgagacagggtcttgctctgtcacccaggctggagtgcagtgatgcagtcttggctcattgcaagcttggcttctcaggctcagatgatcctcccacttcaatctcccaagtagctgggactacagctgagtgccaccactcctggctaatttttgtatttttttggggagatgaggttttgccatgttgttcaggctggtctcaaagtcctgggctcaagcgattcacctgcctcagcctcccaaagtgctgggattatgggtgtgagccactgcacctggccaacttttgtctttttttgatgatatccattttaacaggtataaggtgatatctctttggtattgatttgcatttccctgatgattagtggtattgaacattttttcatgtacctgttggccattttatatgtcttcttttgagaaatgtttactcaattcctcccccttcccctcttttttagagacaggatcttaytctgtcacctgggctggagtgcagtggtacaatcatagctcacggtaacctcaaactcctgggctcaagtgatcctcttgcctcagcctcctgagtagctgggaccac

SEQ ID NO: 367910 - DNA, 592 bp, Homo sapiens
tgctctctactcattggctggcaacatctctaatactttttattaaagacagtgatatatcttgcttaagtcacagatgtaaatcattaggaattatattcaagttatctaagatttaataaagccccaaaccaaataattattataaaaagtcatatttaacttaaaaaaataagcatcgttacatacctgacaaatagcaaatccaaaaccatttgcggaaatattaactgccgttggctgtaccacagcaagctgaatcaaggtgaaaaaaagtgaatgaggctaattttccatatctagatccttccaagtagcaaaacagatcagtcctatccctcattaggaaaagaagcaatcactgacagcactaagagctttgcactgtctcacatrtcaaaagctatgggtcaaataggtaagcaaggtgatgaaaggaaaagtgcacactccccaagctccctcacctctgcccatgggagggcacattagtgctactgacaagtctgtcctcctgttggggctgaagcataaaagacaagaaactaaagtcatctccctcccctgacctcccttaatcagggcctaatcc

SEQ ID NO: 367911 - DNA, 615 bp, Homo sapiens
ttggtgagctaggccccgtcacggtcacttggatatttgtcctttctgtattcattagggctgcaaattcagacagagcctttaaagccacagtggtatcctgttgagggaagaaaaacatttgtacatataagtatatatcaaggtcttcaaagagtaaatttagtagtattttgttgctggatattcatacaccttccttcagagtggaatgctccctgattcatatttgaatgtccttggcctagagtacaggagaggctcaraaaatgtttgctgaaatgttttatagtttttagtgtatagatcttattgatttttgtcagattaatccctaaacagttcacatgttatgctattttgatttgcatttccattgcttatatatagatacaatggatttctgtacaatgatttttttataccacaatgttactaaattcacttgttaatcctagtagcatttctgtagatcccactgaattttgctcataaatgatcatattatcagtaaattaaaagtttcagtttttcctttccaaaaagaagaaaagaaaatagaaaatatttgctatatggaactgaacatctactcttatatcagttaccacagat

SEQ ID NO: 367912 - DNA, 626 bp, Homo sapiens
gaaaagaaaatagaaaatatttgctatatggaactgaacatctactcttatatcagttaccacagatgaaaagtggcagatggggaactgatttattccatataaatatcagacatgaaattcatagtaatgaggagaaaaaaattaaaattartcaatttagccttttgcttaagttactaaactttgaaactgccaagtaattttatgaaatcaaggaaaaaatgcaaccacatacttttaaaaatattttttatatataacatatgatttatataatatatactatatattatatataaaatatatataataaataaatctatattatatattatagtttaaagggaaaaaactatcatctctcacctgagtagatgcaaaaccacccaagctatttctttgcctgcttagccacctcataattgggattccctcagaagtctgaaattgtaagaagtgtgagagcagtgcataggctgcaacttcaatatccagggagcgtggctgccaggagtcagaaagtttggactctgatgacacccagaattgcatgccacctgcaagagaaaagtaataacattctgatcaattatccagaaaaattacattttataccattaaat

SEQ ID NO: 367913 - DNA, 471 bp, Homo sapiens
cttctgggacctctgaatgtcctccagtgcctkcctttctcttattccccactccccattcattcatgtttcacatacagcaaataatcaataaataatacattaatgagaagaaatgtctgtggggaaacaactagtttcagcattataaagccctcttcacaggacataaaggatcaacagtaacccagcccaaattcttatgggatctgttttctatttccaccacaatccttcagtgagtcactaggacagtgactcatccagtgctagaagaggagcagcacatgtttaacttggagtttaaagaatcagtgtgttcacttttaacttcacccaatcgttgattcacaatcaaaccccaagtcatgtttctctgcggctgaaaatgaacaccagcgcttagggttgagggttgcttaaaagcaaacatgaaagtccacgaggagccttccctccgccgccatgaat

SEQ ID NO: 367914 - DNA, 590 bp, Homo sapiens
tacatttgtagtattccacttactaacaatgatatctcaatgggttaaagtcaagatatcttgccatactgtaagttctccatttcctatgtacatgaatttgaagacagaccatgatgartagaagagagaccactgtttccagaagaaagtcaacctatcaccttcttttttttgtttgttttctttgtttgtttgttttacaaaaaatctatggtacagctggtaacaacacaagacgaatttcactctcaagaaatgtgtgtgccctcatccatcttcctgcactggaatagaaacccagcccagtgtaaaactcactgcctgagatgctctcaggaaatcatacctaagactgatctagaattttcatcttcctttaatgggttagtagctgagtcaatttggcaatggacctagacttattaatgtaaatgagataaaacatctcaaaaatcactaaaagaaatctcattcctgcgtcttatgaacctttttaaaagatgtgttaaatttgttttattttcttctgcaacattcttcgtcttttcttcctcttcaattcttgttagccattgtccaagctctct

SEQ ID NO: 367915 - DNA, 604 bp, Homo sapiens
atctgctctctcatttgcttgtccctatagtactaggaagcaggtatcatgacacctgttttataggcaagaaatgagggatcttgccagttaaatgaacttgcatgattcatgtgaggagcagagaggggaagcaaccccaggaataccccacwgcactctgccaccatgagcccagaggtgaggaagatgactgccccgtggtggaatgagaatggaaaacagagcatgcttggcagtaagacttgggttaatcagattcaccctctgaatcagaggttacaaaccatcgccaacaggctaaatccagaattggatttctttggctctcaagtgctttaaaattttctaatcagttgtcaacattttaaatctggattttcagcttataaaatcaggcagtgctgggcatgcaactcttgctggagctgaacaatggctgcctctaaagttccctgcagtccccaccactctctattgccttgtacctggctctgctttgctcctctccattacctgcctggccttaggggtctttgagtttgttctctggcttagatggtcccaagctcatgtgctggtctgattcatcttttataccccc

SEQ ID NO: 367916 - DNA, 548 bp, Homo sapiens
aggtctcttcttagatcacagctcttggaatcaagaagagcctattgttggagactatgaaatggggagcccagaggtactgtccacttttaggacagaacaccacaaggcagacacagacaagggacatcctgytgatctctttctaatcctagattctccaaatccctttaagtctctgctttcttattagaaaaataggaacaataatccccaagtcattgtgtaattatgaggattaaatgagtccacacaattccaaaattctttgtgaactcaaaagaaacacaaacatgaggtgttaactataataattattactcatctatttctcaatcaggacccactcaatagtccccagccacttcacagtttgggcagttccagacatagagtacgcattcaataaacacaggttgacttaatgattgatcccaggactcctcttggtcaaattctttgcctgccatctagctactcatgactcaaacagtaggacaggtggccacaggcacagagaggggtcataccataccatgaagccaggg

SEQ ID NO: 367917 - DNA, 484 bp, Homo sapiens
ctaaacaaaacacagatctaggtccaccataggatttagcaagaagcaccaataactaacactaaacgtaattcataaattatctagtacctttgaagatgaaaagtacacagaaagaagaaaagttggagagtggggaaagagttgttttgaattaaattaaggtgatcaggrcagaactcactgaaaacgtgggatttgagcaaatatttgaagtaaagggagtgagccatgatggaagagtctttcaggcagaagctgctggagctatcacctggtgtattcaaagaatagcaagttgactttccaattgctatataatttaagcctcatcatgccctaatgtactaggtattattactagcatttcacaaatgtaaaaactgaggcttaggaaggctgcatggattggcaaaggctgtcccaatagtgtgtggcagagctgttattccaatcctgactgaaccgatcctaaaacacatat

SEQ ID NO: 367918 - DNA, 484 bp, Homo sapiens
ctaaacaaaacacagatctaggtccaccataggatttagcaagaagcaccaataactaacactaaacgtaattcataaattatctagtacctttgaagatgaaaagtacacagaaagaagaaaagttggagagtggggaaagagttgttttgaattaaattaaggtgatcagggcagaactcactgaaaacgtgggatttgagcaaatatttgaagtaaagggagtgagccatgatggaagagtctttcaggcagaagctgctggagctatcacctggtgtattcaaagaatagcaagttgactttccaattgctatataatttaagcctcatcatgccctaatgtactaggtattattactagcatttcacaaatgtaaaamctgaggcttaggaaggctgcatggattggcaaaggctgtcccaatagtgtgtggcagagctgttattccaatcctgactgaaccgatcctaaaacacatat

SEQ ID NO: 367919 - DNA, 484 bp, Homo sapiens
ctaaacaaaacacagatctaggtccaccataggatttagcaagaagcaccaataactaacactaaacgtaattcataaattatctagtacctttgaagatgaaaagtacacagaaagaagaaaagttggagagtggggaaagagttgttttgaattaaattaaggtgatcagggcagaactcactgaaaacgtgggatttgagcaaatatttgaagtaaagggagtgagccatgatggaagagtctttcaggcagaagctgctggagctatcacctggtgtattcaaagaatagcaagttgactttccaattgctatataatttaagcctcatcatgccctaatgtactaggtattattactagcatttcacaaatgtaaaaaytgaggcttaggaaggctgcatggattggcaaaggctgtcccaatagtgtgtggcagagctgttattccaatcctgactgaaccgatcctaaaacacatat

SEQ ID NO: 367920 - DNA, 605 bp, Homo sapiens
atatattaaaccaaaattgaattcataaagtaaactctactttatcttggcatattttgtttttaatttactagtggrtctgatatattacaattttacataaaattcttgcttctgtattaataactatgattactggatagtttccttatttgtgtattcatgctagccttttcagcattttactatcaatggtcctaattgtcattttaattaaactataagggaaacaatgtcaaaatttgagtcaacagcttgataaattcaacatcttggtaaactcaagcaaattcactcatgtaactatcacccaaatcaggaaataaattcactggcattaagcatcctcccactaactatgcccccaaactgttttgcattcttttgaaccttatacaagtggagtagtatagtatatattattctgtgcttgatttgttctgctcaaatcatatttgtgaaattcatgtttttataatagtaattcattcattttgacagctgtatagtatttatttgtatgatcatataataatttgtttctttactccattattatacatttggactgttttcagttttctattattatgaataactgtact

SEQ ID NO: 367921 - DNA, 683 bp, Homo sapiens
ctttttctactaacatgttatacttatttagcagctggtatagacagaaccagggtgcagctgatttcataaaagcaggctttgcactaactccaccgcttactgatttgatgtgcttcaggagcagaggcaaggtgttgctaatcccagataatagaggacctagacaccagccatagttgacttcaggacccggttaatggtgcagccatttcacccactccaggctggagccactctgcccatagcaacagggagtactgtcatagaagtaccccagctcctctttccacagtctctctgggaagttgccacctttctcaatcttccgagcagctgccatggcactaaacctttcacaggatagaaggcttgctgactccatagctgacaagttcctcagtgtccaccctagcayagagggggttacagtgtggctggctgccagtggactcagatctgaactggggaccattctttctcttttagctgtcagttgggaaggataaaaactgccccctcccaaagtgatgggaagggcaagcagagaacataggtatgcagctttgcaaattgtaatcctctcagctccaacgggagggtatgtatgcaaaacacaaaagaggcctggtccctggagagggtgagaggcagtgttgaaattcaggcaggacttttcattg

SEQ ID NO: 367922 - DNA, 600 bp, Homo sapiens
ttaaaccttccttccatcttttcaaacatcattgtcaatgttgccttctggtgctcagaggtaatcatggtgatgattattgatataatcaatatcaatatcaattattgacataattaatatcatcaagtgatgattataacttgtcttcaattatgtgaaaggaaatctattaatttagaggatggtgaccagccctgtggagggaagcagaagaaaaggaagtggaaccctgctgcagcaggcagggttctgccagccaggcggtcctgctgctgctgcatgaggagcttggaccaracaccagggccaacacagccatgtgactttaaagtgccctaagagcccccagctccccagtgcaggtatgaggaaggggcatagaggagtgcttgctccattgggtggtgaggaatatcagggaaaaattctcagggcagtgaagaatgcatggggctcactggaaaggaatctgcattcatacggacacagaagtgctgacactgggcttggggagagcactgtccctggcaggggtttctacaaggtaccagatgacttgcttccctgggggatgctaagggtatgggtctgctttct

SEQ ID NO: 367923 - DNA, 274 bp, Homo sapiens
aagaaatgaaaataaagagttcacaagattattcaaatttagcaaagaaacaaatatggacccttcttcagaaaacgtaagcagaaagacttagtttggggttacttggaaagaacctgatgaagtttcaagaaagatgtgtgaggtctaaagaggcagtgcccrgtaaatccaaatggaatcaaaggtgccctgcaccctttcttatcaaatgaagaggctgacccaacagagtacaggcacccaaataggagagcaaagagcaaagaagagt

SEQ ID NO: 367924 - DNA, 571 bp, Homo sapiens
attccctcctagtgatccaggctcttcattttcactaaagtccccatttttttctaggattcatggtgcagacaaagacaggcccaggcttcaagcttctgttcatgcatacctgcagataacccaggatctttgcaaagaaaagatatgctcctgtgaaaatgattagaggccatgytggtatacaagaaggtgctggggtgaggtgtgattcggaatgacagtgtgtagacagtccacagcccagactggtgaaagaagccttccaagagaagaggccttgggaaacataggcttaagcaatctggagggagtagaggagccctggagagaggcattttagacaaagaaaagagcctaagcaaatgtctgctggcaaagatgtggtccccggatttaggggaatgtgagagattggaattgacttcattatgaaggacctgtgaatctatatttaagagttttgcctttgtatgatgatagtttttaagaaaagaagtgtggcgttgggtggggttggatggggaacatcaagaaagaaaggaggctgcaaaagtccaggcacaaatca

SEQ ID NO: 367925 - DNA, 571 bp, Homo sapiens
attccctcctagtgatccaggctcttcattttcactaaagtccccatttttttctaggattcatggtgcagacaaagacaggcccaggcttcaagcttctgttcatgcatacctgcagataacccaggatctttgcaaagaaaagatatgctcctgtgaaaatgattagaggccatgttggtatacaagaaggtgctggggtgaggtgtgattcggaatgacagtgtgtagacagtccacagcccagactggtgaaagaagccttccaagagaagaggccttgggaaacataggcttaagcaatctggagggagtagaggagccctggagagaggcattttagacaaagaaaagagcctaagcaaatgtctgctggcmaagatgtggtccccggatttaggggaatgtgagagattggaattgacttcattatgaaggacctgtgaatctatatttaagagttttgcctttgtatgatgatagtttttaagaaaagaagtgtggcgttgggtggggttggatggggaacatcaagaaagaaaggaggctgcaaaagtccaggcacaaatca

SEQ ID NO: 367926 - DNA, 563 bp, Homo sapiens
tgattggcagtcctacattcgtatttgctatagctggcaactctaattgtaatagaacataaatagcttgacttctctatgcctaggtcctgaacattaggtaatagttctttaacaccagtgaaagcataaccaggacaataccaatactagccagctggcccaaattatttgtatagattaaagaaaagagatttggtatttaggacacctatgatagagcagacagggtgaaatgtgcttcatatgatttgatttttttcaacagacaggaagtgtgagggtcagaaggactaaatcgtgtgtccagtatcacaaagcttgcacatggtaacgccagggtttagatgagttctgtctgcctctatgaccygtaggcttcccattccactgcataattcagcatggttctaacatttggcagaagccttgatcattttcttcttgagcgggaactcagagtgctgggccattcatttctcaggcatttctttgtcctccacagtgcctggaggtagtgctggctgactgcggatactctttaagtatctgctcaatgaatc

SEQ ID NO: 367927 - DNA, 572 bp, Homo sapiens
atgttgatcaaagaaataaaaatataataattgtgagccaggtgtgatgccacccaagaagacaataataaatcattaattattaagtaattatttgtttaatgttcgtctttcctcacaaggctcaaagttctatgggagcaagggaatgtatgtgttttgttggtctggtacctggcctagtgcatggcacttaaatgctcaattaaatatttgttgtatatggcgaatgaaagtaggtccttggagggagaacatggcagttaaaaatctggagaactaggtagtgtttgggagaatgaagagagactggasaggtggcatgagatcatgagtcatttgatgctctgaaagtggcccagtagagtgaaggaaagctgactcttcctcttctcactgtagataatgagagtaattgaagtatcttcacagagggcagcaggttaccttggtatcttcagagagtaccagtttattgttaccatgagtctgactaataggcatcatgtcataggtcaactccaatgcattggttaattctggtcagtttgatcagtagacttgcccagaac

SEQ ID NO: 367928 - DNA, 572 bp, Homo sapiens
atgttgatcaaagaaataaaaatataataattgtgagccaggtgtgatgccacccaagaagacaataataaatcattaattattaagtaattatttgtttaatgttcgtctttcctcacaaggctcaaagttctatgggagcaagggaatgtatgtgttttgttggtctggtacctggcctagtgcatggcacttaaatgctcaattaaatatttgttgtatatggcgaatgaaagtaggtccttggagggagaacatggcagttaaaaatctggagaactaggtagtgtttgggagaatgaagagagactggacaggtggcatgagatcatgagtcatttgatgctctgaaagtggcccagtagagtgaaggaaagctgactcttcctcttctcactgtagataatgagagtaattgaagtatcttcacagagggcagcaggttaccttggtatcttcagagagtaycagtttattgttaccatgagtctgactaataggcatcatgtcataggtcaactccaatgcattggttaattctggtcagtttgatcagtagacttgcccagaac

SEQ ID NO: 367929 - DNA, 441 bp, Homo sapiens
cagtgcacctggtaagctggtttactgtcttgtggggtggatctttatgatgtgccagaacttgtgctggagagttccttgctgctactctcctatctcctttctgtcctttcttggacctttcctctcatccaaagacacagtaattcagcatgtgtttatcaagaaccagctctgtgtggtacatgaaggctggcacaggggatacaagacaaatggacagtatcgacccttggagactcatygtctggtcaggagatggacatgtgagaaagaccatctgaccccaccccggccgaatgttggaggtgcttcctgccttctgggttttctccatccttcacagcagtgtctgtgagcgactaatagtgtggtctttcacttttctaacgctgtctgtcttattatagcaccttagataacacagagaggatgttagtc

SEQ ID NO: 367930 - DNA, 441 bp, Homo sapiens
cagtgcacctggtaagctggtttactgtcttgtggggtggatctttatgatgtgccagaacttgtgctggagagttccttgctgctactctcctatctcctttctgtcctttcttggacctttcctctcatccaaagacacagtaattcagcatgtgtttatcaagaaccagctctgtgtggtacatgaaggctggcacaggggatacaagacaaatggacagtatcgacccttggagactcattrtctggtcaggagatggacatgtgagaaagaccatctgaccccaccccggccgaatgttggaggtgcttcctgccttctgggttttctccatccttcacagcagtgtctgtgagcgactaatagtgtggtctttcacttttctaacgctgtctgtcttattatagcaccttagataacacagagaggatgttagtc

SEQ ID NO: 367931 - DNA, 593 bp, Homo sapiens
ttaaaatcttcctgtccagtttcaaaacatgcacatatacatgtatactcacatgtggattttgactgaaattctactctgtctttaggaagattaacatttcaatgatsctaagtcacctaaataatgatgtcagccaaatatacaatttacatatacacgacattaaaagtttctttggtaaaagatttcccacgttatttttctgtacacattatttggattacttgctgtgataagtgtctttgtagatgatagagcttatatgtttctaggcctaagagttctcaggattctacacagtgatatggccacctgtctcactatattttactatcatttctccacactttgccttttattcaaaatagaaaaaattatttttgattattaagcaaatattttttctaaaaatacaaacaatttattcaagtgacaaatatttattgagtatctactatgtgtcaacattaggccacaagctggggacataatcatgatcaaaaggagacattgttactgctctcagttaagtgaggactggggacattaatcaaacacatgcccaaatgagtgcataattaccagctgaa

SEQ ID NO: 367932 - DNA, 352 bp, Homo sapiens
aacacttgcagctcactttagagcagtgcagtagacagtgactgtggaacaggagcaggggtgtgccacatggatgccccctgagggcaggcccatctgtgtgtgaacttgtctacartggattgcacagaccctcactcgcaagcaggtgctatacccaggctggtcaaccacacagtcaggagggtcactgctcgaaggcagagtgtccaacctgccaactccagggtgactcttgacatacaatgtaaactttatctcaatttgccctccatttcctttgggccacagatatacttgacagaaacattaatgaggccaatttgctgctttttttcctttttcatcattt

SEQ ID NO: 367933 - DNA, 352 bp, Homo sapiens
aacacttgcagctcactttagagcagtgcagtagacagtgactgtggaacaggagcaggggtgtgccacatggatgccccctgagggcaggcccatctgtgtgtgaacttgtctacaatggattgcacagaccctcactcgcaagcaggtgctrtacccaggctggtcaaccacacagtcaggagggtcactgctcgaaggcagagtgtccaacctgccaactccagggtgactcttgacatacaatgtaaactttatctcaatttgccctccatttcctttgggccacagatatacttgacagaaacattaatgaggccaatttgctgctttttttcctttttcatcattt

SEQ ID NO: 367934 - DNA, 559 bp, Homo sapiens
caaaaacctaccaatgcttgggcaccactccgagaaattcgaataaattaaaatattcatggctttaaaaacaagcaaacaaataaactttccccaggtgattccagtaagtaaccaagcttgggaaccactgggctaggccttctgagtaataaagaaaatgtgtattggcctagcttcagccggtggttgttgtgcatttacctaggcctggagtggccatctgagtctggggacactgatggtagagtgaggatagaattctccctcaggcaggatgacaaagggcagtgcttcaaggtatgaactgtggccgaggtctgatcaacagcagtgatgaaatgttagaggggccctgtggttaatcraggggctttgatataaagtgttggagctatccctcactcccaagtcctcttgccccctaatagtagcccgtgatggttctgccacctaggaacttaacagtggtattgttaaactagtatctgataaaattgtatatactcaatgtattagtttctcatggcttctataacaaagtatcacaaactaaaca

SEQ ID NO: 367935 - DNA, 523 bp, Homo sapiens
tagcacaatgagaagaccataagaaacaagttgaacactgaagagggcctttctttcatgcaaatagtggccggcttcgtggtttccagagccactgtgtttttcactctgttttctgataaaacagggagtaaacatgaggaaatggaacacattttcctttgtgttaaattttaattttatgacaaaacagtctacacattggattggatttttaatttggatgaaactgatctctgtgagatgtgaatgccctcctggacctatgtctccaasaggaagcacaaaaatccagagtttaagcttgcaaaggatcagtgaaccaatacactgggtacaaatgcaaattataatttacctgtgctgctatttttatgaagattgctgtgttttttgttagatgttgaatggtctcctccaaatgcattttctccccataggctctgttattttattgtgcaatttcgcagagtatgaggttttactaaaatatgtatatgaaattatagcagaaatgcctgta

SEQ ID NO: 367936 - DNA, 529 bp, Homo sapiens
atacctttcaaatattgtgtaatagactcttcctcattttgagtttgtctgatgtcccttcatgcttagattcgggttatttatgtgttgcctaagtgacagtgtgcccttcttagggtattgcttctggaggcacgtgatgttygcctgtcctttgtgtgatgttaacttgtatattttaaattttggtagctgtttattcccccaaagccttttgccaatttatattcttgcatagcttacgagatttgcccattttcacatcctcttcctcacacagagagtcatcagtcttagtcccagtgtaaatgtgcttattcatgctttatttaaaaaacaaagcatcaatgttttttcccattttactctgaggcactttaatattcttaatattcttatctctcaaccaacgtttctcaaccatcaaagatgtagtaaactgacatgctcttttatatcccagagctcactgagagtcgggcagtctgaggggtgacagcgtgggtggggtgggacccttggctgacag

SEQ ID NO: 367937 - DNA, 465 bp, Homo sapiens
tatgcaaggacacacttctccatgtatcttctttccttctttcctgtcatccaatatgaggaaaaggcagcatgggatctggaatgggaggtttcaagagcacccccccactttttaccaggtgtggacccctggtcaccctcctctcctgtccagttcccagtgcctgtwaaaagagactcagaatacttggtttcatccccagtatagaagatacacaggaaggagctgccctcccaatacagcctttgaagcagactctgcccctccttggccatccctcaccaccaccagaggagggcagacagcccagagagcagggctcatgcagggaggcaggtggagcagctccgtcagcactggcacactctgccagcattagctaacagctcctcatacgcccctctgagataattaagtattattatccctattggcaggtggagacggtaagacagagtgttt

SEQ ID NO: 367938 - DNA, 465 bp, Homo sapiens
tatgcaaggacacacttctccatgtatcttctttccttctttcctgtcatccaatatgaggaaaaggcagcatgggatctggaatgggaggtttcaagagcacccccccactttttaccaggtgtggacccctggtcaccctcctctcctgtccagttcccagtgcctgttaaaagagactcagaatacttggtttcatccccagtatagaagatacacaggaaggagctgccctcccaatacagcctttgaagcagactctgcccctccttggccatccctcaccaccaccagaggagggcagacagcccagagagcagggctcatgcagggaggcaggtggagcagckccgtcagcactggcacactctgccagcattagctaacagctcctcatacgcccctctgagataattaagtattattatccctattggcaggtggagacggtaagacagagtgttt

SEQ ID NO: 367939 - DNA, 638 bp, Homo sapiens
caccttttgtaccaaggagactttcctcctctcccaataagacttcgtttactctcctcattgactaatgctctggttaccctccagaagagggagccgaaattgccagtctccctcctccagggacacacctgacctgcactttggttcctgaggtgatttcttctgggctggatgctgtgtcccttgcagttctgaaatacagacaccacccagaatccagaaactgggtgtggaatcttggaactagacatgcttctgggtgtaattttgtccaatatcctgtctaaagcagaaatctctctagcatcctttactgacagctatctagtctctgcttgaataggaacagagaactcacacctccctgcaaggcagactgtctctttgctggacagctctagtgaggaagcagtgcacttacaatgaataaatctggcctactttgatattgcacttgatggtgccatttaatctcatgaagccaacaacatctttcttttgccataatggcattatgctggatgatgacttcccaggttcctgcctgggtgtctgcagcactgaacactggcatttccragtctctttggtagcagatcagaacttgccactgctccacaagcaagctgctctct

SEQ ID NO: 367940 - DNA, 557 bp, Homo sapiens
ttaaaaaccttgaaacatttttaaaaaaatgtgtgtctgtgtagagtaatttaggctactaggtatcctgcgttgcttttgaaatgcttcagctgtaccatgtaagcaagtgttcctgaggtttgaaacaacatcagttaaaactattgtgacctcatctgtcaaagtgatatctcagttacacaaaaacttctatctacatcagaaatccattgacaactgatgctgaataacacagctaacataatagatggctgagtctctgcctgcaattgaggttggcttaaaaggctgactaagcaagcacagaaaactgaaygtggccaagaggtacatagtttataacttggacgaaatagccagatatcatattggacaaaatattgcttaaaaatttaaactacagaatatagaatggcatttaattatatatttaaataatatgactattatttaaaatgagagtgtttaaaccaaatgtttaaaccgagtttatgattctccagacactgttctaaaagctttataaatataaacacatgtgaactacacacaaa

SEQ ID NO: 367941 - DNA, 585 bp, Homo sapiens
aaccaaatgtttaaaccgagtttatgattctccagacactgttctaaaagctttataaatataaacacatgtgaactacacacaaacattttgaggtagacacttttaccatcctacttttacacacagagaaactgagaccccaagagttaagtgacttgaacttgttcacacagctatagaaagttgaggggctaagaaactttcctaaacattctgactccaaagactatgtgtcttagcctcttgcaatattgtctttcaagtcaatcattagtaaaatttgtttagtaaaacaatgctagattatgtctcacccaaaataaaagatcaaatttacataaaaatatatctacctattatctatctattctgtactcagatcattatgtttatatacagaagagtacaktaagtgcatcatttttcataagaatgagctgaattttgaaagtcttgaaaatacagggctctggtatcatatgctacaatgtggcaaggtttgagggacataagtgatagtcaatttggcatgtaaatattttagcataattgaaaatgaaaattgtagtctgacatttccaa

SEQ ID NO: 367942 - DNA, 526 bp, Homo sapiens
aaaacactagcctggtgctacctacaacactctatcaggaaacaaagtttattcaaatttaaattgtatgacattcagtactttctatatattgtctgataactatttctatattatctgttaatctgataacagtgtatgtgaagacatcttaaattcttgkgatatattttacaagataacacataaaaattcaaagttaagtagaatattttaaaggattactatcagttttcataaagacacctactaacatttcatttttgtatgttgaatcattattactattattattcagaaagacacctattaacatttcacttttgtgtatcgaaggattatttgtagtgtgctagtagatttgcacatgcttttctcagtcctttattaaatttccctagaaatcaatgcttagataagagtgagaatgacagagatagaagtacttttgtaaccagtaaaccaaccatcttcaaatggtttgatagcaatcataagtaggaacagattattcttaatttaataa

SEQ ID NO: 367943 - DNA, 564 bp, Homo sapiens
caattaataaaagaggctgcagatcctaaagaagaccctctttgttgtccraagtgatatcaacctgagttgtcttagcaaattcatctctcactagctaaatttccaaacagttgtacaataaatttcctgagatgatagatacaaaatactaacaataaatctaaataatggagatagacttttctgccaatgatcttagaataaagtgaaaaaattagaaaaagaacaaaaaatttctcgcaaaactaatgaagtgttgtgctggaataagtgaattcattgaaatgaagtagcattaaacacaaacaaggaaggaggagtaagaagaaattaatagagaaaaatattcctgaccttgaaattttagataattctttttatcttgagatcatcctttataattctacttatttttctaaagtggtatgctgctatcattattaattattctaataaaattttttaaaagtttataatttttattttatttgtaaggatttttgcatggggacaagattttactttactttttataattttttaatggaacatatgttccta

SEQ ID NO: 367944 - DNA, 324 bp, Homo sapiens
tgtgagcctaggaaatggatatccctggacatgttccactgcagctgtttgtttgtcaaaccctctgggtcctgcacaggatagagtcctgtcccagccaactctccaagcagctctctcggccagcccaaatgtccatggggtgcatgggatctcctgcgtctaagattgtggaggttcttggctagagtggcaactacatgcctgtgtaactcaccccttttctcacagctgctgttakccaggaatcagttgtagtgctagataaccctgtgaagcgttcccagctttctctcccttagcccagggtctgcatcttccctg

SEQ ID NO: 367945 - DNA, 592 bp, Homo sapiens
gctcatttattaaattgtttctagagtatacacagaattgaagaccttagcatcactactattcgtctgcttaggaggagcgaacagaagagaatcagtgagtttaattctcatgcatacaaactggttgataattttttcatcagatcacatccagtatgattaatgtttctcttttttcatttggccaactatgaggtgggcgagtaataacagtatcrcaaaatagaagaatatatgaatattaatgaacagttcatactttgtctccccccaacccctcacatgataaagcaaataatctcatggttcaatctctagagtactaagtttatggctggagaaagcagtagtgcatggcatatgggcaaaaagcatctctgggtagctaaggcaggggtgccttgttacaattattcagactgaagtccagcatattgtatgtaatatgctatttaaataagaacaattttggtacagttattatcatacacaatacacaatactacatgtaattatccttcaagtttcctgtgaatattctatattggaaatgttaaattctataattggaaggaacgtctgtaattta

SEQ ID NO: 367946 - DNA, 592 bp, Homo sapiens
gctcatttattaaattgtttctagagtatacacagaattgaagaccttagcatcactactattcgtctgcttaggaggagcgaacagaagagaatcagtgagtttaattctcatgcatacaaactggttgataattttttcatcagatcacatccagtatgattaatgtttctcttttttcatttggccaactatgaggtgggcgagtaataacagtatcacaaaatagaagaatatatgaatattaatgaacagttcatactttgtctccccccaacccctcacatgataaagcaaataatctcatggttcaatctctagagtactaagtttatggctggagaaagcagtagtgcatggcatatgggcaaaaagcatctctgggtagctaaggcaggggtgccttgttacaattattcagactgaagtccagcatattgtatgtaatatgctatttaaataagaacaattttggtacagttattatcatacacwatacacaatactacatgtaattatccttcaagtttcctgtgaatattctatattggaaatgttaaattctataattggaaggaacgtctgtaattta

SEQ ID NO: 367947 - DNA, 620 bp, Homo sapiens
gaaaagagtaaagtgtttgagaaacaacaaataacttattctagctttagtataggatatagagtacccattacattttgggaaatggtgaaagaagatattagagagaaaacaggggctatatatgtagaatcttatataaaaattattaggggaggtaactaatactaacaattccatgatatcaatggrttaacctaaataagtttacttctcaataatttaacaatttaatgtagatagcctatgaactcatagaatcttccagatagtgctctagcaacccaggttctttcaattttgtcatttcatcatctttagataccttaaagtattggggtattttgctaaatcatagacttctggggttagaatgccattctagaattaaatactccaagccatcatttcccaaattgtgtgctgaggcaacccagggtgctgcagcctcctcagaaaggcatttttctaaatttcaagaaaaacacaatgatgcttcacatctttcagagagcatggcaactaccacctcgagatagtttagaattttaacaccaaatcacaatatattcctttcaatgaggtcacatctttgcatagctaggatttttattaaaaac

SEQ ID NO: 367948 - DNA, 608 bp, Homo sapiens
ctcttcctcctacaaaaattaaaaggagaataagcatagttgcagaagagcaggtttgtcctcatgcctcagaatgaaaactatctctgttctttctctaaatacagttgcagtttggctgtgtagcactccatcacttccaggagtctttgcccaccatggacctgaaactgaagtcacaagcatccaagtgttcctgcccaagtggggctccagagagctaatttttcttcagagggagttgggtagtgcatctgtggtttttgtctgaccatcattcattctcctttttttaatcacagtgccgatttatttagaaggaacactcctctctattctcagtccatatgacttaattagcactgatcccataggctagcttggagtatgagtacataacctggtttagactggtcagtcttgggaatttwgctaaaatttggggagaatatgggtatcttttccatagggtctctagaatatgtttctgggactgctaatggccatcttcttgcccgtctgcccaagaatgaagaaaactaggaggagaacagactcaagggttgcaaatggccataatcctgatgttgtttgagtacatgtaccca

SEQ ID NO: 367949 - DNA, 486 bp, Homo sapiens
ttctgtaatttatgaaactgaatgatctctggataatacataaagaggggaattagtacaaaccttgaactgaccaaggaaggacaactaattcttttgttttttttttattctcaaaatgctttcctaactatatggtaacattgaatccaagtggtactctcttgcaacttgtggtaggcaggaacctgtgaatgtatttccttacatggtattaggatctttccagatgtggttacgtgaaggactgagatggggagattaacttggattattctggtgggtgaaatgtaatcagaagtctccccataagarggaggcagggaagtcaaagtcagagaggagatgtcatcactggagcagaggtcggagtgatgaaattgctggctttgaatgtagaggaaagaatgtgggcaacattttgaagccagaaaggacaaggagatgaaatctcctgtgggacctacagaagggaatcagccctgt

SEQ ID NO: 367950 - DNA, 544 bp, Homo sapiens
acctgtaaaaccaggacaagagagtgaatttccggagtggtttcctgtcgagaggcacgcagacagcgagtgtgttcttacacatacacacaatgcatctacggccgcagcatttgttctaattccctgagctgcagtgagctctggattccagcaggggacatccatagcccagacaagggaaactggggccagctcagccttagaggtgatgaatgaaaatgataaatcactcagacatgagcctgagactggcctgttctgatactcattccataaagacgaaagttctggaagggatgaccctcacaggcttcgttagctctgagtttgtagaatgtcaatgaatttcaagttctcttaatcctgaatttgcaagctgaggtcccgtggagttttgtccatgttaaagggacataattcctttctccccagggcagatcaaaggaaccaggttttgatgactyacagctcacacaaggtcatcctgggaaaacagatcctgagaagtactgcagagcttgtgaagtactgcactggctgg

SEQ ID NO: 367951 - DNA, 595 bp, Homo sapiens
aatctgattctaaattttcattttattgttgagcctttttttatttttaaaaaatttcagaggcaacacagtgaaatgcaaaaggcactaagttagaaatcacaaggaacgttttcttgctgaattcagctttaccattttcttaacatatttctttggrcaagtcatttagtctctctctcttttattttttggtaaaaataaaaataaatttcccattctaggtaattcatatgtcctttctgatcaccaaatttaatttaactttactttgtccataaggtgctattagccagtgccaggcactgttcctttatgtgtagttttattgctacattcaacaaagagtgtttgacattcatcatttgcagaaggctatgctggattctggactactgttgtagtagttataatctgatgagggatggtgtgtaaaatatgctgatgtgtaaaatactacgcaagaagtgtgactatatcacaatagaaatacaggagaaaggatggttaattcttcctgggatggtggcaatgtcaccaaaggcctcagaaaggtgatgacacataggctgagtcttgaagcataaacaggatt

SEQ ID NO: 367952 - DNA, 578 bp, Homo sapiens
gaccttctgatgtgtggctcatgccttaagatctttacagagaatacaaatggtgatgctaaatcagactgaactttctcctactctccttaagcctctttttctctccagtgtcattttccactgctataaaaaagttaaggtctgtcaaacagatatttattctttgctgagtcagaaactcactctatagctacataatttttactctttttccatgtaggaacagtgattttggactctagttgggtgatgaattctgctgagacatcctcatatgaagagggtacatgcaaattaaaattgaagtataaacttgggtattacttggggaatgaggtacataggttcacagcccagcaactgtcacatttctatagttctygacctcttattaatttttaccacgtgtattctgaaagtgatgcagtagaatgttgccagtgtgtactctaagctaatcagaactgggttgaagtcctaccattgccactataaatgcatggccttgagtgagttattctatgttcctgagagacaatggtggcaaagtaccatatagagcatatagtaagcac

SEQ ID NO: 367953 - DNA, 524 bp, Homo sapiens
caacgatatgtccatgtgttatcatcattcagctcccacttataagtgagaacacgckgtatttggttttctgttcttgagttagtttgctaaagataatgacctccagctctatccacatcccttcaaaggacatgatctcattccttcttatgtctgcatagtattttcatatgttcattagagtactattcacaatagcaaagacatggaatcaacctaaatgaccatcagtaatagactggataaagaaaatgtggtacatatacaccttcaatattttacaaagtaccctagattttcctgtcacagaagttgtcaggatggaatgccatggaatatggatggaactctgccttggtacaagcctagaaacttgggaaaatataagatgcatatgaaagatagccgcgtttcttttcttatgtgaaaatcaactcacaggaaaaaaactaggaaaaaagtaaaatggtgctttgtattcagttgctccactggcactaaaaataacacaagtgatgctg

SEQ ID NO: 367954 - DNA, 524 bp, Homo sapiens
caacgatatgtccatgtgttatcatcattcagctcccacttataagtgagaacacgcggtatttggttttctgttcttgagttagtttgctaaagataatgacctccagctctatccacatcccttcaaaggacatgatctcattccttcttatgtctgcatagtattttcatatgttcattagagtactattcacaatagcaaagacatggaatcaacctaaatgaccatcagtaatagactggataaagaaaatgtggtacatatacaccttcaatattttacaaagtaccctagattttcctgtcacagaagttgtcaggatggaatkccatggaatatggatggaactctgccttggtacaagcctagaaacttgggaaaatataagatgcatatgaaagatagccgcgtttcttttcttatgtgaaaatcaactcacaggaaaaaaactaggaaaaaagtaaaatggtgctttgtattcagttgctccactggcactaaaaataacacaagtgatgctg

SEQ ID NO: 367955 - DNA, 534 bp, Homo sapiens
tctcctgcacagctggctctgtgtgaattactctttctttattgcaattcccctgtcttgataaatcagctttgtctaggacccattgggtggttatgatatcaggtaagtaaaacaaaacccagtttactctgtttcctatatgcacctgcaactgtctataacacagggatgtctaccacccagccactgtcctcagacgctagtgcaagaggcagacaggtcaaccagcagtttcaactcaggaagcctgaggatcttggcacacaggagcaggttaacttcatcgggtgtgtaatctgtgaattttcacaaagctctgcacttagcagggcttgtgtttggtttaatgttctgctgctattgtgttgacattcttagtgatttttgagcaagggctcctacattttgattttrtgctgggccctacaaattaggtagtcagttctgcacagaagatatgcttctcgtccaaataaatggtaatagaaatggctcagggaggaatgatgccccttgaagaataaaaaataa

SEQ ID NO: 367956 - DNA, 534 bp, Homo sapiens
tctcctgcacagctggctctgtgtgaattactctttctttattgcaattcccctgtcttgataaatcagctttgtctaggacccattgggtggttatgatatcaggtaagtaaaacaaaacccagtttactctgtttcctatatgcacctgcaactgtctataacacagggatgtctaccacccagccactgtcctcagacgctagtgcaagaggcagacaggtcaaccagcagtttcaactcaggaagcctgaggatcttggcacacaggagcaggttaacttcatcgggtgtgtaatctgtgaattttcacaaagctctgcacttagcagggcttgtgtttggtttaatgttctgctgctattgtgttgacattcttagtgatttttgagcaagggctcctacattttgattttgtgctgggccctacaaattaggtagtcagttctgcacagaagatatgcttctcgtccaaataaatgktaatagaaatggctcagggaggaatgatgccccttgaagaataaaaaataa

SEQ ID NO: 367957 - DNA, 547 bp, Homo sapiens
taggtaagctattattagtctcacaaggcagatgaagcccagaaatattaaacaacttgttcaagctggttaacaacagactgggaaatcaaccctaaatcagagggtcagagaatcatggcattcaaaatctctaagtatctcagagagtctctgggttcaacccactcattttatactttgggaaactgagtattgatgaggtttagtgacatgcttaaattcacattgcaaatctgaggtagatctasgacaaacataaactttctgaagccctctccagtgttatttccactacattaaactggttctgccttttaaagtcatttttaaaatatgttgggtaattattgaaattaatctgccatacttgaggagattcagtgctttatccaaatggcttgttaaatcccctctattgccttgatctctgttggaggcagattcattcataacacatgacccaagcactcagaaacaactttaaccataaatccataatactcttttaccctttgttgaaatcagttactttactcaaaaagtg

SEQ ID NO: 367958 - DNA, 534 bp, Homo sapiens
caagaagacattgaaaataaaaatattatattagcaaaactgaattcattaacaaaaattatttcattatgaaaatgctgttgcaatctatcaaacattttaggaagaaataataccaacatttttattaaaatataaaagaagataatctttttcattaaagagaaaagaaaatatgggacactttctaatttattttatctgactatcatagatgtaatattaaagctagacacatacattcaaggaaaaaaaaatcacagaccaatattccccattaataaaggcacagaattcaacaacaaagtattagtaaayttaatctagcaaaatagaaaaattgtaatacatcttagcaaagaagaagtgttcatcccagaatgcaaggttagttcaatgtttaagaaacaatcattttaagtctgaaaatagagtgaaggagaaaatttttatgattatctcaataggcacagattaaatttagccaaatttaattttaattcataataaaaactcttaacaaactaagaatgg

SEQ ID NO: 367959 - DNA, 590 bp, Homo sapiens
tgtttgtagcaactttatacatatcacaaaactgcaaactacccaaatattctcaacaggcaaaaagataaagatgttgtattacagctatacaatataaaactactcagcaataaaacagaataaattactaatattatatgcaacaacatggaggaatttgaaagctaatataagccagatacaaaatatatatgctatattatttgattcatctatattcctagtaccagcaaagctaacatgatgaaaaaaaacccagaacattggttgtcactggttgtttggtggtaactgggatagatttgaaatggacacatgagtgctacctaggatgatgkgagggttctatgttttgacagggatgtgggttacacagatacttgtatttatcaaagttgactaaattgtacatctggtatctatgtattttattgtatgaaaactgtattacaatgaaaagaaaagaaaaatggaggaaaaaacgaggcagggagaaaaggagagagatgaagaagaggtagaaggaacagagggagagagaaaaaataatggtcctaggaactggggaggatgtgagccaggagctt

SEQ ID NO: 367960 - DNA, 522 bp, Homo sapiens
agctctgacccctgacttctgctctattggctttaaatagcagttggatttataaaagyctattctcagagattcgtttgtatagttttcttgttcagtttctttaacttggaatataaaagttgttccaaattgcccactgtatatctgccaaacttttatgtgaagaattgggtggcaggtgtttcattctgtagtcattcttagaagggtttgttcccatgtttgaatggagtcagttgtgcacttaccccttcccccaagctctcattgcagccttgcctgaaatctattcttctgaagtacagtggaatgttaacccatttataattgcaatgatcattcatttctctttctattgctttgctgtgccaagcacatgggagctaaattcttggcaaaagtctttttttgcttgtagtagtaggaagcagaacttactctgccctgaaatgtgcacagtggagggagatgaggaaagccctgtagtaacggaggaaggaatttctcaattcaacaatt

SEQ ID NO: 367961 - DNA, 629 bp, Homo sapiens
tctgtataattctgtaatggtctatataagccattatrtatttatcaaaacccatagactgtacagcaccaacagtgaaaagtgaatactaacataaactgtggaccttgagtgataatgatgcattgatgtaggtttatcagttgtaataaatataccattctggtgtgtgatgttggtaatgggggaagctgtgcttctgtgaggcagagtatatggagactttctatgcattctgctcaattttgttgtggaactgaaaactactctttaaaaagaggttattgaaaaaacaatctggcataatgggaaacaaggtactatgttatggtaaactgggcttgttctcaataaaactcaatgtgaaattgtggtaatcctgggttggaacatttgctatagccttgaaaacaacaaagcccttttcctcctcttagccaaaaatcaagatggcagaatgggtctttaaaaggcaggctttggattaccttatccatccaaattcatggaaggaaaatgtaggtaggaacaggaaacaaacccatacatatacaactttttatcacacagtgcccacaaaaagacctaatctgattaatgagagtaaaaacatcttggggaatgagcaa

SEQ ID NO: 367962 - DNA, 629 bp, Homo sapiens
tctgtataattctgtaatggtctatataagccattatatatttatcaaaacccatagactgtacagcaccaacagtgaaaagtgaatactaacataaactgtggaccttgagtgataatgatgcattgatgtaggtttatcagttgtaataaatataccattctggtgtgtgatgttggtaatgggggaagctgtgcttctgtgaggcagagtatatggagactttctatgcattctgctcaattttgttgtggaactgaaaactactctttaaaaagaggttattgaaaaaacaatctggcataatgggaaacaaggtactatgttatggtaaactgggcttgttctcaataaaactcaatgtgaaattgtggtaatcctgggttggaacatttgctatagccttgaaaacaacaaagcccttttcctcctcttagccaaaaatcaagatggcagaatggrtctttaaaaggcaggctttggattaccttatccatccaaattcatggaaggaaaatgtaggtaggaacaggaaacaaacccatacatatacaactttttatcacacagtgcccacaaaaagacctaatctgattaatgagagtaaaaacatcttggggaatgagcaa

SEQ ID NO: 367963 - DNA, 608 bp, Homo sapiens
tcctttcatctagagccctgctcattaatattattccatccatgcacttaacattagagtttccaatctactcagaatgattgaattcctatacatatattctccttgwgaggagagaccagtgaaatgaagcagttcaattgttttgccaatttaattttttcagttattggcattccggtttatttatctctcttctggtaggagcttattcttatatatccaaaacccagcatggttcttgaacacagcagaaactcaataagtgtttttacatttatcctgaaatatagatattctaaacctctgcagagcagtgattctcaaaatgtggtccccaaactagcagcatcagcattacgtgagaatttgctggaaacacaaattactggatcccacccaagacctactaaatcagaagttctgagggtggggcccagaaaactcagctttaccaagtcctccagatgattctgatgcatggtaacatttaagaaatacttctttagagtgtagcctaatgaactaatgaactgaagttcttgaaccagacagatgataccataatgagcccaccaagttccgccttctgaagggcttgttgatgg

SEQ ID NO: 367964 - DNA, 549 bp, Homo sapiens
aacacaaattactggatcccacccaagacctactaaatcagaagttctgagggtggggcccagaaaactcagctttaccaagtcctccagatgattctgatgcatggtaacatttaagaaatacttctttagagtgtagcctaatgaactaatgaactgaagttcttgaaccagacagatgataccataatgagcccaccaagttccgccttctgaagggcttgttgatggcccctgtaggctcacggggctgcagccctgccagtttgctsacttctaaaaggcctgacaggaggtgttttctgcggtatatcgaacacagatcagaatgtgacccttacaaactcagactaacctttgtcaaccctatattaccataggcattacctcaggaatgaattgaaatgatctaggctcagagaaaattatacgtaaacaagaatggccattttaaaatgtacagtgtgaaagacaactctcattgcatttcctctctatagtcagcctaacctgaagaagtcaaaaaaacttcctcaaaagcagacaacc

SEQ ID NO: 367965 - DNA, 549 bp, Homo sapiens
aacacaaattactggatcccacccaagacctactaaatcagaagttctgagggtggggcccagaaaactcagctttaccaagtcctccagatgattctgatgcatggtaacatttaagaaatacttctttagagtgtagcctaatgaactaatgaactgaagttcttgaaccagacagatgataccataatgagcccaccaagttccgccttctgaagggcttgttgatggcccctgtaggctcacggggctgcagccctgccagtttgctgacttcyaaaaggcctgacaggaggtgttttctgcggtatatcgaacacagatcagaatgtgacccttacaaactcagactaacctttgtcaaccctatattaccataggcattacctcaggaatgaattgaaatgatctaggctcagagaaaattatacgtaaacaagaatggccattttaaaatgtacagtgtgaaagacaactctcattgcatttcctctctatagtcagcctaacctgaagaagtcaaaaaaacttcctcaaaagcagacaacc

SEQ ID NO: 367966 - DNA, 549 bp, Homo sapiens
aacacaaattactggatcccacccaagacctactaaatcagaagttctgagggtggggcccagaaaactcagctttaccaagtcctccagatgattctgatgcatggtaacatttaagaaatacttctttagagtgtagcctaatgaactaatgaactgaagttcttgaaccagacagatgataccataatgagcccaccaagttccgccttctgaagggcttgttgatggcccctgtaggctcacggggctgcagccctgccagtttgctgacttctaaaaggcctgacaggaggtgttttctgcggtatatygaacacagatcagaatgtgacccttacaaactcagactaacctttgtcaaccctatattaccataggcattacctcaggaatgaattgaaatgatctaggctcagagaaaattatacgtaaacaagaatggccattttaaaatgtacagtgtgaaagacaactctcattgcatttcctctctatagtcagcctaacctgaagaagtcaaaaaaacttcctcaaaagcagacaacc

SEQ ID NO: 367967 - DNA, 549 bp, Homo sapiens
aacacaaattactggatcccacccaagacctactaaatcagaagttctgagggtggggcccagaaaactcagctttaccaagtcctccagatgattctgatgcatggtaacatttaagaaatacttctttagagtgtagcctaatgaactaatgaactgaagttcttgaaccagacagatgataccataatgagcccaccaagttccgccttctgaagggcttgttgatggcccctgtaggctcacggggctgcagccctgccagtttgctgacttctaaaaggcctgacaggaggtgttttctgcggtatatcgaacacagatcagaatgtgacccttacaaactcagactaacctttgtcaaccctatattaccrtaggcattacctcaggaatgaattgaaatgatctaggctcagagaaaattatacgtaaacaagaatggccattttaaaatgtacagtgtgaaagacaactctcattgcatttcctctctatagtcagcctaacctgaagaagtcaaaaaaacttcctcaaaagcagacaacc

SEQ ID NO: 367968 - DNA, 585 bp, Homo sapiens
ttggggcaatggcttgacttggtgcattggggtctaaratcttgcatggagaaagtgattataagggactataagtattaacatggcaatttcctctaacgcaggatatcactgcctgacaagtgactctaaccaagggctcattagagatagacaaactgattttgaaaagcaagcagcttcattttcagaccttcagccaaactataacagcaaaagttctgaatgagtctagctgaaatgtgaatggtttaagttttaccaattatctggtctgtctccacgaatgattttggataacaatatcgtaagatactagtgagctgatcttcctgcaacaatcataatcagcccaaagctgagcatcatcatctcaaacacctcacactgtctggcacataggatgtacttggtaaaaatacttaccaataatcaaatgaatgagtgaaggaacgaattgcttgtttgatttatatgtcagaaactttggagtgaaaagagctggatgtgaaaaaagttgtgggagttggagcagattccttaattcttgccttaggtttttatttcatcttccatatcaagtgg

SEQ ID NO: 367969 - DNA, 668 bp, Homo sapiens
ggtttgcctcatcgaaatctcatgttgagatgtgattcccagttttggaggtggggcctggtgggaggtgttgaatcawaggagtggattctccatgaaatgcctaacatcattctcttggtgataaatgagttctcattctgagttcacacaagatacggttgtgtataaagaggtctctcttgctccctctctcactatgggatgtgcccggggcccttttacctttggccatgattataagcttcttgaagccttcaccagaagcacatgctggcttcacacttcctgtacagcctgcagaaccataagccaatttaatttttttctctataagttatccagcctcaagtattcctttatagcaatgcaaatggactaaaacagattgtgttgtgatttttttacactcataaacattgctgaaatttgtggcataatttaaatgattttaatgatattacaagtggtcattaagccattttaattttccatctataatgaaagataaaaagatctgtagcagatatatcatgaaagtatcaaaagagtcttaaaaactgaagtatttcttgtatatatggggttcatgaatattaatacaaaaatgaaaatatttcttcccatacctgtttattaaatttaaaaaactgtatatatttcaaata

SEQ ID NO: 367970 - DNA, 630 bp, Homo sapiens
cctatgaaaataagttaaaagaccttagctggacgttaaagtatcctccaacatttaaattctcaaaccccattttcaggcattacgtttcctttttgtgatctgacttcttatcctttccttccccctgccattgttcatcatgttttcccttactggaaatagcatcttttargtttcaaggctctccagtgctacttcctcattgttatgatcctcttgccctcagctagaagtgacgtctttatccttttaaatgctagcattttctgcactttttaaaaataagttttattgtgtatatttaagttacgcaacataagatacatacatatagtaaaatggctactatagtgaaccaaattaacatattctttatctcacatagttacccattccccccgccattgtcccatggcaagagcacctataagctactcatttagcaaaaatactaaatataatacactattattaactatagtccctcatgctttacactagatcttttgatttgttcatcttacatagttgatacattgtatcctttgacctacatcttcccttttctcccctgccatcccaaccatggtaatcattgttttattcactatctctatatataagaca

SEQ ID NO: 367971 - DNA, 668 bp, Homo sapiens
ggtttgcctcatcgaaatctcatgttgagatgtgattcccagttttggaggtggggcctggtgggaggtgttgaatcataggagtggattctccatgaaatgcctaacatcattctcttggtgataaatgagttctcattctgagttcacacaagatacggttgtgtataaagaggtctctcttgctccctctctcactatgggatgtgcccggggcccttttacctttggccatgattataagcttcttgaagccttcaccagaagcacatgctggcttcacacttcctgtacagcctgcagaaccataagccaatttaatttttttctctataagttatccagcctcaagtattcctttatagcaatgcaaatggactaaaacagattgtgttgtgwtttttttacactcataaacattgctgaaatttgtggcataatttaaatgattttaatgatattacaagtggtcattaagccattttaattttccatctataatgaaagataaaaagatctgtagcagatatatcatgaaagtatcaaaagagtcttaaaaactgaagtatttcttgtatatatggggttcatgaatattaatacaaaaatgaaaatatttcttcccatacctgtttattaaatttaaaaaactgtatatatttcaaata

SEQ ID NO: 367972 - DNA, 668 bp, Homo sapiens
ggtttgcctcatcgaaatctcatgttgagatgtgattcccagttttggaggtggggcctggtgggaggtgttgaatcataggagtggattctccatgaaatgcctaacatcattctcttggtgataaatgagttctcattctgagttcacacaagatacggttgtgtataaagaggtctctcttgctccctctctcactatgggatgtgcccggggcccttttacctttggccatgattataagcttcttgaagccttcaccagaagcacatgctggcttcacacttcctgtacagcctgcagaaccataagccaatttaatttttttctctataagttatccagcctcaagtattcctttatagcaatgcaaatggactaaaacagattgtgttgtgatttttttacactcataaacattgctgaaatttgyggcataatttaaatgattttaatgatattacaagtggtcattaagccattttaattttccatctataatgaaagataaaaagatctgtagcagatatatcatgaaagtatcaaaagagtcttaaaaactgaagtatttcttgtatatatggggttcatgaatattaatacaaaaatgaaaatatttcttcccatacctgtttattaaatttaaaaaactgtatatatttcaaata

SEQ ID NO: 367973 - DNA, 564 bp, Homo sapiens
agttgtcaacctcttaccctctccaggtcaatgacatgtcctatttggtaggcatacagtagcttgatagttgctttaatgtttaccaattttattctatacctggggaaatgaagcagatgattatatagaaacacatagtcaacytgaattgtaaactaatcccaactctgtaatgcagaaaagaactctggagctatacatttgaattatttatgtgcctacacatcttcttaccagctatgtaacactgggagcaagtcctttaatctccctgatcctctgtttcccaatctacatgaataattaaataaagcccttgtctcataagcttaggatgagctttaaagaagataatattcacattggcatcaaaattgtaactgacatattgtaggcttgccctcaccatggattcaaaccaaatctaagtggtctgtttaaaggcatttgccttttctcctatcatagctattctgacaatcaaaatacatcatagaaagatgactactgagactgaggatccaaatcctgtttctagctccactgtttgtttgtttgttt

SEQ ID NO: 367974 - DNA, 587 bp, Homo sapiens
agaataaagttttaaaaagatctccttggatgttgtatggagactaagccaaagacctaaaatattctggatctttcttgcctttaaagttattagacactaccagacagacttctggagacagtcaaataagttctaacctaagatctaatgaaagcataatgaaaatataccttttagtacttgagaatttgacatatatggatatatattttttaaaaatagatccgattttaaatttgggttcattagctatatgatatcagactgtttcacatctctgtcccttagcttcctcatctgccaaaatagataacaatacctatctcaaagaagtttttaaatataaaaacatttcaaaagggtgagatggctgacactgaatattaattcaataaatatgaatgatttgtatgcaatttaaattttaggttttgagctgatgattctttagtttrtaaatgaactaaaagctgcctgacacacaggtgtttaaataagaaagctaaacagatgactaaaaattgtttattgagctgaacaaggacagttaatactacccgggttaacaggtgcttaattgccat

SEQ ID NO: 367975 - DNA, 579 bp, Homo sapiens
aggctttcctcttattactgttctggccccattgttattcctctagagataaaacataccaagttcataaaaaaattttcatcctcacacatttcctaacagcatatatttatcaggaactcttaatagtttcttgtgcatgatcaattctgagtctttattcccaaatttaacacatttgtttctgcctatattaatatattaacatacttaatggttatctgattgagaagggtctttgggtaaccaggatggaggaggaggtgttgaagatatctgtttatagggctcttctgcttagaattctaattgaggccattttaagaaagttgctccctgttaattcaccaaaaatttaaacatgaaacaatctattaatgtgtaaatattaatgttaaactataaaacaatatgttattttatatctacttttatatagatttataaatatttgtatttactcatattttatctatatgactttattatattcatacaaatattatattactatrtggatcaagtctataaatggcacatttgttccttaatatattattgctgtgctccagaaatact

SEQ ID NO: 367976 - DNA, 597 bp, Homo sapiens
catctactgtgttagaaactgtgcttggtgttatggataagatggtgacttaaacatgccccctgccttctggcagttcccaatctagggaagaaaacagcaagtaagcaagaaattgtaatgcaaggaattaggatacaaatcaggaataaacacagtatgaaaaggtggggtattggagagcttcaggccaggcatcctgtgaggagtgaaatcagtgctgagattagaagaatgagtggggactagaagacgttagtaaggcaactaactaactatgtgtatgtggaggggtagttgatggtgtggttattatactagtctgccaagtaccggaaatggtgaagattaaggctaaagaacaatcagtatgtttcttyattttttaaccgagtcatttaattatcaaggattcttacaaccatttgcaattcatttcaggatgtattgtgtctagcattaattattcttcattcattataagtttgttttaccaaatcactctcagaagaagaaagaggacctaagagaagtaatggatgttgaaaatgcctttaatctttataacagctcggtctaaataaatctcagaaagcc

SEQ ID NO: 367977 - DNA, 598 bp, Homo sapiens
gcaacatcatggcatattttgcacaccaagatataaacaccaagctatttacttacatagagaaaggttccttgctgctctgcttatacagaagaaaaaaagaaaaccataatgatattcaaggaattatctaatgtgctgtacatactttgcaatacaaattgagtacattgttttccctaaaaatgcaacctcaagcagaaaccttaacagagcatttacattattgaatccttgttattaacaaataaaacatgtattcattcactgaagctgtaagataccacctctratttattatttaactcatttaagtaaaaagtgtactatatatacatacatacacacatatgtacagtctcagtaacactaattggaattccaaatgtatctatctgtccataaatataaatatgaaaataaatatattaagtattaactgaatgtacccagttatatcattaaagattatttaatgggaaaaaattagagccagtaatttttgagaaagaggctgtatctcaaaaaccctgcagaaaaaacatgaagttaacctaaatgtccaggcatgctatgcaatttaacattatgacacttc

SEQ ID NO: 367978 - DNA, 638 bp, Homo sapiens
gaaaagtagagaaaagtttttacctatgatcctaagaaccaatataactacttttatattttgttattttggggatacttttctatacgtgattacttttatacagtgtgataattctgtgtatataattttttatcattttttcccaacttcatgttacactaggaacatttccccatattcttaccaatctttcagaaacgtcattttaataattatgtaatactccaatatagagatttatcacaatgcatgtaacttttctcctgatttaacttctaagtctgttacagttgctttctattgttaatgttagagtaatcacatttttcatttttattcactttttaccttaagtccttaggttagatactaaggagctaattattgtgttaatgggaagggttgtacccaatgcttctggggtccrtgtcaagttccccctaccagtctctcattttatttgtggctgggatggttcattctaacaattaggctcattttacattgacagcatctcaccttaagtgtgctgcccagcttgcttttctttaaccaacactaggaagctcacagatgctttcttggcctgtgcacacatgatgttcagcagtgtaggggatcgagcattcctaaga

SEQ ID NO: 367979 - DNA, 431 bp, Homo sapiens
cttttttccttcttttttttttaactctgctgggaccatctttgtaacattattaaaattattaatgtagaatatactctttaccaggccctcttctcagcactgctcatgaattaacttatgtaatcccataaraaccctatggggtgtgaaccttgtctgttttatatgtgctgcctattatagatgaaaaagcaggcacagagaggttaagtaacttgcccaaggtcacacagctagtgagcatcagagcacggacttaacccagttagtctgacttcagaattccatcttttgaaccaggaacaccaaacctgttacacaacatgtacatcaactggacttcacatatttcacttttgcacgtttctgttttcaattgcatactcattacatacaaacatagtgtcttgcctatgactctctcccat

SEQ ID NO: 367980 - DNA, 512 bp, Homo sapiens
ccccagtctttgcctcaaataaaacagataccagaaacagggagaagaatctgcccttttctgagaggtacaaagacgaccatggtgtgcatataccctcaccacttaagggctgtgtgccctcgggcaagttactcargctctctgaacgttatgtttttaactgtgtcaacgtgaactagataaacactatgaatctcaggttccatctgtaatttggcattttgacttatcacctagggtttctgacagcaatgagaaaaatgatggaaaatgtagtgcagagtccagcacctgacaaataataatccattagcattttccttcaatatatttcctactgaactacaggaattttgaggcctcaacttgatattatccctattttaaactttctaatggccagctgcaaacacatccatgtcaactccctccaaaatgttatttgtcctttagatctatttcagatgtatttcttgctgaataatctttgtatgcaatgacccctgtat

SEQ ID NO: 367981 - DNA, 512 bp, Homo sapiens
ccccagtctttgcctcaaataaaacagataccagaaacagggagaagaatctgcccttttctgagaggtacaaagacgaccatggtgtgcatataccctcaccacttaagggctgtgtgccctcgggcaagttactcaggctctctgaacgttatgtttttaactgtgtcaacgtgaactagataaacactatgaatctcargttccatctgtaatttggcattttgacttatcacctagggtttctgacagcaatgagaaaaatgatggaaaatgtagtgcagagtccagcacctgacaaataataatccattagcattttccttcaatatatttcctactgaactacaggaattttgaggcctcaacttgatattatccctattttaaactttctaatggccagctgcaaacacatccatgtcaactccctccaaaatgttatttgtcctttagatctatttcagatgtatttcttgctgaataatctttgtatgcaatgacccctgtat

SEQ ID NO: 367982 - DNA, 535 bp, Homo sapiens
tccaaaatttctgtaatatctgagaaagttatgtgttctttgtgcaaaggttctctgactatccaggcctaaggatgactcaactgagatggttggattttcagaactgawttcctgtgttattcttgctttcaaacttttccagtggctgacttttagcagtggaacctaactgggccagcttttgtgtctcctcacatattacatttcttcttccccaaggagctgtcatttttctccttcttgaaataaattcatctaaagagaatttctctcaatcaacttcccatcattctctctggagtcttcagaactcactattatactgtcaaaagcctgccatccatgcattcactcaaacacaactattgaaagcttaatgataatagtagttactacttaactgaactcctcagatatgccttgtcacctgtactgtgggttcagtaataaataaagcatttttgtccttgaggagctcccagtaaaccaagagaggcaaatatgtaagtagttattcatgtcagaggaagag

SEQ ID NO: 367983 - DNA, 597 bp, Homo sapiens
cagccaaacacaaaacaatcacaggtgataaaaacgtcaccaagagaacttctgtaatatgcacaacaatttcccccagatctaaagatgttaataaatttctgaaaatatctaactttctcacagccaacagatgtaggctaggggttcagagcttctaggtgacagagactagattgtaccttaagcttcatgactttcaatccctctgtctggttggtacctgctcagcctttaagytttggcttatgttcaatgtcctcaagagatctttctagatgttcaatccagattgatccccgctatcatctttctcatagaatctggttcttttccttcatagtacttacgctaatttaccattgtagatctattatttgttggctatatttttctgcacttgttcataagctttgtaatgagtcattcatccatccatacctagcgctgttttgttcatccatgcatacctagcactatcctggcacagagtaagtctcaataagtatgtgtagaataaatataattccattttgcatcatgccaggtgacataaaagtgtaaaaaagtagtagatggtatgttcttagtttggtc

SEQ ID NO: 367984 - DNA, 474 bp, Homo sapiens
agcagaatatgcaacagaggcctgtgtggcttgcaaaccctaaaatcttcactatctggtcttttatagaaaaagtttgccaaaccatagactatccatgctgttttttcaaccttgtgatgcagaactaaaagagacagaaagcctatattgatttagtctaaaaatgcagagctcaacttagagatcttggaagatagaggagtgaatgaaagaagtagaagaaaactgtgtttggtgtttttcagtgaagtgaataagactacatgagatagtagatattctctgccgttgctgttgcacctttctgtaagcaattaaaggataagtaactatagggaagttttttttttaataggggatattgctccctgtcatgccacgtaatctcttaccatttttagragacattctagtaaagattattataaatttttgaaagtggatttgtgttttctttagggtgctgcactg

SEQ ID NO: 367985 - DNA, 516 bp, Homo sapiens
ccaatggtgagacttcagggggttctttaaatggatgcctgcacaaaaataaataatgagcatgcactatatctacacttatttatggattattttcaatgaataattttattttattcttaaaattcatgtagggagaaggaatcaagttctccatttcagaaattagaaaagtttcaaaaagggaaaggaagtatatccattaagctcctctgatggacattcagggactccgtagacatttccacattccctcatrtaagcatcgcaagaagccagtttgcttattaccatgtatttaggtgttattgttgtcttttaacatatgaaaaagttgtgactgagaagtttagtcgagatcccacacaattagcaagctctaaagttggaatttgagccctatgtctggctataaccttgacctctttccattatacaatccttgggttctctatgtaggattatcctaccttcagaaataaggagacaaaggtttgcacaggaatgaggtttgct

SEQ ID NO: 367986 - DNA, 516 bp, Homo sapiens
ccaatggtgagacttcagggggttctttaaatggatgcctgcacaaaaataaataatgagcatgcactatatctacacttatttatggattattttcaatgaataattttattttattcttaaaattcatgtagggagaaggaatcaagttctccatttcagaaattagaaaagtttcaaaaagggaaaggaagtatatccattaagctcctctgatggacattcagggactccgtagacatttccacattccctcatataagcatcgcaagaagccagtktgcttattaccatgtatttaggtgttattgttgtcttttaacatatgaaaaagttgtgactgagaagtttagtcgagatcccacacaattagcaagctctaaagttggaatttgagccctatgtctggctataaccttgacctctttccattatacaatccttgggttctctatgtaggattatcctaccttcagaaataaggagacaaaggtttgcacaggaatgaggtttgct

SEQ ID NO: 367987 - DNA, 502 bp, Homo sapiens
gcttaataaacttcagtttactgatttaaagctataaagttattagtaatatgagaaactcaatagctttgaaaaacagaatacatttagaaaggaagccttaaagatattgaaaatgaattttgtttgtcttcaaagatgtcatttttgaaattataaatatagtgcatattctttaaagtaaatttgggaaatacagaaaagtaggaaaataacaatatactctagttctcctacctaaacgtaatcattgttgacatttagtatactttacttttagacatgtgtaattttgcttagttgagacatgctatatggacaattttgctcgctttttccacttacaatattatargcactttccaagctattgttgtattttaatggctgcattatattccatctagcagatgcattatagttcacttgagcctttcctgtcattggtcatttatttgctttctattagcttctattgtaaataatagcagtaagcttttct

SEQ ID NO: 367988 - DNA, 654 bp, Homo sapiens
aacatgaaattatgcattgcctattttgtacattaaattatgcttcttgttgtggggattcaaaacataaagcatggtcttgatccttgaagagatgcatcattcaattcaacaaacatttatttcctgaacacctgttactgtaccaggcatagtgccaagtgctagaaatagaaggaaaaacaacatataattcttttttctttctcatttttatttgtttattgtatttcccattaatttacttgttcagtgagatgtttttccccatgcaatccaccaaacgagttgatagcctatgatagacatgtaaacagattattaacgattgcatataattgttggtttaatgaaagtgtaaattsagctctatggaagcaaaagtaggaacactgagaaagcctcccaaaatgggtcacatttaatcaggccttaaagaatgaactgaattcagccacatagaactagtcttctaactgaccttcctgcttccctctttctcctccctctaatatagtctctacaaaactgctcaattctttaaatgaggattgaggtatgtcacactgctatgtaaaaccccttagtgatctcccaatgctcctgggagaaaactcaagctcctcaccataccacaaagctctgaaggttctg

SEQ ID NO: 367989 - DNA, 533 bp, Homo sapiens
aaaaaattcatgtatgtttcatatacattatgtcttatgtagatagcctgaaggtaattatatacaatattttaaataactttttgcatgaaacacagtttgaactgcattttgactgcaacctgtcacatgaggctaaaaggtgaaataaatctcatttttaaataaaaatgaatattttctattacactcaaggcacagtgcataggatgagaaggaataactattattccttgctattcttgtactgaggttgaattttagccttaaactatggtaaggaaagcccttgttccttcatttgagcccaatgtcaggtcaaatatgttaaaataaacatagtaacgcaagtcaggggcttccagagagctgcatcacagttttgtgcataagatacacttgaacaccagaaagaataatgcttgtggataaaaatgcgacacaaaacatrtagttactaggctgcatttcacgtactgacacccagcttggctcagacttcaaaatgtgacatcttgcccaaattcaacaaa

SEQ ID NO: 367990 - DNA, 623 bp, Homo sapiens
gggtctcattttaaaatatsacaaatatctaatttggtttcatccatgccaataagcctctggtagaccatttcctttagtttaaggagtttgaattggatttttagtcattaatgactttcaaaatggtagcaatggcctgagttacagagggagaaagaggaggaggaggaagaggagaaacattgacacatgtgcatgggcttcctcggccctctcatttcttatcatttcttaaaatatgttatcactacaagttactccacctttagaaggtaccacgtcctagcaagactacaatatttaagaaagttcttgcattatgaatgcacttatattataaatataaacttgtcttttctaaactactttttttaaaaaaaacactgacttgatcttatatttatttatccctcaatcatctcaaattatgaaaataaagccttcattagggcatcctcctagcagtctttgtcagtaacgcacacacaagtggcaaatgtgagcatgccagggatatagtcatggcacctccacaagtgaactgagtggcccttggtaagtcatgtgtcccttggaccttcttcatggttcctgtggtaggccgaatggctctccaccaa

SEQ ID NO: 367991 - DNA, 623 bp, Homo sapiens
gggtctcattttaaaatatcacaaatatctaatttggtttcatccatgccaataagcctctggtagaccatttcctttagtttaaggagtttgaattggmtttttagtcattaatgactttcaaaatggtagcaatggcctgagttacagagggagaaagaggaggaggaggaagaggagaaacattgacacatgtgcatgggcttcctcggccctctcatttcttatcatttcttaaaatatgttatcactacaagttactccacctttagaaggtaccacgtcctagcaagactacaatatttaagaaagttcttgcattatgaatgcacttatattataaatataaacttgtcttttctaaactactttttttaaaaaaaacactgacttgatcttatatttatttatccctcaatcatctcaaattatgaaaataaagccttcattagggcatcctcctagcagtctttgtcagtaacgcacacacaagtggcaaatgtgagcatgccagggatatagtcatggcacctccacaagtgaactgagtggcccttggtaagtcatgtgtcccttggaccttcttcatggttcctgtggtaggccgaatggctctccaccaa

SEQ ID NO: 367992 - DNA, 623 bp, Homo sapiens
gggtctcattttaaaatatcacaaatatctaatttggtttcatccatgccaataagcctctggtagaccatttcctttagtttaaggagtttgaattggatttttagtcattaatgactttcaaaatggtagcaatggcctgagttacagagggagaaagaggaggaggaggaagaggagaaacattgacacatgtgcatgggcttcctcggccctctcatttcttatcatttcttaaaatatgttatcactacaagttactccacctttagaaggtaccacgtcctagcaagactacaatatttaagaaagttcttgcattatgaatgcacttatattataaatataaacttgtcttttctaaactactttttttaaaaaaaacactgacttgatcttatatttatttatccctcaatcatctcaaattatgaaaataaagccttcattagggcatcctcctagcagtctttgtcmgtaacgcacacacaagtggcaaatgtgagcatgccagggatatagtcatggcacctccacaagtgaactgagtggcccttggtaagtcatgtgtcccttggaccttcttcatggttcctgtggtaggccgaatggctctccaccaa

SEQ ID NO: 367993 - DNA, 590 bp, Homo sapiens
ttgggcatggaattctttatgacgaacagtttcggggttttatatccccacttcacgatcaaagcctgcgtctctgatgctaatcacctgctcagccaatcgaggaasaagtgagaaacctctctcctgctcagctgtgtccctcattggctccagccctgaactgctatctaagtttatttacccctggatggctgattttaaatcagctatgaattaatagcttttcagaaatagaagccaccttagagatcgtctgacttaaattcattacatggatttaaggccatagaggcagggagtaaagtcctccactctaggtcacacagccaggtagaggcgaggaaggacagagtaaagaacattactcaagatttccagtgctactgagcctctgctgctctaaacccctcctctccagcaggctctatacatgagcagatcattgtaggaaatttcagttaattgctgccaagacccctgtaagacttttgctatcatttctcttttggtaaatcaagaataacattagtgccaattttccagttaaaataaatttcaagtgcaaaggtttgaatcaaactgctttg

SEQ ID NO: 367994 - DNA, 590 bp, Homo sapiens
ttgggcatggaattctttatgacgaacagtttcggggttttatatccccacttcacgatcaaagcctgcgtctctgatgctaatcacctgctcagccaatcgaggaacaagtgagaaacctctctcctgctcagctgtgtccctcattggctccagccctgaactgctatctaagtttatttacccctggatggctgattttaaatcagctatgaattaatagcttttcagaaatagaagccaccttagagatcgtctgacttaaattcattacatggatttaaggccatagaggcagggagtaaagtcctccactctaggtcacacagccaggtagaggcgaggaaggacagagtaaagaacattactcaagatttccagtgctactgagcctctgctgctctaaacccctcctctccagcaggctctatacatgagcagatcattktaggaaatttcagttaattgctgccaagacccctgtaagacttttgctatcatttctcttttggtaaatcaagaataacattagtgccaattttccagttaaaataaatttcaagtgcaaaggtttgaatcaaactgctttg

SEQ ID NO: 367995 - DNA, 546 bp, Homo sapiens
gtgagaaacttgccctgtgggtttgtgcagaactgtcagttatatccaaggttctgatacttaactacccttcatctacccttcatagtgttatctttcaggtttatagacacccgtgtcaccttttggagcaaaagtgggttatataatgccgtggcaggcactgcctctatttccaaggtaagagaaatattgttgaatttttttctcttagtttccatggctatcctccaaaatcagatgtttaaacttwtatttttaaagcatccattattatggcttattagctaatgctgtgtctttacttgatcaatacaacttactgttgagagaaaatgtaaataaagcaaaatagagtaagaatcactctaattaatggacaaccagtctgacgatgtttgaattccatcatccttggcatcctttttgtacaatcttctaatttacatataaactagaacacaaaacagacccaaatatttttgcaaattaattttcacacagcctaaaccatggaacttaactgctgcatcacagcgatgtgtt

SEQ ID NO: 367996 - DNA, 183 bp, Homo sapiens
tggacaaccagtctgacgatgtttgaattccatcatccttggcatcctttttgtacaatcttctaatttacatataaactagaacacaaaacagacccaaatatttttgcaaattaattttcacacagcytaaaccatggaacttaactgctgcatcacagcgatgtgttatcttgccaaagt

SEQ ID NO: 367997 - DNA, 657 bp, Homo sapiens
cctgtttgtacttggttccaagtggtgactggctggatccccaaaagcacatcactaaaggtaaagagaaaggaggaagagggaattctcttttgctgatcaccccctgtttaacaagctctgtgctaggaacttgacacatctwatcttgctcaatcctcctcattattattattttacaggtgaggaaaataatactcaaagaggttaaatgactttctaaggtcacctggccagtaggttagggaactagaatttgagatcagtttctttctttaaaacaaacaaagaaaaaaaccaaaggaagtaatgtatgtatggtaacaggtcaaatgatccacaggtgtataaagcaagaggtaatcatctcttcctccttccagtaacatcctgaggaaaccagtgtgaaagtgtattaggcatcattcaacatctttcagtatactcctacaaacacacatacaaatatatacacatgtatatatatatttgagaggttcttttctaaaaaagaagtatttttataaaaagtaacattatgccatggatgtccctccatgtccatactaatagagcttctctttcttgtgtaaagctacagaacttctacagtttgaatgcacttcacttttctcaatcattccctagatgaaagac

SEQ ID NO: 367998 - DNA, 581 bp, Homo sapiens
tttaacaagctctgtgctaggaacttgacacatctaatcttgctcaatcctcctcattattattattttacaggtgaggaaaataatactcaaagaggttaaatgactttctaaggtcacctggccagtaggttagggaactagawtttgagatcagtttctttctttaaaacaaacaaagaaaaaaaccaaaggaagtaatgtatgtatggtaacaggtcaaatgatccacaggtgtataaagcaagaggtaatcatctcttcctccttccagtaacatcctgaggaaaccagtgtgaaagtgtattaggcatcattcaacatctttcagtatactcctacaaacacacatacaaatatatacacatgtatatatatatttgagaggttcttttctaaaaaagaagtatttttataaaaagtaacattatgccatggatgtccctccatgtccatactaatagagcttctctttcttgtgtaaagctacagaacttctacagtttgaatgcacttcacttttctcaatcattccctagatgaaagacattacagttatttccatcttactttaccatgaa

SEQ ID NO: 367999 - DNA, 239 bp, Homo sapiens
ggtaattacagttaaaaacaatgcattgtctacttggaaagtgctaagaacagattttaagtgttttcaccacaaaaaaataagtgtgtgaggtaagacgtatgttaattaacttgatttagtttaactacttcaatctastgatcagatgcttgtagtatctctggggattaagaacactcaatggctcctcattgccactggtgcactgaacctcctttagtctggctttgactgcc

SEQ ID NO: 368000 - DNA, 590 bp, Homo sapiens
agcacaatgagatctgcaattctctttgcctcataagtcttaaggctttattttcagcattgtcttgttttctttctccaaaacatccaggaaactgaatggctggaagtctgactgcaaaacaatggttaggatagtggccaaatatgtgatgtttctgaatatggaggaggtgggcctgacattccatgctgcagatatgcaagaataactggaggaaagaaccaactggtggggcatagttggcccctgtccacattcacttttcctagacagtcttggaggatggatgctttttccttaagttaggttttctcctccccttargcttttacctatataacagaaacagacttctaatgatatatttatatatgccagtaacatataatatatagagatgatatagctgtgtattaatagttgctctgctatgtgtctataataaacactacatagcagttattgatttatctctcccactaaaatacctttaggggtattcagaatagacgcccctccagcagccatcttgatacactaagatttggggaagcaaacaaaaatagactgagaatgggacaaagata

SEQ ID NO: 368001 - DNA, 583 bp, Homo sapiens
attccgataggacaaggatgaatctggaagttattccatacgctgctctttctgtctccattacctagcccctgccttgctttgctaattagtagttatgcttaaatccagctcaagttttactttgtctagaaggccacctttgattatccccatgagttagatggcacggaccttgctctttcatgacatactaggatgcatttkcatgcaaatagccttaccattgctgggtgaatgtgattttctttctttgattttgctagctagactctgagatacttgaagaaccacctggagttagtcccagcttcacagttaagggcatagttttccacaaactcctctcacttaagatgccagtcacaagtttggaggtctcttgggccactgtcacttttgatgagctggatacaaattcactggtccccacggacaccctcaggtttggtaattcaatagaactcctcccagaactcaggatcatgctatacttgtgattagaatacaaacagggaccaaccaaagtaagagatgcatagaaagaagtctgggaggattctaaatgtgaaactcccaccat

SEQ ID NO: 368002 - DNA, 583 bp, Homo sapiens
attccgataggacaaggatgaatctggaagttattccatacgctgctctttctgtctccattacctagcccctgccttgctttgctaattagtagttatgcttaaatccagctcaagttttactttgtctagaaggccacctttgattatccccatgagttagatggcacggaccttgctctttcatgacatactaggatgcatttgcatgcaaatagccttaccattgctgggtgaatgtgattttctttctttgattttgctagctagactctgagatacttgaagaaccacctggagttagtcccagcttcacagttaagggcatagttttccacaaactcytctcacttaagatgccagtcacaagtttggaggtctcttgggccactgtcacttttgatgagctggatacaaattcactggtccccacggacaccctcaggtttggtaattcaatagaactcctcccagaactcaggatcatgctatacttgtgattagaatacaaacagggaccaaccaaagtaagagatgcatagaaagaagtctgggaggattctaaatgtgaaactcccaccat

SEQ ID NO: 368003 - DNA, 489 bp, Homo sapiens
aactgtgccctggtgacttactcttaagagacatcaaatgaggaaataaatggctattgccaaataaacaaaggcaatgttttaaaagtctctgtcatgtcctgatagttcctgacgatgccactaagcccatttcaactgtcattaatcctagtctgactcattctggttaaggactactgctcccatgtctgagccaacaatgccccaggaaggtactargttaggaaatattccatcccttgagcaggaagaagactctgaaaatagtatattgtctccatgccttgcttaaaggtggactggagttcacataacagcttctttaagtaaccatgccctctgcactccccctaaacctccttgccactttgtggctatttttcttggcagctagtttttactcctttctttcctgtgctcttctcatctcacttttatcagtgtttccccaaaagcagaccatgcttccagtgactcctcagccat

SEQ ID NO: 368004 - DNA, 612 bp, Homo sapiens
gtggcctggacttacgacttagtgctaattaataaaacaaaacagaaatgatggtgggtagagtggattgcatagaaacacccacacccaccgcacaaatttgatgtccatcagaacctcagaatgtgaccttattargaaatagggtctttgcagatataattagttaagatgaggtcattatggctggccctaatccaatgactggtgctctcagacaaagagatacaccgacagaagacagccatgtgaagatggaggcagatattggaatgatgcatttacaagccaaggaatgccaaggattgatggtggccaccaggaatgaggaagatgcaaggaaggattcctcccctagaaccttcagagggagcacagctctgctgacatcttgattttgaatgtttcacctccagatgtgacagggaatacttttttattgttttaagccaccagtttgtgtcactttgctatggcagccctagaacatcagcacaggagatcacttcaaagactgtgatataaaggcactgcggctttctctgtgctcactctctcttggatctctcactccagtggaagttggctgtcaagtcgtgaagatattctagc

SEQ ID NO: 368005 - DNA, 619 bp, Homo sapiens
cctgcccaaaccactctttaattagtatttactaaggccaatctattgctgcatgaacttttaggattcaagaatctgacatacagttatgatactctgtcttagcctctccttataaggatgttgacagccagaagaatcacattgaatcaaagccagtgatagaattctgtcaatgactgaytatacttatacagttagcagcccctcctaggagattgccctgttgatccaagaatcaccaagagcttttcctgagccatagctttatagggcatgctatgctattttgcccatcatgaaagagctggcagtccacaaataacctgagggcaggatcacactctaaagtgacttgagcaaatgatttgtgtaagctaatgtgaacctcctatggctgtgctgtcatcaaaacactgggtcaaatcaaataagtccatcaaggtgctataaaatatgcatgcaaagagaatggatgtgatgttgttgagaataataaaacagtccataaaagctatgaaataaatcaactgttctttcaggcatggaatacaaaacaccacatacatccatatatattatatatgctgtaagcacacatttattatatatgagcact

SEQ ID NO: 368006 - DNA, 619 bp, Homo sapiens
cctgcccaaaccactctttaattagtatttactaaggccaatctattgctgcatgaacttttaggattcaagaatctgacatacagttatgatactctgtcttagcctctccttataaggatgttgacagccagaagaatcacattgaatcaaagccagtgatagaattctgtcaatgactgattatacttatacagttagcagcccctcctaggagattgccctgttgatccaagaatcaccaagagcttttcctgagccatagctttatagggcatgctatgctattttgcccatcatgaaagagctggcagtccacaaatmacctgagggcaggatcacactctaaagtgacttgagcaaatgatttgtgtaagctaatgtgaacctcctatggctgtgctgtcatcaaaacactgggtcaaatcaaataagtccatcaaggtgctataaaatatgcatgcaaagagaatggatgtgatgttgttgagaataataaaacagtccataaaagctatgaaataaatcaactgttctttcaggcatggaatacaaaacaccacatacatccatatatattatatatgctgtaagcacacatttattatatatgagcact

SEQ ID NO: 368007 - DNA, 608 bp, Homo sapiens
gtatgcgacagcccttttctatgtaccagagggtcagaaccacagacacaaatgaactaccaccactaccctgagagagttcatcatgtaccttcaaagactcatgtgtaggcaactaatgcaaatgccaasaagaatgaaacatgtaccttaaaagataatataaccaaaggaagaattactaatcccaactgcagagattttgggaaagggtcccagtgtcctgtacaagatggcatttgaattttgactgaggaataggattttttttattggtaaagaaatgggaaaagcatacccaggtaagaaacagcacgttaaagacagagagcagaaaggcagtggctacacttggtcttttctatggagaatttctgcagtgcctgtgctcccataagtctctggctagaatggaaatacatttccttccttttgatagcacaaagaatagggtttattccacagagtgacttggaaccttagtcatagtgttttttcagctttattactcacctacctgtgataagggcctctcccagcaaagtgtcttgaatcactaaaagtttgtctctccttcgtagggctcatagttgacacaggggccagag

SEQ ID NO: 368008 - DNA, 491 bp, Homo sapiens
caattttttgctttttggctttctttattggcaagcatggctgtggagatgttgggcttcactgcagcacaattctagtgtccatgactggccatgggtgtgctgagaggcaattgtgctggctggggtgggcctttggttctgctccttttgactgtggcagtagaagcagctctcctggtttccacagtgttgktctgggagtcactctgagtgtccagcctagtgtttttcttcagcccacccaatgatgtaaatacacatttcactgcctaaaatgaccaaaaacgtgtttgtgttctgcaactagaccctgattgataagcagtgtttgggaggattacacaagcacataggatagtgcaccagacctgcaacacttactattgtgcctggcttctattgtgtgttcttaataaatctgagttccttttcttcccagacttgtcaaccctcctttgtcaatggaagaaaaagacccagttaactat

SEQ ID NO: 368009 - DNA, 498 bp, Homo sapiens
gctgagaaattgagtattttctattttctgagtctttggcaaagaaagcccagggaaaaggtaactaygagtcccttttgagtagctagttcatggcattcgccagagaactattatggtttttgagcaggggaataaaacactgcttgatgattaatttggctgtaatgcatggctggacttggagagaatagttacaaagagaaagatgagaactcaaggtgcagagacatgaagtgccggattcatggtcctgtatgagtaagtggtggaactgggatttgaatccaggctagttgttcccagcctttttccacctatctctcaaagctactcagtaaggactttaacagaactatctcttatatagagccatctgcataaacaacaatgctaggaagccattaattcatttattccttcaattctgctttaattatgtatactgttgttttataaacaatcctgggagatagtataataaaaggaaataatgag

SEQ ID NO: 368010 - DNA, 548 bp, Homo sapiens
gataaatgactttttaaactaaagtgttacaatttgacagaaaggaaaactgaggttcaaagataagtgactttttaaactaaagtgttacaagccagtttgacaaagcttgtatgctattataatttcagattcaaattccaatgctccctctcctaaatttttattgttttgaggaaaattaaactaaacattaaaaaagttcatttacttccatttttatgcctcccttgaaatgcaaatttagcacaagccaaccatctctctctaagcatttccaagcacttgaggcatccacttctttgcactcagcagatggtcataaaatatgaacaaatgaagacagttcatctttagactctagggagtcacagagtcacataagcttaggatttgaatgggcttagaggatttctaaataatgctctctggtttataaataaaaaagctaaggcactacrtcctagagctagtaaaaaaaaccagatatcctcactcccaaaccagtgttctgatgcttgtaaaatctggcactggtttaatcagag

SEQ ID NO: 368011 - DNA, 551 bp, Homo sapiens
acgtattttagtgaaaatcatagaagccagaaagcagtattataatctatttgaagtattgacagtgaaccattaattctaaattctatattaaccaaaaacattcttcagaaaaaagtgaaataaagaccatctgatcatagcaaaattaaactagaaatcaaaaacagatatttaaaaacctctaaatattggaaaattaaataactcactttcaaataatcaaaatatgagagaggaagtcaaaagaaacattagaayatattctgaactaagtgaaaatgaaaataccacaagtgatggtcagttctgtattttcaacttggctaagaggtagtccttgttatttaatcaaacatgagtctaggtattgctgtgaggtattttgtagacatgattactgtataattattttgctttaagcaagaagattctgagttgaaaggcgttaagagcagaactgaggcttccctgaagcagaagaagacattctaactatagattgcagcttcagctccaacttatgcccaagagttccagtttctaatggc

SEQ ID NO: 368012 - DNA, 551 bp, Homo sapiens
acgtattttagtgaaaatcatagaagccagaaagcagtattataatctatttgaagtattgacagtgaaccattaattctaaattctatattaaccaaaaacattcttcagaaaaaagtgaaataaagaccatctgatcatagcaaaattaaactagaaatcaaaaacagatatttaaaaacctctaaatattggaaaattaaataactcactttcaaataatcaaaatatgagagaggaagtcaaaagaaacattagaatatattctgaactaagtgaaaatgaaaataccacaagtgatggtcagttctgtattttcaacttggctaagaggtagtccttgttatttaatcaaacatgagtctaggtattsctgtgaggtattttgtagacatgattactgtataattattttgctttaagcaagaagattctgagttgaaaggcgttaagagcagaactgaggcttccctgaagcagaagaagacattctaactatagattgcagcttcagctccaacttatgcccaagagttccagtttctaatggc

SEQ ID NO: 368013 - DNA, 263 bp, Homo sapiens
agctccaacttatgcccaagagttccagtttctaatggcttgccctatgaatgttgaacttgtctagccagaacccacgattgcattagccaatttcctgcccctactctctctctgtatgtacacacaaacwcacacacacacacacacacacacacacacacacagagtttcttttgtggaaactgactgatacacctcatattaaaatttctgtaatgcatttaaagctttagagaaaaaagttgtacattaaatactga

SEQ ID NO: 368014 - DNA, 578 bp, Homo sapiens
actgggactacaggtgcatgccaccatggctgctaatttttgtattttttgtagagacagggttttgtcatgttgcctaggctggtatggaactgctgagctcaaacaatcctcctgtttcagcctcccaaagtgctcggatacaggcgtgagcctccgagcctggccaagcagctttatttttaatcaatgtaattggaaatgccatcatgagctcttggtaaatgcmaatcacaaataatttttgacaatttttaattttgaaaaagaactctgctgttgtcactgttactgtagctgttaagagtgtttgcattcttcattaaattcaaatttaataatttgatattatttcaaaatataaattttatcacatcttgagctgacgattctcacagaataatttttctaaaaagatttaactctttctacaaattagtttcatgcaattctgaattcaatttatataatggccttttaatatttcctctgacatttcttataactattggaggttgtacaggacatcaaaagtggctttgtgatttatatataattcaaaatgccttggtagtcat

SEQ ID NO: 368015 - DNA, 458 bp, Homo sapiens
tgcagtgggcagctcaggagtgccaagctgtgagctacattcagcactcaagagaagaacccacactttcagagcattgagagggaaagcaactgcaactgtgaggaaactataactgtgaggaaacaagggaaccacatgatgaagcaagagtctaccaactgaccaataagcctaagtgtcacctggtatatcaaaccccaaagctttaacataaaaaataccccactaacatatccccctctaaaaccagagacaagaagacagctgcaaataaagaccctgcagaaagtcccagcacagtaaaagcattcataaaagaagtctattgactgtactcagtctacacggaagtaaaaggaacaccytcacacagagttgagaaagaaccaacacaagaactccagtaactcaaatggccagagtgttgtatgtcctctaaatgactgtaccaattc

SEQ ID NO: 368016 - DNA, 611 bp, Homo sapiens
tgtcaacactctactgacactattagacaatcattgaggtagaaaattaacaaagaattttcaggacctgaactcaacattgaaccaatggatctgactgaactttacagaactctccaccccaaaacaacagaatatacacttttctcawtgccacatggtacatactctaaaattgaccacataatcgaccacaatcctcaacaaatgtgtaagaaccgaaatcataccaaacacactcttggactacagcacaataaaaatggaagccaagactgacaattactgaaaaccatacaattacatggaaactgaacaatatgctcccgaatgacttttgggtaaataataaaattaaggcagaattcaagaagttctttgaaaataatgagaacaacgatacaacatactggaatctctgggacacagctaaagcagtatgaagatgaaaatttatagcactaaatgcccacagcaaaacattagaatatctcaaattaacatccaaacttcacaagtgaaagaattaaataatcaagaacaaatgaaccccaaagctggcagaagacaagaaataacaaaaatcagagctgaactgaatgagatcaaga

SEQ ID NO: 368017 - DNA, 577 bp, Homo sapiens
ttaaacctcttttcttaacaagttacatagtcccaggtatgtctttattagcttcctgagaacagattaatacagtaaattggtactggtagagtggggtgctgctgtaaagatacaatgtggaagtgactttggaactgggtaacaggcagagattggaacagtttggagggctcagtagaagtagaaatatgtgggaaagtttggaacttcctagagacttgagaatgaatgactttgaccaaaatgctaatagtgatatggacaatatagtccaggttgaggtggagatgaggaattgttaggaagtggaaataagatgactcttgcaattttttttttttagcaaagagaatggtggcattttgcccctgtcctagagatttgtggaaatttgaacttgagagagatgatttagggcatctggcataagacatttcyaagcagcaaagcattcaagaggtgacttatgtaccattaaaagcagtcagttttatgtactcaaaaagatatggtttggaatttgaacttatgtttcaaaggaaagaggagcaaaaacgttatgaaaatatgcagc

SEQ ID NO: 368018 - DNA, 506 bp, Homo sapiens
ggattgaaggagaaaaacgaagttcttattgagaaacatctaataataaaactgcaaaaatttatttttaaatactcttttattataaagttttcttttygtaaagataggtcagaaaaacaagcaagacaaacttagcatatgtagaaaaaattgaatttcctagaagccaattttaccatttttgttctatcaagtttactgcatattttaaaatgtaaattaggaaaatccacgaatctgcttcttggaaaaggattagtcccaaatagttttatcctttggggaaaatacacatggcagccggtttgatgtgtatttagtgaatctaccagacaccttccgttcgctgtagtatgaaaggtctttagggttctggtcgacctaaatcagggctttttttttttttttttttcttgaaacagggtctcattttcattgcctaggctggctcactgcagtctcgacttcctgagctcaggtgatccgcctacctcagcctcccg

SEQ ID NO: 368019 - DNA, 506 bp, Homo sapiens
ggattgaaggagaaaaacgaagttcttattgagaaacatctaataataaaactgcaaaaatttatttttaaatactcttttattataaagttttcttttcgtaaagataggtcagaaaaacaagcaagacaaacttagcatatgtagaaaaaattgaatttcctagaagccaattttaccatttttgttctatcaagtttactgcatattttaaaatgtaaattaggaaaatccacgaatctgcttcttggaaaaggattagtcccaaatagttttatcctttggggaaaatacacatggcagccggtttgatgtgtatttagtgaatctaccagacaccttccgttcgctgtagtatgaaaggtctttagggttctggtcgacctaaatcagggctttttttttttttttttttcttgaaacagggtctcattttcattgccyaggctggctcactgcagtctcgacttcctgagctcaggtgatccgcctacctcagcctcccg

SEQ ID NO: 368020 - DNA, 546 bp, Homo sapiens
taaattatctatttacaaaaaaaaattaatgagatcacacatcatagcacatacagacattattcccagattaagtttccatgagtttgagattagacccatggatcctgggacagttaattttatgagtccacttgactaggccacaggatccgagatagttccttgaattagtctgggtatttctgtgagggtatttttgatgagattaacatttaaagttatagactgagtaaagaaaattgtccataatgtgtgtaggccccttccaatcacttgaaagcctaaatagagtaaaaagctgacccttctccaagtaagagaattctcttgcctgacagccttcaaactgtagcactggctcttcctggttctacagaagctactagttttacagctagaactaagacactgactgtgtggattttggactygctactcaccacaattatgtgaacgaattccttataataaatctttattatctgtatatatagctcctattagttctgtatctagggagaattatgaatactacaagaacta

SEQ ID NO: 368021 - DNA, 610 bp, Homo sapiens
aaagtgctattgaagcagctgtgaagaatgaaaaaaaaaaactatagaggaagaacaaagtgacagcagactccatgcaaatcagcagtggacacaaaatatgcactcacaaaagcaataatgtatagatctatgtagttcctgatgctgtataatgtggaaacaatgctattctgcagcagatgaaatttcacaggtagataaatcaaaagactgtgaagaatgaggaagaggytgtaaagagaaatagtaaaatttggaacattgaaggttatattgtaaaatataatctgtacactaaatagaaatcacgaaacacattttggtaattattttaggaaaaaaaacaacagaaaatgtgtgtgccacatctaaattttataattgttcaccattataagaacatcctattaattagattatgtagatagtgctaaatgttagtcaaaatgtgaatgtaattcctgaatactcatgaactaaaactaaaggataatgacaatacttcaagcctacagacaacataactctgctatgctcattagtcactagaatcatttggagtaagggaggatgtgtttgtttacagtgggcagtcatgaacatgaca

SEQ ID NO: 368022 - DNA, 531 bp, Homo sapiens
attacaggctcatgccaccacacttggctaatttttgtatttttagtagagatgggtttttgccatgttgcccaggctggtcttgaactcctggcctcaagtgatccgctcacttcagcctcccaaagtgctggaattacaggtgtgagccaccgcactgagctccttttcaagtttttaaagatgcatcattaggttgttcactggaagatttttcttcttttttgttgtaggcacttgtagcctttgctgagctacttttcaagtttttaaagatgcatcattaggttgtttactggaagattttcttcttttttgttgtaggcacttagtactgcctttgctgtatcccataggtttaggtatgttgtgtttccattataatttgtttcaataaattatkcaatttccttctcaatttctttattaacccactggtctttcagaaacctattgtttaatttccatgtatttgtatagtttccaaaatttctcttgttactgatttctagctttattccattgtggtga

SEQ ID NO: 368023 - DNA, 568 bp, Homo sapiens
agatttttcttcttttttgttgtaggcacttgtagcctttgctgagctacttttcaagtttttaaagatgcatcattaggttgtttactggaagattttcttcttttttgttgtaggcacttagtactgcctttgctgtatcccataggtttaggtatgttgtgtttccattataatttgtttcaataaattattcaatttccttctyaatttctttattaacccactggtctttcagaaacctattgtttaatttccatgtatttgtatagtttccaaaatttctcttgttactgatttctagctttattccattgtggtgatagaagatgctttatattatttcaattttttgaatgttttaagacttgttttgtgacataacatatggtctgcctttgggagtgatccatatgctgagataaagaatatgtattctgcagccattggatgacatgttctgtaagtatctattagctccatttggtctatagtgtagataaagttcaaagtttctttgttgattttctgcctggaagatctgtccgttgctgaaagcggggtgtca

SEQ ID NO: 368024 - DNA, 568 bp, Homo sapiens
agatttttcttcttttttgttgtaggcacttgtagcctttgctgagctacttttcaagtttttaaagatgcatcattaggttgtttactggaagattttcttcttttttgttgtaggcacttagtactgcctttgctgtatcccataggtttaggtatgttgtgtttccattataatttgtttcaataaattattcaatttccttctcaatttctttattaacccactggtctttcagaaacctattgtttaatttccatgtatttgtatagtttccaaaatttctcttgttactgatttctagctttattccattgtggtgatagaagatgctttatattatttcaattttttgaatgttttaagacttgttttgtgacrtaacatatggtctgcctttgggagtgatccatatgctgagataaagaatatgtattctgcagccattggatgacatgttctgtaagtatctattagctccatttggtctatagtgtagataaagttcaaagtttctttgttgattttctgcctggaagatctgtccgttgctgaaagcggggtgtca

SEQ ID NO: 368025 - DNA, 575 bp, Homo sapiens
actatagccttgtggtatcatttgaagtcaggtaatgtgacgcctccagctttgttatttttgctcagtattgctttgacccactgtcaccactcatattcaacatagtactggaagtcctaaccagagtaatcaggcaaaagaaataaataaaaagcaactaaattggaaaagaggaagtcaaattttctctgttcacagatgacatgatcttatatctagaaaaccttaaaggctactccaaagactcccactccaaagactcctacacctgataaataacttcagtaaagtttcaggatacaaaatcaatgtacaaaatatagtagcatttctataaaccaataatgttcaaactgagaatcaaataaagaactcaatcccatttacactaaccacaaaacaataaaatacttaggaatacatttaatcaaacagatgamagatatcttcaaggaaaactacaaaacactgatgaaagaaatcatagatgacacaaacaaatggaaataaaatctcatactcttgggttggaagaatcaatatcattaaaatgaccatactgcccaaagcaa

SEQ ID NO: 368026 - DNA, 597 bp, Homo sapiens
cagtcatagttgccttttaagccactttgtattgcaaatgttcaacaatataggatgaattaaatggtttatttaatttattctgttacattataataaatatttacaatctattgtaaacagaaacagatataagtaaatatgtatattataatctcaaatttctaaatatctatgcatatttaaacttgtagagaaaaaagtaaatataatgtgttaygactggttatttctagatggagaataatgaatagttcttaattctctcctctcttataacttctaaattttctataatgagtatatgcttatatttacattaatatctgaaaacaagtaggaaacaggacaattaaaaaaaaaaaaactctgttgttgaggaggtgatggaatgtgcatgagggaagatggccagtgctgttaggaataccttacaaaaacttctgttttcaggccaggcacggtggctcatggctgtaatcccagcactttgggagcctgaggcggttggatcataaggtcaggagtttgagaccaggctggacaacatggagaaatgctgtctctactaaaaatacaaaaaattagcccagtgtg

SEQ ID NO: 368027 - DNA, 524 bp, Homo sapiens
taagtgagtaaattgaaaagagttcaaaatttagagcttaaaggttttctgcccacataaaactccattggaaatgcttgcattkgtcatcccaataaatgtctttgcatttcagaaacagtcagtcctgggttcttcccttgggagcaattttgttgccttctttcaatgaatatattgactatgctctcattacaatatagaaaactgtttttctctagatctaaaaaaaaaattaaaacaaacaaaaatcaaaaatgaaaaccactgcaagaaaaaaatatcttcagctttctgaaattatgaatgatatttaattaaggtcactggagatggttccatcagaacatcttttgccacttcatgttccaactctcctctgtggtcttttcttgcaatacagccatgtttcatttatgactcgtgatttcctgccacttaggaaaactttgaccatactaacaaatgcttttctgtccaacagagatttcacaatgttctctgtgtatctcaattaggtttca

SEQ ID NO: 368028 - DNA, 552 bp, Homo sapiens
gaaggaaaactgtctagtttctcaggatctccatcaccacaggaaactcaaagtggaaaaaattatttatgttctccttattctctctacatcttaatcacatttatttattcattattcaccattataataatttcacacaatatttgggagagctacataaaaagaataagtattaataacttttcaccttgtcatatttactattcacactttggtcctattttctccatcataataaaattgygaacatttattaaagactcacaatgacccaggcttaaagtatatagactcatacagctcacagaaattttttcaacaattttataatatcattttattccattacgtaaattttaaaaagaagagactagagaaggctcataacattatgctagcaactagcaaagcccagacttgtttcaatatatttctgactccaaagagtattctttcagcttcttcaagacagtctcttgagttaggttgctaaaatagtctgattaaaaaggaaaaacaatataactgagttttaaaggtattgaaaga

SEQ ID NO: 368029 - DNA, 609 bp, Homo sapiens
acacataaatttatacagaatttatttcattaaattacatataaatttcatgttaattacatatatgtattatgctacaaaaagcaacatatggggtgttagtctatcaaaagtaatattacattctttgcccaaaatatttagttagcatttctcaagataccaaacacacatacacacatacacatacacgcagacacaaattcttgaaagtttttctcttccttattaaacctcagccatttgccctagtctttcgcattcactargcctcaacaaaggcactaagtgctttccagaacatagatttaaatgaggtccctgcctagagggcttacaacctaattagacagagacagttgaccaacatatgcccacagactacagttggccacttatttattctctaattaacataaagcagcaggacaacaactctgcctgtgctcattgagcagagaacgtctgtgtatgctgtggaactctgtgggaaatgagactgctgctttctgtgggggttttcagcacacattctctcatttcttgcttgtcttcataattaatattcccgtgcatatcttgctgagactatatatggccaagcaaaca

SEQ ID NO: 368030 - DNA, 591 bp, Homo sapiens
gaatttgttttttagttctagatattaagtattgcaaattactaccatctagtgcctcctttaaaattctatgtaatgctcttgacctgtgtagtaacactagtttatatcttctaggaataagagccatgagtttttcatcctgtggtttttaatttgctattagaaagagtggtatgcttcttttttcctttttgatattgtttctcccactattctatattwtttcttaaaaaatagtataggcattgaagaacatgatttcttatattattctttctttgttaaattttaatatattgaaactcacacacaattgccattggacaattactccacatcattgcattattttaagtgtttctcaaatgaacttgaaaataatacagtagataattgaacagtaagctcctacagcagaaattttagacttatatacaaatatatttttctataaattataaatttgtggacttactgcttagttgctgaactaaagaaatataggcagtctcattcaaagtgtagtttaaggaagctttcagagccaatgatataaagaagggcctgccttcacaagacaagtgaaca

SEQ ID NO: 368031 - DNA, 508 bp, Homo sapiens
actgagtgaagtacttaactcaaaatttcgtgtaaaacttatgaatcaaagctaggaaatgcagtttaaaaagaaatggtaacaactcgattcttaatattcaggttctaaaattttgtcatttatccaaaaacatgtccttaagaaatagttatttgcacataattgtaactatcagcaaatcagcacaataaaaatatartagttttgtcagcatctgtaagatttagttgtttggacagtacttaataaatagaactagtatttctgggtgcctgccagttgaccatctgtctaggttgtccatggagaatcagaacaactgaacattttggcacatccaattacatggagcaactaccaaatctgtcataggttacaacagaagagaatattaccaaaagattgcattaattgatttaatgttgagaatttggggaacctggagatactcatgggaacatctctgtgagtcagtaagttgaataaaatgtaaatgaattaaata

SEQ ID NO: 368032 - DNA, 549 bp, Homo sapiens
ttttatgtaaggaagacgaaactcccctttgatccaagaaattaaatacctaagatgacaaaacactgcctttacttttgaataagtggaaactagtatagatttaagcttttatctcttttagtgttgatgctatctttatttgctgagataagaaaatattccagtttataaggaacgaatgattaacaaaataaatgcaaatgaagtaactaattttaaccagatcttcagtgtcattattgctgacataaaaggagagctgggaaatttaattgcaatttgtcaatatttacaatctctaaataaaatagcaatcacagtggtagcttyttgggacctctggcaggccacttacattgtgcaaattctcttttcactaacctgaactagggagtaatatcctctctgccaaccctatattaaagttcttttcatgcccattggtcattttctagaattttttttctttttttttttttttttttggaaaaccataggtgcaacatgcacaatctcaattcgcacagctagggtaaggaagcctgc

SEQ ID NO: 368033 - DNA, 569 bp, Homo sapiens
aattaaagccacagtaaggtttaggactataccaaagcaatacactagggagagggggatctaagatatcatttttctcagagacaattcatcacatttaaaaaaagatgttttatactttacctcattgtgaatgaaaaagagccacacagtagcccaacgagggcagatttaaaatcacacacattcttttgggttttagttcagtttttttttcccctggaaataagaaccatattatcctatttgaatcttcttgttatttttttattactcttgtttttggttcacttgttttattgatgttacaaactattccttctaattgtacagttttatttccttttgttgtaagtgaatttgtgattaatgtcaaataaatagtggtctgaaggctttaaaatgtttggcctttgtattcatttttcctttcctttttttttttttgaarccaagtctcactctgttgcccaggctggagtgcagtggtgcagtcttggctcactgctacctcctccacctcccgggttcaagcgattctcctgcctcagcctcccaagtagctggaa

SEQ ID NO: 368034 - DNA, 532 bp, Homo sapiens
tccattactacttagctaactccatcaaacatggctccaaatctatggcaattctccatatcatccttaacctgtccttgtaaaaggaaaaatctgataccagatgtaaatagggcttagaagctcatggccagatttggagaaattatgactattctcagatatcagtgttaatagggccatttgcaggaggtggtcagcataaagtactcacagtgagtcagcaaatagttattaacatgaaatgatactgactcagcttttattattttttccaagttgatagatactttcctaacattttgctatatattattcaaatattttcatgacttttatttgttttgggagggggtttcaagttgttatctgcattactcaatttaaartcaatagtggatttaattgatataatgttttctaatcattaatgagtattaaaacccagactaatagcattttaagtaacattttctgtcgaagtatctgaaccattttctttcactcaaaactttgatttaattatgatact

SEQ ID NO: 368035 - DNA, 613 bp, Homo sapiens
cattttatagataaggaaagaggtttacagggctggaatggaagcttcatgagagcaggatcacatctatcttttttactattgtatcactggcatctagcaaagttctgacaaggtagcaagaaataaagaatattaagaataaaaagtaaagagtgggttaaatagcttgtccatggtgggacagttggcactagaacatacatttgcctgaatctaaagtctgtgcttttttttttactatctgagaatggcaaatatgcagcggtgtggtcccctttctgattctgggctgttgcttttttctgttcttcctggtgaaaggctgtcccgttaatgtccttatatctgggatgtttccattcttcaggcatcagtcyaaccatgacctcagtggaatggctttctctgaccccttggttgtaagattggaagtagctttctccggttactctctgtgcatcacctgtttattgcctacgtcaccttcacaacacttactactgtataaaattatcttgtttgcttttcagttgtccctctacctactataatgtaagctttgcaaagacagtgactttttctgcctctactctgtgcatactgtgtacca

SEQ ID NO: 368036 - DNA, 579 bp, Homo sapiens
caataatattaccagcttatttaaaagaatgaaacagtttttacacgtttataacttacccggcatcaggtttactagctactgtgctaggagcttccacatgcatcatttcacttaattttcataattactccgtgatgcgccttacccccagctctgccttaagatgatcaaactgaggtgcaaagtagtttaaaaaataattccataaaaatggtaaaaagtaattttattcattcactcaaaatttatttgaaagcactgctaaagtgtattaactttttcctgaggcaaaatactaaaccttctatgtctttagtttcataacatcagcaattataaaatggaattttaaggtactaaactcaaatgatgtaggtgttagcttaaaagagagaaatggggaagcgatcaggcttgttggaggggagaagggakatgacttacaaggctccctgcagaagaacaagaaatcctgggcacaacagaaagcagaactagttggtagatgctcccagcagacttccccttgatccagaaggaatctattgaaggctttctgacctctgtctccagaga

SEQ ID NO: 368037 - DNA, 579 bp, Homo sapiens
caataatattaccagcttatttaaaagaatgaaacagtttttacacgtttataacttacccggcatcaggtttactagctactgtgctaggagcttccacatgcatcatttcacttaattttcataattactccgtgatgcgccttacccccagctctgccttaagatgatcaaactgaggtgcaaagtagtttaaaaaataattccataaaaatggtaaaaagtaattttattcattcactcaaaatttatttgaaagcactgctaaagtgtattaactttttcctgaggcaaaatactaaaccttctatgtctttagtttcataacatcagcaattataaaatggaattttaaggtactaaactcaaatgatgtaggtgttagcttaaaagagagaaatggggaagcgatcaggcttgttggaggggagaagggagatgrcttacaaggctccctgcagaagaacaagaaatcctgggcacaacagaaagcagaactagttggtagatgctcccagcagacttccccttgatccagaaggaatctattgaaggctttctgacctctgtctccagaga

SEQ ID NO: 368038 - DNA, 574 bp, Homo sapiens
ctcccagctttggagtctggagttccaagatcagggtgccarcatggttgggttctggtgaggactctcttctgggttgggcaggcttccaatttattggctttttattggttcattgtgctgtggtaagatagagagttatctggggtccctgttataaagggcattaattccattcatgagggctccattctcatgacctaattacatttcaaaggcctcacatcccaataccatcacattgatggttaggatttcagcatttaagtttagtggggggacaaaaatattcagttcataacagattacatgcagattaaatgaagactttttgtaacactcaacattgccacttggaggaactgttcgatatgagacttcgttgacaagggaagacgtatctcttttaaagaactgagaaatgctccttagaaggctttgagagatacttgacttccctcgcacattttttttctttgtcttggctgctgggaaactcagagccaatttagtgctcaaaggaataagacatttctcatttcagattcctgataatattatttccttttttctt

SEQ ID NO: 368039 - DNA, 538 bp, Homo sapiens
aggagaagaattcacactgcccacatgacatacatgctcctcttagaaacctcgctgcagatgtttaggatcctggacaccccctgcccagtcagcttctaagatctgtgtggaggtggccaagggacagctgtttttcctaagggtgatgatggtgggtggtttggagcttgattgggtgggttgggttgtgtactgacttgcacttgaggcccctcatggcacagaatgggttatggggtgggaacagaaygggtgggcaggacaggggctgggggctaggcactaagggccgatcactccacacctccatatttaagtatgaaactccacaaggtcttagaattctacattttgattttccagctccaagctcttaaagaacctaaggaaacaatgctgtcaggagtgaggaccttgggcctctgtgaagatagaggttgcctgtctgtgatttagtggggtgacaaaaagcttcacgacacatggaattaggaacttcatctagattttcgctctgagctatgggaatattaga

SEQ ID NO: 368040 - DNA, 501 bp, Homo sapiens
tttcataagttactgctgctgtctatttaaaaagaggcctcagtcacttttattatagtgtgtttgaaagactgtagagagaaatatctgaaatcaccacttcctagttaccatcttcataatactgtaaggcaacacagaatttttttatttcattttgtttgaataaaccacagtctaacaagatgcttctgttttattatcaggcaaaggtaaatgtaaaaattcatgggacaatgggctgagattaccagagaatacattcataagagaaatttgggaggctgtgaatttcaagtacgttctagggctgaaagtaataactagaattggttgtkgatatgtctatatatgagccagaggaatggatagaaatccagacattaagaattaatttcagactggctatgtcatttcacttgtgcagacaagaatcttctcatccatctggtgatggaatcgatgttagaaatatgtcttttcctctgtcattttctgaag

SEQ ID NO: 368041 - DNA, 585 bp, Homo sapiens
ctctgccctcatgaatggattaatgctgttatcaccagagtgcggtcataaaagagtgagttcagttctctctctctcactgtctcttgcccttcatccttccaccatgttatgatcaggaagaaggccctsaccaggtgttagccccttgatcttagacttctgagcctttggaccatgagctcataaatatctgttcaatataaattatccagtctcaggtgttttgttataccagcataaaacagactaagacagtacctgtgaaggttagactcttcctgagtgagtgaaggtagtgctgagtgcagggcagtcaggtggagtgggggaagcagagtgaaccctctgctctgagctattctgagcttttcttatttttactgtggatgagcttgcaggatgtagatcaggcggtgttgacagtttgggcagggggcaggcagaccagctgtggaggatgctgtggccatattcttctcttatgtttctgaggagagacatgggacactctgccaccaccagagatttaggaatagagctgttcttgtgggcactgaaccccctcctcaggttcttacactc

SEQ ID NO: 368042 - DNA, 596 bp, Homo sapiens
aagtaactaagaagtgtgatttggagaaaaattaaaagaaacccctgctcttctcccacgatatccaggcatggattaagatgctgtcatttgaagatctttctggctggatttttcttcccctaaatgattgagttaacacaattaattttatagcatctcctctggtaatcacaaatgattttttattatataatttccagtaggagaaagatgggtgagtaatgaagttgtgtgaccagagacaaataatgtggttgccaatatttggagtctaattcaatctgtttcctgcctttggatgctttagactcctgggattttaggaatggaaagagccttactgatcaccaatcgattcctcttactaaccgataaggccactgtgtgaggctcaaatttaggaamttacttgctcatttaggaagatgtcgtatctagtttttatggctaatgaattcaaaagcataatctaagtgttgctattgatctcagaaccttgagtagagaaaggttaccatttccattgactgttttggaaagaaaagcaaaaacgtgagaatactgatctacatgaccctccgtttaaaattaag

SEQ ID NO: 368043 - DNA, 559 bp, Homo sapiens
attccaacataaccctttagatttctgtatatctgtatagctctccttttgtctttatatataaaatgcaaattacaatgcttacagattacttggaaatttatagatgaatttcatttacatatgttatgtaatatattaaccacatttcttggaagtaaatgtaactaggtttacttggcttcagtttacacataaaggaacagaggctctgagatgcacagtgacgtgttcctgccccacagctcagacgggacagttggaggcctgttcttttcacaaagactgacagtctggtttttcctgactctttctgctgaccaaacactaataggaatatttccactaaaacactggcagtcagagtccgttaatgaaggaagagccttctacaggttcccagaaatctkctggacacttgaccttcttcctaaacacttcattctcataatagtcctttggagttcatgttactatcctccttttcatagctaaaaaaacccataaaattttgagagactatgagacttatccaggagttcatggttaataccataaa

SEQ ID NO: 368044 - DNA, 369 bp, Homo sapiens
taaaactcacatagtccacagcaggaccacatttaaagattcagggcctaaatcacatctttattagtatttctcttaagtatggtccaagtactgttccatacaaattctcagggttctttctattcttgaagagcttgaacctctcaatagttccttaccccactaccctagaagaatcttttttctcayttctgttgatctctttctttatcatttagttcctcatcccttcgttgctcttttcttcatggtcacataccacattatattctctcttcaccacaaaagctccatggacgctgtattattctcctgttgccttaaacccagagcgtgggtcattgttcttctcagagaagcagacaa

SEQ ID NO: 368045 - DNA, 558 bp, Homo sapiens
ttttcatctctccaactttctgtccattcttccattcaaaaaatacttactgatcctatattccaggctccagctatacattgatacattcaatgaatattactaaatttaacaaatatgttttgggcattaaacatgcaagaaaacatataggtcaaagtgagatgcaraactgagtagagtctttgtcctcagagtgatcataacctggaacaggatggaaaatttagacccgcatacatcaaaatgaagaaccattattattgtaccataattatcggagccaacaagtagctatttcttcgaaggctacatgaagtagatttggggagaaaactaaaggacatacaggattttgataggtacattgaagtagaatggagaggaagagaacctgtgggaagtgcattcaattgtgattggaaaggggcaattacattggcctcctttacagattgaagattaacaacatgagtagagaccatcccactattcactcacatcattggcctttgaaaggcaggagctgaacttgggacatggtgttagctctagttt

SEQ ID NO: 368046 - DNA, 571 bp, Homo sapiens
tggaagcaaaagaacaatatctgctaccacaaaaacactcttaggtacatatcccacagaccccataaagcaaccatacaataaaaactacaaagcaaagagctaacaacttcatgatacaatcaaaacctcagcaagttaatattagccatgcatgtaaatggtctaaatgtcccgcttaaaaggcacagacttgctagttggattaaaaaaaataaaagattcatccatctgctgtctttaagagatgagtctcacacataacacccacaggctccaagtaaaggctgaagaaaaatctatcattcaaatggaaaacaaaaaagaacaggggttagtattcytacatcagatgaaacacactttaaatgagcaacagtaaaaaagaacaaagaagggcattacataatgataaagtgtttaattcaacaagaagacttaactattctaaatatatacgcacctaatattggagcacccaggttcataaaacagtgacttctagatctataaaaagattcagccagccacacgataccccactgacagcattagatcactgaggcaaaaa

SEQ ID NO: 368047 - DNA, 548 bp, Homo sapiens
agagttagaaagacctaaaatgcatgatctaacatcacacctagaactagaaaaacagaaaaaaattaacctcaaaaccagcaggaaaaaaaaagaaataactaaaatcagagcagaacagaatgaaattgagagccaaagtccacacaagtatcagtgaaacaaaaagtggctttttgaaaggataaacaagatcaataggctgctagctagattaacaaagaaaaaaaaagatccaaataagcacaatcagaaacaacaaagatgacattacaatggatcccayagaaatacaaaagatcctcagagactattacgatcagctctgtgcacacaaactagcaaatctagaaattttctaaaaacttttctagaaatctagaaatggatacattcctggaaacacacaaccactcaagattggatcaggaagaaacagaaaccctgaagagaccaatatcaagttctgaaattgaatccatcatttaaaaaacctaccaatcaaaaagagccccagaccagatggatgaatagcctaattctaccag

SEQ ID NO: 368048 - DNA, 596 bp, Homo sapiens
gctactgacactagtagagttatgcttaatgttgacttttccatcaaaagccattagataaaataatggaaagcatggggtattgtgggcagaggtgagctcagattgaaccagtaaactgcttctgacaaagagggatgtgtttgtgctcaaaggaaaagggtaacggctgtaataagatatattaagaattatgttacttgtggtaatcactggaaaaatgaataatatttttatccttttcaaaaaatttgtaggtttgaagaagcagagtctggtttgttgccatttgcaacctgcaataattatctatataccttatgtcatatgkaactagaattcatccacttgcaatttgttcaagcatcaaagcagttatctgccatctatcccaggaagtataaggcaaaggtcctaacatggcagaggggcacagatacaccacatggatctttccttttgtgcttgagcaaatctattcctgattataggctcaaacagctctcccaagttgaagatttgacaactctgattgatgcttacagagagctgggaagtggttccatggttccatggtactatggcaggtttgtgct

SEQ ID NO: 368049 - DNA, 580 bp, Homo sapiens
gtgtaataaatacaaagttcaccagctctgtttcaaagctgcatgaagcagagataaagtgaagacaaataataggtgattaatagatgcaaccactttctaaatgagaattytaaagattgtaaatcatttggaaattgaagtgatggcctggaaaacaagtaaaaattaagaaatatcaagtaaaaatggatttgaagaaataaaaatagaaaaggtgaggcaatcccctcatagttgatttgggagggagctgggagaacaggagcctcagggaccttggaagactgtgggcggggagcctgtgcttacctccctttgtggctttggaatatctgtctagaactctgggactgattcagcatcttgatctattcctgccacttgcaaagattatcatcgtctatggattaaaaggaggaggcattctggccctctggaggtggattctactgagctcacagaagaatttgctcctttaatttttttttagaaatatatatatttttagacatataccttgtaaagataatgatttttattccttccatctacctccagctgtctattatttcccaca

SEQ ID NO: 368050 - DNA, 580 bp, Homo sapiens
gtgtaataaatacaaagttcaccagctctgtttcaaagctgcatgaagcagagataaagtgaagacaaataataggtgattaatagatgcaaccactttctaaatgagaattttaaagattgtaaatcatttggaaattgaagtgatggcctggaaaacaagtaaaaattaagaaatatcaartaaaaatggatttgaagaaataaaaatagaaaaggtgaggcaatcccctcatagttgatttgggagggagctgggagaacaggagcctcagggaccttggaagactgtgggcggggagcctgtgcttacctccctttgtggctttggaatatctgtctagaactctgggactgattcagcatcttgatctattcctgccacttgcaaagattatcatcgtctatggattaaaaggaggaggcattctggccctctggaggtggattctactgagctcacagaagaatttgctcctttaatttttttttagaaatatatatatttttagacatataccttgtaaagataatgatttttattccttccatctacctccagctgtctattatttcccaca

SEQ ID NO: 368051 - DNA, 494 bp, Homo sapiens
tctgccagccagtatttgagatgtcctgaaataatggttttatacactcagtcagcccatctccccatccagggctatctatctgtcctgaaccattgctgatatattgttcaatctgtctttgagtgatttcttttccactacaaggctgcttttgctgttgcttataaacaatttgatttgtttgaacattctagggagaggagtagaagctgtgagtagcataattttcctggttccatacygagtggttgagggggggcctcaataccctaactccctcctctgccctgaaggggttcagagtatgccatccaaaaatatgccaccctggcacaaggattatttggagccgagagcaattaaggaaaagcaaacatggtatgctctctcagacctccccctattcatttaaaaatagaatataaattccccctgtgaaggtgacccccacacttcccatactaggaagaagatgcagtcttatcactgga

SEQ ID NO: 368052 - DNA, 543 bp, Homo sapiens
ggggcctgttgggggtgaagggctaagggagagatagcattaggagaaatacctaatgtagatgatgggttgatgggtgcagcaaaccaccatggcatgtgtatagctatgtaacaaacctgcacattctacacatgtaccccagaacgtaaagtataataatacagaagtttaataataaaaaataaagaaaatgtggtatatatacaccacagaatactatgtagccataaaaaagaataagatcatgtccatggatggagcagtaggccatcatccttagcaactaacacaggaacagagaaaaaaatctacatgttatcacctataastgggagctaaatgatgagaacacatggcaacagacactggggcctacttgaagatggaaggtgggaggagggagaggatcagaaaaaaataactattgggtactaggcttaatacctgggtgacaaaagaatctgtacaacaaactcctgcgatataagtttacctatataacaaatcttcacatgtacccctaaacctaaaataaaagtt

SEQ ID NO: 368053 - DNA, 558 bp, Homo sapiens
ttatctatttgaaggtcttgccctgctttattgtacccacaagaggcagaaactgtactttattcactcttatttccaaaacgttgaaaaatccatagcatgtagttggaccttaataaatttgtgttgaatttgttaattaacagaccaatgttactacagtgatttttatcaatacgcatcccaatccctttaagtgggtacattaaaatgtgtactcattaaaattagaaaaagaaaaaacgacttaattcatcccagtaggacttgaggyttatttttatggaggtgaagaaaacttaaaaacacatactgtgcatcaagaaaaataaaatgatagagaagaaagagtgggggaatgtacagagcattatcattttgtgccaagaattgtaaagccaaatctggtctttcatacacacactgtagaagataaataatttctccaatagtcctttatttttctcagcgtcactaattaacctgacgacagagacttagccaaactggcttgcacagtacagaatttggataaggacttgatgagggacattgttc

SEQ ID NO: 368054 - DNA, 564 bp, Homo sapiens
ttaactttatgattctaaaagccataaggaggmgataatgtaatacacacagtatttttacagtatattttgtaaaccaaagctagtttatctcttatgtgacatagtctctttttgtggtggtgggagtgggaggaggattttaaataatactttaactgaatgccaataggtgacaaactttgttagttcactttgtttaaagctgaacctagaagaaaaacaacaaaaagtctcattcacctcctgggagctaattagtggggaacgtgcatgtttaaaaaagtcatctccaagcaccacatgtacttcatttaaaatcataatttacctctctcatttgaatttaccagacagttctaaaaatgtgccaatctgtagttgttggaaattagtacagtttaatattttcttaacttggctttcaaattcattttgcaaaaatctcagtcatttgctaccgtgatcgcaatagaaaatggccgctttctctttgcttgctaccatttcctctgagaagatgaaatacaaagacctcaaaccatggtacaggtctactgtcat

SEQ ID NO: 368055 - DNA, 556 bp, Homo sapiens
atctggtcatattttgctcctgcttaaaagttctttgttggcctccgtcatggaaagatgaagtccagatactttctaccctatctgctttgcttggccacactcaactttatctctgaccttttgtcttgcatattttttttctcagccacactgaacttctcaccttgccttatcaacttatttatgttttgtttgttttttgacattgcatctgctcttcactataaatggaatatcttcctttaytcctcagtttagcaagacctagttcaaatgtcatccccaacacaaagacctcctgacatttccatcaccctaaaccatcccccctcttaactcctgtatcctattttataaatttttattaagttaaaaggaaattatgagtttatacgtctaggttctctagacaagatggaggaaaaggcagggtataatggtagcttcttttgctgtagctgagaaatcatgccataccacttagagagatcttttttgcttttatttttttctttttaattttatttaacagagtgtcaggcaagcgtcactt

SEQ ID NO: 368056 - DNA, 498 bp, Homo sapiens
ctctgcttgggggaggttttaattcatgaggaaggcaaattcaatggctctcaggtgaggtgggaaacagacacctaccaacactccaaagagaacatgtacctctataaaagggmacagtctagtgaacaaagtccacagctctgggtttgatttctagcactgtcacttaatactgtgtgaccttagacattcacttaactctctcagcctcaggatacaatctgtaaaaacaggagaatgcttgttccctgtgccttataggattgatatgagcatcaggagagacagtgggcacaaaatagcactgtcaactacttctttctagtcagttatctggtcatgtttgtgaagctccccaggactgggaacatagcatatgatttttttaaagttactcgatgaatgaatgaataaatgaatgagtaaatgaatgaataatatctaaaggcctccaactaaataataatcaacttcctaaccgtactgaaagccttt

SEQ ID NO: 368057 - DNA, 498 bp, Homo sapiens
ctctgcttgggggaggttttaattcatgaggaaggcaaattcaatggctctcaggtgaggtgggaaacagacacctaccaacactccaaagagaacatgtacctctataaaagggcacagtctagtgaacaaagtccacagctctgggtttgatttctagcactgtcacttaatactgtgtgaccttagacattcacttaactctctcagcctcaggatacaatctgtaaaaacaggagaatgcttgttccctgtgccttataggattgatatgagcatcaggagagacagtgggcacaaaatagcactgtcaactacttctttctagtcagttatctggtcatgtttgtgaagctccccaggactgggaacatagcatatgatttttttaaagttactygatgaatgaatgaataaatgaatgagtaaatgaatgaataatatctaaaggcctccaactaaataataatcaacttcctaaccgtactgaaagccttt

SEQ ID NO: 368058 - DNA, 603 bp, Homo sapiens
aggtccacggtgagtatattttctctatgctccatactttgaatacttgttcacattcagtttgacatttttagagtagactttcttgtagtaaccaccaacagagccttgcacattagacatcttacctagatcaagagttccccaaaggcaggactgagcctttcagggggtgtgcagtaaatgtggttgaatgccactgggtgaaatggaagttaagcagacagaaagaggaatcagaatatgaatgtactgggaatagggatgagggtgaagatgggaaaggggatggaaaaggagctgcagatgcagcaaagccaaagtcttggttatagaggcaccatctacactcatccttggaagaccaaccccaaatcacttcaggttgcttatggttaacataaaaaagctttgctttctccctgtgtctaggccttagttaataatgaatgmcttcatatagtttatatcagtgtaggaggtctgtgatgaaagaggccagaaacattcttacctggatctcctttctcacccttctcaccaggggtgccatctctgccatcacggcctggggccccattatggcccggatgccctgggatg

SEQ ID NO: 368059 - DNA, 465 bp, Homo sapiens
ttggggcacagtttggctttatacattttagggaggcatgagacatgtcagatgtacattgtaagatgtacattggttcagtccagaaaggcgggacaactcgaagcagggaggaggtttccaggtcgtaggtagataagagacaaatggtttcttttgagtttctgagtagtctttcactgaatgcacaatttacaggaatcgtcacttatgtcttagtctggcttartgaaacagcagggcacagggagcaatcagatatgcatttgtctcatgtaagcagagcgatgactttgagttcagcctgtactttgtccacagggaatttcctggtgggcagattgtgagggaggtatgtagctttttaaactctttgtagctatcttatttaggaatagaatgggaggcaggtttgccctacgcagttcccagcttgactttgattttggggatatttattttcct

SEQ ID NO: 368060 - DNA, 465 bp, Homo sapiens
ttggggcacagtttggctttatacattttagggaggcatgagacatgtcagatgtacattgtaagatgtacattggttcagtccagaaaggcgggacaactcgaagcagggaggaggtttccaggtcgtaggtagataagagacaaatggtttcttttgagtttctgagtagtctttcactgaatgcacaatttacaggaatcgtcacttatgtcttagtctggcttagtgaaacagcagggcacagggagcaatcagatatgcatttgtctcatgtaagcagagcgatgactttgagttcagcctrtactttgtccacagggaatttcctggtgggcagattgtgagggaggtatgtagctttttaaactctttgtagctatcttatttaggaatagaatgggaggcaggtttgccctacgcagttcccagcttgactttgattttggggatatttattttcct

SEQ ID NO: 368061 - DNA, 613 bp, Homo sapiens
gttatttactatttagtaagcacacgcaaatgtggtaatcactgcatttattaggaatacactgtaaggttacaggcagtgtgggtgtggattttgactgtatttgaagttttcttaccttgaaacttacttagcacttgtaaacctataccatagagtttagcctttatttcctcttaagagacttgaaaatcctacaccatctagtgtagtgctaatcctaaagaaaacaaccaacgattaagtgttaattgttgattggtatcaccctatgatcaattgttttcaccctaaggctcaagtgaaaccaaacggttggtcactttttygatttagtattttttcaatttcttagatctcaggatatttttagtagattttggatgagacaaggatgtctgacgaccatcattctcagaaaatatctggcatcacctcaaatctggatttcgaacattacagagggatgaatgaggagcagtaccactggactgagggcctggcccactttgccatcttggtattcttaatctttgtcctagttcctggcacgataagaattttcaaataaataaataatttttgtattaaaaaagtagtatttagaaccgaa

SEQ ID NO: 368062 - DNA, 669 bp, Homo sapiens
atttcgaacatttgttccaccaatgcaggcatgacaagtggctcccatatagtctccaagtgccagaattaccttttggatctaaaacccaagccttaattattattccgcagaactccaggatcaatgactaatttttaaagcataaaggcaaatataatctggtctgccaacagcttttatgcatgcacagcacaaaactacttccaagcttaaaatgcagacgacctaactgctgcaaggtaaaattcccttaatgtctttcttatgccttgtcaaacttgggatgctgctgctccacgcatcagctagacaattcaagaataacgtttcctacattattcttcactgtaggtagggagtacgtagtgaaatttatgttctgtaattacagctagggcaaatgatttttttcccccagaggrtattgtgccttatataatcctgacctcaataaagcctacagctttattaggaaggtttacttcaaagccaatatagcagtgagctttgaaaacatagcatgcaacagatgcatcacgaactacggagacagtcaaatggtaacatgtcactgcagttttcatgttgcacaactgcattcaaacttaaaaaatggggacagatctagtacatccaagagagcgcttcggattctcaatctattag

SEQ ID NO: 368063 - DNA, 572 bp, Homo sapiens
agacaaatagtcctcccctcagtcagcggtgggcaaagtcagtccatgaaaatgttctgcttttcttcactctgattcgtagcaagttgatgggaagtattyttctttcagagcaaaatatctgtttctcaggaaaggccatcctagtatctcttccctcccttctagccccaatgttaccaggcactatttatgttactaggcagatgttttgtggaggcctccttctggctccatggcaccctgaacttactcccaccatgctactttgcaattacgtgattacttttccatttctcccactgtaacataagctccaagaggatatgtcctatttatgtctaattcatccttgtacctccaattcctggcacattgactggcacatagcagtattttaataaatatcagcggaatgttgattgaatagaaatattaattataggaaagcaaacaattagctaaaatctgagtcctccaggacagaaatggtgactttatctcggttggtccattttcaaaggtgaatgtagtctaatactgcaattctcagcagggatcaatcagtaagg

SEQ ID NO: 368064 - DNA, 547 bp, Homo sapiens
tagtcacattgtgagatactggcagttaggacttcaacatatgaattgtgggcaagaagacacaattcagcctgtaacgaagacccaggggattaaaaatcgagatggccagttctctgatcatgatgctgagctggctagactgctggcttcctccaccataatcaaccttgaaggaatttccaggaaagcagaggacctgtggtaaactactggagtggctgsgtgctgatttggactgggatgcgggggatggcttgaatctgaggcagaagctgcccagtaaggctgtgaaaggataaactggaatgggggattagaagggttgaaggagtatggctctgtctgctcccctgccattgccctggggcaaacagtgcctgcccctatgtcccaactgagaactctgctccaaatgctgccagagataaaatcagggctgggtaaaagttctgggtctgtgagtgatcgactgtaggtttctggtatctggggttccccatcctaggactcacctaccccctagcccctgaactcactggggctg

SEQ ID NO: 368065 - DNA, 507 bp, Homo sapiens
gatttctctttccagccctgtctgtcattctcactctaaggcacctgagctcactgcattttcccacaagcctctcctgaagcaagaatactgttgtctggaaggtttattcactgcctgatcaagatttgttctaagcagcagggaggtcattgagttcatgggaacatatttccacaaagcaacagcagctcccttcattgcctgttttcaaaaagaagcagcagaatgagatttgtggggttcaaaggtggatatgattatgcaggtttggtcttgggtctgcctgactctctctgtgaacttggattgcttggtcttttctggccctcagkttccttgtttttaaaataaagggctgggcagataatttataagaaactagccttttttcttttttttagaaaactatgatcatatgaataacctcactgcaagaggcaagaaatttgcctcctcatttcttctctaatgcctgctagcagtttgaccttgggcaagttgcct

SEQ ID NO: 368066 - DNA, 388 bp, Homo sapiens
acttcccttgcagccagcaagtctttcctcatgttctacctaaataatttataatgcaatttcagcccagtttcccttggcctattcacagtagccgtgaggactggcttgtcagcctcgcctgacccttttacatccatgataaagagtrctataaagttgtctttgccatctcatcatcttcccgtgctaaatgatcccttcccacagctttgggtctcaatctagaccaggcactccctctccatacaaaatgactgaaaagtccagatcacaaagaatgcctgcgttttggaaaacacattttctatccatccctaggtacagcaaaaacttctaaattaaataaaatgagactaagaatggttttgaaaaccccgattctcca

SEQ ID NO: 368067 - DNA, 567 bp, Homo sapiens
aatattcacctctgccctctgagataaggattactattaacctcactgttcagatgacaaaatggaggcccaatgtcacacagctaagaactggtaaaaacagaactccagaacacactgttatactgcttctatgcataggggtttacccaggacrgcaacatggcagaatatttaaaattgagattttcctggtggacccttcttgatgaatctttaggagattaggatgtcccataaaaacagcttgagcacagaagcagaatgactgagttccaatctgttactagcttattgaggggatgaggagagacaggtaactcttccatggcctggcttccccagttagattctaagataatggttactgcatttttttattacagttgtaatatatgtgtactataaacaattataaaatggctgggcgtggtggctcatgcctgtaatcccagcactttgggaggctgaagagagcggaccgcttgagctcaggagttcaagattggcctgggcaacatgatgaaaccctgtctctactaaaaatacaaaaattagccaggtgtg

SEQ ID NO: 368068 - DNA, 567 bp, Homo sapiens
aatattcacctctgccctctgagataaggattactattaacctcactgttcagatgacaaaatggaggcccaatgtcacacagctaagaactggtaaaaacagaactccagaacacactgttatactgcttctatgcataggggtttacccaggacagcaacatggcagaatatttaaaattgagattttcctggtggacccttcttgatgaatctttaggrgattaggatgtcccataaaaacagcttgagcacagaagcagaatgactgagttccaatctgttactagcttattgaggggatgaggagagacaggtaactcttccatggcctggcttccccagttagattctaagataatggttactgcatttttttattacagttgtaatatatgtgtactataaacaattataaaatggctgggcgtggtggctcatgcctgtaatcccagcactttgggaggctgaagagagcggaccgcttgagctcaggagttcaagattggcctgggcaacatgatgaaaccctgtctctactaaaaatacaaaaattagccaggtgtg

SEQ ID NO: 368069 - DNA, 549 bp, Homo sapiens
gcctggcttccccagttagattctaagataatggttactgcatttttttattacagttgtaatatatgtgtactataaacaattataaaatggctgggcgtggtggctcatgcctgtaatcccagcactttgggaggctgaagagagcggaccgcttgagctcaggagttcaagattggcctgggcaacatgatgaaaccctgtctctactaaaaatacaaaaattagccaggtgtggtggtgtccacctgtagtcccagcyacttgacgggctgaggtagggggatggcttgagcctgggaggtagaggttgcagtgagccaagatcacaccacagcactccagcctgggtgacggagccagacccatttaatttcatctcaaatttaaaatgtatatatataaaactgtgaacaagtaaaaaaaggaaaaaattaatttatccataatatcttcatccagagattaatttatattagttattaataatattctgttctacatcaacagatgtatatctacatccatatctcaatcaatatcacaaat

SEQ ID NO: 368070 - DNA, 549 bp, Homo sapiens
gcctggcttccccagttagattctaagataatggttactgcatttttttattacagttgtaatatatgtgtactataaacaattataaaatggctgggcgtggtggctcatgcctgtaatcccagcactttgggaggctgaagagagcggaccgcttgagctcaggagttcaagattggcctgggcaacatgatgaaaccctgtctctactaaaaatacaaaaattagccaggtgtggtggtgtccacctgtagtcccagccacttgacgggctgaggtagggggatggcttgagcctgggaggtagaggttgcagtgagccaagatcacaccacagcactccagcctgggtgacggagccagacccatttaatttcatctcaaatttaaaatrtatatatataaaactgtgaacaagtaaaaaaaggaaaaaattaatttatccataatatcttcatccagagattaatttatattagttattaataatattctgttctacatcaacagatgtatatctacatccatatctcaatcaatatcacaaat

SEQ ID NO: 368071 - DNA, 589 bp, Homo sapiens
ttcataatggctggattggagaggagagaagcgagaagtcaaagcagaccagagcccaatcatacaggggactatggttaggaatttaactttctttgttaaagcaatagggagccatggatggctttaggcagagggaggagcaaagcaatcaaattcttttttatgaaacttgccctgcctgctttgcayagaatattgattctctcaataagttactgtgtggctataggcaattcacaccttctcaaagccccattttctggaagatgagaaaagaggactaatgctacaaagccataataagaatcctccctggctttccccagggcaggcccaagaaggcctttgtgtttcacactccccaagccatctaaaaattcagctttccgagtgcctgaaacccatatccagactgcctctcatacttagaagcagcttaaatatcccttgtcagctcatataggacctaaatttaggttcagaaaatacagcctccctcaataaggtcccttctggctcaaatacaactatgattctacattcattattcatcttggccacaaggctgtgtaataaatacacagtc

SEQ ID NO: 368072 - DNA, 589 bp, Homo sapiens
ttcataatggctggattggagaggagagaagcgagaagtcaaagcagaccagagcccaatcatacaggggactatggttaggaatttaactttctttgttaaagcaatagggagccatggatggctttaggcagagggaggagcaaagcaatcaaattcttttttatgaaacttgccctgcctgctttgcacagaatattgattctctcaataagttactgtgtggctayaggcaattcacaccttctcaaagccccattttctggaagatgagaaaagaggactaatgctacaaagccataataagaatcctccctggctttccccagggcaggcccaagaaggcctttgtgtttcacactccccaagccatctaaaaattcagctttccgagtgcctgaaacccatatccagactgcctctcatacttagaagcagcttaaatatcccttgtcagctcatataggacctaaatttaggttcagaaaatacagcctccctcaataaggtcccttctggctcaaatacaactatgattctacattcattattcatcttggccacaaggctgtgtaataaatacacagtc

SEQ ID NO: 368073 - DNA, 578 bp, Homo sapiens
gggagatttaccgtgtaccattgtaactccagagttttcaacagagccaagcatgtagtagatgctcaataaatatttcttgagtgaataatcttgcattactcatgaacctatctgtactacttagccaagacagtatggtaagatatctatcttgtggaagatttatcrgaggggtgtgagctctggagacagaattcctgcactcgaatccttgctctgccataaactgaccctgatcaaactagtcatctgtctgtacctgcaaaatgggttaataccatctacctcatagtaggcattcaatgaaataatatgtgtgagctacttagaacagcacttagtaagtatccagatgaagtttggccattattagcttaacatttctatattgactcatactttaagcctaaatacatttcttaaactttaaattattcccatccataataacaagcatgttgaatctctataactacactatgaggtaaatgctgttatcgtccccatcttacagatcaggaaactgaggcacacatcacgggcatgaagccacagagctgagaagtggtagagca

SEQ ID NO: 368074 - DNA, 578 bp, Homo sapiens
gggagatttaccgtgtaccattgtaactccagagttttcaacagagccaagcatgtagtagatgctcaataaatatttcttgagtgaataatcttgcattactcatgaacctatctgtactacttagccaagacagtatggtaagatatctatcttgtggaagatttatcagaggggtgtgagctctggagacagaattcctgcrctcgaatccttgctctgccataaactgaccctgatcaaactagtcatctgtctgtacctgcaaaatgggttaataccatctacctcatagtaggcattcaatgaaataatatgtgtgagctacttagaacagcacttagtaagtatccagatgaagtttggccattattagcttaacatttctatattgactcatactttaagcctaaatacatttcttaaactttaaattattcccatccataataacaagcatgttgaatctctataactacactatgaggtaaatgctgttatcgtccccatcttacagatcaggaaactgaggcacacatcacgggcatgaagccacagagctgagaagtggtagagca

SEQ ID NO: 368075 - DNA, 578 bp, Homo sapiens
gggagatttaccgtgtaccattgtaactccagagttttcaacagagccaagcatgtagtagatgctcaataaatatttcttgagtgaataatcttgcattactcatgaacctatctgtactacttagccaagacagtatggtaagatatctatcttgtggaagatttatcagaggggtgtgagctctggagacagaattcctgcactcgaatccttgctctgccataaactgaccctgatcaaactagtcatctgtctgtacctgcaaaatgggttaataccatctacctcatagtaggcattcaatgaaataatatgtgtgagctacttagaacagcacttagtaagtatccagatgaagtttggccattattagcttaacatttctatattgactcatactttaagcctaaatacatttcttaaactttaaattattcccatccataataacaarcatgttgaatctctataactacactatgaggtaaatgctgttatcgtccccatcttacagatcaggaaactgaggcacacatcacgggcatgaagccacagagctgagaagtggtagagca

SEQ ID NO: 368076 - DNA, 590 bp, Homo sapiens
cagactcccttgcagttaggtgtggccatatgactgagttctgcccagcagaatatggatggaactgatatatccacttccgggacaggcctgttgagamctcccacgggatatgccactcctctgacctcaccattccccccaccacttactggttagatgttgacactcaggtcaatgttgaaagccacatgataaagttggaagttcctccatcatcctgggtccttgagtgactgcatggagcagagcatcccatgtctacctctaccctccaactgctgtccaggcaccccgaattgaactttatgtgaatgcaaaattcatttctttagtattaagcccctgaaactccagggtttatctgttctagaagccagcattaccttaactaatatgccccttgaattagtttattctataaatattctttgagcctctaccgtgtgccagggatgcttctaggcattagtgatacagtggcagccaaggaaaaggtttctgctcttatgtaactttagtgggaggagaccgacaataaacaagtaaacaaataagatagtttttgccagtgatagagctaaaaagga

SEQ ID NO: 368077 - DNA, 590 bp, Homo sapiens
cagactcccttgcagttaggtgtggccatatgactgagttctgcccagcagaatatggatggaactgatatatccacttccgggacaggcctgttgagacctcccaygggatatgccactcctctgacctcaccattccccccaccacttactggttagatgttgacactcaggtcaatgttgaaagccacatgataaagttggaagttcctccatcatcctgggtccttgagtgactgcatggagcagagcatcccatgtctacctctaccctccaactgctgtccaggcaccccgaattgaactttatgtgaatgcaaaattcatttctttagtattaagcccctgaaactccagggtttatctgttctagaagccagcattaccttaactaatatgccccttgaattagtttattctataaatattctttgagcctctaccgtgtgccagggatgcttctaggcattagtgatacagtggcagccaaggaaaaggtttctgctcttatgtaactttagtgggaggagaccgacaataaacaagtaaacaaataagatagtttttgccagtgatagagctaaaaagga

SEQ ID NO: 368078 - DNA, 590 bp, Homo sapiens
cagactcccttgcagttaggtgtggccatatgactgagttctgcccagcagaatatggatggaactgatatatccacttccgggacaggcctgttgagacctcccacgggatatgccactcctctgacctcaccattccccccaccacttactggttagatgttgacactcaggtcaatgttgaaagccacatgataaagttggaagttcctccatcatcctgggtccttgagtgactgcatggagcagagcatcccatgtctacctctaccctccaactgctgyccaggcaccccgaattgaactttatgtgaatgcaaaattcatttctttagtattaagcccctgaaactccagggtttatctgttctagaagccagcattaccttaactaatatgccccttgaattagtttattctataaatattctttgagcctctaccgtgtgccagggatgcttctaggcattagtgatacagtggcagccaaggaaaaggtttctgctcttatgtaactttagtgggaggagaccgacaataaacaagtaaacaaataagatagtttttgccagtgatagagctaaaaagga

SEQ ID NO: 368079 - DNA, 590 bp, Homo sapiens
cagactcccttgcagttaggtgtggccatatgactgagttctgcccagcagaatatggatggaactgatatatccacttccgggacaggcctgttgagacctcccacgggatatgccactcctctgacctcaccattccccccaccacttactggttagatgttgacactcaggtcaatgttgaaagccacatgataaagttggaagttcctccatcatcctgggtccttgagtgactgcatggagcagagcatcccatgtctacctctaccctccaactgctgtccaggcaccccgaattgaactttatgtgaatgcaaaattcatttctttagtattaagcccctgaaactccagggtttatctgttctagaagccagcattaccttaactaatatgccccttgaattagtttattctataaatattctttgagcctctaccgtgtgccagggatgcttctaggcattagtgatacagtggcagccaaggaaaaggtttctgctcttatgtaactttagtgggaggagaccgacwataaacaagtaaacaaataagatagtttttgccagtgatagagctaaaaagga

SEQ ID NO: 368080 - DNA, 633 bp, Homo sapiens
ttggtattttatcagccttccccagtgagcctcatgtaccctacagtttgagaactgctggcccaggcacggctctggcattttgctaaatggagggtgagctcatttgtgcatgcagctcatcagattagtggttttgaaacttgatcagaatgctttcttaaaatcaactcttcctcaggatttcaaaacacaaaataaatcagagggtagctacatatagccccttgtttgcaagtccaacttgagtggctggtaggaatagaaagcagtctacagaagccatatcaggggatacgtggctccaacagggaatagaacagccaaagagaggacaaaggtttgcactggaggaagaagcaggctgttacaaagccctgatgaatggcagagcagacagtcagggataggccaagcccagggtagagacaacagcaggagtcctaagcctgggtcagccattatgaaaactagagcccaaggcacaaagagagatcaggttgttcaagtaagcagtctccattttcccagagagaaaacaktgaggaaacaaaatttatttgtgggggcctgcactccttctgtggaccattaagctgctctgataaaataccattttgaacacaacacatc

SEQ ID NO: 368081 - DNA, 606 bp, Homo sapiens
acaaggctggtgtcactgagaaagtgatcattaagatgagacccaaggatgggaagaaccaatctagtgaagagtggggggaaagggcattctagccaaaacaaaaaacaaaaaactccrcaggatgtgcaaaggccctgagacaggaaagaaattcatcatgcttgtggaagtccagtggggctgaagtctggcaagggaggggatgagattatataaataaatgtagggaaatgctattcagaaaaaggaataaagtaagatactgattatagactatagctagaattctggagcaactgctatgcgctagacagtatgttaggtgttttatacatgtcctattgtgtgtcaatgcttgacctgaccatccaataatgcttcccagtggatgctccattgaacactagtcctttgaaatgttcttcaaaattagagttccttggccaaataaattaaagactcctagaatatatgcaataaagccatttacatttatgttcatcccagtgtttttcaaactgatatatccattaaacacctttttatgtaacaactattgatatataggggaaataatgttctggagagaagactttgaagaaa

SEQ ID NO: 368082 - DNA, 606 bp, Homo sapiens
acaaggctggtgtcactgagaaagtgatcattaagatgagacccaaggatgggaagaaccaatctagtgaagagtggggggaaagggcattctagccaaaacaaaaaacaaaaaactccgcaggatgtgcaaaggccctgagacaggaaagaaattcatcatgcttgtggaagtccagtggggctgaagtctggcaagggaggggatgagattatataaataaatgtagggaaatgctattcagaaaaaggaayaaagtaagatactgattatagactatagctagaattctggagcaactgctatgcgctagacagtatgttaggtgttttatacatgtcctattgtgtgtcaatgcttgacctgaccatccaataatgcttcccagtggatgctccattgaacactagtcctttgaaatgttcttcaaaattagagttccttggccaaataaattaaagactcctagaatatatgcaataaagccatttacatttatgttcatcccagtgtttttcaaactgatatatccattaaacacctttttatgtaacaactattgatatataggggaaataatgttctggagagaagactttgaagaaa

SEQ ID NO: 368083 - DNA, 536 bp, Homo sapiens
tgtaaaacccctactcggtgcctatgaatgatgccatatggctcctgcttgtttacagatttgtctaagcccttgaggtaaacggaatccaaccattgacacccttgacacacagcacgggttggctagagggcggtggggtttgtgtatttgttccttactccaacactgtcttttaagatcactattgtaacctggaacacaggatatcccccargtaatttcacatacttagctggtcctcttgtgaaccacagctccttcccctgtgttgtacaagcccacctatgtgcatattttttgaaattttaagagttgagttttagatgatttgtggagcttggaatttcccagaaggatgacttgctcaggtctctaggcagtgtcttatgtctagcagtctgtccatgtacatatagtacatttaaaaaaattaacgtatttatctatttgaataggtcaatatgtacatggtagaaaagaaagtaaagcaatattcaaggacgtgaagcaaacactaagtgccctctctcctc

SEQ ID NO: 368084 - DNA, 536 bp, Homo sapiens
tgtaaaacccctactcggtgcctatgaatgatgccatatggctcctgcttgtttacagatttgtctaagcccttgaggtaaacggaatccaaccattgacacccttgacacacagcacgggttggctagagggcggtggggtttgtgtatttgttccttactccaacactgtcttttaagatcactattgtaacctggaacacaggatatcccccaggtaatttcacatacttagctggtcctcttgtgaaccacagctccttcccctgtgttgtacaagcccacctatgtgcatattttttgaaattttaagarttgagttttagatgatttgtggagcttggaatttcccagaaggatgacttgctcaggtctctaggcagtgtcttatgtctagcagtctgtccatgtacatatagtacatttaaaaaaattaacgtatttatctatttgaataggtcaatatgtacatggtagaaaagaaagtaaagcaatattcaaggacgtgaagcaaacactaagtgccctctctcctc

SEQ ID NO: 368085 - DNA, 346 bp, Homo sapiens
cccagagtcacatgacagttaagtgcaggtggctccactaaatcccagacgggcctggctccaaggtgccggtttcctctgttctctcaatgcgccccgatgtgccacattattgaagctggagggacagcgttcctgggaaaaccatttagatttcattctccttcctttctctgacagaagctgctggtgaggaaggtaatgattttgatcaaaccatccccagaatgcatgcctgcctttggaaggagcagactgggatgaaattttttactttgggttttatcaaccagaggacatgaggcaggtttyttaacctctttttaggattccgtttttttttttg

SEQ ID NO: 368086 - DNA, 593 bp, Homo sapiens
aaaccgcacatcatgtgttctcacttttaagtgggagctaatatccattctaatttccttttcatctcctcccctcacctgtcctcccttttcttccagttccgtcctcttccctccyctccaaccctctctctccctctcatccttcttccctatctcagccctgttttcctttccttccaggaacattttggtaatgtgccaagcgctttataggctttggggactcagtgatgaattaaagtgaacacgtttcctgctctcacaaggctttgagtctattttgggagtggtggggggcagacactaaacagctagcagtgcaatcatttgtgtaattatatctgtaacatgtgggggggatgatgaaaggagagtgtggaatgagggaatttggtcaggggtcaggggtcaggggacgttttcctggggaatccaggctttagctgagacccggaggatgagtgggaatgaccagctgaaggaagggagacagtggaatagcaacccaggcagagggaactgcatggtgcagggacaaccttgagtggggagtggcctagggctttggagggatggacaggaggccagaa

SEQ ID NO: 368087 - DNA, 593 bp, Homo sapiens
aaaccgcacatcatgtgttctcacttttaagtgggagctaatatccattctaatttccttttcatctcctcccctcacctgtcctcccttttcttccagttccgtcctcttccctcctctccaaccctctctctccctctcatccttcttccctatctcagccctsttttcctttccttccaggaacattttggtaatgtgccaagcgctttataggctttggggactcagtgatgaattaaagtgaacacgtttcctgctctcacaaggctttgagtctattttgggagtggtggggggcagacactaaacagctagcagtgcaatcatttgtgtaattatatctgtaacatgtgggggggatgatgaaaggagagtgtggaatgagggaatttggtcaggggtcaggggtcaggggacgttttcctggggaatccaggctttagctgagacccggaggatgagtgggaatgaccagctgaaggaagggagacagtggaatagcaacccaggcagagggaactgcatggtgcagggacaaccttgagtggggagtggcctagggctttggagggatggacaggaggccagaa

SEQ ID NO: 368088 - DNA, 593 bp, Homo sapiens
aaaccgcacatcatgtgttctcacttttaagtgggagctaatatccattctaatttccttttcatctcctcccctcacctgtcctcccttttcttccagttccgtcctcttccctcctctccaaccctctctctccctctcatccttcttccctatctcagccctgttttcctttccttccaggaacattttggtaatgtgccaagcgctttataggctttggggactcagtgatgaattaaagtgaacacgtttcctgctctcacaaggctttgagtctattttgggagtggtggggggcagacactaaacagctagcagtgcaatcatttgtgtaattatatctgtaacatgtsggggggatgatgaaaggagagtgtggaatgagggaatttggtcaggggtcaggggtcaggggacgttttcctggggaatccaggctttagctgagacccggaggatgagtgggaatgaccagctgaaggaagggagacagtggaatagcaacccaggcagagggaactgcatggtgcagggacaaccttgagtggggagtggcctagggctttggagggatggacaggaggccagaa

SEQ ID NO: 368089 - DNA, 593 bp, Homo sapiens
aaaccgcacatcatgtgttctcacttttaagtgggagctaatatccattctaatttccttttcatctcctcccctcacctgtcctcccttttcttccagttccgtcctcttccctcctctccaaccctctctctccctctcatccttcttccctatctcagccctgttttcctttccttccaggaacattttggtaatgtgccaagcgctttataggctttggggactcagtgatgaattaaagtgaacacgtttcctgctctcacaaggctttgagtctattttgggagtggtggggggcagacactaaacagctagcagtgcaatcatttgtgtaattatatctgtaacatgtgggggggatgatgamaggagagtgtggaatgagggaatttggtcaggggtcaggggtcaggggacgttttcctggggaatccaggctttagctgagacccggaggatgagtgggaatgaccagctgaaggaagggagacagtggaatagcaacccaggcagagggaactgcatggtgcagggacaaccttgagtggggagtggcctagggctttggagggatggacaggaggccagaa

SEQ ID NO: 368090 - DNA, 542 bp, Homo sapiens
taggaggtggctgctttttcagggagagacaatatagaatggagtgtgcagggtctggggtttactccccctcccacaycgtggcagccacgtggccttggtgttttcgagtttgagtactgtcctctataaaacggcacctcccctctagggttttatcctcatgaatataaaatgagatgatatatgtaaaacatcagtacccagcacatagtcagtgctcagtaaataagaacactattgtaattgaaatgaatgacaaaaagtgtttttcattgaagaaatagcaaagggcgataagtgcttatcttaggaatagaagaacaggggacattttcttaacctcatacttcactgcattgaaactgaggtttcctgaccttggctgtagcatcatcttggactggataattctctgttgtagaaggcttcttgtctattgcaggatgtttactggcatctctgggctgtatcccttggatgccattagcatttcccaagttgtaacaaccaaaattgtctctaaacattgccagatgtcc

SEQ ID NO: 368091 - DNA, 577 bp, Homo sapiens
accaaacccagcctcaaaaataaggagaaaatcaaacccttatttcaaatctgaaccttttatatatgagggtaggtgcctgggagcctcacggacaggccgatgctacccattctcctctctacccaacctctaccatgaaacttgtcatctcttttagagaaggaggtataaatacacaccaaaaaattaactgtctttaaaatccaagatggaaatgaagagtatgtcccaaagcagtgtgtgccaaatggtttgcacagacaatcctacgctagaagtttgacgtaatcttcctatgcctcaattttcccagttataaaatggggtgataatactagtatctacctcatagcactgtggggaagaatccaagagataaagcatgtgaagtgctcagtcatggcctagtacatggtrtgcattcagtaaatgttaccatccctgtaatgcatgccctttgaaacatgcaagacaccgcttgtcattttccgaaagcaaaaatgacagagtgacacatgtcaaccctacagttacaaaagtgaggaagaaaactctgtaataaaattgcggaaaa

SEQ ID NO: 368092 - DNA, 642 bp, Homo sapiens
aattccattggctgttttcaggttaagtgtgagcacaaatataattttctcacagaacctgtaaggtacatggatgtgctttggtcaaagaatagactgaggcaggtatccaggtctgcagggctcagcgagtttagcgcacaggcgcatgcttccacttgttatataacctgtttgtgtaagttcatacttggctctgagccattactgtctgtaaaaggtataattgccctgctaacactgtatagggcctcttggggctcagcttgactcaacgtggctggacatgtctcttgtgcaggtgctcttgcatccagagaaagagagaaagccaaatttgtccgtctttgcagacagacagaggggagccaggacacagctcagcttgcttgtgcccagacaggtaaagagttaagctgctgaccctgaaggcaaggggagccggctgtgcagctgtgtgtggaagctggactaagcagctgagacagggcagtgcgagaaagctgttgatgagagctgctgctgctgaataaaatcacctttcacctgcccacggctccctgrctgttctttctgctcatccacccactcccttcggacctcagcatgacatttggcatagtcctgaaactgacagaacca

SEQ ID NO: 368093 - DNA, 566 bp, Homo sapiens
aaaacagtaaagaatactgtggaacttagactgactgtttaaaatrttgagcacttaagcactgaacatctaatatttttagaaggattctgttaaatattctgttaaattatgaagcatacaaatctcaaatcttaggcataatttgcattcatgtgatctcttatggatagctgatatgaatataattcggcataaatatatttaaagggtatttgcaatacactggcaattccctggattttctatataaaagttgaaaatttatacactctatgacccagcaattatattcatggaagtgtagctcatctttctaggagttgagaatattcaagtggctgttcataagagcaaacttgggacaattcagatatcgacaggataatggattcacactgtagaatattaaacagtcctgaaaagaaatttgctacagctataagcaatggtgtgaattaaatgttgtaccaatattgaggaaagaaaacagaaatatagaaagactacacataatagtcttgtaataaaattaatgatactgaaactaaatgatattctttgag

SEQ ID NO: 368094 - DNA, 560 bp, Homo sapiens
gtcatataatagtggtgtatttaagtaggtatttgatctttgtggcaggaaaatggtagttccattataacttaacagtagaagttcctatattagaatgtgtaacctagagcagaaacagtgaaaataaacattcctagtaaggcacatggatatggtagaacaagtatagactttgttgtcaaagagttgctcggttaatacaattagtcgagtgccttctatgtgccaggckttgctctagattctaaaaacaagatagacaatagcaagcaaggcacattcagcctggcctatcttatctctctgatgattgtttgcttgttttttaaattttggctctgttaatagttgggtatttccatataaggaatattattctaagcctcaatttttgtgtaaaatagagatataaaaatacttatctcaaagggtttttgtgagcactacagaacttatatatagatctatgagagagaatgagagagcacctgatgcgtgataaatgtgatttctcttctttttttttttccttcacagctcatggacagctcatgctg

SEQ ID NO: 368095 - DNA, 627 bp, Homo sapiens
tactgccctacccagtagggttgatgatacttgtaagtgacttactgagataatatccataaagtatgcagtgcaccatcttagctaactgaatgtacctctcaggctctggccattctatgccctgagaggtctcttcatgcagcacctytcctgtctgaccacagaaaggctatgtgggtgctgggagtctgcagggcctttgccagaagaacactggaggctcccttgtctctcttgctcttccatggcacaggctttggatagattaagtcctggtcactcttttatcctcaaacaccatgatcagggtctggtttcagctcaggccatttttctacttgcccagaaactacaacctgggtgtgtcctggtttcctccattggacactagatgtacccaggaagatcactcaaggtccagcaccaaccaggcctgaaacaacaccccagagaggggtggagctgtgccctggagctttgcagggcgtcagcccaagggaaggatttctgagctgctggggtttgagaatttcaatccttagaattagtgcagcagcttactgaggttatatagcctctaagtctcttttttctatctaaatctctttttctagacataaatgg

SEQ ID NO: 368096 - DNA, 627 bp, Homo sapiens
tactgccctacccagtagggttgatgatacttgtaagtgacttactgagataatatccataaagtatgcagtgcaccatcttagctaactgaatgtacctctcaggctctggccattctatgccctgagaggtctcttcatgcagcacctttcctgtctgaccacagaaaggctatgtgggtgctgggagtctgcagggcctttgccagaagaacactggaggctcccttgtctctcttgctcttccatggcacaggctttggatagattaagtcctggtcactcttttatcctcaaacaccatgatcagggtctggtttcagctcaggycatttttctacttgcccagaaactacaacctgggtgtgtcctggtttcctccattggacactagatgtacccaggaagatcactcaaggtccagcaccaaccaggcctgaaacaacaccccagagaggggtggagctgtgccctggagctttgcagggcgtcagcccaagggaaggatttctgagctgctggggtttgagaatttcaatccttagaattagtgcagcagcttactgaggttatatagcctctaagtctcttttttctatctaaatctctttttctagacataaatgg

SEQ ID NO: 368097 - DNA, 627 bp, Homo sapiens
tactgccctacccagtagggttgatgatacttgtaagtgacttactgagataatatccataaagtatgcagtgcaccatcttagctaactgaatgtacctctcaggctctggccattctatgccctgagaggtctcttcatgcagcacctttcctgtctgaccacagaaaggctatgtgggtgctgggagtctgcagggcctttgccagaagaacactggaggctcccttgtctctcttgctcttccatggcacaggctttggatagattaagtcctggtcactcttttatcctcaaacaccatgatcagggtctggtttcagctcaggccatttttctacttgcccagaaactacaacctgggtgtgtcctggtttcctccattggacactagatgtacccaggaagatcactcaaggtccagcaccaaccaggcctgaaacaacaccccagagaggggtggagctgtgccctggagctttgcagggcgtcagcccaagggaaggatttctgagctgctggrgtttgagaatttcaatccttagaattagtgcagcagcttactgaggttatatagcctctaagtctcttttttctatctaaatctctttttctagacataaatgg

SEQ ID NO: 368098 - DNA, 597 bp, Homo sapiens
aactgagttagttaaatgaactgtagctcttgctgataattcactcccacatgagaatgggagttcacccacacgatttagttttcccattgataagagaaaatgaggccttgccagagaaatgcatgttccataccaatgcagtcggctttgtgtttgtgcrtatctttccaggtgaagggatgtatttaaacttacagtaaaatctacaaaaagacaaatgctgatgtaaaaaaataaactaccagcttctgtgttcctttatccctagttgtcaaatgtggttgggctcagctcttattttcaggtaaagaagtgactgcagcctgattttttggattttctcagttcagaggaagccactgctgtttgtttcactgtctttccttttgagcttttcctgacaacaaatattaacagaatatctatctatctatctatctatctatctatctatctatctatctgtcatctatcatctatctatatttaatctcataaaacacaatctgcatttgcacaattgaatattttggttctcacatattgctgacagaattttattaaatttaaaggccaaatattttaacatgatcc

SEQ ID NO: 368099 - DNA, 639 bp, Homo sapiens
cttgctctaccaagatcacagagacccttttaggaggcaggagtccagggtggcttttgggatccacctcttcctgaaggctggggcactttggggcatgaatatcaactcagaactgagttagttaaatgaactgtagctcttgctgataattcactcccacatgagaatgggagttcacccacacgatttagttttcccattgataagagaaaatgaggccttgccagagaaatgcatgttccataccaatgcagtcggctttgtgtttgtgcatatctttccaggtgaagggatgtatttaaacttacagtaaaatctacaaaaagacaaatgctgatgtaaaaaaataaactaccagcttctgtgttcctttatccctagttgtcaaatgtggttgggctcagctcttattttcaggtaaagaagtgactgcagcctgattttttggattttctcagttcagaggaagccactgctgtttgtttcactgtctttccttttgagcttttcctgacaacaratattaacagaatatctatctatctatctatctatctatctatctatctatctatctgtcatctatcatctatctatatttaatctcataaaacacaatctgcatttgcacaattg

SEQ ID NO: 368100 - DNA, 572 bp, Homo sapiens
aagaatgaatacacaagctatcaaaatttgtgagctacatctaaagcattatatgtaggaaattatacactaataaactgttagcaaaaaaaggtataaaatctatgactttagcttctaccttaagatacaagaaaaagaatatcaaattaagccaaattaagcagaaaaatatctgttgcgtgtatattatatattatatacgtgtataatacatatacatagacacacacagccrtataaagaatactagatccaagtgatgtttaggaagaagcatgcaaggcagaatttctgtctctagtgttcattctccatgtacttgtctatcctgtgctatggaactttatatttagataggaatttctaaaacatttaatcagctcctggcactctacaaatgaagctggactttaggggttgaatgatttgctgattgtcacaagctattctaataatgtcattttctaaaggcaggtaagcattgtctgtcctgctccagtagtcagactggccaccttcacccccacaggcattagtccttacttcttaaataacagccactagacttg

SEQ ID NO: 368101 - DNA, 572 bp, Homo sapiens
aagaatgaatacacaagctatcaaaatttgtgagctacatctaaagcattatatgtaggaaattatacactaataaactgttagcaaaaaaaggtataaaatctatgactttagcttctaccttaagatacaagaaaaagaatatcaaattaagccaaattaagcagaaaaatatctgttgcgtgtatattatatattatatacgtgtataatacatatacatagacacacacagccgtataaagaatactagatccaagtgatgtttaggaagaagcatgcaaggcagaatttctgtctctagtgttcattctccatgtacttgtctatcctgtgctatggaactttatatttagataggaatttctaaaacatttaatcagctcctggcactctacaaatgaagctggactttaggggttgaatgatttgctgattgtcacaagctattmtaataatgtcattttctaaaggcaggtaagcattgtctgtcctgctccagtagtcagactggccaccttcacccccacaggcattagtccttacttcttaaataacagccactagacttg

SEQ ID NO: 368102 - DNA, 457 bp, Homo sapiens
caggggagtcgggggagtcaactgttgatrggtaaatgctgataaccaaagtgatattttcacaaagttcctatagttgtaagttttagggtattggctagggcctaggtcttcatcagactcccatcaatgaaactcagaataatattaagaaatacaatttaataatgataaagtcaatcagggaaaattactcaagttatttagtgtatgcctcaaaaacaatgataagaactccctatgagtgtccaaatgatgtttgatagggaggagagctatttcatatgacacaatgtaagtgataaaattgaagaatatctccacattagagcctcgtaagagttcagtgttttttctcaattttgcttttatgttggagctggaagttttcttcttgtaacacgatatatactcagagcaaagacagaaagatcttcttgagccccatatgtcccat

SEQ ID NO: 368103 - DNA, 544 bp, Homo sapiens
agatgaggcaaatctgtttagggaataaatggctataccactgcaggaacactcacatgcagtagaagctacatggaaaactcactatattattgcatttctttactctccacaacctttctttcagatttttaaactaccccattggctttagttgtcagaggaatagaatataagtgaaaatgttatacgtataatttattttgtttttattcctagatgggtatatacacagactgtatattctgtacttatagaataaatgatataaagtaaaaaaaatttctgtgactactttatgtatgccttgacaraaaggtatttgaaaatattaccatgttaagaagatttatctgtatctgttttctatactgtgctatggaattttatatttagataggaatttctaaaatatttagaatataaatgtcaaaaatataagatattatcaaaaagataatatattattaaaattgaggaatttaaattctttgaagatatcaaaataacctttctatgtcttttgggaagagaaggaagaagg

SEQ ID NO: 368104 - DNA, 544 bp, Homo sapiens
agatgaggcaaatctgtttagggaataaatggctataccactgcaggaacactcacatgcagtagaagctacatggaaaactcactatattattgcatttctttactctccacaacctttctttcagatttttaaactaccccattggctttagttgtcagaggaatagaatataagtgaaaatgttatacgtataatttattttgtttttattcctagatgggtatatacacagactgtatattctgtacttatagaataaatgatataaagtaaaaaaaatttctgtgactactttatgtatgccttgacagaaaggtatttgaaaatattaccatgttaagaagatttatctgtatctgttttctatactgtgctrtggaattttatatttagataggaatttctaaaatatttagaatataaatgtcaaaaatataagatattatcaaaaagataatatattattaaaattgaggaatttaaattctttgaagatatcaaaataacctttctatgtcttttgggaagagaaggaagaagg

SEQ ID NO: 368105 - DNA, 632 bp, Homo sapiens
aatataagtgaaaatgttatacgtataatttattttgtttttattcctagatgggtatatacacagactgtatattctgtacttatagaataaatgatataaagtaaaaaaaatttctgtgactactttatgtatgccttgacagaaaggtatttgaaaatattaccatgttaagaagatttatctgtatctgttttctatactgtgctatggaattttatatttagataggaatttctaaaatatttagaatataaatgtcaaaaatataagatattatcaaaaagataatatattattaaaattgaggaatttaaattctttgaagatatcaaaataacctttctatgtcttttgggaagagaaggaagaaggtatctgatagatgtttctgccagaatrtgtcctggttagctttggaggatgttctccttaaagacaagcagttccttagacctctttggaagagctggagatgggaagtttttccttttctttctttttatgaaatttatactcctttgtatcctagtacaagtccttcaatgaagcactgttttttctagattactctgtaacaccttttattatgtcaaaactttaggattcatatttaggcaatgtaagtttaa

SEQ ID NO: 368106 - DNA, 632 bp, Homo sapiens
aatataagtgaaaatgttatacgtataatttattttgtttttattcctagatgggtatatacacagactgtatattctgtacttatagaataaatgatataaagtaaaaaaaatttctgtgactactttatgtatgccttgacagaaaggtatttgaaaatattaccatgttaagaagatttatctgtatctgttttctatactgtgctatggaattttatatttagataggaatttctaaaatatttagaatataaatgtcaaaaatataagatattatcaaaaagataatatattattaaaattgaggaatttaaattctttgaagatatcaaaataacctttctatgtcttttgggaagagaaggaagaaggtatctgatagatgtttctgccagaatatgtcctggttagctttggaggatgtyctccttaaagacaagcagttccttagacctctttggaagagctggagatgggaagtttttccttttctttctttttatgaaatttatactcctttgtatcctagtacaagtccttcaatgaagcactgttttttctagattactctgtaacaccttttattatgtcaaaactttaggattcatatttaggcaatgtaagtttaa

SEQ ID NO: 368107 - DNA, 632 bp, Homo sapiens
aatataagtgaaaatgttatacgtataatttattttgtttttattcctagatgggtatatacacagactgtatattctgtacttatagaataaatgatataaagtaaaaaaaatttctgtgactactttatgtatgccttgacagaaaggtatttgaaaatattaccatgttaagaagatttatctgtatctgttttctatactgtgctatggaattttatatttagataggaatttctaaaatatttagaatataaatgtcaaaaatataagatattatcaaaaagataatatattattaaaattgaggaatttaaattctttgaagatatcaaaataacctttctatgtcttttgggaagagaaggaagaaggtatctgatagatgtttctgccagaatatgtcctggttagctttggaggatgttctccttaaagacaagcagttccttagacctctttggaagagctggagatgggaagtttttccttttctttctttttatgaaatttatactcctttgtatcctagtacaagtccttcaatgaagcactrttttttctagattactctgtaacaccttttattatgtcaaaactttaggattcatatttaggcaatgtaagtttaa

SEQ ID NO: 368108 - DNA, 405 bp, Homo sapiens
ctatgattagagatatttgtctagtttcattcttctaaatatggttatccaattttctcaatatcgtttattgaaaagggcatcctttccccagtgtattttttaatcaacttcgttgaaaatcaattcgttgtagatatgtggttttatttctgagttctttattctattcctttgatctatgtttctgtttttataccaataccatgctgttttagtkactatggttctgtagtataatttgagtcagacaatatgatgcctccagctttttactcttctggacattggcctaggcaaatagtttgtgactaagaccttaaagcaaatgcaacaaaacaaaaatagacaaatgaggcttaattcaactaaaaactttttgcattggaaaagaatcaacagagt

SEQ ID NO: 368109 - DNA, 641 bp, Homo sapiens
gtgtacagtgttcactattcgggtgatggtacaccaaaagccaagacttcaacactatgtaatacatgcttgcaacaaaactgcactggtaccccctgaatctgataaaataaaataaaaatagaaaagtcttattctagcatgatggtacaagtcttttaacttttttccatttcattttaagctatttcaccacttaatgtatggaaaaaaagttgactccgaatttcatcttcaatactataattttgatggaaacttgttattcatatgctaaaagaactgttatcataatataactaatacagattttccttattaataattcataaaaatatttgaagtataagctgagttccaggtagcagcacagaggcagatttcagcatatttgtgttatttgcataaatgtgattttacatgtagtatttgagtatgctctgtatmcatgtgactgtacacactcagatacagaagcaaaattgttaagtactcaaggattgtaaattatattttccaaaagtgggagcagcattaacataatttccacatctaccgtatgactttgtccctccatccagtaaaaggttgaatcatgtcactttcctttgaaactgtgtgggctttggtttcctgagaca

SEQ ID NO: 368110 - DNA, 510 bp, Homo sapiens
cactatttggcagcatttgacatagatgatcactgcctcatccttagtactcttttttcacttggcctttgctgtggtttggctctgtggcctgaccaaaatgtgatcttaaattgcaatccaaattgtagttcccaggtgttgaaagaggggcctgatgggaggtaattggatcatgggattggtttcccccatgctgttcttgtgatagtgagtgagttctcatgagaacagatggttttataagtgtttggaagttcctacttcttttttttcctgccrctttgtgaagaaagtgcctgcttccccttctgccatgattgtaagttccctgaggcctccccagccaggtgaactgtgaatcagttaaacttcttttctttataaatcatgccatctcaggcagttctttatagcagtgtgacaacgaattaatacagccttgaagacgtaatactcctggtttccttgttaagtttatgtcgatggtttctccttttcttttcaatg

SEQ ID NO: 368111 - DNA, 510 bp, Homo sapiens
cactatttggcagcatttgacatagatgatcactgcctcatccttagtactcttttttcacttggcctttgctgtggtttggctctgtggcctgaccaaaatgtgatcttaaattgcaatccaaattgtagttcccaggtgttgaaagaggggcctgatgggaggtaattggatcatgggattggtttcccccatgctgttcttgtgatagtgagtgagttctcatgagaacagatggttttataagtgtttggaagttcctacttcttttttttcctgccactttgtgaagaaagtgcctgcttccccttctgccatgattgtaagttccctgaggcctccccagccaggtgaactgtgaatcarttaaacttcttttctttataaatcatgccatctcaggcagttctttatagcagtgtgacaacgaattaatacagccttgaagacgtaatactcctggtttccttgttaagtttatgtcgatggtttctccttttcttttcaatg

SEQ ID NO: 368112 - DNA, 601 bp, Homo sapiens
ttgggggactgttggcaagacatgacttgttttaaaatgtgaggtatatgagatttcggaggggctaggggtaaaatgatatggtttgactgtgtccccccatcaaatctcaccttgaactttagctcccataattcccacatgttgtgggagggacctggtgggagataactaaatcatgggagtggttctctcatactgttctcaaggtagtgaataagtctcatgagatctgatggttttataaggggaaacccctttcacttggctctctgactttgcctgctactatccacataagacatgatttgctcctcctttccttcccaccatgattgtgaagcctctccagccacgtagaactacgagcccattaaacctctttttctgtataaattacccagtcttaggtaagtcattatcaggagcatgtgaacagattaatacaccctcccatcacaggcaaagaggcatasgaggtaaaaattgtttcatgggctgggcccagggccttgctgctttgtgcagtctcagcacttggtgccctgcatccaagctgtggctaaaaggggaaaatgtacagctcaggtcattgcttcaa

SEQ ID NO: 368113 - DNA, 610 bp, Homo sapiens
atgatttgctcctcctttccttcccaccatgattgtgaagcctctccagccacgtagaactacgagcccattaaacctctttttctgtataaattacccagtcttaggtaagtcattatcaggagcatgtgaacagattaatacaccctcccatcacaggcaaagaggcataggaggtaaaaattgtttcatgggctgggcccagggccttgctgctttgtgcagtctcagcacttggtgccctgcatccaagctgtggctaaaaggggaaaatgtamagctcaggtcattgcttcaaaaagtacaagccccaagccttggtggcttacacatggtgttgggcctgtgggtacacagaagtaaagatttgaggttggaacctccacctagatttcagaggatgtatggaaatgcctggatgtttgctacaggggtgggaccctcatggagaacttctgccagggcagtgtggaagggagatgtggggtcagaacctccacacagggccctcactagggcactgcctagtggagctgtgagaagagagccatcatgctccagatcccagaatcatagatccactgacagcttgcactgtgcacctggaaaa

SEQ ID NO: 368114 - DNA, 547 bp, Homo sapiens
aattcgtgttttagccaacaaaccaatcaactaattagcacgtttcctaaatccctgagcttcaacattaaatacagaatctctgcttagtggctccatattaataaatttggcctgatccaaatttwtgtttatttcaccattatcccatacctttagtatctgttcccacacatgttccccagatttccatttgtataagttagaaaagtttaatttttattttaagttcaggagtacatgtgcaggcttgttacataggcgaacctgtgtcatgggggtttcaagagtagccattaccattttctcaggcaatgcggagttaatcttttcaaacaaggtgaagaagcagtggggagaccacttccactgggaaacaagacccttcaaaatttaggagctcgatgtccccagcctcatcagggtcctcccacacatcccattccaacatacaggatcctattcttcctaaacaatgccctcacttccacggtacacaccatgtgagactgaaaattcaacttttgttgtaattcagtcaaacata

SEQ ID NO: 368115 - DNA, 484 bp, Homo sapiens
ttggtggctttatttaggttctgttgttactttatctcatcagttctgatgagagcctttttaggctttcctactagatggaaaattcttgctcamaattctctggcaatgatattgtgcagtgaagacaggctagttcacagaaggtctccacatctgtgttcagggatgtagttacccaagaggcacagacccgctggctctgccctcttctagatacgtttcagctactcagacacacaagtcatagatggctcactagaaatagtagaacctaaaaaatagcatataacccggagggtaggttactttgggatgactataaattttctagaaatctataaacagggagatgattgaggctggaccagaaacaaaggtttttgggggagaataatcttccatttttaatgtttgactgaaatttctgagagtggccagtacattttcacgtattatggtacacggggtgccgtagtaactg

SEQ ID NO: 368116 - DNA, 484 bp, Homo sapiens
ttggtggctttatttaggttctgttgttactttatctcatcagttctgatgagagcctttttaggctttcctactagatggaaaattcttgctcacaattctctggcaatgatattgtgcagtgaagacaggctagttcacagaaggtctccrcatctgtgttcagggatgtagttacccaagaggcacagacccgctggctctgccctcttctagatacgtttcagctactcagacacacaagtcatagatggctcactagaaatagtagaacctaaaaaatagcatataacccggagggtaggttactttgggatgactataaattttctagaaatctataaacagggagatgattgaggctggaccagaaacaaaggtttttgggggagaataatcttccatttttaatgtttgactgaaatttctgagagtggccagtacattttcacgtattatggtacacggggtgccgtagtaactg

SEQ ID NO: 368117 - DNA, 484 bp, Homo sapiens
ttggtggctttatttaggttctgttgttactttatctcatcagttctgatgagagcctttttaggctttcctactagatggaaaattcttgctcacaattctctggcaatgatattgtgcagtgaagacaggctagttcacagaaggtctccacatctgtgttcagggatgtagwtacccaagaggcacagacccgctggctctgccctcttctagatacgtttcagctactcagacacacaagtcatagatggctcactagaaatagtagaacctaaaaaatagcatataacccggagggtaggttactttgggatgactataaattttctagaaatctataaacagggagatgattgaggctggaccagaaacaaaggtttttgggggagaataatcttccatttttaatgtttgactgaaatttctgagagtggccagtacattttcacgtattatggtacacggggtgccgtagtaactg

SEQ ID NO: 368118 - DNA, 484 bp, Homo sapiens
ttggtggctttatttaggttctgttgttactttatctcatcagttctgatgagagcctttttaggctttcctactagatggaaaattcttgctcacaattctctggcaatgatattgtgcagtgaagacaggctagttcacagaaggtctccacatctgtgttcagggatgtagttacccaagaggcacagacmcgctggctctgccctcttctagatacgtttcagctactcagacacacaagtcatagatggctcactagaaatagtagaacctaaaaaatagcatataacccggagggtaggttactttgggatgactataaattttctagaaatctataaacagggagatgattgaggctggaccagaaacaaaggtttttgggggagaataatcttccatttttaatgtttgactgaaatttctgagagtggccagtacattttcacgtattatggtacacggggtgccgtagtaactg

SEQ ID NO: 368119 - DNA, 612 bp, Homo sapiens
ctctttgcattttgaggaggtggggaacatgctaacaacatctgcaatgtggattattaaaagaagattttcccagctttggctgtacactgaaatctctagggtgtgtttaaaaatcctgttgtccaagcacacacraaagcaaataaattagaatctctcagtatgggatccgggtagatatagttttataaggaaatccaacatagtgcaaggttcctaactattaatacaatttttaaaagatattagcgattctccagcagattagaattgggaaaccaatgatttaaaacaacagattatataacaaataacaaggagaaaacacacaaatactatgaaagaggctgtcgttttttgtaataaaccataatcttagaatagttttaggcttagaaaaagattgcaaagacaatatagagggttcctgtacacccaagctcagttttgcatactgttaataataactataaattacattacagtatgttacaattattacaaccaatatataagaattaatagcacattcttaactcaaattacttcatgtaattgtttccgttgtttttggcctttccttagttttcgtcttatgtctttttctct

SEQ ID NO: 368120 - DNA, 612 bp, Homo sapiens
ctctttgcattttgaggaggtggggaacatgctaacaacatctgcaatgtggattattaaaagaagattttcccagctttggctgtacactgaaatctctagggtgtgtttaaaaatcctgttgtccaagcacacacaaaagcaaataaattagaatctctcagtatgggatccgggtagatatagttttataaggaaatccaacatagtgcaaggttcctaactattaatacaatttttaaaagatattagcgattctccagcagattagaattgggaaaccaatgatttaaaacaacagattatataacaaataacaaggagaaaacacacaaatactatgaaagaggctgtcgttttttgtaataaamcataatcttagaatagttttaggcttagaaaaagattgcaaagacaatatagagggttcctgtacacccaagctcagttttgcatactgttaataataactataaattacattacagtatgttacaattattacaaccaatatataagaattaatagcacattcttaactcaaattacttcatgtaattgtttccgttgtttttggcctttccttagttttcgtcttatgtctttttctct

SEQ ID NO: 368121 - DNA, 612 bp, Homo sapiens
ctctttgcattttgaggaggtggggaacatgctaacaacatctgcaatgtggattattaaaagaagattttcccagctttggctgtacactgaaatctctagggtgtgtttaaaaatcctgttgtccaagcacacacaaaagcaaataaattagaatctctcagtatgggatccgggtagatatagttttataaggaaatccaacatagtgcaaggttcctaactattaatacaatttttaaaagatattagcgattctccagcagattagaattgggaaaccaatgatttaaaacaacagattatataacaaataacaaggagaaaacacacaaatactatgaaagaggctgtcgttttttgtaataaaccataatcttagaatagttttaggcttagaaaaagattgcaaagacaatatagagggttcctgtacacccaagctcagttttgcatactgttaataataactataaattacattacagtatgttacaattattacaaccaatatrtaagaattaatagcacattcttaactcaaattacttcatgtaattgtttccgttgtttttggcctttccttagttttcgtcttatgtctttttctct

SEQ ID NO: 368122 - DNA, 439 bp, Homo sapiens
ctcttgtgataaagactaaagaggaaacatgccattcttatcacatcttatcaagggtacataatattaacatgattcatccctgtggatattggccttatccatgtttctgtaatgtgcagttattctcttctcttggcttgccatactgtattctttggaaggaagttattatgcacagcccacacctgwggaatcaggtttttgctctacttccttgagaatacagcattaacagaaattatttggatttttttctgtatggaagatttgtctcttcttccattttattcacttattttgttacttatttatatcagtgtgtatttatgaatatattatattttgggttataatccaatatttctttattttattgctgaaattgatccagttttggtcatttggagctctttcagttggttcctctcacctttga

SEQ ID NO: 368123 - DNA, 439 bp, Homo sapiens
ctcttgtgataaagactaaagaggaaacatgccattcttatcacatcttatcaagggtacataatattaacatgattcatccctgtggatattggccttatccatgtttctgtaatgtgcagttattctcttctcttggcttgccatactgtattctttggaaggaagttattatgcacagcccacacctgaggaatcaggkttttgctctacttccttgagaatacagcattaacagaaattatttggatttttttctgtatggaagatttgtctcttcttccattttattcacttattttgttacttatttatatcagtgtgtatttatgaatatattatattttgggttataatccaatatttctttattttattgctgaaattgatccagttttggtcatttggagctctttcagttggttcctctcacctttga

SEQ ID NO: 368124 - DNA, 546 bp, Homo sapiens
gtttagagcacttataaaagagaccccagagatatcctttgccccttccaccatgtaaggatatagtaaagacgtgctgactgtgatccaggaagctggtcttcactagacaccaaatctgccttgattttgaacttcccagcctccagaattgcaaaaaaaaatagatttctattgtttataaactacccagatgatgagatttggttatagaggcttgaaaggactaagacaacaagatttggatgaatttaaattttcttctttgtgtcatactatttatattttcctgaacatgttcctcttctcctgtgactgcccaatttttaatctgaaaaaaytggtataatatgaacacccacaatacaggtaaccaagactgtgtgagaaactaaaggggcttaaaaataaaaaaataatgttagcatcctgaggtcatcagtttattttcctatgttttaattattgtagagagtcattgtgaaagtttaagtaagcctagaaaggaggaccatatttatcttggtatcttttgttctaaaatcg

SEQ ID NO: 368125 - DNA, 611 bp, Homo sapiens
ttattttcctatgttttaattattgtagagagtcattgtgaaagtttaagtaagcctagaaaggaggaccatatttatcttggtatcttttgttctaaaatcgggcataccaagttattttagtttgtaaaaatacatgaaattaagaaaaattaaactgaaatagtaagaactggaagacacagtatagagaaaagaggagacaaataagaaaatacctttcagtatttaacacatttatgagattrtaagtaaagtcaataaatggtaagaaaaatgtatttgttttattcatctaaaacttaccaaagtttacttattattaagataacttggaaatacatgtatggatgggtgatgtaggaatatttattgaaggatgattggatgctcttctaggatttttacagaaatacgtatattagttcccatatgaatttaatgaagtacatataattttccccaatttgcagggaagcaaattgagaatgagagaagttgacctgcttgaccaatgtcatatagctcattaagagattaatcagaattagaactacgactaacggtactctttctattacatcccaataaggactgggacccaaacatgt

SEQ ID NO: 368126 - DNA, 611 bp, Homo sapiens
ttattttcctatgttttaattattgtagagagtcattgtgaaagtttaagtaagcctagaaaggaggaccatatttatcttggtatcttttgttctaaaatcgggcataccaagttattttagtttgtaaaaatacatgaaattaagaaaaattaaactgaaatagtaagaactggaagacacagtatagagaaaagaggagacaaataagaaaatacctttcagtatttaacacatttatgagattataagtaaagtcaataartggtaagaaaaatgtatttgttttattcatctaaaacttaccaaagtttacttattattaagataacttggaaatacatgtatggatgggtgatgtaggaatatttattgaaggatgattggatgctcttctaggatttttacagaaatacgtatattagttcccatatgaatttaatgaagtacatataattttccccaatttgcagggaagcaaattgagaatgagagaagttgacctgcttgaccaatgtcatatagctcattaagagattaatcagaattagaactacgactaacggtactctttctattacatcccaataaggactgggacccaaacatgt

SEQ ID NO: 368127 - DNA, 509 bp, Homo sapiens
ttcctcggggtgatcagccagctacctggtggcagattatattggacctcttccatcatggaaagggcagagatttgtcctcactggaatagacacttactctggatatgggtttgcctatcctgcatgcartgcttctgccaagactaccatccgtggattcatggaatgccttatccaccatcatggtattccacacagcattgcctctgaccaaggcactcacttcatggctaaagaagtgcagcagtgggctcattctcatggaattcaccggtcttatcgtgttctccatcacccagaagcagctggattgatagaacgatggaatggccttttgaagtgacaattacaatgctaactaggtgacaacacattgcagggctggggcaaagttctccagaggctgtatatgctctgaatcagcgtccaatatatggtactgtttctcccatagccaggattcacacgtccaaaaatcaaggggtgcaccatcacacctagtgatc

SEQ ID NO: 368128 - DNA, 509 bp, Homo sapiens
ttcctcggggtgatcagccagctacctggtggcagattatattggacctcttccatcatggaaagggcagagatttgtcctcactggaatagacacttactctggatatgggtttgcctatcctgcatgcaatgcttctgccaagactaccatccgtggattcatggaatgccttatccaccatcatggtattccacacagcattgcctctgaccaaggcactcacttcatggctaaagaagtgcagcagtgggctcattctcatggaattcaccggtcttatcrtgttctccatcacccagaagcagctggattgatagaacgatggaatggccttttgaagtgacaattacaatgctaactaggtgacaacacattgcagggctggggcaaagttctccagaggctgtatatgctctgaatcagcgtccaatatatggtactgtttctcccatagccaggattcacacgtccaaaaatcaaggggtgcaccatcacacctagtgatc

SEQ ID NO: 368129 - DNA, 509 bp, Homo sapiens
ttcctcggggtgatcagccagctacctggtggcagattatattggacctcttccatcatggaaagggcagagatttgtcctcactggaatagacacttactctggatatgggtttgcctatcctgcatgcaatgcttctgccaagactaccatccgtggattcatggaatgccttatccaccatcatggtattccacacagcattgcctctgaccaaggcactcacttcatggctaaagaagtgcagcagtgggctcattctcatggaattcaccggtcttatcgtgttctccatcayccagaagcagctggattgatagaacgatggaatggccttttgaagtgacaattacaatgctaactaggtgacaacacattgcagggctggggcaaagttctccagaggctgtatatgctctgaatcagcgtccaatatatggtactgtttctcccatagccaggattcacacgtccaaaaatcaaggggtgcaccatcacacctagtgatc

SEQ ID NO: 368130 - DNA, 540 bp, Homo sapiens
tcagatttctatcatattaacagtttcattatcttgaaaaaagaagaaaagtgctatttttatcagcccacttgcattggattctagtatgtgtttcaaatttgttyacagctctttaacattaaaaccaatgaggctgactacatgatagaaggttccctccttctatagcacggaacatattggctgcaatgttctgaatgttggcgtcctgtcccccacattcatatgttggaacccaatgtgatcatattaagaggtggggcctttgttatatgattaagtcatgagttctatcctcacaaatagtatccttctcacccatatgaaagaggctcagtgccagcgatctcccttgccccctttgctttgtgaagacacagcaagaaggtgccatctttgaagcagaaagtaaactctcaccagacaacaaatgtatatttctttttctcaattttgatggactataagaatataaatactcctttgtgaaatattagaattgtaaataggattagtgggacatcctttttttttttt

SEQ ID NO: 368131 - DNA, 628 bp, Homo sapiens
gctaattttttcaacatataaatcttgaggaacacaattcagtccacagaaaggaggaagaaaaataaaattctactgggtccaaaaaataaaaattactaatgaacatagaaacaaatttttccttgatatatgaaagaatattccagagagtttttttaaaaatgaaatggcttccacaggccatagaagaatgacctgattcattctatactaactgcagtaatcttgttttctcccacttaataaaaatacttaaccatgaatactttttcattcgaaaaaatgaaatagcttacacatgtcatcagacagagttcaataggagtgaaacaaatttaagcatcaaacattgggtgagacattggtgatcttccaaaatctttcatctgtagaaactccaccccaatacatggggttaaagatgttcttgctggaccaacttggagggaaagatgccaacccaatttcctgcctacaatttctcccccamcacctgtcatactggcttcaacatgaaggatgtctttataacttgattgatagataactcacaacatctcttataacttggagatgctaagttatatgctgttttggtctttggaaattgatgtttgcaacttaa

SEQ ID NO: 368132 - DNA, 538 bp, Homo sapiens
acgacctgattaataaaattatattattgtctgaaatyccaagtttagctacaaccctcattcacacccagtgtaaaatgtcttaggtcctctaatacaagaaattacctgctctgctaatacactctacattgaaggacaggagaagtgtgtggacattctaaggggcaaatgggaacagcagatatgtctttcgttgacagtaataggcaataatgtcagatttgtattttttatttttttacattagagtcaccaaccctgggacatccaagatgtccaattcactgggctcttcccagcagtttatcaaccagactgcagggacatctaatcaggcggtcattgcccagaattttcctgtgtgtctgtgtgtaatgtcattgacttgaattcttgtgggtcagcatcccacaaaccaagtgtaaattcctcttctctgacacagctggagcctggtgttctgagtcttgcagccctcgggtcacctatggtgtttctgagtagtgtgcaatggacagtaggtgtttatgcacat

SEQ ID NO: 368133 - DNA, 538 bp, Homo sapiens
acgacctgattaataaaattatattattgtctgaaattccaagtttagctacaaccctcattcacacccagtgtaaaatgtcttaggtcctctaatacaagaaattacctgctctgctaatacactctacattgaaggacaggagaagtgtgtggayattctaaggggcaaatgggaacagcagatatgtctttcgttgacagtaataggcaataatgtcagatttgtattttttatttttttacattagagtcaccaaccctgggacatccaagatgtccaattcactgggctcttcccagcagtttatcaaccagactgcagggacatctaatcaggcggtcattgcccagaattttcctgtgtgtctgtgtgtaatgtcattgacttgaattcttgtgggtcagcatcccacaaaccaagtgtaaattcctcttctctgacacagctggagcctggtgttctgagtcttgcagccctcgggtcacctatggtgtttctgagtagtgtgcaatggacagtaggtgtttatgcacat

SEQ ID NO: 368134 - DNA, 538 bp, Homo sapiens
acgacctgattaataaaattatattattgtctgaaattccaagtttagctacaaccctcattcacacccagtgtaaaatgtcttaggtcctctaatacaagaaattacctgctctgctaatacactctacattgaaggacaggagaagtgtgtggacattctaaggggcaaatgggaacagcagatatgtctttygttgacagtaataggcaataatgtcagatttgtattttttatttttttacattagagtcaccaaccctgggacatccaagatgtccaattcactgggctcttcccagcagtttatcaaccagactgcagggacatctaatcaggcggtcattgcccagaattttcctgtgtgtctgtgtgtaatgtcattgacttgaattcttgtgggtcagcatcccacaaaccaagtgtaaattcctcttctctgacacagctggagcctggtgttctgagtcttgcagccctcgggtcacctatggtgtttctgagtagtgtgcaatggacagtaggtgtttatgcacat

SEQ ID NO: 368135 - DNA, 556 bp, Homo sapiens
aggactcaactggcaccaattttagttgaggagtgggggagtcgggcttccccaacattgaatactgtgctcacaatgaccaacttagatttttgatcctagggagaaagcttctctctcagtaaagctgtgtttttctcctttgctgatttattttcaakgcattaacatttttctatcaagtcctgtaaagttcagccaccataagcacttgatgtaaatcccaagacacaacagaaaacaatttaacaaaatccttccacgtaacagttcgtctgtttccggaataagagtggaatgtaaataactttaacaacctctgcttatttgcctcagctgatcccgtagttagcacctctcacttgtcttactgaaatccaggtgccattttctggaccagtcaaagattttgagatacaagtgacatatgctcactggttaattcaagtgaagaggagattcgttgaactgagtaaggatagctgaacaatcagtcctcaaaagtaagaggcctagagaccctagaggccctgggaagtgagacccaatgaacaag

SEQ ID NO: 368136 - DNA, 427 bp, Homo sapiens
gatcctagggagaaagcttctctctcagtaaagctgtgtttttctcctttgctgatttattttcaatgcattaacatttttctatcaagtcctgtaaagttcagccaccataagcacttgatgtraatcccaagacacaacagaaaacaatttaacaaaatccttccacgtaacagttcgtctgtttccggaataagagtggaatgtaaataactttaacaacctctgcttatttgcctcagctgatcccgtagttagcacctctcacttgtcttactgaaatccaggtgccattttctggaccagtcaaagattttgagatacaagtgacatatgctcactggttaattcaagtgaagaggagattcgttgaactgagtaaggatagctgaacaatcagtcctcaaaagtaagaggcctagagacc

SEQ ID NO: 368137 - DNA, 427 bp, Homo sapiens
gatcctagggagaaagcttctctctcagtaaagctgtgtttttctcctttgctgatttattttcaatgcattaacatttttctatcaagtcctgtaaagttcagccaccataagcacttgatgtaaatcccaagacacaacagaaaacaatttaacaaaatccttccacgtaacagttcgtctgtttcyggaataagagtggaatgtaaataactttaacaacctctgcttatttgcctcagctgatcccgtagttagcacctctcacttgtcttactgaaatccaggtgccattttctggaccagtcaaagattttgagatacaagtgacatatgctcactggttaattcaagtgaagaggagattcgttgaactgagtaaggatagctgaacaatcagtcctcaaaagtaagaggcctagagacc

SEQ ID NO: 368138 - DNA, 498 bp, Homo sapiens
tttgtatatttgcttccatcttataatcaagatttaatttccagaagatggagattctgattggcctagttttgataacctgctgcctcctgcagtgaggagggggtcagtttaatggacactcttactgtgtatgttccagggaaatggggtcacctattcttcaagacttacgtaggaattacctgggtttaacactggaagtccyacctcctgggaaaatccttagtcccatgacttagggacagttgttcaccctaatagagcttgatcttcaaaagaaaattgaggtgttattacttgacaaaagcaagagagaagttgggttggcaaaaacaataactattcgtcacagaaaaatttaggtgttattgcctgacaaaggctagagagaatgtgagttggcaaaaacagtaagtattcatcacagaaaaaattatttttttgaaatggaaaaatagaaataattattattattaccagaaaatggaagtatgg

SEQ ID NO: 368139 - DNA, 536 bp, Homo sapiens
agaactaaaaataatattgtaaggtttgcaactaactgaaagaatctcctctcagccatgggaaccgaagagaaaccctaaaaactgagctcaggtcatgacaagatggaaagtcgcatactcctcatgatacccycaccctttggggtttagacacaacaatcgagcagcattaactttaaaagagggatcataagactgatgaaacagactgtttgtggcaataagatacaaaattataagcacggcttaccaccaggctaggcaaggattaagtcatgcttcccctacacctaaagaataaactgcgttctaactgccacatggtttctttttctccagcagccaaacaaacactggtcttgaaataaagcaatattaaaacaattgcagctcaaccaccaccaggtgctggctaactgaccccctgtttcaccagccgtaactacagctttgactggacaagagaccaatttctgtaactttctcttgataagacaccactgaccagggactggttctggccagtttacaga

SEQ ID NO: 368140 - DNA, 576 bp, Homo sapiens
gacattgatcagttgtctagctgtataccagtgtgatttgtcattataaatacagtgaggctcacaagtgtggcgctttgacaagatgtttgactctgagtccttgttcgcgctcattactggcttgcttttgcccaagtttcagtgatttggatcctaagagaatacaccatgggcagtggctgaagcttttctaggctgtgcatgaaatcagacagtgccccagagttgacctccctgagctgataacccgcctttaggaatgtgatcaaagagaacatctctgagacatatgttccagattcctattaaacacgggatataagtttgtgcataatgcttacaatcctgactcacctccttggtaatttgaaaactatgccactgtcttttctgtgacagtgtttataactgtaatatccataggttgatatggacacttcatgttttctgatccaaacgaataatcacggtgctttgtgargtggctaaatgcggtttattggtattttcctttgggcaactgcccaaagtcaccttttgctctgagatataactttggaaattcatttatct

SEQ ID NO: 368141 - DNA, 471 bp, Homo sapiens
atcacataagccaataccttataataaatctttttatctttccctctatctctatctctctgtctatacatgtatctattgtctstctttatttctgtcctgttggttttacttcttggagaatgctgactaatacaacctcctagatcttcctttaagcaagcacttgctgctcagctacaaggagtgtggatggcagagtgtgggagccagttccttcaggctatgcctcagctgtggagataagcctcgcctcatgtctacttttctggggcaaccccggtgattgaagaaggcagttacatggaggtccaccatttaggcctgaaagtactacttgttccagagttcctggctgggttggctgagactttgtcaatcttctacagatcaacttctccccctgccccatcctgctactgccccattctttcacaagtcggactcctaattcccatttgtaccccagac

SEQ ID NO: 368142 - DNA, 586 bp, Homo sapiens
aggagtgtggatggcagagtgtgggagccagttccttcaggctatgcctcagctgtggagataagcctcgcctcatgtctacttttctggggcaaccccggtgattgaagaaggcagttacatggaggtccaccatttaggcctgaaagtactacttgttccagagttcctggctgggttggctgagactttgtcaatcttctacagatcaacttctccccctgccccatcctgctactgcyccattctttcacaagtcggactcctaattcccatttgtaccccagactccaactcagcatctgattgtgagaaaccaaattgcaataagaacataaatttgctgggtaaggttttaaaatgaaacttttgatgaaaaccttttactccatctatcctagaacaactttgctattagttacctctcagtaatgctttggtcaaatgacccattcttttggagagttgttctctctctttgaaacagacaggtgaacagtatgttcagacatcagagctggtggatgagggaccgggtagcaactgcgttaccagctttgactcattgttcagcaccgtgccagac

SEQ ID NO: 368143 - DNA, 615 bp, Homo sapiens
acttcagttacctcatgtaagctaaatcaagcagtatttgtctttctgtgactggcattttttacttagcataaagtacataaggtgcatccatatgatgacatattacagaatttctcttttttaaggctgaataatatttcatygtgtgtgtatcacacacatatgtagtatattttatactgtatatatacagtgtatttatgtatatataactatatatttatagctatatagatatatatatcacattttctttattcatctattgatagacatttacattgttctcagtggtcaactattgtgaataatgttgcaataaacaggagtgctgatatcgcctcaagatcctgacttctattcttttggataaatactcagaagtgggatgactgcattatgtgataattctatttttaattttttaaagaatccctgtacttttttctatagtggctgcatcattttgcattttcaccaacagtgtaaaaggcttccaatttcttcacatacttgtgaacatttagtgtctctctctttttctatgatagccattttgacaggtgtgaggtaatgtctttgtggttttaattataagatctgaaactaaca

SEQ ID NO: 368144 - DNA, 594 bp, Homo sapiens
ataatagcagttattattgcagaaatggtgcatcatatgaaagctttgaaaattaaagtgtattcaaacagtatctttcaaaaagtgtggaccatgccatgcaagccaagaactttattagagcatgatttttttgggtagattcctcaaagatattaataatattaggcaatatgtttcaaatgttttctattaaattccattggctgttttcaggttaagtgtgagcacaaatataattttctcacagaacctgtaaggtacatggatgtgctttggtcaaagaatagacygaggcaggtatccaggtctgcagggctcagcgagtttagcgcacaggcgcatgcttccacttgttatataacctgtttgtgtaagttcatacttggctctgagccattactgtctgtaaaaggtataattgccctgctaacactgtatagggcctcttggggctcagcttgactcaacgtggctggacatgtctcttgtgcaggtgctcttgcatccagagaaagagagaaagccaaatttgtccgtctttgcagacagacagaggggagccaggacacagctcagcttgcttgtgcccag

SEQ ID NO: 368145 - DNA, 594 bp, Homo sapiens
ataatagcagttattattgcagaaatggtgcatcatatgaaagctttgaaaattaaagtgtattcaaacagtatctttcaaaaagtgtggaccatgccatgcaagccaagaactttattagagcatgatttttttgggtagattcctcaaagatattaataatattaggcaatatgtttcaaatgttttctattaaattccattggctgttttcaggttaagtgtgagcacaaatataattttctcacagaacctgtaaggtacatggatgtgctttggtcaaagaatagactgaggcaggtatccaggtctgcagggctcagcgagtttrgcgcacaggcgcatgcttccacttgttatataacctgtttgtgtaagttcatacttggctctgagccattactgtctgtaaaaggtataattgccctgctaacactgtatagggcctcttggggctcagcttgactcaacgtggctggacatgtctcttgtgcaggtgctcttgcatccagagaaagagagaaagccaaatttgtccgtctttgcagacagacagaggggagccaggacacagctcagcttgcttgtgcccag

SEQ ID NO: 368146 - DNA, 577 bp, Homo sapiens
gctttaaaaaataaagtacagtggatataatttgtcttaaattatagatatcagttattagtagcatgtgacaccctgagggcccaaattatttgctcttttgaaaaatggactcatattgatttgtattttgaatttctktccaatttttcttagctttcctactttatccctcctagaagtgtgctgtcttctttagtactcttgtcagtcagcatatgaaactgttcccctcactcccctttgtcctttattatagacgccattccaggtaattaatctggctgagtagagtttagcaccacctaaggcacaacatttaagaaggcactgactttctgggtcaccaaaatgcaggttcagccccttaagtgacctccttaaattttgctcctcaggcaccctgcttacctttcccaagtcccaggccctgggtttactgaggagctagggccttcttccatgaggaaaacacagaaactcttagtgcctggaacgtaggagcttgagataaatgcagaggcccttcagaggcccttttatttgggtggtcagaagctgttaggtaagttgctag

SEQ ID NO: 368147 - DNA, 557 bp, Homo sapiens
aaaactacttattgggaattatgctcactacctggttgacaggatcattaattcccaaaacctcttcatcacacaatatacccttgtaacaaacctgcacatgtaatgtactccctgaatcttttatttatttattatttayttatttattgagacagagtcttgttctattgcccaggctggagtgcagtctggctaattattgtattttttgtagagacagagttttgccatgttggccaagctagcttcaaactcctgagctcaggtgatctgccctccttggcctcccaacgtgctgggattacaggtgtgagccactgtgcccagccctgaatctcaatagaagttgaaattataaataagcaagcaagtaagtaagtaaataaaacacatgttttgtaagtaaataagtaaaacacatgtcttatccaacatcacacgagtggtgagattcctgcctgggagcggacgttctttagtcatcccctcaggctggccctatttccactctcttcagggaatactctttatcatatcctccatgggccctggcc

SEQ ID NO: 368148 - DNA, 535 bp, Homo sapiens
tccacatgagtgttgccatgcatgaagatccacagagagaaggtgatcacctgcaggccaaggagagaggtctggagcagatcctcccctcattgccctcaggaggagccaaccctgctggcaccttgattttgaacttctagcctccagaactgtgasataatatattattgtcattaagccactcagtttgcaacactttgcttcagtaaactaacacagaatgcaatatattctaatgatatttgtgtgtttaattctaccaagaagtattgaaggtgacttatcatgttttcctcatttatgggcgacatccccaaagctcataagtaaagggcttgaccaaggtcaagtagagccacaaattgtctccatgttctctttctaaatctgggttccccagaaacaattctccacctaaatccttagaaggatgtcacaaatggtaaagtcatttattcctagcaaaccaaacctttgctgaggatgcagactttgttacccattaatagcagaaaggatgctagatcaatta

SEQ ID NO: 368149 - DNA, 595 bp, Homo sapiens
aaatacattctaaaatccttcattagaattagtttctcctcatatttcagatgacttttgatttgtccatgtttatgctcttctaggtacatgaatgttgagtctcatgattgttgagtcttccttagaagttttaccctttagaaataaaaagcattttatgtctattttcactaacattagtttttccttattattttgtatatccttgctcatttattcttttttaacttaaagttttaattttgtttatttcaagcttatttaactagttcaagtagcaagcataacattgaaattaacgtaatacaatctaacacttttcctcttttttttttttttttttttttgagacaragtctcgctctgtcaccctggctggagtgcagtggtatggtcttggctaactgccagctctgcctcctgggttcacgccattctcctgcctcagcctcccaagtagctgggactacaggtgtccaccaccacgcctggccaattttttgtatttttagtagagacagggtttcactgtgttagtgttagccaggatggtcttgatctcctgacatcgtgacccacccacctcagcctc

SEQ ID NO: 368150 - DNA, 622 bp, Homo sapiens
taaaggtatggtctccgacaaggctgctcttacttcagacaccagcagcactgaggtggggggtctccagaccacctgcactcctgaaagactgactatacgttttggggttttcatgagcgcttcagttcaataatttgctagaatggctyacaaaactcaggaaagtactataattagaattatagtttcattacaaagaatacaagtcaggagtgctagctaaatatgggacacacagaatgaggtctgaaatggaatgcaaattttctgtctccagccccactccactcccctggagtcaggtggctgaaagccccaaacttctaattgtgtggttagtctttcaaggtgactgtccccattctaaagttatctagaggcctaccacgagtcccctcattaggataatgtggatgatcactcattaggataatcaccgtgaacattctgagaatttttggaactctgtcccgtgaatctggaacaaagaccatacagattctttatgataccacagccctctcctgcactctcttatttaaggtttacagaaattctgtgaaataggtatttttcatccctactttttaacatgagaaaactaaagatcagaaatgta

SEQ ID NO: 368151 - DNA, 598 bp, Homo sapiens
gattggtccgttttggcagagtgctgattggtgcgtttacaaacgtttagctagacagaaaagttcaccaagtccccaccccacccagaagcccagacagcttcacctctcactgtgttcgccacgacgctttgcggcacttagcccgggcactctggcagcccagagggagctggtccccggatcaagcccagcaggcgccgtcgggccgcaccgagtgggcrgcccgcggagcccgcatccacctggagcccgcactggcccgtgagcgccgcatacagcccgggctcccgcccgcgcctctcccttcacacctccccgggagcagagggagccggctccggcctcggccagccccagagagggccgccccccaccagcgcagcagcgggctgaagggctcctcgagcttggcgagagcggatgccgaggccgaggatgcgccagaggggatgccgacgccgagaaggtgccgcgagccagcgagggctgctagcacgttgtcacctctcagtaccactagaaaaaagggtgacaatttggatgtgatttttacttgcaaagagtgagaagataaagatttaagtgcttaaattta

SEQ ID NO: 368152 - DNA, 598 bp, Homo sapiens
gattggtccgttttggcagagtgctgattggtgcgtttacaaacgtttagctagacagaaaagttcaccaagtccccaccccacccagaagcccagacagcttcacctctcactgtgttcgccacgacgctttgcggcacttagcccgggcactctggcagcccagagggagctggtccccggatcaagcccagcaggcgccgtcgggccgcaccgagtgggcggcccgcggagcccgcatccacctggagcccgcactggcccgtgagcrccgcatacagcccgggctcccgcccgcgcctctcccttcacacctccccgggagcagagggagccggctccggcctcggccagccccagagagggccgccccccaccagcgcagcagcgggctgaagggctcctcgagcttggcgagagcggatgccgaggccgaggatgcgccagaggggatgccgacgccgagaaggtgccgcgagccagcgagggctgctagcacgttgtcacctctcagtaccactagaaaaaagggtgacaatttggatgtgatttttacttgcaaagagtgagaagataaagatttaagtgcttaaattta

SEQ ID NO: 368153 - DNA, 598 bp, Homo sapiens
gattggtccgttttggcagagtgctgattggtgcgtttacaaacgtttagctagacagaaaagttcaccaagtccccaccccacccagaagcccagacagcttcacctctcactgtgttcgccacgacgctttgcggcacttagcccgggcactctggcagcccagagggagctggtccccggatcaagcccagcaggcgccgtcgggccgcaccgagtgggcggcccgcggagcccgcatccacctggagcccgcactggcccgtgagcgccgcatrcagcccgggctcccgcccgcgcctctcccttcacacctccccgggagcagagggagccggctccggcctcggccagccccagagagggccgccccccaccagcgcagcagcgggctgaagggctcctcgagcttggcgagagcggatgccgaggccgaggatgcgccagaggggatgccgacgccgagaaggtgccgcgagccagcgagggctgctagcacgttgtcacctctcagtaccactagaaaaaagggtgacaatttggatgtgatttttacttgcaaagagtgagaagataaagatttaagtgcttaaattta

SEQ ID NO: 368154 - DNA, 598 bp, Homo sapiens
gattggtccgttttggcagagtgctgattggtgcgtttacaaacgtttagctagacagaaaagttcaccaagtccccaccccacccagaagcccagacagcttcacctctcactgtgttcgccacgacgctttgcggcacttagcccgggcactctggcagcccagagggagctggtccccggatcaagcccagcaggcgccgtcgggccgcaccgagtgggcggcccgcggagcccgcatccacctggagcccgcactggcccgtgagcgccgcatacagcccgggctcccgcccgcgcctctcccttcacacctccccgggagcagagggagccggctccggcctcggccagccccagagagggccgccccccaccagcgcagcagcgggctgaagggctcctcgagcktggcgagagcggatgccgaggccgaggatgcgccagaggggatgccgacgccgagaaggtgccgcgagccagcgagggctgctagcacgttgtcacctctcagtaccactagaaaaaagggtgacaatttggatgtgatttttacttgcaaagagtgagaagataaagatttaagtgcttaaattta

SEQ ID NO: 368155 - DNA, 546 bp, Homo sapiens
ttgaataatgatacaaatggctttatggtcctctttactgtccaggccactgacagatatgttcagcattgtacatatgtagctccagggtatttcatttgagggataaacacataaacacatccactggaaagaataaactacagtgagctgagaaaatcgatgtgattttcagctgtatgctaaacttttgctctctgttggatcccctctgaaaccacagtaaatcagtcatctggcatcctttgaaggtcttgcatgggtcagcaggggctcctgtttctggcacacaacaacgagggctgctctgcagtggcctcagagctgctgttgtagctctgggtgtcaccgtgccagcacgggttccctttatctcttttgcaactttatatgttcccaaatcatactgtgtttcataagctttgacctacagytgggaagaaagaggaggaggtggagataatgacctacagggctttgttttgaaatgctccctgcaatttgtcctgagccagatctgatcttggatatcagaagattccaaat

SEQ ID NO: 368156 - DNA, 570 bp, Homo sapiens
ttcatcctacatgcacaatgaactccgggtacaacaaaggcaagacgccataagctgaacaacatggaaatgtacacaaagtccttaataaaaccacatagaaaagccaacaagtgtcaccacacccaagaatcatgacaagaaaataatccaaacacaccccagagctctttaatttattgttttgtttttagtattttctccttttctcttggtttaaaggattcttgatttcagtagctaaccaagtcagtagatgcataataactgctaaactagaaaaaaatatgcaagtaggtctgttttatattaaaagaaaaaacctaacacattaacatcctttgttgtgatggtggttctcaaaccagcatttaaaaaatgttcacgttgtgggaaagcaaaacaatggtaatttatgtcacagaagatctgaacatsgtcttcttggttatcttacactactaagaatgtaaccttattcagtactttttaaatctctgagccaattaaataataatttctttatattttactgaaacaaatatgtaatacaaaattagttaatgtgca

SEQ ID NO: 368157 - DNA, 547 bp, Homo sapiens
gagtcctcaaaaggaaacagtctggggcatcaaaaggccataaattcagccagagtagtggtatttggaaacgaccttaagtatcaatcttagaatgaaaatatatgacttttacatccagttcaatttttgaggttatttactttttagagaggctgaagagaaagggttagtacatcaactttcaacctgaaacatatggaagaacgttaaatacttttaattttactagaaaaaaaaatgtctgcaaagtattttaactgagtgggttttggcaaacataaaaactcaattaaataattttttcctatgaaacttttggcatgtccctaaactgggttttcttgtaatattgtctraattagaaatcaaaattgagacagacattaacagtagtcaatcaaactctgatgcaaaagttgccccatttagtggaagatcctgacatcctgacatcttccactggaaaaaaaaaaaagaaagaataaaagtaaaggaagttcagctgagctgctataccatcatgaccagtgcaactttcaataat

SEQ ID NO: 368158 - DNA, 454 bp, Homo sapiens
ctcctgtttttatagttactttctctgtatatgtagatgtatgtagtttattatgtacatagttaactatgtgtgttgaagtaaaattcctagtgtaatttagcctttaagtaaatataataaaacaaaataaagtctgaatttaagaaatataagtgaggccaggcagctgatggctcacacctgtaatcccakcactttgggaggcccatgcgcggagatcacttgaggccaggagtttgagaccagccgggccaatgtgatgaaaccccatcactactaaagatacaaaaattagccgggtgtggtggcacatgtctgtaattccagctactcagggggctgaggcaggagaatcacttgaaccaaggaggtgggggttgcagtgagccgagatcatgccactgcactccagctggggttacagagccagactctgtctcaaaaatataaa

SEQ ID NO: 368159 - DNA, 592 bp, Homo sapiens
ggtatttaagttgattccttttctttgctattgtgagtagtgctgcaatgaacatatgcatgcatgtgtctttgtaatagaacaatttatattcctctgggyatatacccagtaatgggcttcctgggtcaaatggtatttctgtctttacgtctctgagaaattgccacacgatcttccacaatggttgagctaatttacactcccaccaagagtttatatgcattcccttttctttacaacctcgctagcatttgttatttattgactttttatcagtagccattctgactggtgtgagatggtatctcatagtggttttgatttacgtttctctaataatcagtgatgctgaggtttttttcatatgatgttagtcgcatgtatgtcttttcttgagaagtgtctggtcatatcctttgcccactttttaatagggttgtttcttgcaaatttaagttcctcatagattctggatatgagacctttgtcaggtacataatttgcaaatattttcttgcattctgtaggttgtctgtttcctctgttgataggttttcactgtacagaagctcttaagtttaattagatc

SEQ ID NO: 368160 - DNA, 457 bp, Homo sapiens
gaagtgggaggatcacttgaggccaggagtttgagaccagactgggctacataaggagaccctgtctctacaaaacattttttaaaaattagctgggcatggtgatgcacatctgtagttctacctatttgggaggctgaggtgggatgggtgacaaagtgagaccttgctctaaaaaatataagctaatattataatcaccatatgcacgtatttataactagcaggtatattatttccaaaaatgaggtaaaactatacatattactttttaatctttcttcacytagtaatatgttgaggtcatgtttccatgtcagtaaacagggacctatgatattcttttaaattgctgcataatattctattattcaaatgtagtcaaaatttttaaaattctggtgtttatttgatttccctaactggtatatatttgcacgtttccttatactaagtt

SEQ ID NO: 368161 - DNA, 569 bp, Homo sapiens
gtatttctgcaaagaacagttttatccaaacctatagacacttttcttcttatcttccacagttgcagattatactttaaaaagctaacattttaagcttgacaacgtatcttctacatttcatattaagtaaatcccatgaatttattgtaaaaagctctgaacagtgaattatataaagtcagacagtgtagagagtatgcaatatggtgtgataaaaatatttgtatattattgcacagattatacaacactttcagtaacagctctcatctaatatttamcaatactaactatgaggcaggcattaatattaccccccttcacagaaaggggaacttaagcttaaagaagtttagtgactatggtaaacaaatgatgaagttaaggcttgattttggttttccagtttcatatatgtgctcattacactgtattctattacgtgtgctgatttctgcatattctgtcttgcttcaaaaagaatctgaggtggcttacatctgaccttgtttcccacacagcagaaaaatgtgaactccagacaaaattattatgtatttaattca

SEQ ID NO: 368162 - DNA, 521 bp, Homo sapiens
gagatttcaaggcaattagatacaagtctgtaaaacccacagagactgtgaaatgaacatatgaacatggatgcatcagcatggmggcaacccttaaaccaaggtaagcacatgagactctcagacagagtgtggagaaacagagggcaggccctgagggattctcttagtgcgagctgagatagaaaatgaggaactggcacaggtcactgagaatgtgatgccagtatagtaagacagtgtcctaaaacactgtagaagagagggttctgtgaaggaaggagtgcttggctatatcaaatgtaaatgggagttgagtggaggagagcacaggaaacacccatggggtttatcatttgaaggtcctggatgaacttggcagtcagtgacatgtgaacagaagcagtttggaatagactgaggagcaaatgaggggggcaaggaggtgaaaatagaagcaaatagcatatacaacttctagaagttttactgtgtaatttaattaatattataatttaaca

SEQ ID NO: 368163 - DNA, 506 bp, Homo sapiens
ccacttaaacatggtaagatgtgctgtaaatgttagaaataataataataaaaataatagtaataataatgataataatcacatctgatactctaaaggatgttaactgaattttaagagttaattgaattttgttctacagttttcagatgtaaatctttgtttataattatgtaagtgtccttcactatgtaaaataaaatttaattaacctactttaaaaaatatgattcttaaagtgttattcaaagaaacaagatttttaaaacttatgctttactagtagtttcacattcattttattcaagtaaccatacaatttatatgtgattgcatcattgaaaatattggttctttgaaagaccaatatgtgcttgtaatataagagacagtcaaattcaagataaaatattcagaaattgtatcctcttgaactgcagatttgayactgtgagctttagtctccaatctccaattaggtttcttttaaatccacattaattaaa

SEQ ID NO: 368164 - DNA, 508 bp, Homo sapiens
aatcaattattgaacaccttcaggaagcttatggtctgcaaagaacacaggtaatttcagtagaaattataatagtgtgaaaagagccaatgcatgggaaatacttgatgttataggagaataaatagctcatctaatctaatctaaatctcaactactgtaattctcttactaccagcattagcatcatctagaatcttgttagaaatactaaaatttcagtttcaaccccatacatactgaatgtgaatcttcatgttaacaarattctcatattattttaatttacattaacatttaagacaagcattagggaaaattactcagagaaagtggcattaaaaattaactcccaaatgacaagatggttagtttgtgaaaatttaaagtaaaatacgttggaaacagagacatgagtgtacccaaaaccaagtctgtagcctaggctgcaggttggatagagaagacatgcaggaaaaaggaagacaatttcaattttgcgtttgat

SEQ ID NO: 368165 - DNA, 555 bp, Homo sapiens
aagtctgggaattcagaaacttataaaagtgaggaataggtcataccttcattgtctcacaaacttatacaaatgacttttgcctaaaagtagagaaagaatgtaaaatgcagtggtaaagaaagttaaaattagtctatattcattatcagttaagtctgtactatgttttatccattttatasttcagactctcctttcaatgtgttttaatactgtgaagcccgaagatgtaaaatggcggtaagaactacatttgtgagaactttgaaacctcttacaaaaacctcataccatgcatataaaattaattcagttagctgatatttcaaaaacactactttattgaaagcattctcctattttcacttttgtggcaaaaattaggtgatttatctttttttgtgtgttagagacaaattgttgaaacacctttagcagataactagcccattcttattgttcaaatctcaatacaaatgttatctcctgaagaggccttccctgagaagctcatccaaattagttccctctcagtcattctccatcaatcac

SEQ ID NO: 368166 - DNA, 561 bp, Homo sapiens
ttcattaaataagaaagcttatgaaagtattgcataatttgaggcattaatatatagttaagagcagtgatttaacacaagtctgggaattcagaaacttataaaagtgaggaataggtcataccttcattgtctcacaaacttatacaaatgacttttgcctaaaagtagagaaagaatgtaaaatgcagtggtaaagaaagttaaaattagtctatattcattatcagttaagtctgtactatgttttatccattttatagttcagactctcctttcaatgtgttttaatactgtgaagcccgaagatgtaaaatggcggtaagaactacatttgtgagaactttgaaacctcttacaaaaacctcataccatgcatataaaattaattcagttagctgatatttcaaaaacactactttattgaaagcattctcctattttcacttttgtggcaaaaattaggtgatttatctttttttgtgtgttagagacaaattgttgaarcacctttagcagataactagcccattcttattgttcaaatctcaatacaaatgt

SEQ ID NO: 368167 - DNA, 368 bp, Homo sapiens
atagtacatattttgtaattacttcgtggaaaaaattaataagtacacaataaataaggattacctacttggcaaatcatctcagagtgactgagtgttaaagcttagagacagcattttgccaagagaacagtagtgcttgtgcttatatggataagaaaagtgatgctcaaaacaaagtcttctgtccacagaactttyttagtatcactgtcagttatactatggtccatgtatttttaatgtattacaaaagcatgctggcatctttagattcctctgtgattatgtttggtatatgcactgtatgacataacatcctatttttatgtgaaaaaatagtttctttttaactttaagaagaaaaa

SEQ ID NO: 368168 - DNA, 619 bp, Homo sapiens
tccgctactaactagatgttcaactctgagctattttcttaacttatgtgtacttcatttttctcatcttgaaatgtgaataatgatcataactgcttcacagagttgtaaagattaagtgagcaaaacacataaaaatgcagaaaagtgcctggcacatagtaagtacacagtagaatttaactcttaatgttactacaatgcagtgaaaaataggatagagctcttacrgctgttatattttagggagtgacaaacatttaaataactaattgtatgtagttatttgcaagtgctgaaagggtgattcaaagggtatcaggccagtactcaggagggacaccaaacccagcaatatcatatgccccatttcttttggaatgtattcaaacaatctgctagtaagctttcccttcattttatcagccagtttcctggagacattgccttagcatcaaaatttgatattgaaatgttagaatcataagactcatgtatacttctataaatgctggcagtatatttaaaaataaaaactaattagattcattagtagaacctaatagaactaggtagaaccttctgtttatgagtgcctgttggaatgtgtacaaagcaa

SEQ ID NO: 368169 - DNA, 520 bp, Homo sapiens
taaattgtgctggaccttacaaaaatcaaatgactgctttgagcacctgataccacatagtaaagcagagatacaaattctctaatgaacactcttcctgtcaatatacaattccttaattttagtatttttaattttaatttttgtctgcttctatatttttccctttataatcaaatggaagtgaacactaagagagttttgcattatctgctgtcattctgcatggtaccttaacagaacagtatgtccctatgttctagtaaggcaaagcagtgggactatgctaagacaaaattaatttcaaacttcatttgcatgtgtattgtaaagtttctatgtgattaaatacctcagggccaaattaaatgcataccagaactgtaactacagaaaacattaaaatcttttaatttgtacatctcaaaattcatcttgctctgatcttttacaagatatmatttaagccacttagtaataattttttattttaggctaattacctttgacttataacttg

SEQ ID NO: 368170 - DNA, 602 bp, Homo sapiens
tgatgtatttgagaaggcaagagatgcaaacactccttataccagcaggttgacacctatctccataagactcagcagtgttttagcttagattatttccggttttgtgactgacctacttgagatagttagaagtcaggtaggtatgtgactgggtgttactataaatacataagactataacaaattgggttgtagctcaaacctacagctagtggaagaaagcctcccaagagggctgtatagaaagatggtatttagtcttagaaataattactggcataagccctgaaagttatttatatagaatagaagaggtcagatgatattaagaaaggggatctccttaccctgtatcctcaaccagtactatacattaatgaattatgtgtataaagatgacccaaaagacatttaaagtgccttttgggtggtccaaaggagattaatacatatttagtatagaaagagacattcagaactggagggcaccacagagataattaatytgactatgttaattttacagatgaggaaaagaaacccagagaggcaaattcatttccacatattttatacctagttagcaaatgtcaggaaga

SEQ ID NO: 368171 - DNA, 609 bp, Homo sapiens
tacaacgatctggctggagaactctttcgatggggatgcttcaatcagactgtgactaatagaattaatcatacccattgttggggagatttaaagtaaagaatgaatagctagaataatcagagtgcatgagttgtgagaatgataaatccccaaagtggtgttgggccactggcatcactgtggtttcctgatggacaatctcacttgccataaagtctgcctctaatactcctgagataatttcccttgcttcttttcttcctgtgatcccttacagtgcttcttttcttcctgtgatcccttacaatgcactctatcatcagttaatctgatctttactttgtgtcatccccctgagtgcctgactcatacacatctctactygtgacctctttcaggtccagaagttcataccagtccattttgttaagagcctctaccttttcttttatttccttcactcgatagattacaatgagttcttcaagttcagtatgtgagtagccacagagaggtcttgaggtaagtagaaaactaatatcctacctataaagttttcattttctacttttcagtaatttgaagtattcatagaggacgactggg

SEQ ID NO: 368172 - DNA, 635 bp, Homo sapiens
tagttttctttaaagttctttttctatcctaggatcccatccaggataccacattatggtcacttgtcatgtctccttagtctccccttgtctgggacagtttcttccaaatttccttgtttttgattaccttgatcatctttagaactggccaaatattttgcagaactttcctgaatttgggtttgctgatggttttgtcatgattaaaatgggattatgggtttggtgtaggaatgccacaaaagtaaaatgctcttctgattacatcaaaccaagagtacatgytaccaacatgatttagcactgttgatgttaacattgattgcctgacttgaggtggagtttttcatgtttctctattggaaagttactacttttcccctcttttccttattgtattctttgaaggaagtccccatgctcaatgctcagcccatccttaagggtttggtaattattctccaactttttgaggcaggagtgcttatatgaattatttgaaattatttggaatttaaacagaaagcttatgtattatccctcactttttagtagtttaaccaatcatttagatttgtatgtgatcttggttatttattttatactttgggtttaatccaatactttttatt

SEQ ID NO: 368173 - DNA, 573 bp, Homo sapiens
gaactgggtatttggttttatttattataatcattttaaattgaattaaatgttaatagccatatttgactagtgcccagcatattgtacaaaatagttatcaattgtaagattaagataatggagatttgcaaggaaattgtatctagaatggtataaatgaaaattgttattccatgttaagcccaatatatccctaagagtgttcatttatttcaggaatggggcaaataaattacattcctttcttctttccttttttttcttcaacaaatggatattgaaaatacactgtattccacatagtattctaaatttgtgtcatgcaatagtgaataaaataaaattctagcattcatggatattatgcactattgaaaggacataaaataaacaataaacaaatgtatacataaaataatttcaaataatatttgatgccataaaaaataataaagcaagttaataaaagaatattttgggcagaaagcttaatgaaaagggacagcactggatgtggtggcttrtgcctgtattcccggcactttggggtacaaaggctaaaggatcact

SEQ ID NO: 368174 - DNA, 573 bp, Homo sapiens
gaactgggtatttggttttatttattataatcattttaaattgaattaaatgttaatagccatatttgactagtgcccagcatattgtacaaaatagttatcaattgtaagattaagataatggagatttgcaaggaaattgtatctagaatggtataaatgaaaattgttattccatgttaagcccaatatatccctaagagtgttcatttatttcaggaatggggcaaataaattacattcctttcttctttccttttttttcttcaacaaatggatattgaaaatacactgtattccacatagtattctaaatttgtgtcatgcaatagtgaataaaataaaattctagcattcatggatattatgcactattgaaaggacataaaataaacaataaacaaatgtatacataaaataatttcaaataatatttgatgccataaaaaataataaagcaagttaataaaagaatattttgggcagaaagcttaatgaaaagggacagcactggatgtggtggcttgtgyctgtattcccggcactttggggtacaaaggctaaaggatcact

SEQ ID NO: 368175 - DNA, 499 bp, Homo sapiens
atgcccatcccaatcactttgctgtggttacctaaactaccaagaggtttgaaatcaagaggaggcttagcatgaaggagcgctatggagttacagcagtatctgtcagaagaacataccatgggttagctatctctgcctttcccatatactgggctttgaccacatatatttccctctccccttgatgacacattcccacctgtaatgattatctccatttgtcatcttgagcccccttcaagtgtcatctmtaatactaattatgttgtgaggtcttttcctaacccctcacttcctaatcctctagttctcccaaccttagagtctacttttttctcttgtttgtctcattttgctctgctccccgttaaaacctcccctgggctagtgccctactcataaatctccaccttcagacatactaagcaaaatatcttgaacttaacagacgtttgataaatatctgatgaattaaataggatcacataccacagac

SEQ ID NO: 368176 - DNA, 639 bp, Homo sapiens
ttcttttctttttttttcagaagaccaaaaatcttagatcttgggcacctgaagacacacattttgtgctgtgcatttgtttgtccctgtcaccataaagagatgtctcttctagacatccctgtatggttcacactgtcyttctagtgtcagctgaggccttatctcactgcatgctggtcatcgtgcagtgtagatcgggagaggtgggtgctccctgaaaccccttctatagatagaggtggtgtaggaatgctgtcatataccctcaaaggatacttttcttggagctttgtgtttttaatgttaaaaccaggatttcataaatttattctcattgaaaatcatatacattgctttgagaaaatattcacaagtataaagccacagtaaacaaaaaaatcaaagccagcactgctagtagatgtttataatttctttcatcctttttacatagatatatacatccctcagttgagatatgctgtttatacaacgtagctgcccttttgcttttgtcatatcatgaacatcttcccttgccattaaaagcttttttataaacaatatattttaaagggagtgaatatagctaagtgggaaagagcatgccttgagagttgactctgtgtttgaatt

SEQ ID NO: 368177 - DNA, 639 bp, Homo sapiens
ttcttttctttttttttcagaagaccaaaaatcttagatcttgggcacctgaagacacacattttgtgctgtgcatttgtttgtccctgtcaccataaagagatgtctcttctagacatccctgtatggttcacactgtctttctagtgtcagctgaggccttatctcactgcatgctggtcatcgtgcagtgtagatcgggagaggtgggtgctccctgaaaccccttctatagatagaggtggtgtaggaatgctgtcatataccctcaaaggatacttttcttggagctttgtgtttttaatgttaaaaccaggatttcataaatttattctcattgaaaatcatatacattgctttgagaaaatattcacaagtataaagccacagtaaacaaaaaaatcaaagccagcactgctagtagatgtttrtaatttctttcatcctttttacatagatatatacatccctcagttgagatatgctgtttatacaacgtagctgcccttttgcttttgtcatatcatgaacatcttcccttgccattaaaagcttttttataaacaatatattttaaagggagtgaatatagctaagtgggaaagagcatgccttgagagttgactctgtgtttgaatt

SEQ ID NO: 368178 - DNA, 384 bp, Homo sapiens
acacatacacacccacacactgccttttctgtgatggtacttcttaggtctaacacagtggctgatatttcagtttgaccttctagtcctgatgaattgccagtactcatcctgaccttgaacccttcctcttgaaccccagttattgaggccttatgcttgtttmcctgccagagtcgttccaaaccctagtatctgtcactgtttcccttccttcttcctgttctttgccttttccagaaggaatataggtatctgagaaaggttccatactattgtacattgctccagatggggacttgggctcttgcatgtcagttcataagctcagaatagttgggacacagcattattagagagaggctgataggccctctcttattg

SEQ ID NO: 368179 - DNA, 384 bp, Homo sapiens
acacatacacacccacacactgccttttctgtgatggtacttcttaggtctaacacagtggctgatatttcagtttgaccttctagtcctgatgaattgccagtactcatcctgaccttgaacccttcctcttgaaccccagttattgaggccttatgcttgtttccctgccagagtcgttccaaaccctagtatctgtcactgtttcccttccttcttcctgttctttgccttttccagaaggaatataggtatctgagaaaggttccatactattgtacattgctccmgatggggacttgggctcttgcatgtcagttcataagctcagaatagttgggacacagcattattagagagaggctgataggccctctcttattg

SEQ ID NO: 368180 - DNA, 384 bp, Homo sapiens
acacatacacacccacacactgccttttctgtgatggtacttcttaggtctaacacagtggctgatatttcagtttgaccttctagtcctgatgaattgccagtactcatcctgaccttgaacccttcctcttgaaccccagttattgaggccttatgcttgtttccctgccagagtcgttccaaaccctagtatctgtcactgtttcccttccttcttcctgttctttgccttttccagaaggaatataggtatctgagaaaggttccatactattgtacattgctccagatggggacttgggctcttgcatgtcrgttcataagctcagaatagttgggacacagcattattagagagaggctgataggccctctcttattg

SEQ ID NO: 368181 - DNA, 575 bp, Homo sapiens
agtaagctaggaaattgtcagctggcaccgtggagcatcatgagcacaaaaacccatgctcctctctgtgcaggaagcagcctgtctgtagataaaccagggaagctgtggtacttggctacaagtgagagagaaggaggtagcagttgaagtaagtctctgccatcagtttttctttgccttgaatgcttattccatgagttttagcagtttaatccttggagagtgcagagctgcgtggcagtgaagcagtccttgttgagctatggcatgttctaatttagcaagaaagattgcagcacttggtgtgtatagggttatgttttatgggagtctgaaagtgatatgtataaaaactcatctatgattttttatacatctacgtaatctgtgattatcttggcttgatagtttgctrtttatcagtaagggtcaagtatcagttaattttttccttttttgtgaaggtaagtgagcaagaaattgttatttagtgaaacattgatttatttggcattacaaattccatgaacaatccactttatctctgcataatgtgtctttgctacaggttg

SEQ ID NO: 368182 - DNA, 536 bp, Homo sapiens
gaagttaataaatgaaaagagagaagacaccaattacaaatatcaagaatgaaagagaatagaccttatagacgtttattttacattgtggcctcttcttttttctttttcttatttttgacaattttatcaggttgccattcattccatatttgcttcaagaaggaagacattaatatttagaaggtaatatcaacagtatttgaaaaccacttgaaaaggagagaaggaaatgagggagagaaagtcaattaaacagaaccttagcctgagatgccaaattcataatagaaactttgttgatrtgttattttctggggaatgtgagtctgagtgagataattaattggggcatgctaagttttcatttatctgagggacatccaaataaagatgtctagtaggtggataaatatgtgggttggtgtttgaagggaggtctgaagtagggattcaagtttgggagtcaccaccttacaggtagtattaaaaccatgggagtagattggtgatatgtagattgaaaaagctgaggc

SEQ ID NO: 368183 - DNA, 559 bp, Homo sapiens
gtaaaaccattagtgaatactaacactgctttctgggggcgagcctgttagctgtctggatagggaacagaattaccatcttcaggcaaatttggatttgtaaagtgctctttcattgtactgttacaatttaattctaacattattagaattttaaaaatttgtgggaaaaaacgttagaatatggtctcttaatcaccaaagttttatttcaaactgactttaacattcttcacccaagaaccatcaacctgttcctgttaacctgtttaagctgaattaatggatctctttacacctttgcagtaaatgcaagtcatatgtcatgaacatccatacagcctcatgcctgtgagagaacatcactttggaagagagatgaggattttttttaagtacaagctccccaggtagtgggaatctagagaacccttmgttttgaaagaccatcttctgctttaggcccccttgcatttggataccaaagcagctcatatcctctgtttccaattttatgccttggttttgtatctttcatcaaaactcaagattctgcact

SEQ ID NO: 368184 - DNA, 597 bp, Homo sapiens
tcaatgtaaataggatgatataaaaatagaataataataactaaaatacaaactgtaggaatgctagtattgagattacaagtaatcttttaaaaccaaaaaattataatttttaccaggaaaagttattagacacaagctactataatttttgaattaaagagctgccattattgaagatgtaaactacacaaactgatatttggcaatggtgacactgcagtacagtggggatgtgataatggttytaagtcaaccagatacctgattgaaaaaaataattgacattgactcccacctgacctctgttacaaaaaccaatgtcagacggattgcagatctaaatacaataagtaaaacaaaaaaaagcttatggaataacaacatagaatatcaccatgactttggaataagcagatttcttaaacaagacacaaaaagcgttagtcgtaaaagaaaaaattgaaaaatattagattatattaaaactaagaacttccgtttatcaagagacatcattagatggcagaaagataactcgcaaaggagaaaatatttgcaatacatatacccatccagggacttttatgcagaata

SEQ ID NO: 368185 - DNA, 597 bp, Homo sapiens
tcaatgtaaataggatgatataaaaatagaataataataactaaaatacaaactgtaggaatgctagtattgagattacaagtaatcttttaaaaccaaaaaattataatttttaccaggaaaagttattagacacaagctactataatttttgaattaaagagctgccattattgaagatgtaaactacacaaactgatatttggcaatggtgacactgcagtacagtggggatgtgataatggttctaagtcaaccagatacctgattgaaaaaaataattgacattgactcccacctgacctctgttacaaaaaccaatgtcagacggattgcagatctaaatacaataagtaaaacaaaaaaaagcttatggaataacaacatagaatatcaccatgactttggaataagcagatttcttaaacaagacacaaaaagcrttagtcgtaaaagaaaaaattgaaaaatattagattatattaaaactaagaacttccgtttatcaagagacatcattagatggcagaaagataactcgcaaaggagaaaatatttgcaatacatatacccatccagggacttttatgcagaata

SEQ ID NO: 368186 - DNA, 557 bp, Homo sapiens
tttagcatcgcccaaattgtgtaagattagagttgaagagcttaacctggaaagttggaaactaattactgttaacatatgaacagatatggaaaactttctctttgctcctttaagtaagtggaaaggaatgactattttccctttagaaatgtgagagaaagtgatagtatgggaaactttgattgcattcttataaactagctttttgatttcttattacatgatagaatatctcttttttctttaatctctatatgttacaaatttcagatgacctgaaagcaactcttcaatttgggatataagttctaaactttacttggaaacagttccagattcagacacttggttttggggtgtgtgtatatatgttaatatatgagcaaagaacccaatataaatactatgtggcaatttattgaaagcatgcaggagtttaatttaggctcaggacattgtgtcatttgctattcttgttagatatgaactggattttattttytgtctagtaccaagcagtacttcttatattggaccccttgaataaggttacc

SEQ ID NO: 368187 - DNA, 557 bp, Homo sapiens
cccaccaccctcgtcccactaaaattaccctctggggaaatattaccttatatagcctgattaatttactatggaagaaattagcataaaatgacyaaagtaaatgcatcatttaagactaataaaacagccgaagatgtcaggtttgaaagaggagacaaattgtgtatatttaaaactaattaaataatttaaatttgacctatactttatatattagtgagacacaaatataggctattgtcttttaaaatttcattcacataatggaaaatttcttgtttattaaaaatatcacattttgagactagaaacagtaaagtgcatgaaaagtttaaaatataaatttcagaaaactcttatagcagcaaaaaagcagaataaagaaaaacttaaaaacacagacacaaccttttcctgttactgtgccataattaacatcaagtagccaaccaatttttccccagaaaacagtattctgttcactgcctcttgagtcacagattttcaactggcccctcctaggcaaaaaaaagattccaacatacctaaaggca

SEQ ID NO: 368188 - DNA, 557 bp, Homo sapiens
cccaccaccctcgtcccactaaaattaccctctggggaaatattaccttatatagcctgattaatttactatggaagaaattagcataaaatgaccaaagtaaatgcatcatttaagactaataaaacagccgaagatgtcaggtttgaaagaggagacaaattgtgtatatttaaaactaattaaataatttaaatttracctatactttatatattagtgagacacaaatataggctattgtcttttaaaatttcattcacataatggaaaatttcttgtttattaaaaatatcacattttgagactagaaacagtaaagtgcatgaaaagtttaaaatataaatttcagaaaactcttatagcagcaaaaaagcagaataaagaaaaacttaaaaacacagacacaaccttttcctgttactgtgccataattaacatcaagtagccaaccaatttttccccagaaaacagtattctgttcactgcctcttgagtcacagattttcaactggcccctcctaggcaaaaaaaagattccaacatacctaaaggca

SEQ ID NO: 368189 - DNA, 557 bp, Homo sapiens
cccaccaccctcgtcccactaaaattaccctctggggaaatattaccttatatagcctgattaatttactatggaagaaattagcataaaatgaccaaagtaaatgcatcatttaagactaataaaacagccgaagatgtcaggtttgaaagaggagacaaattgtgtatatttaaaactaattaaataatttaaatttgacctrtactttatatattagtgagacacaaatataggctattgtcttttaaaatttcattcacataatggaaaatttcttgtttattaaaaatatcacattttgagactagaaacagtaaagtgcatgaaaagtttaaaatataaatttcagaaaactcttatagcagcaaaaaagcagaataaagaaaaacttaaaaacacagacacaaccttttcctgttactgtgccataattaacatcaagtagccaaccaatttttccccagaaaacagtattctgttcactgcctcttgagtcacagattttcaactggcccctcctaggcaaaaaaaagattccaacatacctaaaggca

SEQ ID NO: 368190 - DNA, 557 bp, Homo sapiens
cccaccaccctcgtcccactaaaattaccctctggggaaatattaccttatatagcctgattaatttactatggaagaaattagcataaaatgaccaaagtaaatgcatcatttaagactaataaaacagccgaagatgtcaggtttgaaagaggagacaaattgtgtatatttaaaactaattaaataatttaaatttgacctatactttatatattagtgagacacaaatataggctattgtcttttaaaatttcattcacataatggaaaatttcttgtttattaaaaatatcacattttgagactagaaacagtaaagtgcatgaaaagtttaaaatataaatttcagaaaactcttatagcagcaaaaaagcagaataaagaaaaacttaaaaacacagacacaaccttttcctgttactgtgccataattaacatcaagtagccaacmaatttttccccagaaaacagtattctgttcactgcctcttgagtcacagattttcaactggcccctcctaggcaaaaaaaagattccaacatacctaaaggca

SEQ ID NO: 368191 - DNA, 665 bp, Homo sapiens
acggtaaccaccccatgattaaattatctcccaccagatccctcccagcacacgtaggaattatgagaactacagtttaagatgagatttgggttggggacacagccaaagcatatcacaacgtatgttttatttgactggcttctttcatttgacattgttttcaaggttaaataattttgtggtgtgtatcagtatttttttatggctgaataatcattgtatggctaccacattttaaaattcataaggtggacatgtggattgtttccaccttttggctattattagtaatgttgctatagaaatttatgtacacgtgtttgtgtggtcatatgtttttatttcttttgggtacatacctagcagtggaatttctgggtcatatctaagtggtaacataagtcttatttttcttaaaattatggtaagtactttggtataaattttatacatatgggtatttacacatatgtgtatctcacatgagatatatactatttatagttaaaaagaaaagagaggaaaggatagagatgaaaagcactgataagcctactatttcgtgaaatacactttcagctcttttgtgtacatgtcartaaatacatacaagtttatgtcataatattgatagttttagatgcttcctttgatccttaaca

SEQ ID NO: 368192 - DNA, 602 bp, Homo sapiens
cttatttgacttggtaattatgtccacacaacttattcatagggttttaaaaaaatttaccttgactactagaatattttccctgaagatctctcagtagaatggggcagagatatttatttttatttttttgtttatgtgggttctattagtattcaccatattaacaattaacattgacaaatgttttaaaatatataattatcttaatataagttacatgttaatttttatgaaaaataattttatttttcaataataataagtaatattttttattgtgtaaatttaaggtgtacaacatgtttttgtgtatttctgcatggtgaagtgcttataacagtcaaattaataatatattatcttccatagttacctttcctttgtgcatgtacatgtgcgtggggtaagagtatctaaaatttattgttttaatgaatttccagtatataaaatgcaatattattaactatagtgctcatgctgtatgctgtttctcyacatgtattcatcctgtgtaaacaaaaaatttgtaccctttgacctacatctcccatttcccctgtgcctttcccaactaccattctactctgccgttttgt

SEQ ID NO: 368193 - DNA, 598 bp, Homo sapiens
aaacagaaaagcccattctaagatttgtatcgaaccacaaaagatccccaaagctagagaaatctcagataaaggggagggaaaagctggaggcatcaaattaycttactttaaaacatactacaaagctgtaataaccaaaacagcatgatattggcattaaaacagatatttaaaccaacagaacataatagagagcccagaaacaaaccatgtatttaaagccaaccgattttcaacaaaggtgtcatgaacacactatggggaaaaggtcatctcttcaagaaatgggtacttggcaaactgagtatccacatgcagaagaatgcaactagactcttaactctcacaatatacaaaaatcatctcaaaactctcacaacatacaaaaataatctcaagatgaattaaaaactaaaacgtaagatcccaagctatcaaaacactaggagaaaacataaatgtttcatgactctggactgggcaagaatttttttgagaagaccttaaaagcacaaacaacaaaagaaaggatagacaaacagaattacaagaaactaaaaacgttatgcacaacaaaaatgcaatcactgagtga

SEQ ID NO: 368194 - DNA, 592 bp, Homo sapiens
cccagcacagagtttgagatttgaaaacggacagactgcctcctcaagttggtccctgacccccgagtagcctaactaggagacacctcccagtaggggccatctgacacctcatacagccaggtgcccctctgagatgaaccttccagaggaaggatcagggagcaacatttgccattctgcaatatttgctgttctgcagcctccgctgatgacacccaggcaaacatggactgaagctgacctccagcaaactccaacagacttgtagctgagtgtcctgactgttagaaggaaaactaacaaacagaaaggacatccacaccaaaaccccatctgtatgtcaccatcatcgaagaccaaaggtagataaaaccacaaagatggggagaaaccagagcagaaaagctgaaaattctaaaaatcagagcgccttttctcctccaaargaacgcagctccccaccagcaatggaacaaagctgggcagagaatgactttgacgagttgaaagaagaaagcttcagatgatcagtaataacaaacttctccgagctaaaggaggatgtttgaacccattgcaaagaagctaa

SEQ ID NO: 368195 - DNA, 642 bp, Homo sapiens
ttggtccctgacccccgagtagcctaactaggagacacctcccagtaggggccatctgacacctcatacagccaggtgcccctctgagatgaaccttccagaggaaggatcagggagcaacatttgccattctgcaatatttgctgttctgcagcctccgctgatgacacccaggcaaacatggactgaagctgacctccagcaaactccaacagacttgtagctgagtgtcctgactgttagaaggaaaactaacaaacagaaaggacatccacaccaaaaccccatctgtatgtcaccatcatcgaagaccaaaggtagataaaaccacaaagatggggagaaaccagagcagaaaagctgaaaattctaaaaatcagagcgccttttctcctccaaaggaacgcagctccccaccagcaatggaacaaagctgggcagagaatgactttgacgagttgaaagaagaaagcttcagatgatcagtaataacaaacttctcygagctaaaggaggatgtttgaacccattgcaaagaagctaaaaaccttgaaaaaagattaaacaaatggctaactagattaaacagcatagagaagtccttaaatgacctgatggagctgaaaaccgtggcacaagaac

SEQ ID NO: 368196 - DNA, 653 bp, Homo sapiens
cagtaaccagtcctggagaaacagagatatgtgacctttcaggcagagaatttaaaatagctgtgaagagactcaaagaaattcaagaaaacacaaagaaggaatccagaattctattagataaattttaaaaagagactgaaataatttaaaagaatcaygcagaaattctggagctgaaaaatgcaactggcacactgaagaatacatcagagtccttaatagcagagtagatcaagcagaaagaatttttgagcttaaagacaaacaatttgaaatgaattcagcaaagtttccattacaaaattaatgccctgctagacagcaacagtgaccaagctgagcatcaaatcaagaactcaaccccttttacaatagctgcaaaaataaaatacaatacttaggaataacttaaccaaggaggtgaaatacctctatggtgaaaattacaaaaccttgctgaaagaaataatagacaacacaaacaaatggaacacattccatgctcatggataagtagaaccaatattgtgagaatgaccatactgtcaaaaacaatctacaaattaaatgcaattctcaccaaaataccaccatcattcttcacaaaactaaaaaaaaaaatcataaaattcttatgaaaccaaaaaaga

SEQ ID NO: 368197 - DNA, 525 bp, Homo sapiens
attcgaaggaataataatagagaacttcctaaacctacagaaagatatcaatatctaagaacaagaaggttacacaacaccaagcagatttaacccaaagaagactacctcaaggcttttaataatcaaactcccaaaggtcaagaataaaggatcctaaaagcagcaagtgaacagaaacaaataacatacaacggagctagaatacatctggcagtagatttttcagaggaaactttacaggccaggggagaatgacataacatatttaaagtgctgaaggaaaaaaaaaaacttttatcctagaatagcatatctggtgaaaatatccttcaaacrtaaaggagaaatgaagactttcccagaaaaacaaaagctaagggatttcatcaatatcagacctatcctacaagatacactaaagggagcacttcagtcagaaagaaaaggatattgacgagcaataaataatcacctaaaggtacaaaactcactagtaataataagtgcattgaaaaactacaa

SEQ ID NO: 368198 - DNA, 579 bp, Homo sapiens
caaataaataacgtaacaatgcatcttaaggaacttaaaaagcaacagcaaaccaaacccaaaattagagrgagaaaagaaataacagagatcagagcagaaatgaaatttaaatgaaaaaaaaaacataaaagatgaatgaaacaagaagttggtcttttgaagttaaattgacaagcctgtagccacagtaaataagaaagagagaagatacaaataaatcaaatcagatgtgaaaaaggagatattacagctgatactgcagaaattcaaaggataattagcagctactatgagcaactatatgtcaataaattgtaaaacctacaagaaatggacaaattccgagatatatgcaacctaccaagactgaaccaggaagaaatccaaaacctgaacagaccaataacacataccgagatttaagccgtaacaaaaagtctcccagtaaagaaaagccagggacttcatggcttcactgctcaaactgttaaacaataactaatatcaatcccactcaaagtatttcaaaaaatacaggaggagggaatatttccaaagtcaatttacgaagccagt

SEQ ID NO: 368199 - DNA, 611 bp, Homo sapiens
tcatcatgaccaagtgggatttatccctgggatgcaaggatgattcaacatatgcaaatcaatcaatgtgatacatcgtatcaacaaaatgaagaataaaaaccatatgatcatttcaatttatgctaaaaaaggatttgataaaatgtaaacatcccttcatgatttaaaaataaaccatcaaaagctgggtatagaaagaaaatacctcaatataataaaagccttatatgacagacccatagcattatcatactgaaggggaaaaaactgaaaggcttttttaaagacctagaatgcaacaaggttgcccactgtcaccactgttactcgacattgtactggaagtcctagctagagcaatcagatgagagaaagatataaactgcattgaaattggaaaggcagaagtcaaattatccttccttgcagatgatatgatcttacatttgcaaaaacttaaaggacttcacaaaaaaactattagaactaataaaaattcagtaaagttgyagaatacaatatcaacatatccaaatcagtagcatttctatatgccaacagtgaacaatgcaaaaaagaaatttaaaaagtaatcccatttacaatat

SEQ ID NO: 368200 - DNA, 433 bp, Homo sapiens
tttaccctctttacctataacatgggaatggaaataattcctttctcattaaattgtgtgaacaatacgtgaaataacccatgcaaagtgtcttgctttgcttagcatagtgcctagcacacagtaactgcttatttcatactaattttcctatctttattgaggaatagttgatatacaaargcctgcgtataattcatgtatataatttgagcttgaacagatgcctatattaatgttatcatcaccatattcaggcaataaacatatccattaccttcaagggtttccttgtgtcttcctccccttttttttgtggtggtgagaatacttaacatgagatctacccttttaacaaaattttagatgtgcaataccttattgttaaccgtaggcactatgttgtacagcagatcactggaaattactcgtc

SEQ ID NO: 368201 - DNA, 433 bp, Homo sapiens
tttaccctctttacctataacatgggaatggaaataattcctttctcattaaattgtgtgaacaatacgtgaaataacccatgcaaagtgtcttgctttgcttagcatagtgcctagcacacagtaactgcttatttcatactaattttcctatctttattgaggaatagttgatatacaaaagcctgcrtataattcatgtatataatttgagcttgaacagatgcctatattaatgttatcatcaccatattcaggcaataaacatatccattaccttcaagggtttccttgtgtcttcctccccttttttttgtggtggtgagaatacttaacatgagatctacccttttaacaaaattttagatgtgcaataccttattgttaaccgtaggcactatgttgtacagcagatcactggaaattactcgtc

SEQ ID NO: 368202 - DNA, 568 bp, Homo sapiens
cctaggatgacagtactattctttaccaatataaaaccaaggaagctgaagcataaagtgttttaagtaaattgcccaaggttacatgtactaagtggaaaaagaatttgaaaacatgcatactgtcttaagagcctgtgctttaactattacatcaaaaatcttcaaaccactgtcagttgggaattcttttctgcagtgttgaagggcttgtaaaggacagactttcctctaacatgggagcaaaacccctactcagatttgttgtgaggatttcataagataatatgctaaatgcgtggcaaagtaccttatgtatagtaagtgctcaataaatgtttgttcagttggcctttgtcaagggagcaagakaagtcatgaagactggagaaactcctgctgctcccctctcccagaacacagagctctcagcctgtgtttaggtgcttttgggaggaggcagcagttggagtgctgacgtggacagcaacagcttctgctgcttcagtgtggcctgtgggtctcaggtaactccatgcccagaaaagtggctcagctgctggagtct

SEQ ID NO: 368203 - DNA, 568 bp, Homo sapiens
cctaggatgacagtactattctttaccaatataaaaccaaggaagctgaagcataaagtgttttaagtaaattgcccaaggttacatgtactaagtggaaaaagaatttgaaaacatgcatactgtcttaagagcctgtgctttaactattacatcaaaaatcttcaaaccactgtcagttgggaattcttttctgcagtgttgaagggcttgtaaaggacagactttcctctaacatgggagcaaaacccctactcagatttgttgtgaggatttcataagataatatgctaaatgcgtggcaaagtaccttatgtatagtaagtgctcaataaatgtttgttcagttggcctttgtcaagggagcaagagaagtcatgaagactggagaaactcctgctgctcccctctcccagaacacagagctctcagcctgtgtttaggwgcttttgggaggaggcagcagttggagtgctgacgtggacagcaacagcttctgctgcttcagtgtggcctgtgggtctcaggtaactccatgcccagaaaagtggctcagctgctggagtct

SEQ ID NO: 368204 - DNA, 579 bp, Homo sapiens
tgtaaaggtgctatgtacatctctcagttctctagtgtagaagcttacagtcaaagtgactaaaaaccataacagctacaattagtggctaaggaacacataatatataagtaagtattaaggcacaaaaatataaattgtaaggggtggtggtaaaatgtctagagtattttgatatcaccaaagttaagttgctaccagcttaaaatagtttattataactacaatactttttctgttaactccatggtaatcaaaaagaaaagaaattacagtagatgaacaaatgacaaactaagcttagcaactcagaaaactaccaaaccacagaggtaaaagacaaaggaggagaaaaggaacaacgaacctataaaacaaccagaaaatccttaacaaaatgacacgaataagtccgtcactattggaaataacctagaatgttgatggattaaattactcatttaaaatatatagagtggttgaakggatttttttaaaaaaccaactatatgctgcctacaagagactcactccagtgttaaagacaaacatagactgaaagtaaacagatagaaaatc

SEQ ID NO: 368205 - DNA, 557 bp, Homo sapiens
gcactgaaggctttgcacttggggttagcaaggcgaagaggagcaagcacaggcttatagaccagcagaaagcagaggtcgaaggaagggagcatttaatatagtacctatggctctgcatgtgggaagtttgggcaaagtattgagtgtaccaagcttactggaatacaaggaattaggttttgaggtttaaattctagttatatgtaattttgtgacatagaatttataataaatgctattaatagaaaaattatactttctctgagcttcagtaacctcatttgtaaaatgagtctaatgatgctattcagagttgtttttaaattaaatgagattatgtgaaagccctttgtggctagcaacagtctatatgaatgaaagacacatttgatttaytgtaaattaaaagtgaatgatggctttaggttacacgtggccattcaattccaataaggccattataaaataattgtaaatttatgtatttttattacaaggtgagaaagtagctatgaaaggttggttacttgttcacaggtttatccagtcagagc

SEQ ID NO: 368206 - DNA, 551 bp, Homo sapiens
aatattgtctcaggtagcactgtaaccatgaagcagtcccagtgaaaagtcaggacacctgtaatattttttcctcttttcatgatacagttttcatcttatttttttgttatttgtgaatgctatgatctgaatgtttgtgtcaccttacaaatttatatgttgaaattctgacccccaaatgatggtattaggagaaggggctttggggaggtgattatgtcatgaaggaagagacctcatgattgggattrgtgctgttctcacactgctataaagacctacctaagactggataatttatgaagaaaaagggtttaattgacccacagtttcacagagttaacaggaagcatgactgggaggcctcaggaaacgtacagttatggcagaaggtgaaggggaagcaagcatgtcttatcatggtagagcaggagagagagacagcaaagggggaaatgcaacacacttttaagccatcagatcttgtgggtcttgtgagaactcactatcatgagaacagcaaggggggaaatttgcccccatgatgc

SEQ ID NO: 368207 - DNA, 582 bp, Homo sapiens
acaaggagaagttggcaatttccaacctgaaagagggccttcactaaaacctcaccatgctgacaccctgatctcagacttccagcctccagaactgtgagaaagaaatttctgtttttttatagccatctactctgtggtatttttttatagcaacctgaatggactaagatggtgagtgtctcttacttcgggtgataggtgatagatgggtgagctttttttgagtayaggtcatatcttacttattgagctatctctagtaataagcactgtgctaggagtacagtagtacttcaatctttttaatgaattaatgggtccaaattttgatgaattaatccttttaatgaattgtgaattaaagactcttttttgtgcatctctaacctaaaaaggcatcttaggtcagtcacccctaagtattctgaattgggtaagagggcagttgtcttaatagtagaggtgaagcagaatcttatctgcaccctatattctttcttgtctatattaaatggaaactaaggagtgggtgaaaataatgcaaatgtttatgagtcacttgggaggagacaaaatgtg

SEQ ID NO: 368208 - DNA, 582 bp, Homo sapiens
acaaggagaagttggcaatttccaacctgaaagagggccttcactaaaacctcaccatgctgacaccctgatctcagacttccagcctccagaactgtgagaaagaaatttctgtttttttatagccatctactctgtggtatttttttatagcaacctgaatggactaagatggtgagtgtctcttacttcgggtgataggtgatagatgggtgagctttttttgagtacaggtcatatcttacttattgagctatctctagtaataagcactgtgctaggagtacagtagtacttcaatctttttartgaattaatgggtccaaattttgatgaattaatccttttaatgaattgtgaattaaagactcttttttgtgcatctctaacctaaaaaggcatcttaggtcagtcacccctaagtattctgaattgggtaagagggcagttgtcttaatagtagaggtgaagcagaatcttatctgcaccctatattctttcttgtctatattaaatggaaactaaggagtgggtgaaaataatgcaaatgtttatgagtcacttgggaggagacaaaatgtg

SEQ ID NO: 368209 - DNA, 566 bp, Homo sapiens
aatcacatctacgtaaagaggatatccatcatgtcaagcatctattctttctgttataaacaatccaattatattcttctagttatttttaaatgcacaataagttattgctgagggtagtcacccggttgtgttatcaaatactagatcttgttcattctacataattacatttttgtacccattaaccatcctcatcccctcccccacccacctgctacccttcccagtccctggtaaccatcattctactctctatctccatgagttcaattgttttaatttttagctcccccaaacaagtgggaacatgtgaagtttgtctttctgtgcctagcttatttcagagtagaagtttttaagcacacaatcccaacttaccctttcccagttatcatatttcttcatctttgccctaatcctttctttctacctatctttacttttttccttaattttcctcttagaagccaaaatctctgctcactacatggatacacaagtygtatttgtcttatcaagacttttcctctgctctagggcagccctgtctggattctcacact

SEQ ID NO: 368210 - DNA, 505 bp, Homo sapiens
catactttctcaatctgataagcctcacaagtgtttttcataaatatgccattcccaaactaggtgacaaccagattcttcactcytttgtagcatttacaagacttagaataatactaggagcacaagttgtattttgatacacataagaaatatataaaaatatttaagggaaaattaacagaaccttgttactcaatatattgagctaacaatagtggtgaaatattcaagccaatcaaattttttgcctcttagtcatgaactccttgccaagtacagttcacgtgttcaagtaaatagcacacttttctagctaactgggaaataaagtatttcttaaaaagtaaaagagatcttttctgcctggaattagctatctaaaataatattaataaaaacaaataggtatgttgtactaaacagaggtattaataaatgtagtacattctacatttttataaattgaatcctcttttttctaagaatttatctgagacatcat

SEQ ID NO: 368211 - DNA, 624 bp, Homo sapiens
tgttactcaatatattgagctaacaatagtggtgaaatattcaagccaatcaaattttttgcctcttagtcatgaactccttgccaagtacagttcacgtgttcaagtaaatagcacacttttctagctaactgggaaataaagtatttcttaaaaagtaaaagagatcttttctgcctggaattagctatctaaaataatattaataaaaacaaataggtatgttgtactaaacagaggtattaataaatgtagtacattctacatttttataaattgaatcctcttttttctaagaatttatctgagacatcatggaagtcccttttttttttttttttttttttgagactgagtctcactctgttgcacaggctggagtgcagtggtgcgatctcagctcactgcaagctccacctcccgggttcatgccattcccctgcctcagcctcctgagtagctgggactagaggcacctgccaccacgcctggctaatttttttgtatttttaatagagacggggtttcactgtgttagycaggatggtcttgatctcctgacctcgtgatctgcccgcctcagcctcccaaagtgctgggataataggcgtgagccaccgtgcc

SEQ ID NO: 368212 - DNA, 582 bp, Homo sapiens
atataccatacataatagtatatttaatctatatataaatattakaggttaaaccttacacaacaaacaaaagtaacacttaacatcaagaggagaaagagataggagaaagggttaatgagcaagtcccagcgggagcaaagaagacaaaaggattcctggtctggtccattggtctccaaatggactctccaaaggaagagtctttgatgtggcagagcctttagaggtagatgccaagtgcttatcatgggtcactgcaagactcagtcagttaaggcagctgtttggagctgctgaagttctgctttttttttatagtcagagtcctctggtgagaacctatagtggaagagtgtgtttgtttatgtgcttatctgcttggacatagtctttatatttttatttgttaagtaaaacatcttatccttgttggcaaaatgccatatgaaatataaaatggagtctttttctaagatggagtttaatgaaggggtgctctatacaccccaatttcatagttttcgggcatttctggattaacttcctcagagtttactcttctacttctgagggagtttt

SEQ ID NO: 368213 - DNA, 537 bp, Homo sapiens
tacatgggagttcccaaggagacaattctccttagtacttcccattcactctgtagtcagagccatggccacacaagctcaatccactccacaagtcagtctatattatataccatacataatagtatatttaatctatatataaatattagaggttaaaccttacacaacaaacaaaagtaacacttaacatcaagaggagaaagagataggagaaagggttaatgagcaagtcccagcgggagcaaagaagacaaaaggattcctggtctggtccattggtctccaaatggactctccaaaggaagagtctttgatgtggcagagcctttagaggtagatgccaagtgcttatcatgggtcactgcaagactcagtcagttaargcagctgtttggagctgctgaagttctgctttttttttatagtcagagtcctctggtgagaacctatagtggaagagtgtgtttgtttatgtgcttatctgcttggacatagtctttatatttttatttgttaagtaaaacatcttatcct

SEQ ID NO: 368214 - DNA, 582 bp, Homo sapiens
atataccatacataatagtatatttaatctatatataaatattagaggttaaaccttacacaacaaacaaaagtaacacttaacatcaagaggagaaagagataggagaaagggttaatgagcaagtcccagcgggagcaaagaagacaaaaggattcctggtctggtccattggtctccaaatggactctccaaaggaagagtctttgatgtggcagagcctttagaggtagatgccaagtgcttatcatgggtcactgcaagactcagtcagttaaggcagctgtttggagctgctgaagttctgctttttttttatagtcagagtcctctggtgagaacctatagtggaagagtgtgtttgtttrtgtgcttatctgcttggacatagtctttatatttttatttgttaagtaaaacatcttatccttgttggcaaaatgccatatgaaatataaaatggagtctttttctaagatggagtttaatgaaggggtgctctatacaccccaatttcatagttttcgggcatttctggattaacttcctcagagtttactcttctacttctgagggagtttt

SEQ ID NO: 368215 - DNA, 608 bp, Homo sapiens
gtcataaggcaatcaggtggcatgaaaatattaaaaactacaggaaaccagcatctagcaaataaatttgaagaccatgttcaccctgaataaacaaatgcctttaaaatttttccaacttttaataaaactttaaactcagaaaagttgaaaaagaagtaccatgaagacacatgtaccctttacctagattcacaaattgttaacattttctgagattggctttgtgtgtctctgtctctttccstcttcacacacacactcattttctctctctcttacacacacgcacatatacatgcacatacacgcattttgggggagctctgaactgctctaaagcaagtttcagacatcaagatcatccaaaaatacttaaggtatttttcctaaaattagcacattcttttatattactataataacaagcataagacatttgctactgataattaatattatgtagtatacagtctaaatttaaatgtctctaattgctctcaaatattctttatattagggatcatatattggattttttgtcacgtttcttattttcatcagtctacaatgttgctcaccctgcgccctttttcctcatcttttac

SEQ ID NO: 368216 - DNA, 546 bp, Homo sapiens
  misc_feature (1)...(546): n = A,T,C or G
actttggtaaataacactgtcttaggaaaatttcaatttcatcttctatgctttctgatgcaatagccactagctgcttgaggctattcaaatttaaattaattataattaaataaaacaaaacattcagtttctcagtcacctgagccacatttaaatgtataagtattcactcaacacatatggctagtggctacctattggacagtacagatgtaggatattttcatgatttagaagttctattggatagtaatgaatgcagatttcaaatgtatttgcatagagtagtgcaaaatagtcccttatagagttaaattattattttttcttgtcttttattttgcttttrtgcttatttcctttctaatttgtctgttttaattttttcagggtactaaagttcttattatatctactatntttctgtttttatctcacattttcctttccttatgctttcttttgatttacttttatcaactcttttttttaaacttttaggttcagaggtatgtgtgcaggtttgttacaaaggtaaattgt

SEQ ID NO: 368217 - DNA, 586 bp, Homo sapiens
gcccctcctactatcacccccagtaacccactttgggaatgtgtgctccccattcccacaaytctgggcaccacaggtttagagaactcttctaccagcagacatagcaaagtcccattagatagaagatacagctgccatttccacactttgggcaccttgtgtccagggcccgaaaaaaaaaaaaaaaggatttgggataatcaccatcctggaaaaggtacacgacctagtcgtcaggaggaaagctgctgctacacattagagaagtgggcaatcagcttaacaccaaggtggttggcatatgttagtattccatcatctaattttaataataaacccataattgccacagcagccacagcctatgaaaagtaaacattaacttggtcccctcaggaaggaaggtctgggttactcacaaagttagcatccttgtaccattataagaaccaaggtaaagggctccagaatggatcagagagtttagcctagagctccctgtccccagcagcagctggggttgcagtttctcctactaacctttttcccttataaccttataactttatccaaagagaaagtc

SEQ ID NO: 368218 - DNA, 375 bp, Homo sapiens
taggttctaacattagtctattaggtgaaaaaatatatatatatcaatgataatactcttgcaaatctcatcagatcagaaaagaaaatatgcatctcaaaaatgcatcactgctggtttttctttcagcatttgaaccaatcactatgacgtgtttggctttcatttatggtaatacattgttcaaaccaggtctgtgtttaaatacaraagttccacttagcttagcttgatgtgatactataaaaggcatgagggaaaggccattcctgttcgttgaaggaagtcactggtagactcccctgaatgctttaaaggattacttttcctcgaatctttcatttttgttagttcatttttgttggtcattataca

SEQ ID NO: 368219 - DNA, 533 bp, Homo sapiens
attgaattcctatacccatattagctttttacaaatcagatcaaccatggcagtgaagactcaccattcatcttttcgttcattaatattataaggaaatctattcctgtgggcagacattaaacatgagagaaattaacacagttgcactaatgcaaacacaatgtcaataatttataatctgggaaaagcaactggtaaaccacattttaattatacaggctcatcgtgacacatcacttatgtgacattttaaaactcattcacacaataattaatccagacaagaaggttttaataaattataaccagatacattatactagcatagttttctgtcagcrtattttttcctatactactggacgtttgtaagaatatcactggggtcagatatattcatactccttcatttaccaagctgtacaagtgtttttaaatatattagtttaatatgttaccaacaagagaacaaattactcagtaaacaaatgggtatctgaaaataagatgcgttgttcatggatttcata

SEQ ID NO: 368220 - DNA, 574 bp, Homo sapiens
gacgtttgtaagaatatcactggggtcagatatattcatactccttcatttaccaagctgtacaagtgtttttaaatatattagtttaatatgttaccaacaagagaacaaattactcagtaaacaaatgggtatctgaaaataagaygcgttgttcatggatttcatatttgcttccaggctgcaatacatggaacagtaaagagtagcttggaaattaaaatatgttaaattcaggaacatgctggataattttaaaagttggatggttataaagatgcaaacccatgtttcatttatgaaaaacaaaagtttctattaagagcattaaaaatttgaaaaaatttattttttatcatttgttttttgacagatctaaattcagtattgtcactgggcttttttttgcaacagttctagtaaagaatctagttttaaaacacccaagacatgttcaaccctttgacattctagtcaccatggctctctaccaagttggacacttgagaaggaatgcttttaagtctatttagccagttgtctatgtttaaaaaaaaaaaagcaaaacaaaaaa

SEQ ID NO: 368221 - DNA, 574 bp, Homo sapiens
gacgtttgtaagaatatcactggggtcagatatattcatactccttcatttaccaagctgtacaagtgtttttaaatatattagtttaatatgttaccaacaagagaacaaattactcagtaaacaaatgggtatctgaaaataagatgygttgttcatggatttcatatttgcttccaggctgcaatacatggaacagtaaagagtagcttggaaattaaaatatgttaaattcaggaacatgctggataattttaaaagttggatggttataaagatgcaaacccatgtttcatttatgaaaaacaaaagtttctattaagagcattaaaaatttgaaaaaatttattttttatcatttgttttttgacagatctaaattcagtattgtcactgggcttttttttgcaacagttctagtaaagaatctagttttaaaacacccaagacatgttcaaccctttgacattctagtcaccatggctctctaccaagttggacacttgagaaggaatgcttttaagtctatttagccagttgtctatgtttaaaaaaaaaaaagcaaaacaaaaaa

SEQ ID NO: 368222 - DNA, 555 bp, Homo sapiens
tagttttccttgggtgggtaagcatatgagtgaggtttgactgaacagttggagttgggagggtgaggcaaggggtaggcaaaggtgagcagcaggagtaaaaggcgcatacatgtaagagagcacagtgcaagaagataaacctggatttaatactggaaatgtaggtaggagctagaacatagttacactgagtaatttgaattttattctaaagacaactaggtatctccaaaagattttaaagagaagaatgatatctytggcaacaaagtgaaagatgaaatgtagatattatgcttgagatagagaaaccaactaggagatcaatggactactgtaagaagtgatgagtgagacttataggatgggaggatcttgacagttacgtaaaaagaaaccaaggaggaggtagaacaagatggccaaagacaagcctctaccaattgtccacacaaagaaaagcaccttcatatgaaccaaaaaccaggtgaggaatcacagcatctggttttaacttaatatcactgaaagaagcactgaagagggtagaaa

SEQ ID NO: 368223 - DNA, 576 bp, Homo sapiens
ttaaatataaatagactaaactctaccatcaaaagaaatagaatggctgaatggatgaaaaaacaatacccaatgatctgctgcctacatgaaacaaacttgacctataaagacacacatagactgaaaataaaggaatgaaaaaacacattccatgcaaatagaaaccacaaaagagcaggagtagcaatatatatatcaaacaaaatagatttcaagamaagaaatataaaaagacacaaagagtattattatataatgagaaaggggtcaattcagcaagaggggataacaattgtaaatatgttcacattcaacactggaacacccagatatataaagcaaatattgttagagctaaagacaagtagaccccaatacagtaaaagctgaaggtttcaacaccccaatttcagcattggatggatcacctagacagaaaatcaacaaaaaaatcagacttaatctacactatagaccaaatggacctgaaagatatttacagaacatttcactcaacagctacagaatacatatgcttttccagaccatatggatcattctcagggataggca

SEQ ID NO: 368224 - DNA, 512 bp, Homo sapiens
tgattcattttcctttccctatggagagcattctacttctttctgacttggagctgggtcaaggtcgggggatgaatgctttcattaagattcaacttgttttgtgcagtagaagacagggacaagcttgcatttcaagggtttgggttggggaagataatgctaaaatgacagttcagaatagaaatattctgaatgtcatataccagaaaactgtagaactaaaacgttatctgataaataaatgaaggagtcttggtcaatggaccccaatccatccagttacctmttagaaatctcagcatcattaccaaattcccctctccctttcaccccaagaagaggcttggcaaataatagatcctcaaaatattgttattaaaaaataataaatatatttgttttctaataaaattcctttgtgaccagaaaataatctgtataatactgactctttgaaattgccttgtagtctagtacatgaccaatatttataaatattctgtatgtac

SEQ ID NO: 368225 - DNA, 650 bp, Homo sapiens
gtattacatgaatattaatatgctggtttcaatgattatacttcatgtaagatgttaacatagggaaagatattttaaaggttataggaactcagaatagttgtaactttacttcggtttacaattagtttaaaataaaaagatttttaaaatagaggcaagaaatgtaacataaaatgaaattttcttctgccaaattttctactaaaatactgccaaatggggtcaaatttaataattttctaacagatatttctgggcattgactatttaccaggcactatctgaygagagtaatacagtgaagaacaagacagaaaatccaagtctacagtcagtaaacaatcctattttaaaggggttcaggggagacaaaagaaagaaatacatacataaatttaaaaatatgagctaagaacaatggactgcaatgcaggcaaatggaagagcgaatgcagtgcctctgaggtaggagtatgtttcaggatacctgcatttttcttacttcaccattttcccatgggaaaattaacttgcaccatcctcaaataattctgttcctaccaggtaaatgcgccagcatttaatggctttcataaatctttgtcaagcaaccacctgtcaacaattcccatgtcaaccgtaactgc

SEQ ID NO: 368226 - DNA, 650 bp, Homo sapiens
gtattacatgaatattaatatgctggtttcaatgattatacttcatgtaagatgttaacatagggaaagatattttaaaggttataggaactcagaatagttgtaactttacttcggtttacaattagtttaaaataaaaagatttttaaaatagaggcaagaaatgtaacataaaatgaaattttcttctgccaaattttctactaaaatactgccaaatggggtcaaatttaataattttctaacagatatttctgggcattgactatttaccaggcactatctgatgagagkaatacagtgaagaacaagacagaaaatccaagtctacagtcagtaaacaatcctattttaaaggggttcaggggagacaaaagaaagaaatacatacataaatttaaaaatatgagctaagaacaatggactgcaatgcaggcaaatggaagagcgaatgcagtgcctctgaggtaggagtatgtttcaggatacctgcatttttcttacttcaccattttcccatgggaaaattaacttgcaccatcctcaaataattctgttcctaccaggtaaatgcgccagcatttaatggctttcataaatctttgtcaagcaaccacctgtcaacaattcccatgtcaaccgtaactgc

SEQ ID NO: 368227 - DNA, 650 bp, Homo sapiens
gtattacatgaatattaatatgctggtttcaatgattatacttcatgtaagatgttaacatagggaaagatattttaaaggttataggaactcagaatagttgtaactttacttcggtttacaattagtttaaaataaaaagatttttaaaatagaggcaagaaatgtaacataaaatgaaattttcttctgccaaattttctactaaaatactgccaaatggggtcaaatttaataattttctaacagatatttctgggcattgactatttaccaggcactatctgatgagagtaatacagtgawgaacaagacagaaaatccaagtctacagtcagtaaacaatcctattttaaaggggttcaggggagacaaaagaaagaaatacatacataaatttaaaaatatgagctaagaacaatggactgcaatgcaggcaaatggaagagcgaatgcagtgcctctgaggtaggagtatgtttcaggatacctgcatttttcttacttcaccattttcccatgggaaaattaacttgcaccatcctcaaataattctgttcctaccaggtaaatgcgccagcatttaatggctttcataaatctttgtcaagcaaccacctgtcaacaattcccatgtcaaccgtaactgc

SEQ ID NO: 368228 - DNA, 650 bp, Homo sapiens
gtattacatgaatattaatatgctggtttcaatgattatacttcatgtaagatgttaacatagggaaagatattttaaaggttataggaactcagaatagttgtaactttacttcggtttacaattagtttaaaataaaaagatttttaaaatagaggcaagaaatgtaacataaaatgaaattttcttctgccaaattttctactaaaatactgccaaatggggtcaaatttaataattttctaacagatatttctgggcattgactatttaccaggcactatctgatgagagtaatacagtgaagaacaagacagaaaatccaagtctacagtcagtaaacaatcmtattttaaaggggttcaggggagacaaaagaaagaaatacatacataaatttaaaaatatgagctaagaacaatggactgcaatgcaggcaaatggaagagcgaatgcagtgcctctgaggtaggagtatgtttcaggatacctgcatttttcttacttcaccattttcccatgggaaaattaacttgcaccatcctcaaataattctgttcctaccaggtaaatgcgccagcatttaatggctttcataaatctttgtcaagcaaccacctgtcaacaattcccatgtcaaccgtaactgc

SEQ ID NO: 368229 - DNA, 605 bp, Homo sapiens
caccttgtaaactacaaagcatgctacaaatattaactgttaggatttgattgattccttttgtattttttctaatttggtcatgagrtttttttcaagaaagtaactactaactatcccttccctgatggagagtcacggatttggtgatggtgattacagtgggtctttcacaggatacttctttatcatggcagatggcctaatacctaagtgtctgaccagtgttcaattgtccttctcacagaaaaatcatttctactggcagacacccttgtggctctagtctgacctgtgtccggtttacctctactaagacagccactctctaggagagccccaagcaggaaagaagttaggttcagatgtggtagtcccgtgaaacacagaggaggcaactcaacaagacacatgaagtaagaaaagcaatgtattacttatagatcacggagaaggccccatgctacataggaccaacaagaagtaggaagccatctggggcatggacactcaatgagtacgtggggaggaagagagagaaggacctacatgccaaagccattacaggggtccagagcattacccaagcaggcttctagcaggca

SEQ ID NO: 368230 - DNA, 563 bp, Homo sapiens
gtaggtacaggtagcaggcaaaatgagcataaaaaggaacatgttatctggagtaaacggtgtctgtatctagagcaggatgtgttgggccttttgagttgtcttcttcagcatccatcaggtratgtctggggcttgtgtcatctgaggaagccacatcgtctggggctatgggtcccatagggtcattttcttcatttctggtaccaggttgggtcctagccacaccatggtatggtttgatgcatcgtgctggaatccaaagaggacctgaggggttgtgaacacaagcatattctctttcccatgttaagcattcatttggaccacaccatacattactgtttacatctttccataaaactgtgggttttatgtcttgaaaggttttagcaaagtacttttctacagctaattgaaatttatcatctacattttaaaaattaagggtaaataaggcttgtgccaatagtgttgcagggtccttactcatattcccccatttttgttttttgaggatgtttttaagagtggaatggacacgttgtatggcctgtccttgg

SEQ ID NO: 368231 - DNA, 563 bp, Homo sapiens
gtaggtacaggtagcaggcaaaatgagcataaaaaggaacatgttatctggagtaaacggtgtctgtatctagagcaggatgtgttgggccttttgagttgtcttcttcagcatccatcaggtgatgtctggggcttgtgtcatctgaggaagccacatcgtctggggctatgggtcccatarggtcattttcttcatttctggtaccaggttgggtcctagccacaccatggtatggtttgatgcatcgtgctggaatccaaagaggacctgaggggttgtgaacacaagcatattctctttcccatgttaagcattcatttggaccacaccatacattactgtttacatctttccataaaactgtgggttttatgtcttgaaaggttttagcaaagtacttttctacagctaattgaaatttatcatctacattttaaaaattaagggtaaataaggcttgtgccaatagtgttgcagggtccttactcatattcccccatttttgttttttgaggatgtttttaagagtggaatggacacgttgtatggcctgtccttgg

SEQ ID NO: 368232 - DNA, 563 bp, Homo sapiens
gtaggtacaggtagcaggcaaaatgagcataaaaaggaacatgttatctggagtaaacggtgtctgtatctagagcaggatgtgttgggccttttgagttgtcttcttcagcatccatcaggtgatgtctggggcttgtgtcatctgaggaagccacatcgtctggggctatgggtcccatagggtcattttcttcatttctggtaccaggttgggtcctagccacaccatggtatggtttgatgcatcgtgctggaatccaaagaggacctgaggggktgtgaacacaagcatattctctttcccatgttaagcattcatttggaccacaccatacattactgtttacatctttccataaaactgtgggttttatgtcttgaaaggttttagcaaagtacttttctacagctaattgaaatttatcatctacattttaaaaattaagggtaaataaggcttgtgccaatagtgttgcagggtccttactcatattcccccatttttgttttttgaggatgtttttaagagtggaatggacacgttgtatggcctgtccttgg

SEQ ID NO: 368233 - DNA, 563 bp, Homo sapiens
gtaggtacaggtagcaggcaaaatgagcataaaaaggaacatgttatctggagtaaacggtgtctgtatctagagcaggatgtgttgggccttttgagttgtcttcttcagcatccatcaggtgatgtctggggcttgtgtcatctgaggaagccacatcgtctggggctatgggtcccatagggtcattttcttcatttctggtaccaggttgggtcctagccacaccatggtatggtttgatgcatcgtgctggaatccaaagaggacctgaggggttgtgaacacaagcatattctctttcccatgttaagcattcatttggaccacaccatacattactgtttacatctttccataaaactgtgggttttatgtcttgaaaggttttagcaaagtacttttctacagctaattgaaatttatcatctacattttaaaaattaagggtaaataaggcttgtgccaatagtgttgcagggtccttactcatattcccccatttttgtttwttgaggatgtttttaagagtggaatggacacgttgtatggcctgtccttgg

SEQ ID NO: 368234 - DNA, 623 bp, Homo sapiens
ggattgaatttttttttaggcaaaaccacaaaagtgtgagataagaactgaaggagtttgtcagcaggaagggcatgctctatatgacctgtgtaatcagagagtgctatttgcaggtccacagataagggcaatactgcttcaaattgccttttacttaaaggaatcctgatgatatcagggtcataacctagcaactgattgcatcttctgcagcctgaatagatgactttactgacgaactggatatrgggagagagtgtcttagtcccggtatgtgaacaaaaaacccattctagaaagcatagctctggggccatctgtcctattaaccctgtagcggagtgtttggtaggaaacataaataattgtactgaataccatgggtcaatgtgttctagttgcctttgagagatagcttgttctatctcttccatttccctttgtgttgcaggagttaaatatctaggagagtctagggctgtattgccctttaagataaaaaagaggttctgtatcagtagttatgcccaaggtgggatgaagtcagttaatattgcctagtaatttctgataatcatttaaggtgtgtaagttgctagtatttaatttaaccttttgag

SEQ ID NO: 368235 - DNA, 579 bp, Homo sapiens
agtgttaaagccgttaggtatgggggattgaatttttttttaggcaaaaccacaaaagtgtgagataagaactgaaggagtttgtcagcaggaagggcatgctctatatgacctgtgtaatcagagagtgctatttgcaggtccacagataagggcaatactgcttcaaattgccttttacttaaaggaatcctgatgatatcagggtcataacctagcaactgattgcatcttctgcagcctgaatagatgactttactgacgaactggatatggggagagagtgtcttagtcccggtatgtgaacaaaaaacccattctagaaagcatagctctggggccatctgtcctattaaccctgtagcggagtktttggtaggaaacataaataattgtactgaataccatgggtcaatgtgttctagttgcctttgagagatagcttgttctatctcttccatttccctttgtgttgcaggagttaaatatctaggagagtctagggctgtattgccctttaagataaaaaagaggttctgtatcagtagttatgcccaaggtgggatgaagtcagttaat

SEQ ID NO: 368236 - DNA, 597 bp, Homo sapiens
aaggacaacattgcacaaacataagtacaaacattgtttatgcacagagtgctttttcccctgtgttctaagagctattgaggggaatctccatcaagataactgttttctgttctgttgcattgcgtggtcttgttcctgagcaacatcccagctactgtcagcagctcacatagtctttcttactttagtcctaaaccagctcccctttgatgtttgaaaccagtgctaaggcctaaatggagagcaatttcttttcctggtctatcctcatttcccactctcatccagattttccaagttagaaaacaaacccacacagagaatttaataatactgtctcatacagagagattccagggaggtttttaaggtttcactagttacacaaaaatgcaagtcatgtttggctccacttggacatcctagtatatttcacttccctgtttcrtctccagtacttccccttcatgattctactcatccacactcttctgtcttctttggaatatacttttgtactaagagctgtcctggaggggacatgccttctccactgtagattcttatggatggggggactgccatgaagtcttt

SEQ ID NO: 368237 - DNA, 578 bp, Homo sapiens
catgtatttggccatctcatactacttaggactagggatctccctttcaccaataacatgaatagcagattatcagaataacaaktacatggtatataatgccactgagatgaataaagtcatctaggcacaaaattttaaaaggagtagccatcaggtacagtgatgatccagcaggagaagctgagaagtgacatgagagaataaaaggaaaaccagttggtaggagccctggaaaccaaaaggaaagattattcaaaagaaggataaaattttacctatccacactcagcaactgagagtcactgatgttaataaggcatgagcaggttcaagggagtagtgggaatgaaatcatattgaagtgaattaaacagtgagtgagagatgaggatgtgaagacaacatgtctttttgcaagattcagtaataaaagggagcagataaatagatcactatctagacagaaaactggcctaaaagaaatgagtctatttgggttctggtaggaataatccaatgggggaaaaggttgatgatgctaaaaaaaagaagggacatccaaagaaaagaggccc

SEQ ID NO: 368238 - DNA, 606 bp, Homo sapiens
aggaaactgcccccactccaattacttccaccttgtctctcccttgacatgtgggaactaaggggattacagggattataattcaagatcatatttgggtggggacacaatgcctaaccacatcacagggtgaagtacaaaagatcccatttggagagaatggtctttgatgagagcaaaaactcatcacccttgtaaaaaataaaactttgagtatgaatcctagtgctttgtagatatgatattagaaggaagagagagctcttttcttgtggtttgaatttttccattgaagtatgagcaagagtatttgcaactaagactacaaatttgaggagtgaaaagacagcaggaaagagttaatgtggaaactggagagaaagcccgcttgaaaaatcacagtggaattctgaaaatgtagtcactcttaattaaatcagtcctcgattgtctgcacatcacaaatttaacagtaactgctacaattttggaagccctaccatcacttcacatatattatcctttattttaaaccttactacaaccttatgatgctgaaattgtttttcccactttatatataaraaaattgaagctcaaaaaggt

SEQ ID NO: 368239 - DNA, 471 bp, Homo sapiens
atttgctatgctaattaacacctgaaattatgattaaacatttacaaatgtctctctgggaagccttacatctggggtacatctcttctgtatacatctgttgctatctaaacatatttcattatttaaatgcaagatttaaaaaacccattatgctattaaagttagaaatatagcatatgaaaagtmtgctgattttttaaaatgtattttaaattgctgggcttaaatgtgtaacaacataaatatttggctaattttgctgccgtaatatagaagtttcagtttaaccagggctgcatggatctgaaaaaacaattgctctaaagctaacaatgacaatgggaaattaatcagaataattaccaccatgttaatatctgggttaagtgagttatcaggcacaaaatatttagaatagtaccaggcacaaagtaagtgtttaattatttttacttgttattacataaa

SEQ ID NO: 368240 - DNA, 534 bp, Homo sapiens
ttcttctacctcatctctctgatttactgttttgcttttaaggactcatgtgattagattggacccatctaataataaccctaagtaatttccacatctgagggtccataacctcaatcacatctgcaaaattatttcagccataagtaacatattcacaagtttctacaattaggaactattattctgttaaccacaactaggtattgtgctaagcgctgtgcaaaataatagtattagtaatgataataataatagtaatagtggtagcaarccctgtgctaagttttctacatgtaaatttaatcattaaaccaacctaatgaggtacgtaatggtatgggtcttattttacagatgagaaaaccgaggcacaaatggacaaataacttgcccacagttaccacatcaataagctaggatttgaacctaggcaatctgatcttggagaacaaaaatgtcctgtccccagtgagtttatagtcaaataggttttggggaaaggagaagtcatacagataaatgcgtgtttta

SEQ ID NO: 368241 - DNA, 505 bp, Homo sapiens
aatagagatatttcacatgtatttaggaggtaaaagttttaaaaacgatgctgcattagatgttggtgtgagaaggtactatatgtcctttttcttctccaacctctgggattaattataatatgtttggagtcttgtgaaaccatgcttcttaatctgaggctcttgatcctacttatttctgtggagctcctgattcatgaggttttgcttgaggctctggaatttgggaattcagagccatttgtttcgtttcgtttttttgaggtaccttgtttgaacattcttatgttcacgcacatttgggaaaygctgatatagacagtgtgtaagatagttagtgattctcaatattggttgcacattagggatgcttttaaaactatgtacgccagggccctacctgaaacaattaagtcagaatctgtgtgagttgggcctgggcattggtgttttaacaggtgattgtgatatgcagccagtatgaaactctgagttaaattat

SEQ ID NO: 368242 - DNA, 581 bp, Homo sapiens
atgcataacatgtactgcaaatcaacccattgcctgtatttgggaattgttttattggattgtattctgcttttgttctaaatctcaggaattcttagatcacttcactaaatccagtggcttctctgggtcatactattcttctatcagtttacttacgggatgaatataaacccctcatttaatttccccaaattatatttcaggtgaggaaatgctgtatcatagaacttgagtaaatgcagatacatagagcacaatagaggaaacatattacactgctattagaaatagtttctcttagtatgtagatactaagcaaaccagagagttcatgcctagctcctggcargctcctgctgagtcaggactcctgctgagttagctccatcagcaagtaaactctgccatttagtcccaggtataccaggagacaaccttcctgggtgccagaaagaaaagcaggtctcctcccctcttgtccgaggaaatcttgcttatttaatgatcttgtatgtttgacagtggtagtagccattccttcataaaaacccatacctcacctacaatgatgtggttag

SEQ ID NO: 368243 - DNA, 426 bp, Homo sapiens
aaaactaggataaaggtcatcttaagacaacatcttggaagtacaatagtccccccttattcacaggagtatgttcgaaaacccctgttggatacctgaaaccacagtagtattgaattctacatacactgtatttggagttcaagtgcatttgcctctacatacattttgatgaagtttaatttataaattargtacagtaagtagataaaacaataataaaatagaacaattatgacaataatgtattatactaaaagttatgtgaatgtgatctttctttctcaaactatcttaatatttttggaccacagtcgaccacaagtaactgaaacaggaaagtgaaaccacaggtaaggacacactactgaactacacagcacttcagcttattggttagagctttgtcacatgaccacatgtcct

SEQ ID NO: 368244 - DNA, 583 bp, Homo sapiens
cataccacatatggctagcctgggaaaagtacagtttctactgaatgtatatcaaawtcacattattataaagtctaaaaactgtaagttgaaccctcataagttggaggccatctgtatatggatcttccaggagggccatggcaatgtggtaagctgactattaaatgacttaaaagcctaagaagtgtcttcaaaagaaaaatcagccatttaacagttgcagacttatcaggggtaagaagagaaggacaaaaactgagataggtaaagataaggcaaataatagttgacacttatcaagggcttactacatgccaggctctgttctgtttttcatgcgttactgcagtcctcacaaagatcctatgaaataggtattacattttctccattttacagaacaggaaattgaggcacaaggatgtcaggtaactttcccaagttttagtaagaattagagctaggatttgagactgagcagtccggttctagaatcgtgcacttgcccatcacccttgtgggggtcatgaccattggcccctaaaagttcactgaaaaactactgacatgaggcaaattt

SEQ ID NO: 368245 - DNA, 550 bp, Homo sapiens
gtagctcccataattaccacatgctgtgggaggagcttggtgggagataattgaatcatcaaggtgggcaggggggcggttcctccatactgttctcatactgaataagtcttacgagatctgatggtttataagcagagacccctttcacttggttctcattctgtcttgccagctgccatgtaagacgtgcctttcagcttccaccatgattgtgaggtctctccagccacatgtaactgtgagtccattaaacctctttttttttttgtaaattacccagcctctggtatgtctttattagcatcatgaaaacggactaatacagaatatattctaaaaatcaatagctaagcaagaatttattgtcatttttattaatacaagtgtatgtgtcctatatctcaatgttaaactgtggattagaaaatacagtttaagttaaaaggtaaagtgagatcctctactctcttaagagtattggaagggagggaaggataaytgaaggaaaggatgatgtgcaaatcagacatgtaatttactaacccag

SEQ ID NO: 368246 - DNA, 509 bp, Homo sapiens
agggagaaaattaaaaatgtgtagcaatgttatatttaaaatacctactagacatctagatgggggtgtcaggtaagcacctgggtttacaagtctagaggcttcagtgaagagcacttaactaaagaaaaaatgggaagtcaccccaatatcatagataatgctaaggttgtggaaatggatgtgggcacctaggaagtgaatatagaaaaagaaagaaaataatctaagaatgaaaaaatgaaagaagaaaaagaattagaaaaatgaataggattcatcaragattaagaaggagtagccaatacggtagataaaacggtacctagctatgtcaaatgttcctgatagatgaagactaaaaatataacattgaatttagcaatggagaggtcacttctgactttgagtggaacaactttaagtagagtgatggaggcgaaagcttaactagagctgactcattagaaaatgagaggagaggaaagtggagactaaaaatgcagtcc

SEQ ID NO: 368247 - DNA, 635 bp, Homo sapiens
gtattttttctatgtttaaatacacaaatgctggccattacattacaactgcctacaactgttcagtaacatgctgtacatgcttttagcctaggagcaatagactatacgatagcctaggtgtgtaggaggctctatcatttaggtttctgtaagtacactctatgatattcacacaatgatgaaattgtgcatttcgcacatctttcartgacagatgattgcattgggatagacaaatagaaaaatggaacaggaaagagagtccataaatgaaacctcatatataaacaaacttgatttatataagaactggcactgcagaagaccagcaaagaaaggaaaaaccattcaataataatgttgagtgaagatgttaacgtggaaaaaataagattggatccttacttcagaccacacataaaaactattttctggtgaatcaaagacttatatgtgaaagaaaatatattacaatatttaaaatatatttttctattgtttctttaagactttggaataagagttcattaacaaataaatatatattgctaaaaatagaatgggaaagtttgataaattctattacattaaaactaagaacttatgcttatcagaaaacaccgtaggaagca

SEQ ID NO: 368248 - DNA, 635 bp, Homo sapiens
gtattttttctatgtttaaatacacaaatgctggccattacattacaactgcctacaactgttcagtaacatgctgtacatgcttttagcctaggagcaatagactatacgatagcctaggtgtgtaggaggctctatcatttaggtttctgtaagtacactctatgatattcacacaatgatgaaattgtgcatttcgcacatctttcaatgacagatgattgcattgggatagacaaatagaaaaatggaacaggaaagagagtccataaatgaaacctcatatataaacaaacttgatttatataagaactggcactgcagaagaccagcaaagaaaggaaaaaccattcaataataatgttgagtsaagatgttaacgtggaaaaaataagattggatccttacttcagaccacacataaaaactattttctggtgaatcaaagacttatatgtgaaagaaaatatattacaatatttaaaatatatttttctattgtttctttaagactttggaataagagttcattaacaaataaatatatattgctaaaaatagaatgggaaagtttgataaattctattacattaaaactaagaacttatgcttatcagaaaacaccgtaggaagca

SEQ ID NO: 368249 - DNA, 635 bp, Homo sapiens
gtattttttctatgtttaaatacacaaatgctggccattacattacaactgcctacaactgttcagtaacatgctgtacatgcttttagcctaggagcaatagactatacgatagcctaggtgtgtaggaggctctatcatttaggtttctgtaagtacactctatgatattcacacaatgatgaaattgtgcatttcgcacatctttcaatgacagatgattgcattgggatagacaaatagaaaaatggaacaggaaagagagtccataaatgaaacctcatatataaacaaacttgatttatataagaactggcactgcagaagaccagcaaagaaaggaaaaaccattcaataataatgttgagtgaagatgttaacgtggaaaaaataagattggatccttacttcagaccacacataaaaactattttctggtgaatcaaagacttatatgtgaaagaaaatatattacaatatttaaaatatatttttctattgtttytttaagactttggaataagagttcattaacaaataaatatatattgctaaaaatagaatgggaaagtttgataaattctattacattaaaactaagaacttatgcttatcagaaaacaccgtaggaagca

SEQ ID NO: 368250 - DNA, 580 bp, Homo sapiens
ttaattaattttattgatatttttcagagaaccaggttttggtttcattgattttctctattcttttcctgttttagtttgattaattttctctgtatctttattatttatttctttctacttgcrtttgatttaatttctctttgattttctagcttcttatagtggaagcacaaattattaatttaaaaactgtcttctctaataaaagaattaaatgctgtaaatttctttctaattgctactttataccccacacattttgataagctatactttaaatttttattctcttaaaaatatcttctaattttcctgtgatttcttcttaatccatcagttattcaaaattacattgaatatctcccaaatatttggaaaatttccaaatatctttctataaaaacttctaggtcaattctattacagtcagaatacatactgtatgatttcagactttcaaatttatcaaaaattgttttgtgactcattctatagcctatctgggagtttttaggccattaatgtaactattgatatagctaaatttaaagctactatgttgctgtttgtgttctta

SEQ ID NO: 368251 - DNA, 580 bp, Homo sapiens
ttaattaattttattgatatttttcagagaaccaggttttggtttcattgattttctctattcttttcctgttttagtttgattaattttctctgtatctttattatttatttctttctacttgcatttgatttaatttctctttgattttctagcttcttatagtggaagcacaaattattaatttaaaaactgtcttctctaataaaagaattaaatgctgtaaatttctttctaattgctactttataccccacacattttgataagctatactttaaatttttattctcttaaaaatatcttctaattttcctgtgatttcttcttaatccatcagttattcaaaattacattgaatatctcccaaatatttggaaaatttccaaatatctttctataaaaacttctaggtcaattctattacagtcagaatacatactgtatgatttcagactttcaaatttatcaaaaattgttttgtgactcattctatagcctatctgggagtttttaggccattaatgtaactattgatatagctaaatttaaagctacyatgttgctgtttgtgttctta

SEQ ID NO: 368252 - DNA, 541 bp, Homo sapiens
gccttttatggagacatcattgggtaggagtgactgacagtcatatagaaatatgactggacaaaaaggtatgacctaaacccagcaagatctgtctgtacagattcttcttggcatttctgtgcagcattccttcctccaggatatggagcaagacaccctctggaatgagggtcttatgacccatagtcagattagagtcctgccttaggtaaaaggagggcaggaaaaagtcacagagagagattycgtttctaagacctgcttctgatgcctcaagtgccccaacattataaaaacctatacatgtgtataatatcacactgacctaaggatcttttgatgaaagattggaagaactattatcatgtttatttgccagagtttgcaaggctctttctcaccatatttctctctaggctacattacactttaaaattataataaaatgggaaattcctaaaacacactaaagagtttcgcagtccatttattccctatcaaatagaataccacgcaatattgagatgttttattgctg

SEQ ID NO: 368253 - DNA, 540 bp, Homo sapiens
tttttatttccttctcatctcaatagtgaaatgactactgtgaaaggttgctttcattcagttgatccagactgagactggaaggaaaaatcctgactcctcttttatttcctgagaaaaggaaaatagttcagagcagtctgaggaatgtgagttgtgcaaaatttgtcaggcccagagagtcatgagtataggacttacccatagtggtggtggtggaggaggacaattatttaaagcaatttttttcctaactagctgccttatccattatctccatgttcctgggatttgtgatacaaagaacaatgtawggccaatcaatagcaataatgtaaattattggtaaataacttaggaactgccttttcctttcctttaaaaatttacttgtactttacagcaggtacactgctaatgggagtgtatattcggggcaagttgaatatatgctctctggttctagtcctcaaacttcaaccaaataaactcttcacttatattaagtttgcctcagttttttcctttaggtcgacactc

SEQ ID NO: 368254 - DNA, 508 bp, Homo sapiens
gcaagtctgaaagacagctgggcagtcattaaatcttaaagctccacartaatctcctttgactccatgtctcacatccaggccacactgatgcaagcggtgggctcccacaaccttgggcagctccaccccatagcttctttcacaggctggtgttgagtgcctgtgatttttccaggctcaccatgcaagctgttggtggacctaccattctggggtctggaggacgatggcccacttctcacagctcctaggcagtgccccagtagggtcaatgtgtggggctccaaccccacatttcccctctgcattgccctagtagaggtccttcatgaacgctccaccccagcatcagacttctgcctggacacggaggcatttccatacatcctctaaaatctaggtggatgttcccaaacatcaactcttgtcttctgtgcacaggcccaacaccatgtgaaagctgtcaaggcttggagcttgcaccctctgaggcaatggcccaagc

SEQ ID NO: 368255 - DNA, 562 bp, Homo sapiens
ttccttctttcatctaagggtggtggtcgtgggggagaacrgtcctggttgcaggaagtgagatttagatttacctgtgggtggttcctgctcttgttttacctgaattgatttttaaattctttgcaagtaaaaaatgtgtgtgtcatttacaagacaatatgagagttaggcaacaatagtaattgtcatttaaaaacttttcttttctaaattacttcttattttgaatttgcagtttctgcctataaggcagttctatttacaataagtagaataatttattagggtgggcatatcatagatgatatggtaaaaattgctgttcatttaagaaatacaattagtcttgacttgatgtcatccataggttcttggaaactatgactttaagcaaaatgacatatatatatatatgtatgtaacaaaaccattttttcttatcaatgttataacaaaactatattgaataaaattatgctattcaatgacctgctgcatgttgttttgcttaaagtcacagtttccaagaacgtgttgatgatgttaagtgaggacttaa

SEQ ID NO: 368256 - DNA, 548 bp, Homo sapiens
gttatagggttatgagtgtttagggaagaatttttgtgacatggtacaattcactggaggagttgtttaaaactttttgttttaaacaaaacaatttaagacttgaaagtattcagaatgtataatacaatctttatcatcatccagctttaatgattatcaaaagattaatattatagctcttatttgatctatatgtatacctattccycttctccaatattatttttaaacaaatcccagaaatcttatcattttacacttaagtaacagaatacagagctctaaaaaactattttaacacaaaagtatgctacatttttcacatcttaaaaagtaagcataattccttaattttattaaatgcccagtgttcaaattcccagtaattttagatgtaatatgtgactttatttttacagtttattcattgaattgggattaaaataagattcacatgtaataattgattattcttttttttttaagtctttttaaaaaataggtttccttgttctctctctttctctctctttcctctctctgtc

SEQ ID NO: 368257 - DNA, 566 bp, Homo sapiens
ttgaggaaacaagaaaatacaaagtcatcctttaggacaggtgtcagcaagctttttctgcagaagactagctaacaaacattttgggctttctaagccatacagtctctgtctcaactacacactctgtagttgtagtattaaaacatctatagataatatgtaaatgaatgggtgtggctaagtttcaataaaacattgtttatgaaaacaggcagcaacaattgaatagcacaagcaaaaaatgaacttgggcccctactccacactgtacmtaaaaattaattcaaaatcaactttagacctaaaaatgggaaagatgaggggattgagagataacagctcaagggcatgggatttctctttttttttttttttggtgatgaaaatgttctaaaattggttttggtaaagtttacacaagtctgtgaatatactagaagccattgaattgtacactttaaataggtaaattctatggtatatgagttatgtctcaattcaactacctaaaaaattaaaacaagcaaaactggtgatgagtcagatttaactctctggtagga

SEQ ID NO: 368258 - DNA, 668 bp, Homo sapiens
taatggaatagcccctaagatgacatgtgaaggggttataccaaactcttatcaaacttttccttcagatatttcccatattaaccagttcttaattggtattccagagatagtaacatattttattataagcttatatcgaagcataaatattattcaaggtacatgcataataaggtgataaatgacttatccagaacttcacttaaattaaattaacattgagagtggagttttcctttttcaaaagagttccacgcaatctactgctttccccctgctgagagtgctaatttattttttctttgctagaaaaccaggagacggtcttaagactgggttttttatttattaatttctttcattgattctaagatactttaacaactgtgcatcagtggatacagtattttcaagctatttaatgtaatgtcagacagtatgtttcctagtagaaagagaatccctttggagtgttaggcagtttgcctctctgtataagacttaaaaatacaaacagtagcaattatttatcacagcctcagaagcctagttgttggatggaagtctttgcttaayaaaggacacgtgcagagtaatgttcattttccagattttttactcagaaagcaattcaaagtgagcatgtccaagtaaaatatttatca

SEQ ID NO: 368259 - DNA, 672 bp, Homo sapiens
ttagtttttttccccaaaatgtatcatcaggttgtgataacactatttattgaatagttaatcctttcctactgattagaatgccacttttatcatatacatttatctttttttcttctgtattttgttatatttttctttttgtcagtgactgcatcaatactatgcaattyagatggaattttcaaaagtgtgtaattattgtacttttagcaagaaaatcacactcatgcaagacaacagagcacaaataatttcttctttctctaaattcaagtgtgctcttgtgctgggcccaaactcaaaagcttctggacaccatgcaggtatcataaatgtatgataaagtcagtggtaagtcaacgaagattggtttttatcataaataggtgattacatgatgctcctgaaagtatgtcaattcaatattttaacatatttttctgtccaaacaagtctgtggtctctaaatgtccacctccagtctagcggaaataattctgtattagaatcaaacagcttctcaagcttcatcatttattaactgtgaaactttgagcaaattacttaaccctctgaacctcagtttcctcctttgaagaaataaataacaatagttacccgcaagattggactaattatcacatgaaataatatgcattacaatactga

SEQ ID NO: 368260 - DNA, 672 bp, Homo sapiens
ttagtttttttccccaaaatgtatcatcaggttgtgataacactatttattgaatagttaatcctttcctactgattagaatgccacttttatcatatacatttatctttttttcttctgtattttgttatatttttctttttgtcagtgactgcatcaatactatgcaatttagatggaattttcaaaagtgtgtaattattgtacttttagcaagaaaatcacactcatgcaagacaacagagcacaaataatttcttctttctctaaattcmagtgtgctcttgtgctgggcccaaactcaaaagcttctggacaccatgcaggtatcataaatgtatgataaagtcagtggtaagtcaacgaagattggtttttatcataaataggtgattacatgatgctcctgaaagtatgtcaattcaatattttaacatatttttctgtccaaacaagtctgtggtctctaaatgtccacctccagtctagcggaaataattctgtattagaatcaaacagcttctcaagcttcatcatttattaactgtgaaactttgagcaaattacttaaccctctgaacctcagtttcctcctttgaagaaataaataacaatagttacccgcaagattggactaattatcacatgaaataatatgcattacaatactga

SEQ ID NO: 368261 - DNA, 672 bp, Homo sapiens
ttagtttttttccccaaaatgtatcatcaggttgtgataacactatttattgaatagttaatcctttcctactgattagaatgccacttttatcatatacatttatctttttttcttctgtattttgttatatttttctttttgtcagtgactgcatcaatactatgcaatttagatggaattttcaaaagtgtgtaattattgtacttttagcaagaaaatcacactcatgcaagacaacagagcacaaataatttcttctttctctaaattcaagtgtgctcttgtgctgggcccaaactcaaaagcttctggacaccatgcaggtatcataaatgtatgataaagtcagtggtaagtcaacgragattggtttttatcataaataggtgattacatgatgctcctgaaagtatgtcaattcaatattttaacatatttttctgtccaaacaagtctgtggtctctaaatgtccacctccagtctagcggaaataattctgtattagaatcaaacagcttctcaagcttcatcatttattaactgtgaaactttgagcaaattacttaaccctctgaacctcagtttcctcctttgaagaaataaataacaatagttacccgcaagattggactaattatcacatgaaataatatgcattacaatactga

SEQ ID NO: 368262 - DNA, 608 bp, Homo sapiens
aactcttcttatcatcatcatccttatcatcatctcatgttgatgttggttttattataacaggaaatatatatactttaagaaaggggctgtgttgaagcagattgactcactttwtaggtttgctccacacgcaatactgtctgcttgagaaccacatggggattggatgggtaaggttgctccagaccacagtgatttcagagaagagtaatagaaaattttgccacagagaaacaaacatctctccttgaaacatgtcccatgtaacacaaggaatttcgcagccttatttttgccttatcgctacaactatattatggcttataaatatcaacagtatctgagtgctttatctggcccaaataaatgaatgtttctattgctaccagtttttcttcctcgaattacaaatgccacaatgaacagaaacatctctcttggagcactgtatgtgctcaatcacattctgttgttctccaccacccccaaacatccagatgaaatgtaaaatactcagtccatgaatattgggaagcattgatttgtattactgtgaagccaaaatatttagatgcaagggttgggactttctcctttattcttgc

SEQ ID NO: 368263 - DNA, 650 bp, Homo sapiens
ttctagcatctatgtcatttcagcattgacattggttgtttttcttttattgtgcagtttgagattttcctagatatttacatgataagtacttttgaattatatcttaaatgtttgagtactaaactataaaactctgggtcttatttaaatcctgtagagaatggttgcttccctcatttcttattaatacataataattgtacatatttatggagtacacataatattctgatacatacatacatacaaggtgtaatgatcagatcaggatatttaggatatctgtcacctcaaatacttatcatttctttatgttgtgaacatttcaaatcttctcttttagatattaaaaaawtatttttaactataatcaccctactatactattaaatactagaaactactcctatctatgtgtacgtttatacccattaagcaacctctcttcatctctttactccctgccctttgcagcctctgataaccaccattttactctctatttccatgagatcaactttttaaactctcatgtatgaatggaagcatgtaatatttgtctttatgtacccaacttttatcagtttaacataatgacctccagttccacccaggttgctacaaataagaggattttatttctttat

SEQ ID NO: 368264 - DNA, 508 bp, Homo sapiens
taataaatacctaactcttcaatgcccagacataagcaaacatccctaagtatcaagacaatccaggaaaacatgatctcaccaaacaaacttaataaggcaccagagaccaatcctggagaaatagagatatgtgacatttcagacagaaaattcaaaatagctgttttgaggaaactcaaagaaattcaagataacacacagaagaaattcagaattctatcagataaatttaacaaacaaattgaaataataaaataatcaagcagaaattctagagttgaaaaatgtaattgacacactgaagaatgcattggggtcttttaatagcagaattcatcaagcagaagaaagaagaagaaagcctatcacaaggcatttaataatcggacwcccaaagataaaggataaagaaaggctcctaaaatcagcaagagaaaaggaagaagtaacatacaatggagctccaatgtgtctggcagcagacttttcagtggaagccttatag

SEQ ID NO: 368265 - DNA, 609 bp, Homo sapiens
ttttgtagctattgtaaattgcattgttttctcgatttcattaaggtagttcattcttgatttcattcagctaggtggtttttttttgaaaagataagcaaaattaaaaaatccttagctagaatattttttaaaggggagactaaaataaataaaatagaaaataaaacaggagacattgcaaataatcccacagaaataaaaaaacatcataaaaagtatcatgaacaattatataccaaaaattagacaaatgggaaatggacaaattcctagaaacatacagcctactaagactaaatcaagaaaaaataaaaatcctgaactgayctataacaaatagagagactgtatcagtatttataaaccttgcaagaaaggaaagcctaggacaatatggcttctcagatgaatcctatcaaacatttaaagaaatttaattccaatcatccttaagtaattacaaaaatagaagagagaactctttgaaactcattctatgagaccaacatcactctaataggaaagccagacaaagacactgcaagaaaagaaaagtataggtcaatatcactgactaaagtggatgtaaaaatccacaacaaaata

SEQ ID NO: 368266 - DNA, 424 bp, Homo sapiens
ggctgactgcatccttgacctcccaagtgatcctcccatttcagcttcccaagtagctaggattacaggtatgtgacaccatgttcagctaatcatttaaaatttttttcttgtagagatggtgtatcactacgttacccaggctggtcctgaattcytgggctgaagtgatcttcctgccttggcctcccaaagtgcttggattataggcatgagccaccatgcctggcctcttttctcttattttcttggtcagtctagccagaggtttgtcaatgttgctgatgttttcaaagaatcaacattaatattctacattatttttctgtttcctatttcattaatttccacattaaactttattatatccttccttctgcttactctgaatttagtttgccctttcttcttttctagtttctta

SEQ ID NO: 368267 - DNA, 578 bp, Homo sapiens
caagcaagataaactggcaggaaaagacttccaaagggaaactcaccatgtgagaagagagagtctggactggcctccaggctcaaaagaatctgaaggggaaggctggcttcagtgacacatatggctgaggccagaagtyccccaaaccaggctgtcctgccataggaggtatgctttggaaatggtgcctacacatgtgtgtgaatggaaagatccccactcgagaacctgaggaaggggcagcatcttggggctattcaggagtgtggaccaacaagggcgagggcacagcagtggatggagatgtagttgcctgtgctgcaactatttccaaaagtgccctgtgtggccaaggccaaagcaaagggagctccaaatgcttcctgacatttgaaggcaggacaactggggaagaggtgagacagacagtgtgtgtgtgtgtgtgtgtgtgtgtgtgtgtgtgtgtgtgtgtgtatgtgagagagagagagaaaggctgacttcatgcaaatatgtgcaagtggtggtttgagtgtgactgttatttgaacttgaaaattgcaaagtaagagata

SEQ ID NO: 368268 - DNA, 578 bp, Homo sapiens
caagcaagataaactggcaggaaaagacttccaaagggaaactcaccatgtgagaagagagagtctggactggcctccaggctcaaaagaatctgaaggggaaggctggcttcagtgacacatatggctgaggccagaagtcccccaaaccaggctgtcctgccataggaggtatgctttggaaatggtgcctacacatgtgtgtgaatggaaagatccccactcgagaacctgaggaaggggcagcatcttggggctattcaggagtstggaccaacaagggcgagggcacagcagtggatggagatgtagttgcctgtgctgcaactatttccaaaagtgccctgtgtggccaaggccaaagcaaagggagctccaaatgcttcctgacatttgaaggcaggacaactggggaagaggtgagacagacagtgtgtgtgtgtgtgtgtgtgtgtgtgtgtgtgtgtgtgtgtgtgtatgtgagagagagagagaaaggctgacttcatgcaaatatgtgcaagtggtggtttgagtgtgactgttatttgaacttgaaaattgcaaagtaagagata

SEQ ID NO: 368269 - DNA, 516 bp, Homo sapiens
gccaatcagttctgccatcccatctaggagtagaaaacagcaagaaaacctcagttcgacccccctaggattccatctccaaccttgaccaatcagcactctgcttcctgagmccctacctgccaaattatgtttgtttgtttgtgatggagtctcactctgttgcccaggctggagtgcagtggcacaatctcagctcactgcaacctccgcctcctgggttcaagtgagtctccagcctcaatctcccgagtacctgggtttacaggcaagtgccaccacgcccagctaattttttgtatttttagtacagatggggtttcgccatgttggccaggctggtcttgaactcctgacctcaggtgatccgcctgcctcagcctcccaaagtgccgggattacaagcgtgagccaccacacccagcaccaaactatctttaaaaactctgatccccaaatgcttgaggaaactgatttaagtaataataaaactcccgtctccctcacagccagctc

SEQ ID NO: 368270 - DNA, 426 bp, Homo sapiens
ttagtttgttattttctaaagatatttgctttcaaaagtaattattcatatatatcagttacaaaattcttctactgagagttccccaccaaaataagccaggcatggtgtgcacgtgtactcccagctacttgggaggctgagatgggaggactgcttgaacctaggagttcaaaaccagcctggaaacgttagactcccragaccttgtctcaaaaagaaaaaaaaatgttttttcaataaattaattaattccaggtagaatcattttctagaaggtcttgctgtcctccagtctcttttctgtactcctgaaattcctgcctttcttaaaattcttcaacagttttccatagtggagcttgcctgtctttgtagcctcagcccacattgcccttcctcctactcacagatccagctatgttg

SEQ ID NO: 368271 - DNA, 426 bp, Homo sapiens
ttagtttgttattttctaaagatatttgctttcaaaagtaattattcatatatatcagttacaaaattcttctactgagagttccccaccaaaataagccaggcatggtgtgcacgtgtactcccagctacttgggaggctgagatgggaggactgcttgaacctaggagttcaaaaccagcctggaaacgttagactcccaagaccttgtctcaaaaagaaaaaaaaatgttttttcaatwaattaattaattccaggtagaatcattttctagaaggtcttgctgtcctccagtctcttttctgtactcctgaaattcctgcctttcttaaaattcttcaacagttttccatagtggagcttgcctgtctttgtagcctcagcccacattgcccttcctcctactcacagatccagctatgttg

SEQ ID NO: 368272 - DNA, 539 bp, Homo sapiens
agtgatcactctcatggcaggatatgaggggtctcttgccatcccaaaacatctcccagagcctgtcatgtatcccaaatcccatcatcagaatcgccccaaagggtaacctcaaataaaatattaggggatgaatataagaaataattaagtgaagagttggtcctttaatccttgtttgaattttgcaaatacagtattaagccactcctaactcctaccaaagcaggccattcagcgcacttgaaaaaaaattccctccgatacttagatagcaagttttattcctaaccaacgcaatcagccacstggatggcatgagttttgatagaagaggttgcagagggtgggggactggggcccccacagtgggctttagcagcatgaaggtactgcagaggggtgctgggggacgggaggggtttccagagagggcgatgggagggtgccaaagatgaatggggctcacaccaaaggaacactctctcttcattctcttttcaccttttcccctctgtggcatcctacactgtgacctc

SEQ ID NO: 368273 - DNA, 338 bp, Homo sapiens
ataaaacacacctttggccacatttttttttggattgctttttatttctgaactaaatgctagcagctttagctttatcaacagcaatgatttctgcaagctgaargcttctctagaagactatgccatttcgtttctgctttccctcatgcagttctgcttcttggtttgttaactatagctctgtctcttccgtgtgttgtagaagacagagaaaccagaattagatgagcaagaggtgtgaccgtttttcagaggggtgtgtctggcaaaaccttaaacagtatttctcaaatagacatttgaagatgttctttacctgtgccttcgaaaccatc

SEQ ID NO: 368274 - DNA, 567 bp, Homo sapiens
  misc_feature (1)...(567): n = A,T,C or G
acaaagcaggtgttcataggatgttcactgaaaagagagaagcactgtagcgttttcactgtgaatgggcacaggggttgctgagtgagaattagcataggggtttttgccggggkaggggctggcagcaggaagtaggcagtagcaaatggaaaaggctggcctggtcccacccttcatctctttctagaaggaaaatggcattatttttacatccaatgaaacactcaagaccctccaaatgcctgatgcagaaaagagaagaccagcatagcaacactaggaaacccaaagggcagaggatacacaagggaaatggagtccatgcgctggaactggctgtctctgctatttgtggcatacttactgattgcacaactgcaaaactggtaaaatggcataatcacggctcaagccaagtgtattggctgtaagtccagtgatttttattttaactcgtctaaaaacactttaaaaattgctaagccctctgtaaatagttgtatgctaagaatctagggtaacacgttgtttatccatgcaatcttttccataccccantccttc

SEQ ID NO: 368275 - DNA, 567 bp, Homo sapiens
  misc_feature (1)...(567): n = A,T,C or G
acaaagcaggtgttcataggatgttcactgaaaagagagaagcactgtagcgttttcactgtgaatgggcacaggggttgctgagtgagaattagcataggggtttttgccgggggaggggctggcagcaggaagtaggcagyagcaaatggaaaaggctggcctggtcccacccttcatctctttctagaaggaaaatggcattatttttacatccaatgaaacactcaagaccctccaaatgcctgatgcagaaaagagaagaccagcatagcaacactaggaaacccaaagggcagaggatacacaagggaaatggagtccatgcgctggaactggctgtctctgctatttgtggcatacttactgattgcacaactgcaaaactggtaaaatggcataatcacggctcaagccaagtgtattggctgtaagtccagtgatttttattttaactcgtctaaaaacactttaaaaattgctaagccctctgtaaatagttgtatgctaagaatctagggtaacacgttgtttatccatgcaatcttttccataccccantccttc

SEQ ID NO: 368276 - DNA, 589 bp, Homo sapiens
ttgcatatttcatgtcctttgctattttgctagattgctattagaaatctgggacaatgactcagtcctttagcttaaaatttgttacaataattggaatattctaggctaaaggatttgtttgtttgtttgtttgtttgtttgtttcagccatgtatgatctggttttcttcctaactttaaaactcaagacatttaaatactcttgtaaagaatacaatgtaggccaggtgtggtggctcacacctgtaatcccagcactttcggaggctgaggcaggtggatcacctgaggtcaggagtttgagaccagcctggccaacatagtgaaaccccatctctactaaaaatacaaaaattaactgggcatgatggtgtgcacctgtaattccagctacttgggaggctgaaacagaagaatcgcttgaacccggaaggtgaaggttgcagtgatgcagtaagccgaaatcatgccactgtactctagcctgggtgacaragtgagactccatctcaaaaaaaaaaaaaaaaaaaagaataaaaggtaaacagaatttcagttatcttcatgtttccaacccttaggctac

SEQ ID NO: 368277 - DNA, 513 bp, Homo sapiens
taggtcaaagctcacacagaagtgatggtggcgggtttgaaataagtgccttctggccccgaagtctaggatctttttcctctgctagttgtwttgtctcttgggacaacagaaacccttcttgtaagaacagggcctggtagatgactgaccaagggccacctatacgcttatatctctcaggctgctctcgggctttccccaacatgcttacacacaggctttactcccaatccgaggcctcccctcccacgaggcctggccacactgcttcagcatctcctatagcgtctcttgattcccttgcaatcccatattgaagtcctctgaagtcccatattgtgctgatttaccccccatgaagggacatctataacaccacccttcctctcacaacaaattcctagatccaaaactatccactgaaatagtaacgatttttctcatttgtcatcctgggaatgggaactattggtttgccaagttgagagatatttataactcaatgaaaaa

SEQ ID NO: 368278 - DNA, 513 bp, Homo sapiens
taggtcaaagctcacacagaagtgatggtggcgggtttgaaataagtgccttctggccccgaagtctaggatctttttcctctgctagttgtattgtctcttgggacaacagaaacccttcttgtaagaacagggcctggtagatgactgaccaagggccacctatacrcttatatctctcaggctgctctcgggctttccccaacatgcttacacacaggctttactcccaatccgaggcctcccctcccacgaggcctggccacactgcttcagcatctcctatagcgtctcttgattcccttgcaatcccatattgaagtcctctgaagtcccatattgtgctgatttaccccccatgaagggacatctataacaccacccttcctctcacaacaaattcctagatccaaaactatccactgaaatagtaacgatttttctcatttgtcatcctgggaatgggaactattggtttgccaagttgagagatatttataactcaatgaaaaa

SEQ ID NO: 368279 - DNA, 554 bp, Homo sapiens
ggttttgaaggaaagatctaaatcatcaggtgacttgttatattaatgaaggattaattaaacatcgaccgtgtgcctagcactgacctggtcctttagagaaatcaaaagtggcatatgttacatccctgctctcaatgggcttaatatctagctggggagataaacaagagatgaaccacatggtaggtggaattggaattaagggataaactgggcagtaacagctgaggagttcagagaccgcttcatggcaaaatcaggatttataaaataaagggatggatttttacacttaaaataagaagaaatcaaagattaagatatcatgcaatttggggaaagcctgaagtttttaaacaataatcagcatggcttgggactttatctatgtcatgctgtccttcctgctctcggttctgaaggagtcatgtgggtcagtggcctcaacttacatcactgaaattaatccaatamgggagaatttgagaccagtcctggcaaccccctggctctcttgccataaattatcccctagatttgccacagttggc

SEQ ID NO: 368280 - DNA, 623 bp, Homo sapiens
caccacatagtaagaattgaatgtttacacagtagacaagggcaaagagctcaaaagaaaagcaaagaataataaataggcaattcacagaaaaccaagtacaagtactccataagcaaatgaaaagaggctctgccttacttataattcaagaaatgaaaatcaaagccacaatgggatcatcctgaccatccaaattagcaaacattttaaaaaatttaatattgcaagtattgccaggtgggtaagcaaggaagtattgatggcattgctggtaggaatgtaaacagactcagccatattggagggcaatttgattacatggctaaaacttgaaatgcccatacaccctgacccaaaaactctacttctaggaaactacttgagagatatacttctatgagtatacaaaaatgtttctaacaaggatattatctgccsatttttttttaaatagagaaaaaaaaaactagcctaaatgtccatccatagaacgttgcttaagatggttctaacactggccatccacacaatggaataccaagtgactcgaaaaagaatgagctaggtcggtgtgtgtgggtatggaaagaattccattatacatttgtgaatgaaagaaa

SEQ ID NO: 368281 - DNA, 514 bp, Homo sapiens
gttgtttcattcctatgttattttttaatatttgggaaatttctagatctctttctgttactgatttccagttaaattccattatgatgagaaaagcgatgtttatattatagctatattaaaaattttaaagtctgttttatggcccagaatatagtttattttagtgactgttccatgtacacttgaaaagaatatgtgttctgctgctgttggttggagtgttgtataaatgtcaattaggtcaagttctctacttgttctatcaattattttaagaagaagactaaagtgtccaagcattgttggggatctgtctatgtctcctttcaacgctatcagtttttscttcatgtgttttagagttttgctgtttagatgcatatacctttatggctgttatgttttcttggttaatttcccctttattatcatgtaatctgcctcttcattcttggtaatgtttccttgttttgaagtctactttgtgtaatattaatatagccactcctgc

SEQ ID NO: 368282 - DNA, 514 bp, Homo sapiens
gttgtttcattcctatgttattttttaatatttgggaaatttctagatctctttctgttactgatttccagttaaattccattatgatgagaaaagcgatgtttatattatagctatattaaaaattttaaagtctgttttatggcccagaatatagtttattttagtgactgttccatgtacacttgaaaagaatatgtgttctgctgctgttggttggagtgttgtataaatgtcaattaggtcaagttctctacttgttctatcaattattttaagaagaagactaaagtgtccaagcattgttggggatctgtctatgtctcctttcaacgctatcagtttttgcttcatgtgttttagagttttgctgtttagatgcatayacctttatggctgttatgttttcttggttaatttcccctttattatcatgtaatctgcctcttcattcttggtaatgtttccttgttttgaagtctactttgtgtaatattaatatagccactcctgc

SEQ ID NO: 368283 - DNA, 514 bp, Homo sapiens
gttgtttcattcctatgttattttttaatatttgggaaatttctagatctctttctgttactgatttccagttaaattccattatgatgagaaaagcgatgtttatattatagctatattaaaaattttaaagtctgttttatggcccagaatatagtttattttagtgactgttccatgtacacttgaaaagaatatgtgttctgctgctgttggttggagtgttgtataaatgtcaattaggtcaagttctctacttgttctatcaattattttaagaagaagactaaagtgtccaagcattgttggggatctgtctatgtctcctttcaacgctatcagtttttgcttcatgtgttttagagttttgctgtttagatgcatatacctttatggctgttatgttttcttggttaatttcccctttattatcatgtaatctgcctcttcattyttggtaatgtttccttgttttgaagtctactttgtgtaatattaatatagccactcctgc

SEQ ID NO: 368284 - DNA, 514 bp, Homo sapiens
gttgtttcattcctatgttattttttaatatttgggaaatttctagatctctttctgttactgatttccagttaaattccattatgatgagaaaagcgatgtttatattatagctatattaaaaattttaaagtctgttttatggcccagaatatagtttattttagtgactgttccatgtacacttgaaaagaatatgtgttctgctgctgttggttggagtgttgtataaatgtcaattaggtcaagttctctacttgttctatcaattattttaagaagaagactaaagtgtccaagcattgttggggatctgtctatgtctcctttcaacgctatcagtttttgcttcatgtgttttagagttttgctgtttagatgcatatacctttatggctgttatgttttcttggttaatttcccctttattatcatgtaatctgcctcttcattcttggtaatktttccttgttttgaagtctactttgtgtaatattaatatagccactcctgc

SEQ ID NO: 368285 - DNA, 596 bp, Homo sapiens
ctgagtaagaaaataatttctgtggaaatcctatttcccttcccttaaattggtggtttttaaaactgtgttccttggagtccaagagattttcattaagtttccagatttctacaaagtgtcctcagaggtcatcctggaacagagggtggaatggaatggaggggggcacctccctgttgctttgttttaaatattttatgttatttgaacaaatagttccttggaattaaataaactggaaaacttccactttggagcattgactcagcccccycaggatgggaaagagcttgaagtttatctatcttagtctacctctatgcggaaggcttgaattcatcatcaccaagtgacatccagcctggatctgagcagcttcagaggcaggggattccccacatccctagccgctcaccccgtcttgactagtcctgatgcttttactactgcatgcatcactgcttctcaaacttggctgcccatggcaagcacctgaaaagtttttttttttaaactgatgcctgggcctcactcccagaaattctgatttaatgggttcaggtatggcctgggcaatgggagatttgaaagtt

SEQ ID NO: 368286 - DNA, 596 bp, Homo sapiens
ctgagtaagaaaataatttctgtggaaatcctatttcccttcccttaaattggtggtttttaaaactgtgttccttggagtccaagagattttcattaagtttccagatttctacaaagtgtcctcagaggtcatcctggaacagagggtggaatggaatggaggggggcacctccctgttgctttgttttaaatattttatgttatttgaacaaatagttccttggaattaaataaactggaaaacttccactttggagcattgactcagccccctcaggatgggaaagagcttgaagtttatctatcttagtctacctctatgcggaaggcttgaattcatcatcaccaagtgacatccagcctggatctgagcagcttcagaggcaggggattccccacatccctagccgctcacyccgtcttgactagtcctgatgcttttactactgcatgcatcactgcttctcaaacttggctgcccatggcaagcacctgaaaagtttttttttttaaactgatgcctgggcctcactcccagaaattctgatttaatgggttcaggtatggcctgggcaatgggagatttgaaagtt

SEQ ID NO: 368287 - DNA, 596 bp, Homo sapiens
ctgagtaagaaaataatttctgtggaaatcctatttcccttcccttaaattggtggtttttaaaactgtgttccttggagtccaagagattttcattaagtttccagatttctacaaagtgtcctcagaggtcatcctggaacagagggtggaatggaatggaggggggcacctccctgttgctttgttttaaatattttatgttatttgaacaaatagttccttggaattaaataaactggaaaacttccactttggagcattgactcagccccctcaggatgggaaagagcttgaagtttatctatcttagtctacctctatgcggaaggcttgaattcatcatcaccaagtgacatccagcctggatctgagcagcttcagaggcaggggattccccacatccctagccgctcaccccgtcttgactagtcctgatgcttttactactgcatgcatcactgcttctcaaacttggctgcccatggcawgcacctgaaaagtttttttttttaaactgatgcctgggcctcactcccagaaattctgatttaatgggttcaggtatggcctgggcaatgggagatttgaaagtt

SEQ ID NO: 368288 - DNA, 537 bp, Homo sapiens
aaacttctcccccagctccctaccccatattatattttaccatcattttaaatttctgtaatctgccaggtaaaattgtaccccactgtaacaatctgaattgtcctgattactagtgggtaataaatatcttttcatatatttaaaaatcattggtactttttcccctgggaattacttacatacatcctttgccttttttacattgggttgttttatcttttcttagtgaacttcaggagctttaaaaaatattaaggatattagctattagcactttgttcagaaatattatttctcagtctgccatttgactttaayagtgtcttttgacatagagaagcccccaattcttattaaatcagatttgtaaacctttttaatgcttatagaggccaaaagagtttagttcttgtcagaaagtctctcctcaccacaaaatttaaaaatatttttctgggatatttttatagattttatttttctatattttcttttggtatatttatagtttttatcttggtatatactgtgaca

SEQ ID NO: 368289 - DNA, 615 bp, Homo sapiens
agctaactggaaaattgttttcataattcaattttgttttacataaccttgctcccccaaatgttagtaatttaactcaaagagctgttagtggtattaaatagtcactaaatgttgcagaggcagctcagcaaaattcacgaatggggaaaccattttatgaccatcgtttcacctccggggggggctcactggcttttgttccaggcccctatggcccagagggaataacatctgtatttttaagaccagctttgcaccacacctgcatatcaattcccctttctgacttctgcctctaaaccaaagccaaatgtttggctacggatttggtttccagggttcggctgagtatgaaaggcagcagctccaagacttcactggtcccaccaaaaaattgtttaagtgakgttaattgagtcctgggaaagtttaaaaaattgaaatccttagaggaaatggagatgaagggaaagaaagggagaagaagaaaaagagaaggcaatgagaaatgactgataaaaacagaagttaaatcaaatgatgatattaatttaaaaaatttaaactaaaatcatttaaaaattaaaatatttaaaaaatcattttagttta

SEQ ID NO: 368290 - DNA, 615 bp, Homo sapiens
agctaactggaaaattgttttcataattcaattttgttttacataaccttgctcccccaaatgttagtaatttaactcaaagagctgttagtggtattaaatagtcactaaatgttgcagaggcagctcagcaaaattcacgaatggggaaaccattttatgaccatcgtttcacctccggggggggctcactggcttttgttccaggcccctatggcccagagggaataacatctgtatttttaagaccagctttgcaccacacctgcatatcaattcccctttctgacttctgcctctaaaccaaagccaaatgtttggctacggatttggtttccagggttcggctgagtatgaaaggcagcagctccaagacttcactggtcccaccaaaaaattgtttaagtgatgttaattgagtcctgggaaagtttaaaaaattgaaatccttagaggaaatggagatgaagggaaagaaagggagaagaagaaaaagagaaggcaatgagaaatgactgayaaaaacagaagttaaatcaaatgatgatattaatttaaaaaatttaaactaaaatcatttaaaaattaaaatatttaaaaaatcattttagttta

SEQ ID NO: 368291 - DNA, 447 bp, Homo sapiens
ttctacccactggtcgcagttctgcattgtgagtagtacagaaaagttctaaccctattttccaagttttgaagatggcactgttgccaccacttgtctgcctctacctgttcttcttcaggttaaatcaygccatctctttctcaattgtcctctttggattggaaccctatattactggtcctggtcaccctcccttgggtatgttctagtttatgaaggcctttcttaaaataagcacctaagaatggaacatgatgtagtctgaccagcaaaacataagaggactatgctcagaaccctacctttctactaagacattccacaattagattcactttttaaaccttttttcatactagtggtttttactgaaggtcagttccaattttctgaccatttttaggtgaatttcagagtattaagatcagctattcaagtctgtct

SEQ ID NO: 368292 - DNA, 575 bp, Homo sapiens
agcacctaagaatggaacatgatgtagtctgaccagcaaaacataagaggactatgctcagaaccctacctttctactaagacattccacaattagattcactttttaaaccttttttcatactagtggtttttactgaaggtcagttccaaytttctgaccatttttaggtgaatttcagagtattaagatcagctattcaagtctgtctgttcaacagatttttttttaaggaactgccatcaagcttagatgtggtttccaaattatacccaccttccattttgaaaacatggacatttgtccatctttagtcttacagtttttcaatcaattggcacatttgtactgtgtgtctatcctgggccagatgttgtgctgtgaggtgggtcagtgaataagacacaatttctgctctcaaggagcctctattcagtgaggagagtcacatgaatgcacagaaggttacaggagctcagaaacaagatgcctctgagaacatattcatccacactaaagaggcatcgttccctggggtgctgggctcaacctgcacacaatgagtgttggtggga

SEQ ID NO: 368293 - DNA, 568 bp, Homo sapiens
ttgtgacttattttatatatgtggctccatatgtatcttctggctaaagattaagttgtaatagacaattgataaacccatacatcctcctcctatttatgtcttaattcttcaaatcagggtttcgtaaagtggttctgaatctgcaggacttaaaaaaatgttaaaaattgaaaaaacaaacaatggatccagggacaagtttgggaaatgttaaatgataccaaattaaccaagtttccttagtgcaagatatcctagaggctttactatgccagcgagccttatgaatctccaagaggggcacataatacacggcatttcttgaatttacttccatataaaactcttcccatgcaagactcacaggrtttgaggttctgaaacatgctttgggagaggctgcttttcaccacctctgcttatacaaatactacacccttgactagggccattaacaaatgaaaatgcatttgcttttccataagtcaaggtgaatttcacaatgcttttcaattaaggaagcagactccacaaatcctttacctgtgaccatttacatgtgacc

SEQ ID NO: 368294 - DNA, 562 bp, Homo sapiens
tgtttcctactcatggacccttgctcaatgacctactcatggaccctttactgaccattaaaawttttacatcagtagtaaaggcatggatctcagaatgtaaatgcaaagatttagttaacatttgtgtaaatctgaataagccctgactgcaaaaactaacaataaaaatgtccttttttaaaaaattaaaatgctgacctacaacgagtttgaaagaggtaggagggtgatttgtaattaaagctttctgaagatctcattttctttgggaataaagtagagagataaaattcagactttagttaaataagcatgttttgtataagccgggtgcatactaaaagttccaacttcttctcaagcatagcagataaaggatattatcaaatgttcatcaagggaggagatatgtaggcaaatattatgaccatagagtgggcatggtaaaaaatagcacaaaataggcagtaaaactgaatcaagatatatcagtaattttggttttgttttcgtttttcaagtccagcttatgtgctttaaagaaatgcatataaaacgt

SEQ ID NO: 368295 - DNA, 562 bp, Homo sapiens
tgtttcctactcatggacccttgctcaatgacctactcatggaccctttactgaccattaaaatttttacatcagtagtaaaggcatggatctcagaatgtaaatgcaaagatttagttaacatttgtgtaaatctgaataagccctgactgcaaaaactaacaataaaaatgtccttttttaaaaaattaaaatgctgacctacaacgagtttgaaagaggtaggagggtgatttgtaattaaagctttctgaagatctcattttctttgggaataaagtagagagataaaawtcagactttagttaaataagcatgttttgtataagccgggtgcatactaaaagttccaacttcttctcaagcatagcagataaaggatattatcaaatgttcatcaagggaggagatatgtaggcaaatattatgaccatagagtgggcatggtaaaaaatagcacaaaataggcagtaaaactgaatcaagatatatcagtaattttggttttgttttcgtttttcaagtccagcttatgtgctttaaagaaatgcatataaaacgt

SEQ ID NO: 368296 - DNA, 601 bp, Homo sapiens
attaattaatggtaattgtgattaatattaagtaaatctcaattctgtaacatattattaaattaaactaaatttggcttaaggttgccctctgtaccttcaacccctttctaatgaactacaacctatgttagtaggtagacaaactaaaagcctaatttagtagtacagtatatttttggtaacttctttatctcagccaacgacagcagctgagtgtcagccaatcataggctggtaagtgatcagatcatgccccaataaggcaaatgcagaaccgtaaccaatgaagctgattctgtacctgctttgcgatttctgtctataaatgcagcctgcctacattgctgagtggtgatctctgaacctcttctggttcctgtaaaagtattttcaaattttcacattttagaagaggcaaacacccttcttctgcgttctgagctaggcaagcagaacccttaattatttgaaaascaatttttatatttctgtattctggatgttccttttgaccctttcaaattctttttcttgttttttgtccctttgatctttggtcaatagtacaatgatttgcatctttgtcccagtaaaggag

SEQ ID NO: 368297 - DNA, 592 bp, Homo sapiens
ttgtccatgaccatggtacataaacattttattataacttttgatgtctagaagcacaaagtgaaagaaaccatggctgttatttgttgatttaccactgcagatgccgaaagggagagtcacctgctagttcctctcccattggtgtttcaccacagagtgtcatcttgatggttttaagtttccctgagacagatgactactgactgccaggaaatactgtccttcagtgataatgcttttattcctttcagttcttggagctgttggtgagagaaataaagcctagatcatggccagataatgaagagcctcataggccatgctaaaatgtctagacttttaaattttacgttactygttccaaatgctccaagccctaacatggtttcttcccaaggtctacttgcgctaacttttaacaaaggctctctacttccaaaggagagaagtgggctcctctgagtccccttttgtttttcactaggcctgaccttgggctctgatcttggactattaagtctagtttcagcaagaatccttccatgctggtttagtgaaaatctgccatcttggtctctgatcaaattcc

SEQ ID NO: 368298 - DNA, 572 bp, Homo sapiens
caacttaattgtactttctagcattcttgcttcattgcttttgactagactgacatatactcataattatagtattcttaataattacatctatgtccaaatgtctttmagaaaccagaacacacaactaagactacttgagaaaaaagctttaaaatgattataatgttcatgaaaatgaatagttagaagcaagttttgggtaaaatcttaagagccatgtttgtttctgtcttccatttcatttcccttctctattgaacaggatgctctctgagctagcatatgttcaatgcttgtgtagtatttagattatctttggaaaaggttggaatttcctttttactacatagttagcatacttaatgggacacagtaaacttagatacaactccagtgttattgaaaagggaaatataaacttgaaaattgtagaaaacactgtaatttgaacacattgtttaatatgtccattttagcatggtatactaaatttagcagaaaggaggaaatacactaataagaaagttacttgaactggaaataatagtataacttatgaccctcttgga

SEQ ID NO: 368299 - DNA, 572 bp, Homo sapiens
caacttaattgtactttctagcattcttgcttcattgcttttgactagactgacatatactcataattatagtattcttaataattacatctatgtccaaatgtctttaagaaaccagaacacacaactaagactrcttgagaaaaaagctttaaaatgattataatgttcatgaaaatgaatagttagaagcaagttttgggtaaaatcttaagagccatgtttgtttctgtcttccatttcatttcccttctctattgaacaggatgctctctgagctagcatatgttcaatgcttgtgtagtatttagattatctttggaaaaggttggaatttcctttttactacatagttagcatacttaatgggacacagtaaacttagatacaactccagtgttattgaaaagggaaatataaacttgaaaattgtagaaaacactgtaatttgaacacattgtttaatatgtccattttagcatggtatactaaatttagcagaaaggaggaaatacactaataagaaagttacttgaactggaaataatagtataacttatgaccctcttgga

SEQ ID NO: 368300 - DNA, 558 bp, Homo sapiens
atattatgaaaacaaccaaccaaagaagaaaattgaaaaggaaaaaatggaaaaagataaggcttactgagatgagacagattaaattttgggttctagagtgtgtagcaagagcagacttcagacaacctgaagcctragtctgctgaggagtgctgtgggcttttagaaaatctatctttgttttgttgaatatctcagtaaacactctggaatgtgtgggaattatttatatcatttgctgctggtgagtgggctggtcttcaaaacagccaaggtgagggagatgtggatataaagcccttcatgaaaatggctgaaggagcatctcacttccggtggcatcctcactccttgttggtgacatccttcacattttacatcctctgtcattaaataaactctggaccctcttctgctgggatattttcatccaaaacaccatcacaccattgtaaccaacatgatgaagtttaactactcgtagaaagagatagcagaactaacttctaaattagcaaggggaaaactttttaaaatataaaagtcaaatatgta

SEQ ID NO: 368301 - DNA, 558 bp, Homo sapiens
atattatgaaaacaaccaaccaaagaagaaaattgaaaaggaaaaaatggaaaaagataaggcttactgagatgagacagattaaattttgggttctagagtgtgtagcaagagcagacttcagacaacctgaagcctgagtctgctgaggagtgctgtgggcttttagaaaatctatctttgttttgttgaatatctcagtaaacactctggaatgtgtgggaattatttatatcatttgctgctggtgagtgggctggtcttcaaaacagccaaggtgagggagatgtggatataaagcccttcatgaaaatggctgaaggagcatctcacttccggtggcatcctcactccttgttggtgacatccttcacattttacatcctctgtcattaaataaactctggaccctcttctgctgggatattttcatccaaaacaccatcacaccattgtaaccaacatgatgaagtttaactactcgtagaaagagatagcwgaactaacttctaaattagcaaggggaaaactttttaaaatataaaagtcaaatatgta

SEQ ID NO: 368302 - DNA, 640 bp, Homo sapiens
gaaccaaagagcatcaatgagaaactttataagtgaagcagagaaacatttatttgtgcatcagctaaactctgttgcctgcaaagtatcaactgtcatgttctgtaaaatgctgtgagtcatacagatccagcaagcacttatcacttcttatcatcagcctatgtggactccgagcttggagaaaacaagcataagggtctaaagcctgaaatgattaataacatagttgaaagagattataaaaggagaattctttcttgtcattggataatctgttataagctatttgggctgtatctacatttaataaaataactacttaattcagtaaacctggtttaaaaatgtgcaaactaataagtgtaagtcatgtaaatatagtgtaaataaatatcataaatatagtgatytgcataattttaaaccaaatgttccctgtctgtgaactgcaggaacaaatttaaaagccccagagggggaggagtgtaacagaggagtaagagtgtaaccctaaaaccagaccgcctagggtcggattcccagctcaacaattagctatacagccttgagcaggttgattataattgctcaaggtataccattagcctgtataccactaaccttgattgcagtatca

SEQ ID NO: 368303 - DNA, 574 bp, Homo sapiens
ggaaaactacactgaaaactctggggcagtgagagtgacaactgctattactgtcatagtattaggaaaatagttttgacctcataaaacccctcatgagactcatttgaggaccccaagattcctaagaccatactttgaaaaacactgcttagartaaagataaagccagcatttcacaacctggggaataaaagtctaaattttttattctggcatttcagacctttccaatctgccaccaaccatcttttctaatgtttatctcctatttctctactagctaaaatttgtagttataccagttggtattaatcttctcattattttcctatttttgggtctctgctcttgtgtttttgtgtctctgctcattttagtttttctcattgaatcactctctgttaaatcttctgtattagcactgtatcaaatataagatttttaattacaaactttcagtttgaactttctatgttcagagtaagctacctttccagaaatatttttcttacttttagcctactgcccttgtattaaatgacatccttaaatattaatgtctatgatggtc

SEQ ID NO: 368304 - DNA, 529 bp, Homo sapiens
gaagcaaaaactatgagatatgcatggagacacagacacaacctaataataggaaaaatcaacataccacttscagtaacaagagagatcacatgaacaaaagtaaggacatgatctaaacaatgtaatcgaaagggtagatcttatggatatatattaaactctacaccctgataataatgaatacacattccaaatatctaacaactgactcttaacattcaaactggatgctggccaagacccactgacattagccgaatatgattatttctcttacttttatgtaattaccaaccagttaaatagatccacattacttttgttttttaaaagtttttgtggctttgcaaaaagtgcaaaacatttactttactttactttcgacatatgcattctaaagtcacaccacactccttaacttcatctcatattgcaatgtggcgaagtttattttccctaaagagtgccatatgtgtccatactcttttttagcattcctatcccagactatcctgtcacatgcaaa

SEQ ID NO: 368305 - DNA, 529 bp, Homo sapiens
gaagcaaaaactatgagatatgcatggagacacagacacaacctaataataggaaaaatcaacataccacttgcagtaacaagagagatcacatgaacaaaagtaaggacatgatctaaacaatgtaatcgaaagggtagatcttatggatatatattaaactctacaccctgataataatgaatacacattccaaatatctaacaactgactcttaacattcaaactggatgctggccaagacccactgacattagccgaatatgattatttctcttacttttatgtaatyaccaaccagttaaatagatccacattacttttgttttttaaaagtttttgtggctttgcaaaaagtgcaaaacatttactttactttactttcgacatatgcattctaaagtcacaccacactccttaacttcatctcatattgcaatgtggcgaagtttattttccctaaagagtgccatatgtgtccatactcttttttagcattcctatcccagactatcctgtcacatgcaaa

SEQ ID NO: 368306 - DNA, 527 bp, Homo sapiens
aatttcatccttctgcatgaaaagattattctttcccccattgaattagcttggcatccttgtcaaaaatcaattgacaattgaccataaatgtattggtttatttctgaactctcaattctattttcttgatctrtatgcctatcaatatattattaccatgtagtcttgatgactgtaattttatagtaagttttgaagtcaggaagtatgagtgaaccaacttttttccttcctctttaagattactgggctattctgagtctcttacatttccatgtgaattttaggaccagtttgtcaagttctatgtaagagccagctgagattttgttagaggttgcaatgactcttgttcaacttggtagatattattatcttaataatactgtcttcttatctacgaatgtggaatgaatttccattaatttaggttttaacttatttcaagtgtgtcttatagtgtgcaaatcttgcacttcttttaatttattcctgagtattttttatattctgtaaatggaatt

SEQ ID NO: 368307 - DNA, 596 bp, Homo sapiens
ggaatactatgaacaatgtgtgacaaccaattagtcaacttagataaaacaaacaaattcctagggagacataactaccaaaacaaattcaagaacaacaaaaatttgaatacatctataataaataaagagagtaaattggtaattaaaacaactttcacgaagaaaagcccaggctcagatggctttgctggtaaattctaccaaacatataaagaataatttttttgcaaactcttcccaaacagtacaagaggaaaaaacacgtcccgctacattctataaggccrctatttctgtgataccaaaatgagacagatatcacaagaaaaaaaatgatacaacaatttctactacaaatatgaatgaaatattctcaaaaaatagtagcaaaccaaatttagcaatatatgaaaataattacatcccatgactaagtgggatttatcacaggaacgcaaggttgtgtttcaacatataaaaataaatcagtgtggtaacactctatcaatccagtaatggacaaaaaccacaggatcttctccacagaaaatccagcatcctttcataataacacttaagctagaaacaaaagg

SEQ ID NO: 368308 - DNA, 524 bp, Homo sapiens
tttagttgatccacattctcaatgacacctgaatttctgttttgttttgttttctaatctggtgggacatagcatggtatttcattgtctgaatttatatttatctgaataccagagtagatggggatctctcatacttttttacatttggcttctttttctgagaataacttttttattatctttgtcagttttggtttaggattttttttaagttaaagggctttttaayagttaccatcagagtgggaacaaaaaaatataagtttacagtttggggctgttattttaaattcactttctttgtcacttttctgtgtctatgtcaaagtgttgctgttttgctcaaatattttgtctcctttctaaccccaaattctcagtacatagcattactttctatttcacaagaaagaaaaccattgaaaataaattctttcaacttcctgccacttatacgtctcctctccatgtcccttgccccaaaaaagagaaagaaaaaaaaagtcatatttctgaataaa

SEQ ID NO: 368309 - DNA, 568 bp, Homo sapiens
gtttgcctgtcttctatattaaaacaaaaatatctcattttcccgtccaatcaataattatgtcaagttagtttatcatattgtttaaatcttttytatgtatttattgatttttctaattgtagtattgattattgagagattgtaatcaatatagtcagtactgcaatttaaaaaaattgtaaaacaggtaattctctctatttttagtgtttcctccaggaattccaatatagatccctaacctatcataatctaccttcaatgttataaacttcaaatacaattttatataaattcttgctttaaacgtgtgttttaaaataaataagatactataaattatcctttatatattagctgggtatggtggtgtgcatctgtaatcccacctactctgaaaactgaggtgggaggattgcttgagcccaggaggtcaaggttgcagtgagttatgatagtgccactgcactgcagccagggcaacagaaccagatcatcttttaaacaaacaaacaaacagacaaagaaaaccctaacatcatgtacaaacattgatggaaataga

SEQ ID NO: 368310 - DNA, 557 bp, Homo sapiens
actcttagtatagtttcctgggtaaccrccaccaatatatcaaatttgacacatgaagggatatctctctgctttctctgaacaaggtctggatagccaagaggaatcaactttcccagagccttgcctaatggcataattcgatagagatgaatttcccaaagccattcagcatgtgtttattgaaaacaactctagccaagacactaggctaagaataattgagcaagttaacacagtccctgtcatcacagagtatataattagtttggtatgtagtttttagtatcttctcaagtagcaagtgttggagttttgcttttgttttgtttttaattaggactagccagaaaaaaaaaaaaaggtattgtgtcattgaggtataggtggggcaaatcccagacttgggatttagggaggggtgtgagacaaagtaactgaaaaggaaagttgcatggaatctcgggcaaagatagtttaaaatcttgctggagaaattccctggagaaaagtcatcatttattttgtgtttagtatctacatcatttttcttatgt

SEQ ID NO: 368311 - DNA, 557 bp, Homo sapiens
actcttagtatagtttcctgggtaaccgccaccaatatatcaaatttgacacatgaagggatatctctctgctttctctgaacaaggtctggatagccaagaggaatcaactttcccagagccttgcctartggcataattcgatagagatgaatttcccaaagccattcagcatgtgtttattgaaaacaactctagccaagacactaggctaagaataattgagcaagttaacacagtccctgtcatcacagagtatataattagtttggtatgtagtttttagtatcttctcaagtagcaagtgttggagttttgcttttgttttgtttttaattaggactagccagaaaaaaaaaaaaaggtattgtgtcattgaggtataggtggggcaaatcccagacttgggatttagggaggggtgtgagacaaagtaactgaaaaggaaagttgcatggaatctcgggcaaagatagtttaaaatcttgctggagaaattccctggagaaaagtcatcatttattttgtgtttagtatctacatcatttttcttatgt

SEQ ID NO: 368312 - DNA, 557 bp, Homo sapiens
actcttagtatagtttcctgggtaaccgccaccaatatatcaaatttgacacatgaagggatatctctctgctttctctgaacaaggtctggatagccaagaggaatcaactttcccagagccttgcctaatggcataattcgatagagatgaatttcccaaagccattcagcatgtgtttattgaaaacaactctagccaagacactaggctaagaataattgagcaagtyaacacagtccctgtcatcacagagtatataattagtttggtatgtagtttttagtatcttctcaagtagcaagtgttggagttttgcttttgttttgtttttaattaggactagccagaaaaaaaaaaaaaggtattgtgtcattgaggtataggtggggcaaatcccagacttgggatttagggaggggtgtgagacaaagtaactgaaaaggaaagttgcatggaatctcgggcaaagatagtttaaaatcttgctggagaaattccctggagaaaagtcatcatttattttgtgtttagtatctacatcatttttcttatgt

SEQ ID NO: 368313 - DNA, 557 bp, Homo sapiens
actcttagtatagtttcctgggtaaccgccaccaatatatcaaatttgacacatgaagggatatctctctgctttctctgaacaaggtctggatagccaagaggaatcaactttcccagagccttgcctaatggcataattcgatagagatgaatttcccaaagccattcagcatgtgtttattgaaaacaactctagccaagacactaggctaagaataattgagcaagttaacacagtccctgtcatcacagagtatataattagtttggtatgtagtttttagtatcttctcaagtagcaagtgttggagttttgyttttgttttgtttttaattaggactagccagaaaaaaaaaaaaaggtattgtgtcattgaggtataggtggggcaaatcccagacttgggatttagggaggggtgtgagacaaagtaactgaaaaggaaagttgcatggaatctcgggcaaagatagtttaaaatcttgctggagaaattccctggagaaaagtcatcatttattttgtgtttagtatctacatcatttttcttatgt

SEQ ID NO: 368314 - DNA, 658 bp, Homo sapiens
atttttcttatgtttcatgcatgccccgctttatcaggtggatcatgtttcccagtgtagaggctgaaaatatcagacaacttgctttcctgacctcccttgcaactaagatccagccatatgacctcagctccaacagtcggatgcaccatcactgattttcatcagaagttagtgactacgagaagtagaagcagtgcagtacacaccagtgacagatggcacattggtgatgcctagattcagggcccagaggcagcagcgggagctcttgtggcagcatcatgcatcagtagagcaagctgacgagtccaatgcacagctgctatgtcagcaaatcttcaatgcaccaaccaggggagtgattttggcctttcttcctgctatttgctttatatttatgctatatattatttataatgtagatatatatattatttataattcagatatatataatatatagcttatatttatgctatataaagcaactggatatgctttaataatttattttgtgttgaattaaccagaatcagtttctgaagcaaagaacagggaagaaaagaaaaaagatcacyatgcaaactctacttaatatcagtctgtgtttattgttgccagaggcagttctctcaaaaatgtagagatagaggtc

SEQ ID NO: 368315 - DNA, 549 bp, Homo sapiens
ccttggtgtgactgggctgggtccctctcttgctggtcccctccagagggaccctggaccctttccagcctcacaggccctatggagaccccagcccttctccatcaccttctcctcacctgcttgcccctctggtcttgtcctcgggtctgaggacatgcagcctgatttgccctatggggagaaatcagggaagaagtcacatctcaggtccataaraaacacgggagagtcctgggtagagaggtgaaggggcccaacttcctgccaagtccaagcccaagccctccccatgtgggaccctaggaggtagaggagatggtctgcggtcttcacctctccactgagagtcctcaacatcctcatacttttaaagatttccaagggcacaggaggcagacgccattgtgtgggggaaagaggccgggtgaagctgaggaaggagttgacactgttggcgcaattaccaggggtaagtaacaacaatgatggagttaataataataatttatttcacactgttatgtcatgccataagacgtgccatca

SEQ ID NO: 368316 - DNA, 578 bp, Homo sapiens
atgctatgtgaaacaagtcagacacagaaagacaagtactgcrtgatctcacttatatgtagaatctaagaaagtcaaacgcatgaaagcaaagtatagaatggtggttgccagggctgagggctaagggaaatgagatattgatcaaggggcacaaagtttcagctaggcagaatgaataagttctggaggtttcatgtgcaccatggtgactatggtaaataacactgtactgtatacttgaaattttgtgacagtaaatattaagtgttctcaccaccaaaaaaacggtaactgtgaagtgctgattatgttaattcactggattgtggtaatcattccacagtgcatacatacatcaaaacgtcatgtcgtacaccttaagtatatacaatttttatttgtcagttatacctcaataaacctggaattaaaaaactgaaaattctataatctcatctctgatcactgctctaaccataggtaagcactggtatcaaattatacatcattctagatctttgttttactcattcatgtatgtatagttttgagtgtattatatatgaatatgtaga

SEQ ID NO: 368317 - DNA, 578 bp, Homo sapiens
atgctatgtgaaacaagtcagacacagaaagacaagtactgcatgatctcacttwtatgtagaatctaagaaagtcaaacgcatgaaagcaaagtatagaatggtggttgccagggctgagggctaagggaaatgagatattgatcaaggggcacaaagtttcagctaggcagaatgaataagttctggaggtttcatgtgcaccatggtgactatggtaaataacactgtactgtatacttgaaattttgtgacagtaaatattaagtgttctcaccaccaaaaaaacggtaactgtgaagtgctgattatgttaattcactggattgtggtaatcattccacagtgcatacatacatcaaaacgtcatgtcgtacaccttaagtatatacaatttttatttgtcagttatacctcaataaacctggaattaaaaaactgaaaattctataatctcatctctgatcactgctctaaccataggtaagcactggtatcaaattatacatcattctagatctttgttttactcattcatgtatgtatagttttgagtgtattatatatgaatatgtaga

SEQ ID NO: 368318 - DNA, 578 bp, Homo sapiens
atgctatgtgaaacaagtcagacacagaaagacaagtactgcatgatctcacttatatgtagaatctaagaaagtcaaacgcatgaaagcaaagtatagaatggtggttgccagggctgagggctaagggaaatgagatattgatcaaggggcacaaagtttcagctaggcagaatgaataagttctggaggtttcatgtgcaccatggtgactatggtaaataacactgtactgtatacttgaaattttgtgacagtaaatattaagtgttctcaccaccaaaaaaacggtaactgtgaagtgctgattatgttaattcactggattgtggtaatcattccacagtgcatacatacatcaaaacgtcatgtcgtacaccttaagtatatacaatttttatttgtcagttatacctcaataaacctggaattaaaaaactgaaaattctataatctcatctctgatcactgctctawccataggtaagcactggtatcaaattatacatcattctagatctttgttttactcattcatgtatgtatagttttgagtgtattatatatgaatatgtaga

SEQ ID NO: 368319 - DNA, 589 bp, Homo sapiens
tctttctgtcccagaccctcctcagaacttgactgtgactgtcttccaaggagaaggcacaggtaggatggagccccctccctggggctgggggagcagggccttcagctcagggcagggccaggtccctcctcatcctggactcaccctggtgatatgagactcccttgtagttgaacccaggcctcctccccatccttagcctctgtggccacctgagcacctgtcctcttccccccactcccctcagactcttgcacacacaccctcctcagccctgcagccaggacagggggaaatacatatagcaggagcagcctttgggcctcttatcttccatctcctgaatatgccacctaactcgtctttttattttacccaatagttttgagctacgttcttttggatacatgctataatcacgtgggcaaaaattttaaattcacagtaaaatgtgtccccagaatcaaccagggtctgtccaggctgtcctgagccttggtttgtgcacctggaagatctcagaggtggtttgatgtcagyagtgagactgtttgcaccctcttctagggatgtgtgtgattccact

SEQ ID NO: 368320 - DNA, 479 bp, Homo sapiens
catggggttcgcatgtctcagatggccctgaaggtactgatccaggctctggtgctcctggaaggcaagactcagattctgctccatctcctcccatctctgggcgggtctctggcatctctggcccaygagggtcaatctgtgtggaggggacaagctctgagcatgtgtgggtctgaggttcctcttccatgcagggctgaggtctcctgctcctccccagcttcctgtccggccctgtagtccttcccctccactcccttcctcttttctgctcacacaggaagccctggaagctgcttcctcagacatgccgctgctgctactgctgcccctgctgtgggcaggtgagtggctgtggggagaggggttgtcgggctgggccgagctgaccctcgtttccccacaggggccctggctatggatccaaatttctggctgcaagtgcaggagtcagtgacggtacaggagggtttgtg

SEQ ID NO: 368321 - DNA, 550 bp, Homo sapiens
gtacctgaaaaatattaaaacctacactgttaaacaggaggaaagacaataagctcagttctggaaatgctgaatggggcatgacggtgggccacattgggaggaggtgtctgcaggacagactggatgccaggatgccccatcactcrccggggaggctgaccctgtggtagggtgggtgtcattcctgcccactgctgtcctggctgctttcctcctgtgggtcttcactctgatgggagacaccagggtctttgagcctggttttctcaggctgtggggccattgttatgagcctggaatgagggactttggcaggtaaagggtgggattaatccaggagccctcaaacaagacttagtcacaaggtctccctctacctcccactccttggacatctgagatcagggccctggaatagacccacgcctatcccagtggccacaggctggattctgtacatcatcacaccccctgccctttctccagccctcacagcccctccaggacccttctacaccaggtccatcctcttcacctctggcccatg

SEQ ID NO: 368322 - DNA, 580 bp, Homo sapiens
tacatctggaagtgaaaaggcaaaaacacgtgaacttaaaactcactgacagcccatacacaaagaagaaagagaaaggaatcaaatcttatcactacaaaaaaaaaaaaaacatcagccaaccacaaaaagaaacaataagaggggaagtaaggaaccaggaatatataaaacaatcagaaaacaatcaatgaaatgaaaataacctattaataataatgtgtatgtaaatggattaaattgtcccatttaaaatatatggactgcctgaatgaatgaaaagaaaatctaractcagcttgttggggtgatcagatccaacactaggccgtgggggccacgaagtccagcggagtcaaaggaatgagacaagacaagttaatagtacataaagtgagtccagggggccgacgctagtatggaggctgtgaaggccccgagctctgggagcccacactatttattggtaatcaaacaaagaagcaggtggtgaggacgtgcagaagtggggatagacaagtgagaacgtgaggactttggggtagaaaggtagcggtgcatcaagcatagctgtgacggt

SEQ ID NO: 368323 - DNA, 580 bp, Homo sapiens
tacatctggaagtgaaaaggcaaaaacacgtgaacttaaaactcactgacagcccatacacaaagaagaaagagaaaggaatcaaatcttatcactacaaaaaaaaaaaaaacatcagccaaccacaaaaagaaacaataagaggggaagtaaggaaccaggaatatataaaacaatcagaaaacaatcaatgaaatgaaaataacctattaataataatgtgtatgtaaatggattaaattgtcccatttaaaatatatggactgcctgaatgaatgaaaagaaaatctaaactcagcttgttggggtgatcagatccaacactaggccgtgggggccacgaagtccagcggagtcaaaggaatgagacaagacaagttaatagtacataaagtgagtccagggggccgacgctagtatggaggctgtgaaggccccgagctctgggagcccacactatttattggtaatcaaacaaagaagcaggtggtgaggacgtgcagaagtggggatagacaagtgagaacgtgaggactttggggtagaaaggtagcrgtgcatcaagcatagctgtgacggt

SEQ ID NO: 368324 - DNA, 631 bp, Homo sapiens
cacatctttatcaaacacatattttacaaatattttctcccactttctggcttgtttttttcttaacaatgtcatctgcagaaaagtttttaatcttagtaaagttcagcttaacaattttcctctcatggactctgctttttggtgctgtatctaaaaaatcacggccagagccaaggtcacctagattttctttgataatatcatctaaaagttttacagttttgcattttacatttaagtctatgatccactatcagttaatttttgtggaaagtataaggtcggtatctaaattcatttttttgcaggtagataccaagttatcaagttccagcagcattttttgaaaagactgtctctttattgaattgcctttgcaccttttgccaaagattagytgattgtatttgtgtagttctatttattagctctctatcctgtttcattgatttatttgtctcttcttttgccaacaccatactgtattggttacggtagtttatgaagccaggtagtgtcactctccaactctcttattctccttcaataatgtgttagctattctgggtttttccccttccatgtaaactttagaatcagtttcctgatagccacaaaataatggtgg

SEQ ID NO: 368325 - DNA, 474 bp, Homo sapiens
gttactgaactatgttttataaagcccacctataaactgggtagaattcagtttagattaattattttataaaattgaatttggacattctataggtacatataatgttctacaccttcttaacttgttgcctgtgtaattagggaacttcactaagctttattcattccacatgtatttgttgaatacctggcatgtgctaagtcctatgctaagagcctgttttctgacatcaatgtgagcataacaatacctattttgcaggattattgtggtggtgtatataaaatgtttaccaaagtccctgatacaaaggtgttcaataaatggttacatacttttttttttaataaragcctgctattgtttgcctagcttgttgtcactctgttatccatttggtcttttgcattttttgcattgtaattaacagtagaaatgtaagtgggagaatagggaacttgtcttatttgt

SEQ ID NO: 368326 - DNA, 616 bp, Homo sapiens
aaaaacaaattaaaaaatttagaaaagtctaacaaatccaaatatrtagaaagaataattcatcacgaccaagtggactttcctctgaggaatgtaaaatcgttttaactttatataatcagttaatgctgagtaacataaacaaaaatggtggagtagagaagtcccaaagtccatccctccacaaaaactggcaaaaaatttgaagatcgagttttttaaaacttgaaactaatcaaaagcttacagcaaccagggaaatatttaataataattaaataaaaccttgaatctctgtaaaataactttgtaacactttaacttactcaggttttcctcatttcccatcttggtggtggttttaaagacagctgacattccagctacaggtacatagtacaagtgggagcagcatggaccttattcccaaagaactgtggctttgacctgtctggtgcttccatgaagtattacataaaaggcttgccattagtttgtttaactcagaactttctcacagatgagatggctaccctggaggtatagtttggaaacatttaaaagcaaatgtttttattgctgccacctggggaaaggcataatagttggggcaaac

SEQ ID NO: 368327 - DNA, 553 bp, Homo sapiens
ttgaaagtgagagacaactcttcctttcacttgaatatcgagaggcgattgtaggcttattaattggcctaatttcaatattgttgtgtttcagggaatagagaggactgaggagagggagagagacaggcaaatggctggctggtagagcagttagaacacacaactcttatcaattaggttcattgtcatttatgggagaggtttgtggcactccaaaataattataatagtaacatcaaaaatcactgaccacaggtcactgtaagagatataacaataatgaaaaaggttgaaatattrcaagaattatctaaatgtgacacacagatatgaagtgagcatatattgttagaaaaatggcactgacagacttgctgaatactgggttgccacaaaccttcaatttgcaaaagatgcagtatctgcaaagcacaagaaaatgaggtatgcctgtatgttctatgcactgggttaaatgttgacaatcaaaaactaattatgccatttactgaggatttatatgacaggcattatagtaaatgtttagcat

SEQ ID NO: 368328 - DNA, 534 bp, Homo sapiens
gaggggccgcaacggtgacgactgtggcagagaaggcccggaggggctctgcgttctgtagtggcgctgcttgggcccktggcggattgtaagctgctggttttgcggctgggaagagcggcgagagggttcggcatttttcgtcgggatccccgcaaggatgagtgctgccagagagtctcacccgcatggggtgaagcgttcagcctccccagacgacgatgtaaataataatggcggagtggctgagggttgaggcctactaaagcctggagtaggccgggaagggtggttggaggaggacgcgcctgaggtggcctgcagcgggagagcccagggaagaaaccagaagaatgagtgggaaatgcctcccttaatctttatgagggtcagaaggtttgaagaggcccacacgctgagagccggagacctgcgtaggaagggggattgaggaaggaaattctgagagggtcgaggagtgaaagagcttagtcaagggatttcgtacgtgcgttttggggggccgatgagagt

SEQ ID NO: 368329 - DNA, 586 bp, Homo sapiens
atttctatctagacatttgtagtggattgaatagtgtcccttccaaaacaaaaatacggtcaagtcttaaccccgataactgtggatgggaccctatttggaaatggggtttctgcaaatgtaattaaattttaaatcttaggatgagataattctggatttagggtgggccctaaatctggggactggtgctattataagagaaaggagacagtgatttgggacacagagacacaacggagaaggccatgtgaggatagaagcagagattagagcaatggagccccaagtcaaggaacaccaaggattcctgagagttagaagctgggagagaggcaaggaacagattctgcctcagagcctccaaaacaacacaaccctaccaacagttgcttctaagatagcttgttatcaaaaattacattttaaracaattattttcatatttatattttaataaaacatttaaagcaattatttcatacaaaaataaactgcatttttttatatactagcagtgaacccttggaaattaaatgtaaacatttccaatatcataaaaaaaccggctgggcatggtggctca

SEQ ID NO: 368330 - DNA, 535 bp, Homo sapiens
ctttctagttgtgtgtcttcgggaaaaaaattacctaatctacatgtcacttccttcatctacaaaatagtgataacattaacatctccatggggctgcgataagcaccaaaaataaaaaaatatggaaatgttttactaaatgtaaaacagtctacaaatgtcattaagctaaacagatgcacagaaaaaataacaccaatgagtaaataaacaccaaacaaatttctaggcagcaaacattttaggagttcaaaagatggagaggcagtttcctaggccgatttattgcttcagarggtagaagcaacatatgtaataaaatgtagagatggagacatatacttaatgctgtattttaaatttggacttccttgacactatttctagaaatgttaggccctgcagctatttcattaatttttttttctaataagtttgagatgactgtgactgtggacgtaatactgaaaatataaactccacaaagtatgacctgattctatccatttaatctttcccaaagctattacaaa

SEQ ID NO: 368331 - DNA, 535 bp, Homo sapiens
ctttctagttgtgtgtcttcgggaaaaaaattacctaatctacatgtcacttccttcatctacaaaatagtgataacattaacatctccatggggctgcgataagcaccaaaaataaaaaaatatggaaatgttttactaaatgtaaaacagtctacaaatgtcattaagctaaacagatgcacagaaaaaataacaccaatgagtaaataaacaccaaacaaatttctaggcagcaaacattttaggagttcaaaagatggagaggcagtttcctaggccgatttattgcttcagaargtagaagcaacatatgtaataaaatgtagagatggagacatatacttaatgctgtattttaaatttggacttccttgacactatttctagaaatgttaggccctgcagctatttcattaatttttttttctaataagtttgagatgactgtgactgtggacgtaatactgaaaatataaactccacaaagtatgacctgattctatccatttaatctttcccaaagctattacaaa

SEQ ID NO: 368332 - DNA, 453 bp, Homo sapiens
ttcatctttctatagtttccacattctttgtcatgtgactttgtagtactccctctaatgtcaaccactttattttcctgccccattgatactgaggctgggaatgtgaattgactgagacaacagaatgcaggcagaaagaagtgytgggtactaattgtgatcctaagccttaggagtcatccactgtttctactagacccgcttatgcttctgctgctgccatgagaagcacatgtattgggtagcttgttatgccaaagataaaaaacaaatagagcagatcgatatccaacctgactctgggagccagcaccatccaatcctagtgtaggcctgtcaaactcgacttgatctcaaacacaagagagaataaatgatttctgttttaagccactgagttttgggatggtggttatacagcttattatgctgatagctaaccaattcaca

SEQ ID NO: 368333 - DNA, 640 bp, Homo sapiens
gatacagtattttgtctcagtttgtttttactatgctaagccaaaatttagtatatatatttgaaccttaacaaatatttagaaaatattatatatgtatatctcaatatatatacacacactataaacatayaatgtgtgtgtacatatatatgtgtatattcatacaaaatttagtgtgtgtgtgtacatagatatatatgtatatacacacacatagacacacacactttaagtttataggctatttttgctggtaaagtttcctgaacactatgtaggtagtaactataaaaaatataaaatttgttttttttcctgaaaggtttattgtttgcacttctagatagtgaaaaatgaaaactatggaaacaatgactgcccaaggaacaaaacatatacacaaacctttgatttagtaaccatagccaaactctgtggtagctcacttaataaagtggttacagtcattttggggggctccccagggtgaaatgttccactttttatagctttgtatataattaaaaatctgctataactatgaccttgagtatctcctcaaaaaacatataattaaataaccagaatatctaataaataacagctgcaaggtaagcaacagaaaacgccgtctgaa

SEQ ID NO: 368334 - DNA, 396 bp, Homo sapiens
ccctcagatggtctttgtgtttctgcactctgtactgggacaggaagggtggaagctagggtaggaagggctgtgttcctgcygctcctgccattgctgctgttgatcccaactctgcagccatggctgtaacactatcttctcctgacctccacctgatgaatactgtatcaggagaggctagtctctgcccatgaaagtgcccatatgtgtgttttctcttcattcttctcagactatgctttccttgccttcctattttgatcctaatccatgccttctggaaagaaagcctgacccttggccattcactcaaagcaacagggaattaattgtctactaatagtttcagaagtgaggtttttgcaccttaagatctattggtgagtagaagaa

SEQ ID NO: 368335 - DNA, 642 bp, Homo sapiens
agtctctgcccatgaaagtgcccatatgtgtgttttctcttcattcttctcagactatgctttccttgccttcctattttgatcctaatccatgccttctggaaagaaagcctgacccttggccattcactcaaagcaacagggaattaattgtctactaatagtttcagaagtgaggtttttgcaccttaagatctattggtgagtagaagaaaatactggacatttaatttgtatatttatcaactaacccatttataatttccatccattttataycttatgttatacaatatgacatatagtttataaatatacaaatattgagtgtgaccaaaaaacattttttaaaccatgatgcacaccactaaaaaagtttgaagcacctgctttgagataattcacctgttatcccatgacacagatcaatgacctctgtcaaaatcccattttaaaaaattccagtttttaaaggaacatttggatgcctgctatcatttgtctagagcagtcccctaggtttgaaaaccttatggcctcatggttacaatgtccagtccaaatgactctaggcattcactgtgaaatgtttgatctccttaactctgtaatttgttttggggatttggttttttaaaaaaa

SEQ ID NO: 368336 - DNA, 642 bp, Homo sapiens
agtctctgcccatgaaagtgcccatatgtgtgttttctcttcattcttctcagactatgctttccttgccttcctattttgatcctaatccatgccttctggaaagaaagcctgacccttggccattcactcaaagcaacagggaattaattgtctactaatagtttcagaagtgaggtttttgcaccttaagatctattggtgagtagaagaaaatactggacatttaatttgtatatttatcaactaacccatttataatttccatccattttataccttatgttatacaatatgacatatagtttataaatatacaaatattgagtgtgaccaaaaaacattttttaaaccatgatgcacaccactaaaaaagtttgaagcacctgctttgagataattcacctgttatcccatgacacagatcaatgacctctgtcaaaatcccattttaaaaaattccagtttttaaaggaacatttggatgcctgctatcatttgtctagagcagtcccctaggtttgaaaaccttatggcctcatggttacaatgtccagtccaaatgactctrggcattcactgtgaaatgtttgatctccttaactctgtaatttgttttggggatttggttttttaaaaaaa

SEQ ID NO: 368337 - DNA, 576 bp, Homo sapiens
ccatagtatatttcaaaacaaaaaaaataattttggtacaatacaacttagatacagaccttattcagattttatcagtttgtactttttttatatatattaaattttatcacatgtgtagaattgtgtcaccccatcaccattgttacagcactattctgtcaccacaaagaaacccccttgtgttatattttaatagccatacctttcatccaattttaacctctggtaaccactgatgggttctctataattttctcactttgaaaatgttatatgaatgctatattgttatataagtaggctgctttttatctcccctcagctaaacgtccttgaggtctatccaagttgctggtggattaatagttattcctcttgaattgctgagcagaatcccaggtatgaatgtaccagtttgtttacccattcattcactgaacgacatttctgttccctttacactcctaaatattgatgactccaagtcgcttctgtttaaatgtattatatagacattttccaygttagaaattcaaacaaaggcatgtatttacttatttattcacttagaaa

SEQ ID NO: 368338 - DNA, 629 bp, Homo sapiens
cattttccccagctacgtgttttcagattgaataccttggagccaaggggttcctctaggcctacccctacagtacagagaaaactgagtgggcaaacttctgctcctcctcgcttgccttcaaacagaacttctcttcctttattggtttgatttatcaaagttctgtggaatagttctcaaatgtgtacacttcccacagtttccttctaagtttgctctttcctccctcatacttttcaaaccccctcactccctcactccctcacttttagccaatgactctaagtttctctttactgagaaaacagaatctatgmggctttaactccctcttcaaataacatctccaaaacacagaatgtcatgggctccacccaccttctccttctcctttcctaacaaaggccattccctcgcatgcttctgaatcccactctttggctttgcaaggtctttgaatttctgttcatcctctctctttctgatctagtatctccaatcattaaaaaaaattcctcttaacctcacaaccttctccagctattgcccaatatctcaattccttttcagagaaaaaagtctttaaagacttgcttacatgtgctgcctgccttatcattccacat

SEQ ID NO: 368339 - DNA, 539 bp, Homo sapiens
atataagatagatttgttcctaatgctattcaggtgtagattttagtttcttctgaatggaaattttaagaattggataagcgtaggtaataaactatgagtctgttaggactcattgctgtttgtgtagttayaatcagtgttattgttatattaataaatacctaaaattcttttacttttacataataaccactgtcagaacattttcttcctgtagaattttactcaataaacaaaagcaatatatttctagaattgaaactgtttgcactaggacaaaaaaacatttttggtaacatatgtaatgattaaagaggatttttttagtttttattccttctattccagttgccttcaaaatattttatcctgagatttcagttatttttgaactctttcctagaactcttataatctccttgagaaggagggacaaaaatgcaaatagacccaacacttaacctcctaggtgctgccatcaccaagccacggtcagagctcagtaacatcattgcagtgaattttaaaaagtagca

SEQ ID NO: 368340 - DNA, 590 bp, Homo sapiens
tttaatttctgaattcaatattgtaattaagaattatgagcagcaataataatggtaacagcaaaaataacaatcactgccatttattgggcatttttatgtgttggacaatgccaagaacttcatgtgcattatcaatgtgcattatttcatttaatcctcacagtaaatcttccaggtaggyatgattcttgccctcattttaaaggtcaataagttgacacttattgaggtaaaataaatttcccaagtaagaggccagaattccaaaccagagttttctcattccagaaccaattctatactgcttcttctgaatcagtattttttatagcgaatatattttattcattgtttttgacagacttgcaaaggaaagcagaaatacacacgcaatcatgcatggagccatctatttgtgccagcctttttatgtgtctagagggtctcagctggggatgccactgtagtctagagatgtttgaaagcaaaatcggtgttttgtttgctgtgatgaatggagggtaccactagcatttagtagagatgaaccaaggagtaggtggagctgtgtttgggcacaaatttca

SEQ ID NO: 368341 - DNA, 590 bp, Homo sapiens
tttaatttctgaattcaatattgtaattaagaattatgagcagcaataataatggtaacagcaaaaataacaatcactgccatttattgggcatttttatgtgttggacaatgccaagaacttcatgtgcattatcaatgtgcattatttcatttaatcctcacagtaaatcttccaggtaggtatgattcttgccctyattttaaaggtcaataagttgacacttattgaggtaaaataaatttcccaagtaagaggccagaattccaaaccagagttttctcattccagaaccaattctatactgcttcttctgaatcagtattttttatagcgaatatattttattcattgtttttgacagacttgcaaaggaaagcagaaatacacacgcaatcatgcatggagccatctatttgtgccagcctttttatgtgtctagagggtctcagctggggatgccactgtagtctagagatgtttgaaagcaaaatcggtgttttgtttgctgtgatgaatggagggtaccactagcatttagtagagatgaaccaaggagtaggtggagctgtgtttgggcacaaatttca

SEQ ID NO: 368342 - DNA, 646 bp, Homo sapiens
tgaggtttcttactgcttatggggtcccagtattagatcctagccctgttggactggaggagggcgtccctgtgtcctgctccactgaaatccaggcagggaggagcacaggagagtttgtgcctccagcttacaggctgctctgtcccaagtgcaagggcagtaaggactatgcatggccagatttttattccaaattcattgcgtgtagactaagtttctcttttgtgggaatgagtaaaggagcagtgataggctaaggatatgaggctagtggagttctctccacatgaaaggaaatgtcaggagtggcaggaaaggatttcccctctccttccccgctactgtgaccacattggttgctctgcattgctgcaaccttaacctaagagctgtgctctttattgcatgatatgtatgaggttacaaatgcttgttctrtgtaacgatgtcactgttattctagttttctgaattgaatatctggtaccataaatgtgcagtgacaccattactgttggtcatagtatgaacaactttatccattgcctaccttcagcatcaggagtggtcatgccgtgcatttgctaataaaattataggaagtttgatattttgcaaataaagttatgaggatattttgtcc

SEQ ID NO: 368343 - DNA, 600 bp, Homo sapiens
ctgttggtcatagtatgaacaactttatccattgcctaccttcagcatcaggagtggtcatgccgtgcatttgctaataaaattataggaagtttgatattttgcaaataaagttatgaggatattttgtcctctaaaaaagtcattggtaaatacacagtaaagtaatagcatgtaatttgattcctaaaatgttcccagtagtgggacattctggagagcctataaacaagaaacatcttgggatagtgtcatgtggttttatttgaacctaggtctgagtacatataatacataactgctattttcaagtaaatatgtccctgacaattttcatatgaaccgtttaaaaatctgaaattgaaatctctcacaagcattttcgttaaggtagaaattctctcagtatgatgtagtaataataataataaacagaaatagacagaaaaaaggtgcatgagtcctttttttaattrtttgaagccctttatatgtattgtttcttttgatccacaaaccaaccctttgaaatatatatttagccctattatcagataaagatacttaaatttagagaggttaagtaatatactcaaggtc

SEQ ID NO: 368344 - DNA, 636 bp, Homo sapiens
tcaaattctcgagatagtaaacatacacaaaatgatctttgcagatagtttgatggctgccaaggtttgttggggaaatattaaaagataatattgaataacaaaaaggataaatgatcgaaggccgttggtgccaggtcaagaatttgaacttatgctattctgtaatagggtcacactaaagatttttaaactaggaatgacaattttaaactaggaatttaagtaggattaactaggaattttaaactaggattttaaactaagaatgacaaataaaaatatactttttggaaatgttaatccagtggcayggtaaacaaaaattagactgaaaggataattggaaaccagatagatgccaattgcaacaatttagccatcaagtaatgaaagcctttgattgggatgatgatagtggcaatgtaaggggcaatgctataccttctgaaaaaataatcaatgcaatttaaggatggctttggaagaaaaactgaaagaaagtgctataagtcagccttgactttccacaactagaaaagaaatggtctgaaaaatcataggacatatatatgttccagttctcagaaggaatttttatatataatagataacattaatatattaatttaatta

SEQ ID NO: 368345 - DNA, 636 bp, Homo sapiens
tcaaattctcgagatagtaaacatacacaaaatgatctttgcagatagtttgatggctgccaaggtttgttggggaaatattaaaagataatattgaataacaaaaaggataaatgatcgaaggccgttggtgccaggtcaagaatttgaacttatgctattctgtaatagggtcacactaaagatttttaaactaggaatgacaattttaaactaggaatttaagtaggattaactaggaattttaaactaggattttaaactaagaatgacaaataaaaatatactttttggaaatgttaatccagtggcacggtaaacaaaaattagactgaaaggataattggaaaccagatagatgccaattgcaacaatttagccatcaagtaatgaaagcctttgattgggatgatgatagtggcaatgtaaggggcaatgctataccttctgaaaaaataatcaatgcaatttaaggatggctttggaagaaaaactgaaagaaagtgctataagtcagccttgactttccacaactagaaaagaaatggtctgaaaaatcataggacatatatatgttccagttctcagaaggaatttttatatataatagataayattaatatattaatttaatta

SEQ ID NO: 368346 - DNA, 575 bp, Homo sapiens
ccattaaatcatattttcagccttctttatatctttaccattaataattcattcatggatgtggttttatatatatatatctatgcaaagattaatttttcacctattctgtatcactatagatgtattggtaaaactagacagaacatttgtaaaaggcattgccaatagagattgaaagtagctctggccaggcgcggtggctcacgcctataatcccagcactttgggaggctgaggcaggtggataatgaggtcgggagtttgagaccagcctgaccaacatagtgaaaccccatctctactaaaaatacaaaaaattagctgagcgtggcggcrggcacctgtaattccagctacttgggaggctgaggcaggagaatcacttgaacccgggagccggaggttgcagtgagccgagatcttaccactgcactccagtccaggcaacagtgtgagactctgtctcgaaaaagaaaaagaaagaaaagaaaagaaaagaaattggcccttagtctagaattagcatatgtgttaaaaaaattcagggtaagaacctgataattttaaaaggg

SEQ ID NO: 368347 - DNA, 494 bp, Homo sapiens
ttgacctccctgtctccaggcttgtcaccagtcatgtcgtctacagaggtattgtgagtgctttttcacattgagatctacccttgtctttttcctttcttaaaaatttttctccagcaatccactgtgtagagaatgcaggtgacactgaacagtgtgtggattaggggaaccaaaccctcgtgcactcagaaatcratgtataacttttgactcccccaaaactcaactactagtagcctcctattgactggaatccttactgatattataaacagtcaattaacacatatattgtatgttatatgtattgtatattgtatttttactgtaaagtcagctagagaagagaaaatgttattaagaattccataatgaagagaaaatatatttactattgttaagtagaagtggatcataataaaggtcttcatcctcctcatcctcacgttgaatatgctgaggaaggagaaggagagagaagaaagagaagg

SEQ ID NO: 368348 - DNA, 616 bp, Homo sapiens
tactagtagcctcctattgactggaatccttactgatattataaacagtcaattaacacatatattgtatgttatatgtattgtatattgtatttttactgtaaagtcagctagagaagagaaaatgttattaagaattccataatgaagagaaaatatatttactattgttaagtagaagtggatcataataaaggtcttcatcctcctcatcctcacgttgaatatgctgaggaaggagaaggagagagaagaaagagaagggcttggtcttgctgtcttaagggtggcagagacagagaaaatccatgtgtaagtggactggtgtacttcaaacctatgttgttcaagggtcaattgtagtccaaataccttaacatgttttaactagcctttcagaacgaatgtgtcacagttactggatgtgagcctccttggattgatttttttttcaaagcttcctgggagattcaggtatgattcaaggttcagaaagctgagttagataggtcacaataagtttatattgtttttaaaagataaattagaactgaaattacaaaattmgaaaattctcatgtgaaacttgcaaaccctgagacctgcccctgcaaca

SEQ ID NO: 368349 - DNA, 532 bp, Homo sapiens
tgcccctgcaacaagtgtagaaacactactctgtcctctaatgaaagacatttgaaggtgcataaactaaagagtgatatggtcacattagataataataatactactaataataaacarccctggggacagttttaatggtagatgctgcattagttcatttccatactgctataaagaactgcccaagactgggtaatttataaaggaaagaggtttaattaactaacagttcagcaaggctggggaggcttcaggaaacataatcatggtggaatgtgagggggaaaaaaggaaccttcttcacaaggcagcaggaaggagaagtgctgagcaatagggaaagagccccttataaatctgtcagatctcttgagaattcactcactattataagaataacatgggaggaaccagccccatgattctgttacctccacctggtctcttccttgacaggtagggattacagagatcatgggtattacaattcaagatgagatttgggtggagacacaaagcctaaccgtat

SEQ ID NO: 368350 - DNA, 532 bp, Homo sapiens
tgcccctgcaacaagtgtagaaacactactctgtcctctaatgaaagacatttgaaggtgcataaactaaagagtgatatggtcacattagataataataatactactaataataaacaaccctggggacagttttaatggtagatgctgcattagttcatttccatactgctataaagaactgcccaagactgggtaatttataaaggaaagaggtttaattaactaacagttcagcaaggctggggaggcttcaggaaacataatcatggtggaatgtgarggggaaaaaaggaaccttcttcacaaggcagcaggaaggagaagtgctgagcaatagggaaagagccccttataaatctgtcagatctcttgagaattcactcactattataagaataacatgggaggaaccagccccatgattctgttacctccacctggtctcttccttgacaggtagggattacagagatcatgggtattacaattcaagatgagatttgggtggagacacaaagcctaaccgtat

SEQ ID NO: 368351 - DNA, 532 bp, Homo sapiens
tgcccctgcaacaagtgtagaaacactactctgtcctctaatgaaagacatttgaaggtgcataaactaaagagtgatatggtcacattagataataataatactactaataataaacaaccctggggacagttttaatggtagatgctgcattagttcatttccatactgctataaagaactgcccaagactgggtaatttataaaggaaagaggtttaattaactaacagttcagcaaggctggggaggcttcaggaaacataatcatggtggaatgtgagggggaaaaaaggaaccttcttcacaaggcagcaggaaggagaagtgctgagcaatagggaaagagccccttataaatctgtcagatctcttgagaattcactcactattrtaagaataacatgggaggaaccagccccatgattctgttacctccacctggtctcttccttgacaggtagggattacagagatcatgggtattacaattcaagatgagatttgggtggagacacaaagcctaaccgtat

SEQ ID NO: 368352 - DNA, 365 bp, Homo sapiens
tgttacctccacctggtctcttccttgacaggtagggattacagagatcatgggtattacaattcaagatgagatttgggtggagacacaaagcctaaccgtatcagatacatagagtgcagagctaataagaggaagttccattaagaggcctttgcaataattccggtgttcagcgctacttatataaagacagataagkcctggggaaatcattctggagcttgtctaggaaaggagagacaatcacaatacctggcagtgagcatgggagagacagataccaggggtaatggcagcgctggtgagagagacaggttgcagataactaggaggtatctaccaaggttattaaggtataaaaa

SEQ ID NO: 368353 - DNA, 585 bp, Homo sapiens
cacaatacctggcagtgagcatgggagagacagataccaggggtaatggcagcgctggtgagagagacaggttgcagataactaggaggtatctaccaaggttattaaggtataaaaattagctgggcggcatggtgggtcacacctgtagtcctaactacttggggttgaggtaggaggattgcttgatcccaggagttcaaggttgcagtgagccatgatcatgccactgcactccagtctgggtgaccgagcaagaccccaactctaaaataaacttaaaaaatttaaaaactagcaaaattatgccatcaccaaagtacagtctctattagctaacaactgakatgaaagagaaaatgtgtacctcacacttagtgtagatttaagaaaaaaaaaaaacactgagaaattcaaatggcaaattcaaatatacttcctgtattttgccaaaggcttctgcttatacagccaaatacagctaatggttcattaaggcagtgaggtttgcaaattcatcaataacatgcttcatttaattatttgtgtgtgagaaaaaaatagctaagatatatggactctttt

SEQ ID NO: 368354 - DNA, 647 bp, Homo sapiens
ctaatggttcattaaggcagtgaggtttgcaaattcatcaataacatgcttcatttaattatttgtgtgtgagaaaaaaatagctaagatatatggactcttttaagagagcaaattatagtccccacctgtgaccagtgaacatttgtatcttagcctattttcaagctgcattttcatgttatggcattacagaataatgaccctggatcattaggaaaaagtttgatggcagtcagtatatgttgcatattgtaacacatttctcagctttcttacttagcaaagcattattttacttccttttagtctatgtatggaactgcttttgcttagttgtttattttaaattatttmgttatttatctaattaaataatttataaacctgtcacacaaaacaaaatctagttttacggtgacttttgtttcaccacataatttccccatctacctacttgctccctcccaggcaatcagcacctgaattctcatgctcacaattgctttcctttcctttttgaagaattttgttgcaaactgtgtgtataaaatgggtatcacactgtggataatctctctggacttactttttcactgagtgtgattttgctaagattcatccatagagttgctggttgcagtgtg

SEQ ID NO: 368355 - DNA, 647 bp, Homo sapiens
ctaatggttcattaaggcagtgaggtttgcaaattcatcaataacatgcttcatttaattatttgtgtgtgagaaaaaaatagctaagatatatggactcttttaagagagcaaattatagtccccacctgtgaccagtgaacatttgtatcttagcctattttcaagctgcattttcatgttatggcattacagaataatgaccctggatcattaggaaaaagtttgatggcagtcagtatatgttgcatattgtaacacatttctcagctttcttacttagcaaagcattattttacttccttttagtctatgtatggaactgcttttgcttagttgtttattttaaattatttarttatttatctaattaaataatttataaacctgtcacacaaaacaaaatctagttttacggtgacttttgtttcaccacataatttccccatctacctacttgctccctcccaggcaatcagcacctgaattctcatgctcacaattgctttcctttcctttttgaagaattttgttgcaaactgtgtgtataaaatgggtatcacactgtggataatctctctggacttactttttcactgagtgtgattttgctaagattcatccatagagttgctggttgcagtgtg

SEQ ID NO: 368356 - DNA, 500 bp, Homo sapiens
aataattttttttttcctgggaggggtcacttttcaagcactaaaacctcattatcttaaaggatctgggatatcctttaagttattctattttcccgacaagatataaagccacataaagcattcccaaaggatacagaaaaaaataactctcccttataatctccatatactttttgttttgcttcttggtaatactaatcamcctttctaaagagagtcacctcttcctttctagccaccatcagttcacctcccatttttcttctctataggtgttcccatgctcacatttcccagtctggtctacatttgcacaaagttttatacccagtagaactactaaaaatgatcaaatgaacagatttctttcctacttttgtttgtaattaagaactcaaaacaaatgcaattaacaaaaaaagacattcagagtaaagtcagggataagcaaaatgcttatgaataaatttaaattgccctgataaattcatggatta

SEQ ID NO: 368357 - DNA, 533 bp, Homo sapiens
tccctacattcctggggcaaaccagaatggctggtcaccatactagtgttagaagcggatttttaattttgtgctcatgagcatgttgtgcacttctaaacaagctgaaaataggcctgaatgatcaatgatcagtatatgtctaagtgttgaaagtagaatgtcctattctctttatataggagatattaccttatttaaactcwtttataagatatttctggactggaaagttaagtatcttaaaaatgataagaaactcacattaaaaatactaaaatgatttaattaaataatcctacaaattttttcaagaagattcatactacagctgaaattgatcaaactgctttaattttcaagtctccttagaaatggtacatgtttatgcaacaaaaaaaagtgagtacaaactgacatcagaaaatgagagcatgggatactcaaaataaatatttaagttatctatgaacttgggttatcctggaaaagcatagatgaaacaacattttaccatttttatactaataggt

SEQ ID NO: 368358 - DNA, 557 bp, Homo sapiens
tgctatcacttgccaagtgagtcatttattctaagcatgttatatatgttaattcactttacaacaaaaaacctgtaagaattaaacaacatctccactgtaaagattaggacactgaggaacacagaggttgtgtcttgtcaaggtcacagagctagtcagtggctgcatccaggactcacggaactagaatctatgtgttaaatcactctatcayattacctctcattaacagcaaataaataaatatatcatttcagggacagatatcttctatgaataaggataaagcactgttcaggaacatggggcaatggaacggggatatagtagtttagacaacagggtcagggaaggtttctgtgaggaagagatatttgaggaagaacctggatgatgaaaaaggagaacttttgagaaaatctgggtaaagcacatttcaggaagaaagagcaaagacttaaagcaggaagaaactaagagtgttcaaggaagaacgacaaagagaatggttagggtggctgaaagagtaatctagaagggctagattacgtaag

SEQ ID NO: 368359 - DNA, 557 bp, Homo sapiens
tgctatcacttgccaagtgagtcatttattctaagcatgttatatatgttaattcactttacaacaaaaaacctgtaagaattaaacaacatctccactgtaaagattaggacactgaggaacacagaggttgtgtcttgtcaaggtcacagagctagtcagtggctgcatccaggactcacggaactagaatctatgtgttaaatcactctatcacattacctctcattaacagcaaataaataaatatatcatttcagggacagatatcttctatgaataaggataaagcactgttcaggaacatggggcaatggaacggggatatagtagtttagacaacagggtcagggaaggtttctgtgaggaagagatatttgaggaagaacctggatgatgaaaaaggagaacttttgagaaaatctgggtaaagcacatttcaggaagaaagagcaaagacttaaagcaggaagaaactaagagtgttcaaggamgaacgacaaagagaatggttagggtggctgaaagagtaatctagaagggctagattacgtaag

SEQ ID NO: 368360 - DNA, 483 bp, Homo sapiens
ccagtttaaaaaaaaaaaaaaaaagatgttctgagttttcaactcccctgccaaagcaatggtaaaccccttttttctttctttctttttttttttgcagacagagtctctgtcatccaggctggagtgcagtggcattatgataatagctcactgcagcctcaaactcctgggcttaagcaaacctcccacctcagccttcctagtagctgggactataggagaaagtraccatgcctggctaattaaaaaaatttctttgtagagacaggatcttgctatgttgcccaagctggtctcgaactcctgggctcgagaaatccttccacctcggcctcccaaagtgctgggattacaggcatgagcctggcctgaaacattttttttaagtcaagttttaaggaggtactcccatcatccaaaatataacctaccaaaaacaagactccagggtttaagttggaagaatatccatgcaataat

SEQ ID NO: 368361 - DNA, 548 bp, Homo sapiens
aaataaattaatgcaaataaatgcttataacagtggcagtttaatacatactcaataactgttaagcattattttttataaaaatagtaagagccacaaattttgaaaaatgaatkaaaagttctggacttataatacctagctctgtttctcaatatctatgacattgggcaaggcctagagaggccttcgtttcctcatcatagatggtttagatgccatatatttccttaagattcttaaaacgtcttttttccttctcctagttaaaaaactcttgttagagcttaggaaacactggaaaactgaaaggcagcctggtctaagaggcaaaggactgaagcacatgttcaacttctgatttaagttttgagatattaattctgtgctgtcttatgcagccttagaccactctttgacaactgtgtctaggttggctcaacaaaattaaagattactacctaagccttatttttgccatcaagaaatggtttggggtgcagtgaaataaattcattaaagcaatttgatttttgctgaaataaaat

SEQ ID NO: 368362 - DNA, 548 bp, Homo sapiens
aaataaattaatgcaaataaatgcttataacagtggcagtttaatacatactcaataactgttaagcattattttttataaaaatagtaagagccacaaattttgaaaaatgaatgaaaagttctggacttataatacctagctctgtttctcaatatctatgacattgggcaaggcctagagaggccttcgtttcctcatcatagatggtttagatgccatatatttccttaagattcttaaaacgtcttttttccttctcctagttaaaaaactcttgttagagcttaggaaacactggaaaactgaaaggcagcctggtctaagaggcaaaggactgaagcacatgttcaacttctgatttaagttttgagatattaattctgtgctgtcttatgcagccttagaccactctttgayaactgtgtctaggttggctcaacaaaattaaagattactacctaagccttatttttgccatcaagaaatggtttggggtgcagtgaaataaattcattaaagcaatttgatttttgctgaaataaaat

SEQ ID NO: 368363 - DNA, 673 bp, Homo sapiens
ggattcctcaaacctgaatttaactgtgtttgtgagggtccagctcagggacagacattcagtaaaccctccaatgataactgatattgttgtttttcttataattacaactattggctttgttcaataaagcaatatttataaaagtaatttattagaatgagaagtacagaaaycaaaaatggaggggaaatttgaatgaagatacgatgtcagaaatgagggaaggaactctaaataatacttcggagcctgaactttggagttagacaagttgagttcacatgccagccctgctgcttatcagaatggggagtttgggcaaagtggctaacagcccatcgcctccacttcctcatcttcaaggctgccacttcacgagatattattatgaagattgaaagagataaagtacataagatgctagcccaatgctcagaataaatatttaataattacagctattattaaatcctggttatggatggaagagtggacttggtaaaagtccaagccgcagcaggtttgagaataaaataacctacattgactgctttgagtgtttatcagtttgtagacttcatttatatcaactttaaaaaggataatctctcttcctcaggcccactgtttttacactctgattataattaacttgcctcttaatgacact

SEQ ID NO: 368364 - DNA, 673 bp, Homo sapiens
ggattcctcaaacctgaatttaactgtgtttgtgagggtccagctcagggacagacattcagtaaaccctccaatgataactgatattgttgtttttcttataattacaactattggctttgttcaataaagcaatatttataaaagtaatttattagaatgagaagtacagaaaccaaaaatggaggggaaatttgaatgaagatacgatgtcagaaatgagggaaggaactctaaataatacttcggagcctgaactttggagttagacaagttgagttcacatgccagccctgctgcttatcagaatggggagtttgggcaaagtggctaacagcccatcgcctccacttcctcatcttcaaggctgccacttcacgagatattattatgaagattgaaagagataaagtacataagatgctagcccaatgctcagaataaatatttaataattacagctattattaaatcctggttatggatggaagagtggacttggtaaaagtccaagccgcagcaggttygagaataaaataacctacattgactgctttgagtgtttatcagtttgtagacttcatttatatcaactttaaaaaggataatctctcttcctcaggcccactgtttttacactctgattataattaacttgcctcttaatgacact

SEQ ID NO: 368365 - DNA, 560 bp, Homo sapiens
catgcccatctggcctagaatgtttaattggctataagcctttggctctcagtccctcggccataggggtcccaccaatggactggatggacctggggcaggtagccccagcaatgatataaaacaaaataaaactgtagccatagatactgtctctggcaaatttcgacccaaaaggaggtaatataaactaaaaaacaaaatcctaagccccactccctgactgaatggagccccttgtggccaaggggacccccacatacacaaaacccttaaaactgagatcctgaccgtgacaggatgagaggtcagacattccccattatacgcctcctttttgtggtctagacacaactgaccaacattaatgttaaaatgaagatcataaaactgacagaacagactctttgtgacaataagatctcatggatacccccaatgttttcagtctattttacaaggacttttttgaaatttggactcacaattttgacaayagcacttataatttattttatagtctggttagcaattatttatttcattttgaaacggagttt

SEQ ID NO: 368366 - DNA, 516 bp, Homo sapiens
attggtcagggcaagggtgatgaaatcatcacaatgtggaaatcaccttctttggtgagtcagctgctcgtggtgttcctccgctcagctgagtcagtggggtccttcagagcaactgatatcagtagttccactgttatacaggacctgaaagaatatctcaaagggaaaacttaatgtttcattawgttcaagttgttatctacagagcagttaacagaactatcatcttgtaacagagtcttacttgattctaggacagtaggcaacaaacaattattaaatatggtgaagcaggtcggagagcaagctacctaatgattaatgctgaacatgcagcaagcttggtttattttagtttctccttctcccttcttctctgattaattttataatattcagaagggttcctgtacacctaggtcaacttgaagaccgcaggtgtgtggaagtaagacatagatccaggatcaacgtggagacctcaggtgtgtggaagtaagacatagatcggaa

SEQ ID NO: 368367 - DNA, 592 bp, Homo sapiens
acacagctggcgaccccaggcattttaatgggagagacttctggctaaccccaggcaatctaatgatagagacacctgtttgacagcaggcattctaatgccagacactccaggccgagcccaggcattataatgacagagacatatctgcaacaacatgtattttaatgggagaaacttctggccaaccccaggcagactaataatagagacacctgtgtgacttcaggcattctaatggctcccaactgaccaaaaccattctaatgatagacacacctgggcgacaacaggcattctaatgaaagagacwgctggccaataccaggcagtctaataatatagatagcttggtgaccccaggaattataatggaagaaactcctggttgaccacaagccgttcaattatagagacatctgggccaccccaggaaatctacttggagagactcccattcgatcccaggcattctaatgatagatacatctgagagaacacaggcattctaatgggagagtctcctggctgaccacaggcatttcaactggagagattcctggccaatcccaggcagtctaatgatagagac

SEQ ID NO: 368368 - DNA, 547 bp, Homo sapiens
tagttaaataaattcattagtacattaatagacatgattggaatagggaaaggggctatttcattctagtccacacttgaagattcacaaatatggtggaaactaaacaaacaatacactccctttaaatgcctacagtaaaaaaaaaaaagacctccaatcagtaacctaactttatacctagagtaattagaaaaagaataactaagccaaaagctagcagaataaaaggacataataaagattagaaataaaatacagataaaaataaaacaatggagactaaaataaaagagaaaatagaaaaacagtagagagaatcaaccaaaacaaatgttgactcattggagattggaaaaattggcaaatcttttagccacactgaaaaagacaaaaagggagatgacagaaataactaaaaagaaataaaagtgcagatattatttacaatcctcaaagaaacaaaaagaattaaaagagaataccawgaacactcaaaagttaacaaattagataacccagataaacaaatttccagaaacgtaaa

SEQ ID NO: 368369 - DNA, 488 bp, Homo sapiens
agccatcctaatactatgaagtggtatctcattgtggttttgatgtgaatttctctaatggccagtggtgttgatcatttattaatgtgcttattttggtcatttgtatatcttatttaaagaaatgtctatttaagtttctctaccttttccttaattggccttttcaattcttttagttgagttttargaattttctaatagactgtctattaatccgttatcaggtacataatttgcaaatcttttatttcattcagtgggtgatcttttaatcctgtttatcgtgtcctttgaaacacaaaagttttagatgttgataaagaataacatctgattttttcttttttacctggttttggtatcatatttaataaatcatcaccaaatgcaatatcctaaggtttttaattatgttttcttatgagaggtttatagttttaactcaaatataggtctttgatgcattttgatttaatttttgtatg

SEQ ID NO: 368370 - DNA, 632 bp, Homo sapiens
acttttagagtgcctggagtccgccaggagtctctcccaatatattagctcgggtgggctggtagtctatctcataagaatgcttggggtcgcccaggtgtctwtattattagaatacctggggtcagctggatatctctccccttagaattactggaatcacccaggtgtctctatcattacaccacctggggtggccaggagtctctccaattaaaatgcctggatttttctgggcctctctcccattaaagtgtctggggtcgctgaggtttctctatcattaggccacctggggtccgccagaagtctctattattagattgcctgtgattggctagaaatatttcatcagaatgcctggggtcgtctgagtaactctataattagactgcatggcttgccaggcatctttcttgttagaatgcctgggttgcccagttgtctctatcattaggcactctggggttggccgaaagtcactcccattagaatgctggggtcgcccatgagcctctatcattagactgcctgacgttggccaatggtctctcccattagaatgcctggggtggcccaggtgtgtctatcattagaatgcctggggtcacccatgtgtctctataattaaa

SEQ ID NO: 368371 - DNA, 632 bp, Homo sapiens
acttttagagtgcctggagtccgccaggagtctctcccaatatattagctcgggtgggctggtagtctatctcataagaatgcttggggtcgcccaggtgtctttattattagaatacctggggtcagctggatatctctccccttagaattactggaatcacccaggtgtctctatcattacaccacctggggtggccaggagtctctccaattaaaatgcctggatttttctgggcctctctcccattaaagtgtctggggtcgctgaggtttctctatcattaggccacctggggtccgccagaagtctctattattagattgcctgtgattggctagaaatatttcatcagaatgcctggggtcgtctgagtaactctataattagactgcatggcttgccaggcatctttcttgttagaatgcctgggttgcccagttgtctctatcattaggcactctggggttggcygaaagtcactcccattagaatgctggggtcgcccatgagcctctatcattagactgcctgacgttggccaatggtctctcccattagaatgcctggggtggcccaggtgtgtctatcattagaatgcctggggtcacccatgtgtctctataattaaa

SEQ ID NO: 368372 - DNA, 632 bp, Homo sapiens
acttttagagtgcctggagtccgccaggagtctctcccaatatattagctcgggtgggctggtagtctatctcataagaatgcttggggtcgcccaggtgtctttattattagaatacctggggtcagctggatatctctccccttagaattactggaatcacccaggtgtctctatcattacaccacctggggtggccaggagtctctccaattaaaatgcctggatttttctgggcctctctcccattaaagtgtctggggtcgctgaggtttctctatcattaggccacctggggtccgccagaagtctctattattagattgcctgtgattggctagaaatatttcatcagaatgcctggggtcgtctgagtaactctataattagactgcatggcttgccaggcatctttcttgttagaatgcctgggttgcccagttgtctctatcattaggcactctggggttggccgaaagtcactcccattagaatgctggsgtcgcccatgagcctctatcattagactgcctgacgttggccaatggtctctcccattagaatgcctggggtggcccaggtgtgtctatcattagaatgcctggggtcacccatgtgtctctataattaaa

SEQ ID NO: 368373 - DNA, 576 bp, Homo sapiens
cagtcctacattgaaaaactgaacatgctgcaatgaaaactagaaacaatctatctgtaaatatgcttggtaatgtgtggatttktctcactgaatgaagcctttgttttgattcacagggttgaaaacacaccttttgtagaatctacaaagggatatttctgaatgctttgggtcctgcagtgaaaaatgaaataaagtctttgttttgatttaccagattggaaacatcctttttgtagaatcaacatagggacacttatgacttcattgaagtctatggtgaaaaagatgatccctcgtggtaaaaactagaaacaagttatctgtgaaaatggtttgcaatgtgtaaattcatctcacaaaacggaacttgtgttttgattcactgggttggaaacactcattttatacagtctacaaagaaacatatgtgaccccattgtggcatacggtgaaaaatgaaacatcttattgtaaaaaggagaaacaagctatctgtgaaaatgctttttgatgtgtggactcctctcacagagttaaacttttattttgattcaacaagttgaaagccct

SEQ ID NO: 368374 - DNA, 561 bp, Homo sapiens
ccagatcttgtgtccagatcaaggacatcaccaagccatgtgggatctgcccctgtgatccaatcacctcccaccaaggctccacttccaacattggagattactgttcaacatgaagtttggaaaggacatccaaactatatcatttagccctgggcctccaaatctcatatccttctcctgttgccgaatacaatcataccttcctaatagtcctccaaagtcttcactcatttcagcattaactcaaaagttcaatgtctcaactgagtcaaggcaagtcccttccatctacaagcctgtaaaattaaaaaagttatttacttctgagatacattggggatatgggcattgggtaaacattcatgttccaaaagggagaaattggccaaaagaaagggactacaggctgcatacaagtccaaaacccagcagggcagtcattaaatctkaaagctctaaggtagtctcctttgactccatgtcccatttccagggcacgctggtgcgaggggtgtgccaccccaggccttgggccactctgcccctgtatctctgcag

SEQ ID NO: 368375 - DNA, 568 bp, Homo sapiens
cttctcagcagcccatgttgcagacaggttgggcatttgtggcagcagtggctagaccagccttggtgggtggagctgtgctgttgatttcatggtcagcatccctttctaccaccaaagctgctccatgcatgcacccagggggccagcactcaggtggtcggggacagaggctggctgaagtcaaggactgcggccattctgtctaactggttgcttagtggctccctggtggatgctctctgttgggaatgaacacgtgataccaagctcttcacctctcatggccacacctgtgagttcattcatgtgcctcctgtcccggggtggtgggcagaatgatgatgtcccccaaaaggtgtccagggctctttttaaatagggatggcatagaacaaatccacccactaatggstgcttaacatgtaccccattccacagccctctgctccagcaaatatagcacagctggcacagcaacaatccactgggctactgctcagtggagcttgggattagctgtacatatacacaggggctttttagggggaattggctcctgtgatta

SEQ ID NO: 368376 - DNA, 529 bp, Homo sapiens
ggtgagtggagcccctgtgccgatcccatgtgtgacctccatccctgctaccacagtctctatcttcaccagcctgctgacaatgacagggtggctggggaaggagcctgactgatgcccaaagaaagggccatcttgtctacctggtcactgagcttctcctcggctgaggcggttgccctttggcaaatgtcacatgggctgcgaggatcttcacgctctgccctttcagagacctctaaccacacaacacttccccacacctcctgctaccgttttcccaaatgtgttcctttcaagtycctgaccatccatctggccaagccaggagcaactgaccatgagtgggtggcacctgtagctccgaactctccttccaggaaaaatgaaaacacctaggggccctgcccagagtatggaccacgggtgttggaaccactttttcatgtaacttgcttgtgacttcagggcctgcctgagccccgggttgtatattgctgcttccacttgaagacagaacacagctgtg

SEQ ID NO: 368377 - DNA, 536 bp, Homo sapiens
taagtccaagtcccatcccagccggatagccagggcaactgcccaggtaaactgagacagcagcagcaggcaagccagtgcagagctgggtgatccacaggttcatgagcggtggcaggtggaacaagggcrccatgggcggagggttgggcagctgcaggtggcatcattgagccaggggcctcctggtgggtaaggacattgtagagtgagcgggcgcacctgggacccaggaattcacaggaaggagagaggaaaaaggaagtccctggcgggtaaacacatatgcatgcacacacatccacgtctgcacacgcatccacgcctgcacacgcatccacgactgcacatgcatccacgcccaatctcttccctggaaataaagccaggggccttaggccagcttgcagtggggcccagcccttaggacaggctccttggtggggtaggggtgggggcagctgtcctcctgggccagctccttggggctgaacccgctgctcgaggggtcttccaggctcccagcggccggcacc

SEQ ID NO: 368378 - DNA, 546 bp, Homo sapiens
cgtgcccaacaggagcgtgggcacagtgtgggtatatgttgggcagggtcaggaagtggctctgtgcggtcaggacctggctctgtgcagtccaggccctcagccaggcaggcctgggactggcctggggctgggcacagcaggtccatgagggctccacatggctgatgttccactcaggacctgggatgtgggtggggagggggtgggggctgctctagccagacgcctccctgccaggactcagcagcgacttatccaacatccagagagcgggagcgaggccagagyctgctggggccactcaggggtaaggctgaggaaggcccctttaatgaggggatgtcagagccagatctgcaggggactctcaggcaggagctcagggggcccaggaaggctgcagcccggtgggcagatgtagggaaactgaggcccaggaggtcagggctactgccttagaacccaatgcttttccccaagtcctaggaccagggcctccctggaggaggacgcctggggcccaggtccaggtccggactgata

SEQ ID NO: 368379 - DNA, 631 bp, Homo sapiens
aaatatcccgttcgcactttaagcaaaagtgaccattaagcttgtgggcgcggtaggccagagcgtcaggatgcctcctttccactgggacggtcctcaaatcaagcggacatggagtgcgtggtagctcttttcgaagattccaccacctggaataacgaattgtgccaagctctttctctgctatttcctgaagttcagtgccctgygggtcagcccccgagggccatccagccttcatcttccaaaaccaattttacctcgtgtctccaacaacgaggggaaaaaacttggcattccttggagacttaaaaggttgcagtaaagtcaggcacctccaaaagctgacccatcggtctgcccttattcatccctgagtggatgtatggtggtattatggaggacctttactggacactctgccaaataatgagagcagtactgatgctgtagttcagttggctatcccttttactctggcatttcatcaaccagaaaaaaaaaaaaaaatgtagcctcaattcttacctctttaacaacgctaataagtatactctttcttcgtaggtgttatgtcgtaccatacatccaggagttcatcaaaacaactaagccaagacatgctaagaaa

SEQ ID NO: 368380 - DNA, 631 bp, Homo sapiens
aaatatcccgttcgcactttaagcaaaagtgaccattaagcttgtgggcgcggtaggccagagcgtcaggatgcctcctttccactgggacggtcctcaaatcaagcggacatggagtgcgtggtagctcttttcgaagattccaccacctggaataacgaattgtgccaagctctttctctgctatttcctgaagttcagtgccctgcgggtcagcccccgagggccatccagccttcatcttccaaaaccaattttacctcgtgtctccaacaacgaggggaaaaaacttggcattccttggagacttaaaaggttgcagtaaagtcaggcacctccaaaagctgacccatcggtctgcccttattcatccctgagyggatgtatggtggtattatggaggacctttactggacactctgccaaataatgagagcagtactgatgctgtagttcagttggctatcccttttactctggcatttcatcaaccagaaaaaaaaaaaaaaatgtagcctcaattcttacctctttaacaacgctaataagtatactctttcttcgtaggtgttatgtcgtaccatacatccaggagttcatcaaaacaactaagccaagacatgctaagaaa

SEQ ID NO: 368381 - DNA, 631 bp, Homo sapiens
aaatatcccgttcgcactttaagcaaaagtgaccattaagcttgtgggcgcggtaggccagagcgtcaggatgcctcctttccactgggacggtcctcaaatcaagcggacatggagtgcgtggtagctcttttcgaagattccaccacctggaataacgaattgtgccaagctctttctctgctatttcctgaagttcagtgccctgcgggtcagcccccgagggccatccagccttcatcttccaaaaccaattttacctcgtgtctccaacaacgaggggaaaaaacttggcattccttggagacttaaaaggttgcagtaaagtcaggcacctccaaaagctgacccatcggtctgcccttattcatccctgagtggatgtatggtggtattatggaggacctttactggacactctgccaaataatgagagcagtactgatgctgtagttcagttggctatcccttttactctggcatttcatcaaccagaaaaaraaaaaaaaatgtagcctcaattcttacctctttaacaacgctaataagtatactctttcttcgtaggtgttatgtcgtaccatacatccaggagttcatcaaaacaactaagccaagacatgctaagaaa

SEQ ID NO: 368382 - DNA, 320 bp, Homo sapiens
gattaggtcccaggaggacggaccctgcagtaccatagcaggctccsgcagtccttccccaccccaccactaaaggtgtatttcagtaactgtgcactaggaaaagggcaatgccagggctgggggactccgggaccaagttgacactgagagctggagtcaaggtaccatcatgggcccactagagtagggcgtatggaggccagcaaagtgcaatcctggtccacctctagctcacactgagtcatccctttgcattcccagaatgctgcatattcccccagaccctaaaagtacactcagacaatcttggtagttgg

SEQ ID NO: 368383 - DNA, 320 bp, Homo sapiens
gattaggtcccaggaggacggaccctgcagtaccatagcaggctccgscagtccttccccaccccaccactaaaggtgtatttcagtaactgtgcactaggaaaagggcaatgccagggctgggggactccgggaccaagttgacactgagagctggagtcaaggtaccatcatgggcccactagagtagggcgtatggaggccagcaaagtgcaatcctggtccacctctagctcacactgagtcatccctttgcattcccagaatgctgcatattcccccagaccctaaaagtacactcagacaatcttggtagttgg

SEQ ID NO: 368384 - DNA, 320 bp, Homo sapiens
gattaggtcccaggaggacggaccctgcagtaccatagcaggctccggcagtccttccccaccccaccactaaaggtgtatttcagtaactgtgcactaggaaaagggcaatgccagggctgggggamtccgggaccaagttgacactgagagctggagtcaaggtaccatcatgggcccactagagtagggcgtatggaggccagcaaagtgcaatcctggtccacctctagctcacactgagtcatccctttgcattcccagaatgctgcatattcccccagaccctaaaagtacactcagacaatcttggtagttgg

SEQ ID NO: 368385 - DNA, 594 bp, Homo sapiens
tctgtttgaaattatttccagaaaagaatgtgcatgttggyttcttcttcatctactgcatgtgttacaacttttcaagagtcttgagaataatcgtatggcctttgaaacaattgaattttgaaatgctttagcagaagttattttagaaaataacaatacatttttaatatttttctcattaccccaacctaatcaagttccaatttgtcttatggctttacctcttttgaagatataatctttggtatctaaatgtaaaatgaacatcttgggtgttacctagtaacaaacaggttaactaagaaccaagaaaatttttttctggaaatctagaaatggttaacttcagtttccttcatcttattcttgcttacctctgttaatttcgggcccaagagtttgtcagattcattagggatttgaatcattaaaaccccagtgagtggtagcttagtatgtctcccacatttcattaatgtagtataaatagctcattaaagtaattgaaagtaggtaatcatcaacataaagtttatttagcccataagccaaagaaatcttggtctaggagtgctctttcaaaagttgcat

SEQ ID NO: 368386 - DNA, 636 bp, Homo sapiens
ccagccaggaagctcattgtttaatagactttatggtgaatccttatatgaaacaaataattattgtgtaaaagttgccttcagatgaacattgtagatcaatctatattttcacaaatcaggtttctaatttgccgttaaagcaagatatacggaggacagaaagtatttaagtacagtttagtatttttggttgtgtaatttaataaaatataaattatttatttttctttttccagcaaattctgcccagctggttgtagagacgttctgctctacagagcagaatgtacataggctaggtacataygctaggtaatatgtacccatgtacatgggttaagtaatatggctttccaatatttacatttcagtgagacttagacttcaaaatagctagaaaataaaagtataaattgtaccatctgttcaaaagggaattttcaaaaatcaggttcaataaatgtgaattttaaaaatcagtaccaaaaaagtgacaaataaacatcaatttcctttaagttggatggatgagggagtgactattttaaagaaaataatcctggaaaatgctggtaattttatcataataatatgatagtgagacttgatggctagtcttttggagatgtatcc

SEQ ID NO: 368387 - DNA, 586 bp, Homo sapiens
aaacttattaaaagaaagaactgaaattagaaaacattttatttaaattggaaaaaatccagcaatatgttgtttaaaaggaacatacytaaaacataaggacataaaaaatttgaaagtgaaaggagaaagaatatacactgggcatattttctccaaaagaacatggatacagttatattttttaaaaacagactttaagaaaaaaaccattagggataaaggttacttaaattcttaaagaaccaatttactacaatgttaaatctatcatcatagtgggagattgcaacaaaactttcagggaaattaggaaagaaggaagatttgaacaacaagcttgatttaaagttttaagagggcatttggttgtaaaagaaatacctctggcgtctaagtaagaagataaaaagtgagcaaaaaacagagatttttcaaaagaaaacatacaagtggatgataaacatgaaaaaaaaagttcaacatcactaatcagagaaatgcaaattaaaaccacaatgagatatcatcttacaccaatcagaatggccattattaaaaagtcaagaaacagatgttggggagg

SEQ ID NO: 368388 - DNA, 597 bp, Homo sapiens
tgatagcaagggtttgtcaactggaaaaatatgcatgagtgcttagagcagcatttctggtctctgcatggatgataaatgtagcaatcagaaagctcactggttatgctgacatgtaaattaaaatggcacactctgaagccctggggcagaggagtgtttttactctcaggtgcttttgtgggagaaaataaaggcttaatcctttttgggtttttacagcttctataagttactggttgtctccaatgttatcatcatctgaaacccttacagaaccactgagctccctagaacactcctagagacagttgtttagtgatgagtttgggaagtgaagaaagatggcctttgttaacactgtttaaaaagatggcctttgttaacgttatattcttcgtttgtttttatcctgtgctcttttagcttcatgagaaaaaaaatgtgttaagtgctttaaatggttcaacttaatcttttcatattttcagatttcctcagccaytagaaggtgtaaaactagagctgtgtagaactcagtgtcagcctaccctgtggtccagacgtccacacatataaacaggcagttcagaatgg

SEQ ID NO: 368389 - DNA, 545 bp, Homo sapiens
aactgacatacacacaaagcgatggtttcagacctgtgtgaaacaagccaggaatgagtttgtaaaacaatgttggatttttttcctgatcatcaaacaacattttttctctacaaacaatttttaaattctggaaaatgtagagagaatataaaataacccattatccccccattcagtttatgtattgtttatgtatttcttaggaagaatttgaagaagcttcttgtcttccacaaaagatgtaaagtactatcattttaactgactgctaccataactacattcccatttgtcttctacctctgaagagaatatatcactttggcttatccatttgaatggcaatagtgaagtaaacttaatgattttttacacatgtggacacaaagtacgaaccaaamctacaatcctctaaatagaaatgacttgggtcacctagcatattgtccatttggtatcacatgtaatcagctattcgttgtgtctttcactcaacacagttaagcagttcatcatggcttgagactgaagtccaagttagt

SEQ ID NO: 368390 - DNA, 602 bp, Homo sapiens
ggattgttagtgcctgagaatatttgaagctgggaggagtaaactcgtagatgatgaatgacttttctgtgttaaagtaaatacataaacatagatgtatactgacatagtgtttagaattgcattttacmaagctggatcttataatatccattctgcaatttgattttctcacacagcaatacattatagatatctatagagtttatattcatatgtttatattcacagtttatattcatgtgtcttgaaatccacagatgaatgttagtacaagttctgatttccaatttttcctctctctgatgtcaaaattatttaatattattggtgctattagttgtgttcctgagatctacagaaacttaccagagagcattacatgatatcttaattattatagcttgaaactacaatttagactcttttcttgcagaagtctttcttttattcctttcttttattccttgaatactttcatctcattatgctttgagatcagtgttagtttcttaaatttacctaaatatctcattggggtttctatcatgtcaatactacaaagaatttgaataaaatcatttttgcaacagggctttctc

SEQ ID NO: 368391 - DNA, 602 bp, Homo sapiens
ggattgttagtgcctgagaatatttgaagctgggaggagtaaactcgtagatgatgaatgacttttctgtgttaaagtaaatacataaacatagatgtatactgacatagtgtttagaattgcattttaccaagctggatcttataatatccattctgcaatttgattttctcacacagcaatacattatagatatctatagagtttatattcatatgtttatattcacagtttatattcatgtgtcttgaaatccacagatgaatgttagtacaagttctgattkccaatttttcctctctctgatgtcaaaattatttaatattattggtgctattagttgtgttcctgagatctacagaaacttaccagagagcattacatgatatcttaattattatagcttgaaactacaatttagactcttttcttgcagaagtctttcttttattcctttcttttattccttgaatactttcatctcattatgctttgagatcagtgttagtttcttaaatttacctaaatatctcattggggtttctatcatgtcaatactacaaagaatttgaataaaatcatttttgcaacagggctttctc

SEQ ID NO: 368392 - DNA, 579 bp, Homo sapiens
aagtcaggcagtatgctagacatgttcacacatataaactcatgtaatcctcatattaataatatgacataagtatcatcatctatacacagaaacaggcccactgtgggaaagtggcttgcctaagattacacagatagtaaaagaaagaaagcaaggttttaaatcgaggcctctatgagaaacttgtagaatggttgattggaaataattcataaacaggaaaaataattattggtggaaatgcagtagagastaacggtcacaaaaatccattgtcatataaacagaaagcaagcaagtaagttaaaaaccacataataaagaaaagatgaagaaaaactggtagtgcatccgaggctacttcccagagcctgagccatcatcagagactggtcataaatggacaatattaaacacaaaccgttctgggaataatacaagttggctgccatatcactcagcaactcacctactttttcctttcagctcttaataacgcagcagcagcagcagcagcagcaacaacaaaagagcacaaggtactgacaaaggggaaacatctgaaagtggaagctg

SEQ ID NO: 368393 - DNA, 569 bp, Homo sapiens
tacatgcctcatcaaattcgatattccacctgctatgagaatcatcagtgttgtggctaccaaatagtggcagctccatcagcgggagccctgaagtgaggataaggaggctctgaaacacagcccctagttgacttgtggtgaacatgtagtgtgagtgagaaaccaccatttgttcttaaagactactgggatttggggaaaggrggtgtttgtgtagcataacctattagtctgttttaactggaaagtataaataattagaagattaaagtataaatgacgagtgaacatataaaaaagataactgattagaaattttcagaaaagcagcacatataacttggaaattgttcctgactacatttaagatattcataaaatataattttggaattggggacttgtcaggagactggagtttctgcttgacaagatggcagctactacagggttacattaggaaataaatgtataactgtacctaggtctcacatgtgccactgtgacaagaatggctgaatgattaggtgaatcatattcactccgacacggagcattatctctgc

SEQ ID NO: 368394 - DNA, 582 bp, Homo sapiens
ttacagaactagcaataggttatggctagtaacaaaaatatatatttgcttatgtgtgtatatcttggtttcttttatgtctttgtactgtatatttttgtgtatacacacatacacacatatatatgtttgtggatacacacacacacacacacacacayatatatatatacatagagtgacgatcccttcataacacaacatagggtagagttttgtacgtatgctgttgctttaattgcagagaagaaatactgctaatgtcagcctgcatgatctgcacctaggtgttttctggtaggcagggagcagaattgaggcactggggtggaagccttttcctcatttttagcatcttaagtgtggtgaccacattcagaagggtagtacttggcactgccaggagaggaaaattaggattcatctgcttctcttaccagccactgtgagaatgctgaattttacatttggtcaattagacttgttaatataattctgtctgaagtactcaaaagatatgtgctcaaggtaaaatcaccatctgggttagcataataggtattcctaaatatcacgcctact

SEQ ID NO: 368395 - DNA, 597 bp, Homo sapiens
attttttcttctagttactggctcacaaaactaactggatgcaaacagatgactaaatttagaggtaactgtgctgtgaaaggaaccataagcctaaactcaagtgccttggactattctagacataaataaacctgggtcctccaacctcccatgattaggaagctgacttcaaaggctctgtagcacctaaagagagcttgctcttcaacatgcatttcagaagtggccaaagacaatactatgaacaaggtacagctccccagagggtagatccacgggccatggcgatcataaactaaggagttcttcagagggcagaatcagagtttaatcaagggatttcccttcaccaaagagagagcactgcataggctttcccagggagatttcaaaatgatcaaacccagtcagtggctattctgtgtctcccattcttcctctttctaaatgggaatggtattaacttttactgtggttaaagacttgcacactatcagtagcttataagaataagtrtttatttctcatagttttgtgagtcagctgtgactcagatggggttcagtttcaggctgtggggtgcattttggtcag

SEQ ID NO: 368396 - DNA, 661 bp, Homo sapiens
tttgtctgtgatttcttttaacaatgttttgtagtttccctgtagagctctttcacctccttgcataggtatattcctaagtattttattttttgcaactggtgaaaatgggttgacttcttaatttgattctcggcttggtcactgttggtgtatagcagtgctactgatttgtgtacattcatattgtatcatgaaaccttactgaattcatttatcggatttaggagcttttgggatgagtctttagggttttgtaggtgtacaatcatatcactggcaaacagtaagagtttgacttccatttttccagtttggacgccctttatttttttctcttgtctaattgatctggataggacttccagtactaggttgaatataagtgttgaaagtggacatttgtgtcttgtttcagttctcaggggattgctttcaacttttctccccttcagtataacgttggctgtgggtttgtcatagaccgcttttattaccttgaagtgtgtcccttctaggccagtttttgtgagggttttaatcacaaagtgctgctggattttttraatgatttttctaatctattgcgatgatcatataatttttgtttttaattctttttttgagatgtatcacatttaatgacttgtatatgttaaat

SEQ ID NO: 368397 - DNA, 423 bp, Homo sapiens
cctccaaactgtttcaacttctgcctgttacccagttttaaaggygcttccacatttttaggtatctttacagcaacaccccactacctggtaccaatttactgtattagtctgttctcccaccgctaatatagacgtacccaagactgggtaatttataaagaaaagaaaagaaaaaaaagaggtttaattgactcacagttcggcatggctggggaggcctcaggaaactaacaatcatggcagaaggagaagcaatcacacccttcacatggcagcagcaaggagaagtgccaagcaaaagggggaaaagctgcttataagaccatcagatctcgtgagtactcactcactactacgcaaacaggatagggataaccgcccccatgattcaattacctcccaccatgttccttccacgac

SEQ ID NO: 368398 - DNA, 423 bp, Homo sapiens
cctccaaactgtttcaacttctgcctgttacccagttttaaaggcgcttccacatttttaggtatctttacagcaacaccccactaccyggtaccaatttactgtattagtctgttctcccaccgctaatatagacgtacccaagactgggtaatttataaagaaaagaaaagaaaaaaaagaggtttaattgactcacagttcggcatggctggggaggcctcaggaaactaacaatcatggcagaaggagaagcaatcacacccttcacatggcagcagcaaggagaagtgccaagcaaaagggggaaaagctgcttataagaccatcagatctcgtgagtactcactcactactacgcaaacaggatagggataaccgcccccatgattcaattacctcccaccatgttccttccacgac

SEQ ID NO: 368399 - DNA, 578 bp, Homo sapiens
aagagtggtaaaataggttttatggtgatggaatatttatttttattgaagtgatggcaacataatcaatatgtctgataaaaatgacatagcccatattgtatgcattatgtacatgtatactctaaaaacattgtattagggttctctaaagggacagagctagtaggatatatgtatatatgaaagggagtttgttaggataattgactcacaygatcaaaaggtgaagtctcacaataggctcctgtaagttgaagaacaaggaagccagtctgagttccaaaacctcaaaattagggaagcaaacagtgcagccttcagtctttagccaaaggcaaagagcccctggcaaaccactgctgtaagtccaagagtccaaatgctgaagaacttagagtccgatgtttaagggcaggaagcatcccacatgggagaaagatgaagcctggaagactcagtgacacctcattccattttcttctgcctgctttattctagccacacttgcagttgattagatggtgcctacccaaattgagggtgagtctgcctcttccagtccatgaactcaactg

SEQ ID NO: 368400 - DNA, 578 bp, Homo sapiens
aagagtggtaaaataggttttatggtgatggaatatttatttttattgaagtgatggcaacataatcaatatgtctgataaaaatgacatagcccatattgtatgcattatgtacatgtatactctaaaaacattgtattagggttctctaaagggacagagctagtaggatatatgtatatatgaaagggagtttgttaggataattgactcacatgatcaaaaggtgaagtctcacaataggctcctgtaagttgaagaacaaggaagccagtctgagttccaaaacctcaaaattagggaagcaaacagtgcagccttcagtctttagccaaaggcaaagagcccctggcaaaccactgctgtaagtccaagagtccaaatgctgaagaacttagagtccgatgtttaagggcaggaagcatcccrcatgggagaaagatgaagcctggaagactcagtgacacctcattccattttcttctgcctgctttattctagccacacttgcagttgattagatggtgcctacccaaattgagggtgagtctgcctcttccagtccatgaactcaactg

SEQ ID NO: 368401 - DNA, 571 bp, Homo sapiens
ctcacacacacacccaggaacaatacttttcatcctttaatccaatcaagttgacactcaatattaaccataacaaaaataaacattatataaagatcaattgcctggttttgatatttactatagttacagaaggtgtgaccatggaggaagctgggtgaattggaggaagctgggtgaattggcctttcagtactaatagtacaatgtcctgtgatctataatttaaaatataaaaaataaaaaggaacagaacctctgaatcagatttgctgggttcaggtttgtgctctgctttttactaagtattgaacctcaattagtttatttaactcttctgtattcataattaacctaattcatatatttgttgtgagaattaagttrtttgtgtaaattgctgaggatgatgcttatttgcgttgaacaagtgctgttcataactaactagtattttaaaaataaaagttgaaatttaaataggttcatctgttagagatcctatagctctagagtaactgcatataaattcaaatcctggcatgtatggtctttttattaaatattattc

SEQ ID NO: 368402 - DNA, 536 bp, Homo sapiens
gtgtgccttcacaaatctcatcttgaattgtactcccataattcccctgtattgttgtggggggaactggtgggagataattaaataatgggggcagtttctcccatactgttctcatggtagtaaataagtcttaggagatttgatggttttgttagtggaaacccctttcatttgattctcattatctctcttgctgctgccttgtaaaaagtaccttttgccttctgccatgattgtgagacctcccaagccatgtggaactgtaagtccatgaaacctgtttcttttgtaaattgcccggactttggttatctttatcagcagcctgaaaacaggmtaaacagaaaattgataccaggaggggagtgctgccaagaagatacccgaaaatgtggaagaaacttctgaactggataataggcagacgttggaacagtttggagggaccagaagaagacaggaaaatgtgagaaactccctacagacttgtcgaatggcttagaccaaaatgctgataatgacatgagaaatga

SEQ ID NO: 368403 - DNA, 602 bp, Homo sapiens
acaaagaaacaatgtaacatcacatctaggggtgctagagaagcaacaagaaaccaagcctaaagctagcagaagacaagaaataaccaaaataagctaaactgaaggaaatcgaggtgccaaaaaaaagcatacaaaagatcaagtccaggagctggttctctgaaaaaataaataagttagatagaccactagctagatgaataaacaaaaaaaaagagagaagatctaaataaacacaatcaggaaagacagagggagtgttaccaccagctccacagaaatacgaaacatcctcagagactattacaaagattactttgcacacaatctaaaaaacttagaagaaaaagataaatttttggaaataygcaacctcttaaaattgaagcaggaagaaatttaatctggaacagaccaataacaagtttcaaaattgaataattcataaaaagcctacccaacagaaaaagcccaggaccagatggattgacagccagattctaccagatgtataaataatatctgataccattttcctactgagactattccaaaaaattgtggaggaggagctcctccccaactgattctctgagggc

SEQ ID NO: 368404 - DNA, 593 bp, Homo sapiens
atttttaaatgcctttaaaaaggcagaagtttgaataatattggcttggacatatgtgcttctgaaactaaaatacaaaaataatttgtaggtgtaaagaatgtaagtcttacctcgtgagtraatgctctctctgtcccaaattggaagacgatggtattgaaatgcctgtgtccattcagtaattcactcaggattcaaggattcattataactatcaaagctttattgctttcttagtagctaaggtggtttattatttgaaagcactgggtgatatacggtatacttgtataatatgacacccttagaaaatatggagccatgctgtggcaccattatatttagattatagcttatgtggctgcctattcaaaagaaattcaattttgactttaattttcaccccggggcctcctacttgaaattttatcctgtaagaaacaaaagtttgaatgagtaatttagcatgatctgcaattaattattaaatgtagtgtatacatatatatatatatacacacacacacatatacatatttctaaaaaagacaataaaaacatgcaatagtggttagtggtctggcacaaag

SEQ ID NO: 368405 - DNA, 562 bp, Homo sapiens
gtagtttttaaaaaaaatttcaaacwagtaaagtataacaaagctgattcattgacttagcataacctggcagatactttacctctttatatgggttaaacctgagatctcattagactgtcaatctatggaactgtattttttgtttttccccgtggtaaattctaaacttttatgacagtttttctttttgtatatgcagagatgtatgcttttgttgtttttataaccagaatgaatgtaaccattatgctgcaagaacaggattctatagggtttgaataggatacattttttttgtttttcatgtaaatctgtggactcattcttctttgcatcttgggtgaaatttcagaaggctataactattcaatcattctaatatattacaatttattttgattactttggccaaataaaagttataatttagctgttataatacccaacagtctaatatagaaattctgaacatcttttaaagttgtgtcttcttacctcacttatcttggaacaacttgaatctgagaagcttgcaatggtgaagaagggcctactaaac

SEQ ID NO: 368406 - DNA, 513 bp, Homo sapiens
aaccatcaacagggaccccctgacaagttctgttgaaactaaactgccaactctgaggaagctgttccttatgtgtagtcatcactgctgtargtccacagccaagcccttaacttaagtgggcttgaatccacttttggtttagcatggccagcagtcaggaagatgagttggatgtgaaacaaagaagagtgagaaatagttgggcatctccatctgtctgtcactttggctgactgtgacaacattctgagagtagtggtttctgctttacttctgccaaatctcatgcactttcctcttttagctaacttttacccagaattgtacagagaagatgattctggaaaacaatgtccagacttagcagactttacataacatgtaccagcatactctttttaaaaaacttgatttcaaatactaagaataatttcataactactaatcagtttaacttatccaatatttatttgttacctactatgtgctagtcactgtgcttacatggtc

SEQ ID NO: 368407 - DNA, 636 bp, Homo sapiens
tttatttaattattcttcatggctagtgcatcaggtaacaattatctttactttcatcacagcagtgctgctgtgcaaaataagctcaatttgtgttcagaatatgattttaactcctactgatactctggcaatttaaacagtattataatgttactacctgcagaaaaacaagcaaatcaataaaagcaaaaatcaaaaacagtctgagtgagaactgacaggacccaaaaacatttcttacaatctgagtcccaaagtactttctctaggattggatttatgtagattgatttgttggaagtttcatggtgcaaaaagtgagggtcccctcttagttttgcactttgtattagtttggacaaacatataacaatatcaatcattttttataattttgaaatgatgggtcttcatctattgtcaaggcacactttggtagaactagctgaagaaaygaaggtaaaaataagagacttctagaagaatggattatggaaagaaaataaaatccacactgaaacatttcacaaattttcctttgggctaaagagtttttcttgttacagttttcccaccagtcttctaccatttgtatttatatcttgaccctaaaacttacgagcagtgatggtt

SEQ ID NO: 368408 - DNA, 621 bp, Homo sapiens
actcagcaatcaaaaggatcaacctgttgatatcataaatgacatgaataagtcttaaaaacattatgctaagtgaataaaacataaataaaaggctgcatattatataattccaattatattatgtgttaaggcaaatatatagggttgctttaagatctaattttttaaaattatttatattgtgtatatttaagttatgtgacatatgctatgggatacatatagacagtaaaattgttaccatagtaaagtaaattcacatatccttcatctcacatagttaccattttttttgtggcaagaaaaggtaaaatcctatttgcttagcaaaaatatcaaatgcaatgtaatttttattaactatagcactcatactgtatactagatctctatccttgtttattctacatatctgtcactttgtattatttgacctacatttacctatscatttctgtcccatccccataaacactgtttcattctctgtatatttagtttttttctttctctgttttttaatatttcacatataaatgagatcattgaacattttctttctgcgtctggtttatttcacttagcataatgccctccaggttcatccatgtgtggcaa

SEQ ID NO: 368409 - DNA, 519 bp, Homo sapiens
tatagatgtgatagcactggcttgatacatgagctgtttaaattctcaattgtgctacattcaattggcctcttgtcttgtcaaagaactatgttattgcatgctrtttttctagggtaatcagacagtctgcatcgtgtagtaatagagtaattgagttttggataccttgtgtttaatgtatagactttttatattgcttactcttcctccctcaatagtcttttgaaacatcatagaacatttgcctgtctttttcatagttaatatttctgtcttttcacataattgagcattgacatatgttcataattgccattactatacaacctcttctaaaatggtagaaaatattaactttcagatgagaggtggtttagacacatatttagaactcatgaaacatactttttcagaaaactcaaaatattataagaacagaaggaactgaaagcacatggattctaaccatccaatttatacttgcatcctctgatcagtaaccctgctaaatgacta

SEQ ID NO: 368410 - DNA, 519 bp, Homo sapiens
tatagatgtgatagcactggcttgatacatgagctgtttaaattctcaattgtgctacattcaattggcctcttgtcttgtcaaagaactatgttattgcatgctatttttctagggtaatcagacagtctgcatcgtgtagtaatagagtaattgagttttggataccttgtgtttaatgtatagactttttatattgcttactcttcctccctcaatagtcttttgaaacatcatagaacatttgcctgtctttttcatagttaatatttctgtcttttcacataattgagcattgacatatgttcataattgccattactatacaacctcttytaaaatggtagaaaatattaactttcagatgagaggtggtttagacacatatttagaactcatgaaacatactttttcagaaaactcaaaatattataagaacagaaggaactgaaagcacatggattctaaccatccaatttatacttgcatcctctgatcagtaaccctgctaaatgacta

SEQ ID NO: 368411 - DNA, 536 bp, Homo sapiens
ctatacaacctcttctaaaatggtagaaaatattaactttcagatgagaggtggtttagacacatatttagaactcatgaaacatactttttcagaaaactcaaaatattataagaacagaaggaactgaaagcacatggattctaaccatccaatttatacttgcatcctctgatcagtaaccctgctaaatgactatctagccttcattttaatgtctcaataatgaagaactctaaagacaaatctttctatctttacacttctctggctatttaaaatttgtcattacactgaacccacttgccgtaattctaacctttaaaaccatctataactgmaatatacatttaatataaaattatgatgactagaaacataacattttttctctaatcatctctgggctcatctctcaatagctcggaagagtgcatcttttacccagtgaaaaataattttctttattaatacccagaaattttacaaactttcccattgttctgcaataagattcaactgatcaagagacttga

SEQ ID NO: 368412 - DNA, 583 bp, Homo sapiens
catcttttacccagtgaaaaataattttctttattaatacccagaaattttacaaactttcccattgttctgcaataagattcaactgatcaagagacttgaagtcatttacaccaaaaattttaactttttattcttaacttcttgtttgaaaatagaaaaaaaataaactaaaggtggtttaaatacaaaggtaaggcactggcttgggtaacagcataggccagctactgtttgatttggaagcccaaacaacatcatccagacctatttctcatgtgaggtttcacaatccattaygtgtgccttattctcaggatgtatgtggggtcctcatcaaccagtaagaggtattttcttcttttttttatgttttttgggccatgttcatgtatatcagaagagaaaacatctcttttgagattgttctggtaagattgatttgggacagctcatgttcagtcagtagtggctagaggaacctgatgctgggtattctgattctgtaatgctcaaaatacagcctggaacattttacaaactcaataggtgttcactgttcttattattaaccaactacagt

SEQ ID NO: 368413 - DNA, 583 bp, Homo sapiens
catcttttacccagtgaaaaataattttctttattaatacccagaaattttacaaactttcccattgttctgcaataagattcaactgatcaagagacttgaagtcatttacaccaaaaattttaactttttattcttaacttcttgtttgaaaatagaaaaaaaataaactaaaggtggtttaaatacaaaggtaaggcactggcttgggtaacagcataggccagctactgtttgatttggaagcccaaacaacatcatccagacctatttctcatgtgaggtttcacaatccattatgtgtgccttattctcaggatgtatgtggggtcctcatcaaccagtaagaggtattttcttcttttttttatgttttttgggccaygttcatgtatatcagaagagaaaacatctcttttgagattgttctggtaagattgatttgggacagctcatgttcagtcagtagtggctagaggaacctgatgctgggtattctgattctgtaatgctcaaaatacagcctggaacattttacaaactcaataggtgttcactgttcttattattaaccaactacagt

SEQ ID NO: 368414 - DNA, 495 bp, Homo sapiens
ttttgctatttttttttttgtagtggttccatactttgaggtcttatacttaattatttaatccattttgattttatttttgtacatggtgggagatagggggtctagtttcattcttctgcctatggatacacagttttcccagcactagttatgaaagagactgtcttttccccagtgtatgttcttggcacttccgcggaaatgagttcacwggaggtgtgtggatttgtttctgggttctccgttcggttccattggtctatgggtctgcttttatgatagtaaaacgaccttttggttactatagctcttcagtataatttgaagtcaggtaatgcaactcctccagttttgcgctttttgcttaagacacctttggctattctggctcttttgtggtttcacataaattttttctatttctgtgaagaatatcattggtattttgatagggactgcactaaatctgtagactgctttaggtggtatgga

SEQ ID NO: 368415 - DNA, 585 bp, Homo sapiens
tgtcacactagtttgaataacagtggtagtgaaagtgggcaacttgccatgttatggatcttagaagaaaggctttcagtttttccccattcaatataatgctagctgtggttctgtcttaaattactttcatgatactagttgtgggtatattccttctatacccagatttttgagggtttttattatgaagggatgttgaattttaccaaatgcttttttatcatcaagcaaaatgatgataaggtttttattcctcattctgttgatatggcgtatcatgttgattgagttgcacatgttgaactgttcttgaatcacaaggataaatcccacttygtaataataaatgacctttccaatgtgttgttgagttttgtttactagtattttgttgagaatttctgcataaatagtcatcagagatatttggcctgtatgttttttatgtgtccttgtctagttttaatacgaaggtaatactgaacttgtagaatgagtttggaagtagtctcttctctaattttcagaatagtttgagtaggactgatattagtttgtctttaaatgtttgctagaatgcag

SEQ ID NO: 368416 - DNA, 304 bp, Homo sapiens
gtcatcctctgggttcagggtcaacgctacattaatgacccaccatttatcctctgcgtaattcattccctggcaacctattttatttatgctgtataaattcaggaagcaattaatagttgccacaaaagcaacatgattcagggtgcttttctcaacaaaacttcagagcacgrcacttctcatgccccaaggcagggaagggaagcaaagctgactgaggaaaagcactaaatcatttcgcttcatgttctatcctccttctgcccctggttggagagaggctgaggtaactttctggctt

SEQ ID NO: 368417 - DNA, 566 bp, Homo sapiens
acctcctgggttcaagcaattttcctgcctcagtctcctaagtagctgggattacaggtgtgtgccaccatgcccgctaatttttgtattttcagtaaagatggggtttcactgggcaggggagctgttgaggtctccatgttaaagatgagaaactgagactctagagattcaatggcttgtcttgggacacacacggtggtagcctgrggaactcagctactctcatggcagatgcagagccagtgccactcaacttcaagacctttgggcctatatccttgtgaacttttttttttttttttttttgagatggagtctcagccgaggttggagtgcaatggtgcaatctcggctcactgctacctccgtctcctgggttcaagcaattctcctgcctcagcctcccgagtagctgggattacaggtgtgtgccaccatgcccggccctcagtgaactttttatattctgtgcccatgaaatatttgtaggttgagggattggtatatatgaagaacaaacataaaataataagggatggtgttttttaataaatgtggaactt

SEQ ID NO: 368418 - DNA, 547 bp, Homo sapiens
ttttcttcaggcaggctatctgtacccatcatttcatcttacagtggcttcctctgaactgtaaactcctgagatgctggaaacctaagtaaaacagaattagaaagtcatgtcatttctgtaactcaatgacatcacatattacattcaaagaatcagacacaaatatgttttgaatgatttgtttccttatatttttgaagttctgcaatttcaatcaatcaagcatagtgcctggtattaagaagacttctacctagaaaaaggattgtgattgattcatgatgcctgtctgaggatgggcttggtggctctcctgaccyaaattagccacccctgcctggggtaattgaaaactgcatgtgtggacaggtaataagggcaatgaaatatgcaacaaattagtctggattaagcaaaatcaccttctttttttttttttttttttttttttttgagacgggatctcgctctgtcactcaggctagagtgcaggggcatgatcttggctcactgcaacctccgcctccagggttcaagtgattcc

SEQ ID NO: 368419 - DNA, 547 bp, Homo sapiens
ttttcttcaggcaggctatctgtacccatcatttcatcttacagtggcttcctctgaactgtaaactcctgagatgctggaaacctaagtaaaacagaattagaaagtcatgtcatttctgtaactcaatgacatcacatattacattcaaagaatcagacacaaatatgttttgaatgatttgtttccttatatttttgaagttctgcaatttcaatcaatcaagcatagtgcctggtattaagaagacttctacctagaaaaaggattgtgattgattcatgatgcctgtctgaggatgggcttggtggctctcctgacctaaattagccacccctgcctggggtaattgaaaactgcatgtgtggacaggtaataagggcaatgaaatatgcaacaaattagtctggattaagcaaaatcaccttctttttttttttttttttttttttttttgagacgggatckcgctctgtcactcaggctagagtgcaggggcatgatcttggctcactgcaacctccgcctccagggttcaagtgattcc

SEQ ID NO: 368420 - DNA, 574 bp, Homo sapiens
tttctgcatatggacatcacacacactcccacccaccactcttccttgaactgggggaggtaacagaatctgcgcccaccccggacattcctgcacatcctgaacataaaagcagttgtgaaacatgcagaatcctccccgatttatttctttttaccttacatcccttccactttgatgtcagtagaatatttgaaagaaaagaatctaacgtgacctactaccctggaatgccaagaaaaacaattaccaggtcgatggagctcagggagcagctggtggacatgaatgaatggggcaaaaatagtttgttttctaaactcgttccacctcagggttgaccatcaggtcttttgctggaggcgcccagagctccccactttctgaacctcagtgacccacaatccattcctaaaagggagagcctcctgtctttctctcagttccctcargctcttagcaggactcaataagagccccagaaatttcccagaagtaggtgatttaaaaacacttaaaattgtaagggtgggtggtggagtcaggtgggaagaagcgagtagagttggaagga

SEQ ID NO: 368421 - DNA, 561 bp, Homo sapiens
actgtgggattccatggggcttcaaatccacttcccaagctatgccattgtgaggaaagtragacaaagtgtcgaggggctgggaagattagtaagcaaaaggcttccctgagacagcatctaaacttgcacggaagacagcctttctagaccagagcagtttcatcccaaagcaggtccttggacactgctccctctcaaatcccatccaccaggaaatgctttcctggcctacacagaactagctggcttactgcaaagcttcttcagattttcctcttgatagacccccgccccaggacttctctgccctttaaattctggcatcctgacactggcagcattagctgtgggcttggttgaagaagaaactgcagcaatgccagggaatcagcaggaagacctccagcttccccacagcctcttggcagaactcagggtggcctctgcagctggtatgagccagccaggctgctgggtagcttgcctggacctgagtgccaggccccacagcagagggcaaggtgtgtggctgccttggttggcaagtgcattccaatt

SEQ ID NO: 368422 - DNA, 561 bp, Homo sapiens
actgtgggattccatggggcttcaaatccacttcccaagctatgccattgtgaggaaagtaagacaaagtgtcgaggggctgggaagattagtaagcaaaaggcttccctgagacagcatctaaacttgcacggaagacagcctttctagaccagagcagtttcatcccaaagcaggtccttggacactgctccctctcaaatcccatccaccaggaaatgctttcctggcctacacagaactagcyggcttactgcaaagcttcttcagattttcctcttgatagacccccgccccaggacttctctgccctttaaattctggcatcctgacactggcagcattagctgtgggcttggttgaagaagaaactgcagcaatgccagggaatcagcaggaagacctccagcttccccacagcctcttggcagaactcagggtggcctctgcagctggtatgagccagccaggctgctgggtagcttgcctggacctgagtgccaggccccacagcagagggcaaggtgtgtggctgccttggttggcaagtgcattccaatt

SEQ ID NO: 368423 - DNA, 561 bp, Homo sapiens
actgtgggattccatggggcttcaaatccacttcccaagctatgccattgtgaggaaagtaagacaaagtgtcgaggggctgggaagattagtaagcaaaaggcttccctgagacagcatctaaacttgcacggaagacagcctttctagaccagagcagtttcatcccaaagcaggtccttggacactgctccctctcaaatcccatccaccaggaaatgctttcctggcctacacagaactagctggcttactgcaaagcttcttcagattttcctcttgatagacccccgccccaggacttctctgccctttaaattctggcatcctgacactggcagcattagctgtgggcttggttgaakaagaaactgcagcaatgccagggaatcagcaggaagacctccagcttccccacagcctcttggcagaactcagggtggcctctgcagctggtatgagccagccaggctgctgggtagcttgcctggacctgagtgccaggccccacagcagagggcaaggtgtgtggctgccttggttggcaagtgcattccaatt

SEQ ID NO: 368424 - DNA, 304 bp, Homo sapiens
accatctctagcagcacacatggtaaacactgatctctgcaaactgcctttttaaagatctgaatccaaatttacctactctagaaaacytccccctcccttgatctacttttcatcccattttaggacttctttgctccttcatgataagtccttgcgtgtttaatttataccccatcacttttgtgtgttttaacttcactgttctcaatactttcacatctgtgctttttcttctgtactagattgtaaaataccaaaggcaaagactttgacttgtttcttttagttcctcccataggcc

SEQ ID NO: 368425 - DNA, 304 bp, Homo sapiens
accatctctagcagcacacatggtaaacactgatctctgcaaactgcctttttaaagatctgaatccaaatttacctactctagaaaacctccccctcccttgatctacttttcatcccattttaggacttctttgctccttcatgataagtccttgcgtgtttaatttataccycatcacttttgtgtgttttaacttcactgttctcaatactttcacatctgtgctttttcttctgtactagattgtaaaataccaaaggcaaagactttgacttgtttcttttagttcctcccataggcc

SEQ ID NO: 368426 - DNA, 426 bp, Homo sapiens
  misc_feature (1)...(426): n = A,T,C or G
gttttcaccacagggctgccaatcagcgggtccaaagaaagatgcagagaaagctctaagtgtgacagccactttcccctttttcagtccctttctttggaaaattggtcttctccaaaagaaagggaagaaaacatccactggctctctgaggaaaggtttccaaggcctgtgatttgctgacatgcggggagttatgatgttatgagaacagccctgatgacagcaatactatccccacactgctcctaggatgtccagagcaatccaagygatcatgataaacttcatatgtgagggtcagacggccgcctgaccacacnagagccaggcacatgaaagaaacaataaaaacttgatttaactgtgggatcccttctagagggcttaattatctattgtattaccacattcccgttattcagc

SEQ ID NO: 368427 - DNA, 531 bp, Homo sapiens
agaccaaacgacatatttggcagacagaaaactgcatgggaaaagatgaaaaggtacaggaataaaggaaagtgcagggcatatttggaaactagtaggcagcattatttagctaaattatttgatacatgtattgttgtagttgaggtaggtcctgaaggatagacagtggagacctttaagtataagccttaggaagtagaactccttactctaggtaataagactcactgaagttttccagcagggagtgatgtgatagcattttgctttakaaaaattaatctttcagaagtataaatgatagatttgagagtttgaaatagaagcagaagggagggtgtggcggcaattagggagcttttgtgatggtccatatgagagatattacgggtgtgaattcaagcaaaagcaacacaaatgaaaaagatagaacaaatgtgaaaaatgctttctgtaggtacatcatgcagacaacatgcttctaaaatgctgaacctggagaactgggagtatagcagtatcattaat

SEQ ID NO: 368428 - DNA, 428 bp, Homo sapiens
accagcccaggagccgcatggggcaaaggaagctccctcccacagccaagggaggagatgggggattgtgctaccatgtcctgaaaaccatgctttgcccactgatctctgcaaccagtggatcaggaggtcccctagtgagcccacgccaccagggccttgggtcccaagcacagagctgtgcagagtcaccacagctacttgggtgggcagcagctggggcaggcactgagatacaggactttttgcatactccagcacctagaactctggtgaggcaggagatccgtgggaagggggctgaagccagggagccaagcaatttctctcagcaggccccaytcccgcggaacccacaagctaaaacccactggcttggaatccccactggccagtgcagcatgctggagactgcctaagaagaccca

SEQ ID NO: 368429 - DNA, 462 bp, Homo sapiens
gtctttcctgtgctgttctcatgatagtgagtacgtctcatgagatttaatggttcttatggtgggggtcacgggggagcagttctgcacaagctgtctttgctagctgccatccatgtaagacgtgtcttgttcctcctcgccttccatcatgattgtgagacttccccagccacatggaactgtaagtccaattaaacctctttctgttgtaaattgcctagtcttgggttatgtctttatcagcagcmtgaaaatggaagaatacagtaaattggtaccagtagagtggggcactgccataccaaaaaatgtgaaagagattttggaactaagtaataggcagagattggaacaatttgaagggctcagaaaaaaagacagaaaaatgtgggaaagtttggaacttcctagagacttgttgaatgactttgaccaaaagcctcagaatgatatggacaa

SEQ ID NO: 368430 - DNA, 559 bp, Homo sapiens
tgttggtgggactgtaaactagttcaaccattctggaagtcagtgtggcgattcctcagggatctagaactagaaataccatttggcacttaatattataatcatacattttaaaaattatttttaatrttaacatacttcatcatatcatcctgatataattagaagctctttgacagcataggccattatttgttactctttcacatgctctacacaattagcatattattacacacttaatagattctgaatatcttgacagagttcatcaatatttactcatgagagttaaataagttaaatctcattctgatttttttcttgctgcttctagaccatctacccagtaaaaataagaaaacttttcatctataccttcttctatcattttatttaacagaaaaaaaatgtttccttattttatatagcctccccatttgcaaaactaccaaaattgagctaataatttatgctttattaaaacatactttgatgatttttgattctgtatactgtgttgattaatagtcatcatttgttttgtaatatggtaatt

SEQ ID NO: 368431 - DNA, 601 bp, Homo sapiens
tctctgtacattctttaaagtacgtatcattttctaactttcttcagagtttatgaagtctagactaaatatctgaatatgcctatctgtctactgggatcaacttgggtgaggcaacatggggaagtaatctcttactaaatccctaggaatgtaggtttgattttaggtagataaaagaaatcagataatgtagataactgctaaattgggttgctaacagaagacagcctatatagcacacatgcagtagagtaaatctgcaaaaggcaacaagattgtgtcagctattgatcagaaacaagatacttccatagcagcagtattaatatgacagtataggctatactaatgttgttaaaccttccatttttgagtgcttataatgtgtttatctaatctgatctaatcctgacatttagtgttcagattaaagttatgaagcaactactgctattrctccattttagatagggagaagtgaaagctcagaaatgttagataaattatccaaagtcatacaactagtaagtgttggcgtcaggaataagccccaggctatgacgtcagggccagtgctttccctccaatacaatgtggt

SEQ ID NO: 368432 - DNA, 607 bp, Homo sapiens
gcatttaccccatacacaaaaaattaaatggattaaggactttaatgtaaaacacaaaactatgaaaaccctggaagacaacctcggcaatacaattcaggagataggcatggcaaagagtttgtgacaaagatggcaaaagcaactgcagcaaaacaaggattgacaaatgggatctaattaaatgaaagagcttctgcacagcaaaataaactaacaacagaataaacaggcagtctacaaaatggaacaacatttttgcaaactatacatatgacaaaggtctaatagccagcatctataaggaacttaaacaaaaaaagaaaaagacaaacaatcccataataaaagtgtgcaaaggacatgaacagaaacattttaaaataagacatatatgcggccaacaagcatgtgaaaagaagttcaacattcatgattattagacaaatgcaagtcaaaaccacaatgagataccatcgcatgccaacccgaatggygattattaaaaattccaaatcaacaaatgctggtgaggctgcagcaaaacagaaacacttttacacagctggtgagaatgtaaattagtttaatcattgtggaagacagt

SEQ ID NO: 368433 - DNA, 604 bp, Homo sapiens
agtacagtatactggttaacagtgctggttctaaagttgaaatatctgcttttcaccacttaggtgccaagtgactttaggcaagtgatataatgtttttgcttcagattcctcatccacaaagcgatacttaataatgtaaagtgcttagatcaatgcttagcacatagtaagcaytatataagtgtgctattattatctgtatttaggtagtcaaatattaacatgtgcatagattatggtgtggataatcttgcaaatgagtccactatccaatttttttagaatatgttaaaatgactaccacattgccaatttaatcaaaacctttttgatttattttttttcttaatttccactttcattttagatacaggggtacatgtgcagggttgttatatgggtatatttcaccgatctagtgagcatatgtattagtccattctgacattgctataaataaatacccgagagtgggtaatttataaaggaaaggggtttaattggctcatggttctgtaggcaggctgcacaggaagcatgatggcatctgctcagcttctgaggaggtatttaaaaaaacttacaattatggtagaaggca

SEQ ID NO: 368434 - DNA, 604 bp, Homo sapiens
agtacagtatactggttaacagtgctggttctaaagttgaaatatctgcttttcaccacttaggtgccaagtgactttaggcaagtgatataatgtttttgcttcagattcctcatccacaaagcgatacttaataatgtaaagtgcttagatcaatgcttagcacatagtaagcattmtataagtgtgctattattatctgtatttaggtagtcaaatattaacatgtgcatagattatggtgtggataatcttgcaaatgagtccactatccaatttttttagaatatgttaaaatgactaccacattgccaatttaatcaaaacctttttgatttattttttttcttaatttccactttcattttagatacaggggtacatgtgcagggttgttatatgggtatatttcaccgatctagtgagcatatgtattagtccattctgacattgctataaataaatacccgagagtgggtaatttataaaggaaaggggtttaattggctcatggttctgtaggcaggctgcacaggaagcatgatggcatctgctcagcttctgaggaggtatttaaaaaaacttacaattatggtagaaggca

SEQ ID NO: 368435 - DNA, 585 bp, Homo sapiens
atatactctttaatctactactttgattaaaatatattattgaaggcaaaacaatggtctaccaaatgtgttcatgtcctgatatctgaaacttgtgaaatagttaaattctatggcaagaggaattaaggtaacagatggaattacattgctaattaggtgactttaaaacagggagattaccctggattatctggtcattccaatctaaccacaggggtccttacatgtggaagatggagcagaagcatgatgtcagagtgatgcctatgttatcagaaagaytccaccagcctttggaaagactctacttgccattgttggttttggagaaggaggatggctaggaactaaagaatgctaccaactggaaaaggcaagagagtggattccagaaaataatgcaaccctgccaacaccttgattttagtccagtgaggcccatttatgatttctgacccctccagaaacataaaatttaaaaaattccattattttaagcctcaagtgggggttattttttacagcagcaataagaaactcatacatacatggaaatacgtggtgaataattttaaggggatg

SEQ ID NO: 368436 - DNA, 585 bp, Homo sapiens
atatactctttaatctactactttgattaaaatatattattgaaggcaaaacaatggtctaccaaatgtgttcatgtcctgatatctgaaacttgtgaaatagttaaattctatggcaagaggaattaaggtaacagatggaattacattgctaattaggtgactttaaaacagggagattaccctggattatctggtcattccaatctaaccacaggggtccttacatgtggaagatggagcagaagcatgatgtcagagtgatgcctatgttatcagaaagactccaccagcctttggaaagactctacttgccattgttggttttggagaaggargatggctaggaactaaagaatgctaccaactggaaaaggcaagagagtggattccagaaaataatgcaaccctgccaacaccttgattttagtccagtgaggcccatttatgatttctgacccctccagaaacataaaatttaaaaaattccattattttaagcctcaagtgggggttattttttacagcagcaataagaaactcatacatacatggaaatacgtggtgaataattttaaggggatg

SEQ ID NO: 368437 - DNA, 626 bp, Homo sapiens
cttttattaccttatcttggaaatcatatagagtctcttttcccatggacacaaacttatctaggtttaagaggagtgaaggtagacccatattcttaatgtgaggaatctgaaagtcccactctgagaaaagcatgtgtgatgttatatgctgttgttgccattgtgcaatatatagtttgccacatcttagtgacatggcctttcctcttttaaaatacctggacttgaaaaggaatttaaaatttgcatctttattttcttatacaaaagattatgataataacatttcaactccatagggttttcttgagaactggcatgtataagcagttaataggtaataactatttttggatattttactatgtaacagaaattataaattcaacataattaatgtttatatattatatattaagtcatatttattctctacttatttgggtcatgtattatatatttaattatttgatggaacatacactcmgattaacagttatatagaaatcttacacacatattatttgatcatttgtgcaacaaatatttattgagcatctaatttgtgtcttatacaattgtttcatatctgaaaaagtagtagtagtaaagaatgaaacagt

SEQ ID NO: 368438 - DNA, 496 bp, Homo sapiens
ctgttccataactgggagctaaatgatgagaacacacggacacatggaggggaataacacacactggggactttctaagggtggagggtgagaggagggaaaagatcagacaaaataaataattagatactagacttaataaccgagtgatgaaataatctgtacaacaaaatcatatgagacaagtttacctgtgtaacaaacctgcacttgtacccctgaacttaaaawtaaataaataaataatacgtaacataaacaaacaaacaaaaactgtgctgccttttatttcaggggatttgtactgtcccccattgcaatagtcttgaataaagccttcctttcctattattgtcagtgcaattatcctttgattgtattgaaaattaccaatgtctcattttacataacaattgtttcataaaaatttaagatttaaagaaacaaagttaattaacctgataagtaaatcatacgttgttttaaaattaaaata

SEQ ID NO: 368439 - DNA, 496 bp, Homo sapiens
ctgttccataactgggagctaaatgatgagaacacacggacacatggaggggaataacacacactggggactttctaagggtggagggtgagaggagggaaaagatcagacaaaataaataattagatactagacttaataaccgagtgatgaaataatctgtacaacaaaatcatatgagacaagtttacctgtgtaacaaacctgcacttgtacccctgaacttaaaaataaataaataaataatacgtaacataaacaaacaaacaaaaactgtgctgccttttatttcaggggatttgtactgtcccccattgcaatagtcttgaataaagccttcctttcctattattgtcagtgcaattatcctttgattgtattgaaaattaccaatgtctcattttacataacaattgtttcrtaaaaatttaagatttaaagaaacaaagttaattaacctgataagtaaatcatacgttgttttaaaattaaaata

SEQ ID NO: 368440 - DNA, 610 bp, Homo sapiens
tgagcaataataggaatctacttgtgtatagaattaaatttttttatttctaagttatcatcatagaagttttccttcaattatatttacataatcattttcttatagaatttgtgtctaatagaataatggttgcatacaaaaaagccatgagaaaagtaaatcacctaatttctaaggctatatttctaaaatgaattttctttatataataaagcacataaaatctaaaaagtttatcagtcgaaggaatattttgtgtgtgtgtgtgtgtgcacgcrtgtgtactagtaacactcatgagtgtgtggtcagattatttccattcttgaatattggtaaacttcattacaaatcttgctcaagtctgaacgaagttcaaattttaatattcttagtacagcaggggcagataggaatctcaaaaatcttttcaggataactggaatgaaagtagaatacaaagaacataagttctttgtaaaagaacggagttcagattgaatcagggaagaatggtttctacagctttctggtccattccccatgacatcccaggggaaaaaaagcatgtagatagccctgtaatggtccttcactttctaatttt

SEQ ID NO: 368441 - DNA, 597 bp, Homo sapiens
attttttaaagtaaagtatttttcatgagaacatttgaaattcatatttgttttaacaagtcaaattacaaagaatgtaatctatattcaatttgtargctgaaagacttcaggaggacaaatatttaaaataaatttgttgtgtttactgggggtactattatatttttttttaagaaacatccaaaataaacttacatagcacaaactttcttgtgagatagcttagtatgagccactgagcagttactttccctgtattaaagcctgtgcctatgggatacgaaacatctaagtttaaaatatttcctgtctaattattccaaataggggtttggcaatacataattaaaatgtttagcttctcaaattaaccttatatgaggcttataattatacaattatataatcattgtgttgaggggatgcacatgttaaatgttaaatttgttagatttttttttaagtgaaaataagtttattaagtaagtataccttacttagccaaaagagtggctagtttatagacagagcagtggcataggctggtggcctgaatatgcctattattatttctttattatatgccaaacaaag

SEQ ID NO: 368442 - DNA, 597 bp, Homo sapiens
attttttaaagtaaagtatttttcatgagaacatttgaaattcatatttgttttaacaagtcaaattacaaagaatgtaatctatattcaatttgtaagctgaaagacttcaggaggacaaatatttaaaataaatttgttgtgtttactgggggtactattatatttttttttaagaaacatccaaaataaacttacatagcacaaactttcttgtgagatagcttagtatgagccactgagcagttactttccctgtattaaagcctgtgcctatgggatacgaaacatctaagtttaaaatatttcctgtctaattattccaaataggggtttggcaatacataattaaaatktttagcttctcaaattaaccttatatgaggcttataattatacaattatataatcattgtgttgaggggatgcacatgttaaatgttaaatttgttagatttttttttaagtgaaaataagtttattaagtaagtataccttacttagccaaaagagtggctagtttatagacagagcagtggcataggctggtggcctgaatatgcctattattatttctttattatatgccaaacaaag

SEQ ID NO: 368443 - DNA, 597 bp, Homo sapiens
attttttaaagtaaagtatttttcatgagaacatttgaaattcatatttgttttaacaagtcaaattacaaagaatgtaatctatattcaatttgtaagctgaaagacttcaggaggacaaatatttaaaataaatttgttgtgtttactgggggtactattatatttttttttaagaaacatccaaaataaacttacatagcacaaactttcttgtgagatagcttagtatgagccactgagcagttactttccctgtattaaagcctgtgcctatgggatacgaaacatctaagtttaaaatatttcctgtctaattattccaaataggggtttggcaatacataattaaaatgtttagcttctcaaattaaccttatatgaggcttataattatacaattatatartcattgtgttgaggggatgcacatgttaaatgttaaatttgttagatttttttttaagtgaaaataagtttattaagtaagtataccttacttagccaaaagagtggctagtttatagacagagcagtggcataggctggtggcctgaatatgcctattattatttctttattatatgccaaacaaag

SEQ ID NO: 368444 - DNA, 597 bp, Homo sapiens
attttttaaagtaaagtatttttcatgagaacatttgaaattcatatttgttttaacaagtcaaattacaaagaatgtaatctatattcaatttgtaagctgaaagacttcaggaggacaaatatttaaaataaatttgttgtgtttactgggggtactattatatttttttttaagaaacatccaaaataaacttacatagcacaaactttcttgtgagatagcttagtatgagccactgagcagttactttccctgtattaaagcctgtgcctatgggatacgaaacatctaagtttaaaatatttcctgtctaattattccaaataggggtttggcaatacataattaaaatgtttagcttctcaaattaaccttatatgaggcttataattatacaattatataatcattgtgttgaggggatgcacatgttaaatgttaaatttgttagatttttttttaagtgaaaataagtttattaagtaagtataccttacttagccaaaagagtggctagtttatagacagagcagtggcataggctggtggcctgaatatrcctattattatttctttattatatgccaaacaaag

SEQ ID NO: 368445 - DNA, 560 bp, Homo sapiens
tagatttggaatcatgcaacaagtagttatgtgtctggcccttttttgaggtttattcacattgttgcatgtatatagtgttttcctttgtatttcacagtagtattttattttatttcagtaatgattcatggttttatttatgcagaaattgaatttccattgctaaaagtttttgttcatcttgatattattgtgaaagaaatcatttcttagcttcacttttcaaaactgtaaatagtctataaaattatagttgatttttatataataatcatgtatctcatgtccttgttaaacattattataggaaggtgatagataacccctcctaaatccttaggaatctcagatatgatcataycatcattgaataaagacagttttatgtcatcctttcccacctgtatgcctttaatttctcttctgggtctcactgcattgtctcggactgcctataaaatataattgccccatgaccaatacaggagttagtgccaccaactccctcctaagcagtcaaaaatccatgtataacttttgactcaccaaaaactgaa

SEQ ID NO: 368446 - DNA, 560 bp, Homo sapiens
tagatttggaatcatgcaacaagtagttatgtgtctggcccttttttgaggtttattcacattgttgcatgtatatagtgttttcctttgtatttcacagtagtattttattttatttcagtaatgattcatggttttatttatgcagaaattgaatttccattgctaaaagtttttgttcatcttgatattattgtgaaagaaatcatttcttagcttcacttttcaaaactgtaaatagtctataaaattatagttgatttttatataataatcatgtatctcatgtccttgttaaacattattataggaaggtgatagataacccctcctaaatccttaggaatctcagatatgatcatatcatcattgaataaagacagttttatgtcatcctttcccacctgtatgcctttaatttctcttctgggtctcactgcattgtctcggactgcctataaaatataattgccccatgaccaatacaggagttagtgccaccaactccctcctaagcagkcaaaaatccatgtataacttttgactcaccaaaaactgaa

SEQ ID NO: 368447 - DNA, 378 bp, Homo sapiens
tgaataactgggaaatagctgatggaagtaattgaaagaataatttttggtgggtgttaaagatagaatcttgattgcacaatgttttaaatgaacacaaacaagatagaaatttcagacgacctctgtagtgtcaacaggtagagaataagacaaggtaaatactttttttcattagaaaaaaatacgagtttttttggggggggattatgaggtattgataataaagaaaaagagatagaactagaagscatccttttcctgaataaaaactaaaataatttttattcatagtatattttagtatcaatagacaaattagttttctattgttgctgttaacaaattactacaaacttaatggcttaaaacaacgca

SEQ ID NO: 368448 - DNA, 565 bp, Homo sapiens
tgaaagttatttctatatcccttgaatctgggctggctttgcaatttgctgcagttaataggatgtggcagaagtaaagatgtgttgggtctgagtctgaacttcaagaggttttctatgtttatacttttcctttcaggtcccagtaactatcagacgaacaagcccagctgagcctgctggaggctaagagatcatatggatcatagtccactcatcttagctaagagtatgctaaactaagcaggttgcaactgatttcaaaatatgagagaaagmccagccaaaataagtggagtaatctatccacactgcagctgtccacacatgaaaaagtgagacaacagcacaataaatacccaatcaacctggaggcttctgatctataataaatgctgtggtcttcagtcattgagttttgatgtgatttgttttgcaggaatagctggcttcctttatggctcccagtcctgttgccctaatgccactgtggcttaaagaacacaagcaaaattgcagctttctggggtccaatttttggggacattattccttttcatgaggg

SEQ ID NO: 368449 - DNA, 601 bp, Homo sapiens
tggaggcttctgatctataataaatgctgtggtcttcagtcattgagttttgatgtgatttgttttgcaggaatagctggcttcctttatggctcccagtcctgttgccctaatgccactgtggcttaaagaacacaagcaaaattgcagctttctggggtccaatttttggggacattattccttttcatgagggctctactcttatgacctaattttctccccaaggtcacatctcctaataccatctgctatggtgtatatgttttccccaacaaacctcttgttgaaattttatccccggtctggcagtgtaggcagatggggcctggtgggaggtgtttgggtaacatgggtggatccctcatgagtaagtgagtaccctccttttcrggtgagtgacttctcagtatcttacttctcacaagagctggttgttaaaaaaaaaagcctggacccctcaccttccctcttctcttgccatgtgatctctgtacacactggctcccctttgcttctctgatgagtagaaacaaccagaaacccttaccagatgtaagtgcccaattgtgaactttctagccttcagaatcatgaacca

SEQ ID NO: 368450 - DNA, 601 bp, Homo sapiens
tggaggcttctgatctataataaatgctgtggtcttcagtcattgagttttgatgtgatttgttttgcaggaatagctggcttcctttatggctcccagtcctgttgccctaatgccactgtggcttaaagaacacaagcaaaattgcagctttctggggtccaatttttggggacattattccttttcatgagggctctactcttatgacctaattttctccccaaggtcacatctcctaataccatctgctatggtgtatatgttttccccaacaaacctcttgttgaaattttatccccggtctggcagtgtaggcagatggggcctggtgggaggtgtttgggtaacatgggtggatccctcatgagtaagtgagtaccctccttttcgggtgagtgacttctcagtatcttacttctcmcaagagctggttgttaaaaaaaaaagcctggacccctcaccttccctcttctcttgccatgtgatctctgtacacactggctcccctttgcttctctgatgagtagaaacaaccagaaacccttaccagatgtaagtgcccaattgtgaactttctagccttcagaatcatgaacca

SEQ ID NO: 368451 - DNA, 624 bp, Homo sapiens
cagattgcgaagaaaaatatttggggaaacataattgactctttgcatggaaacacgtgtgaagatgtgtactgtatttgaaaaaaaactcaaggaccaaattaaaaatgatcatgcaaaactgtaggaatgagtgaatgaaaagcttagaaataagtagwtttttgccaaagagtaagccaagagtttgagatcctggatgatagctgagtcaaagatataatcattctagtacatggctgaaattacgtttcaggcaaattgactatagaaacataataacaacaatactagatttatcacaatacatgtaacatttatgaggtgtagatagaagaaaattataaaattgatgttaaaaatctctggaaattcatataaagtcatagagctcagtggatataaaaactcacttagggtaaagcacgtgggtgaacaacatctttcagagtagtacattttagaatctaattataacatagatataacattcttaaataaacagatcgtgattactagaaattctgtttatcttcattgttatactgtcacttttcattcaacattattaagaaatcattgtaggaaagagagttttgtgaactactactaaaaatagtgata

SEQ ID NO: 368452 - DNA, 606 bp, Homo sapiens
aattttaaaagactatataaagtgaattcatttcttatttatggaaagagaccaagtctaaaagtcaattcaacaaatatttattgagcatttattcaacaatcatttattgatrgtattacatataagaagcaagattttaaatgttacaaggatgtaaatataagtaagttacattatttatgtcctagttagaggataagaggagtatactgacaaatataaaggtttttaaaactgcctcctatatttaatttacataatcaatcatccttttataagaaagaaaaaaaaatattgattgtgatctatgagccaagcacttcctagaaaaaagtgctgaataagacaaccaaaggcacataccccaagtatctgccaactgttaacactgtcataataatgaaaacaaaacaaaaaaaataatgaaactatacttaaatgattgctgctgtctttagcctaggcatatgatctcctcagccatacatccagcatgcttcacgccttttgtttacttattagcttctgtaagcatataagattgttatctatttcttgcatttgttggcaggaggggtttccttagagtttaagaggcagcag

SEQ ID NO: 368453 - DNA, 606 bp, Homo sapiens
aattttaaaagactatataaagtgaattcatttcttatttatggaaagagaccaagtctaaaagtcaattcaacaaatatttattgagcatttattcaacaatcatttattgatggtattacatataagaagcaagattttaaatgttacaaggatgtaaatataagtaagttacattatttatgtcctagttagaggataagaggagtatactgacaaatataaaggtttttaaaactgcctcctatatttaatttacataatcaatcatccttttataagaaagaaaaaaaaatattgattgtgatctatgagccaagcacttcctagaaaaaagtgctgaataagacaaccaaaggcacataccccaagtatctgycaactgttaacactgtcataataatgaaaacaaaacaaaaaaaataatgaaactatacttaaatgattgctgctgtctttagcctaggcatatgatctcctcagccatacatccagcatgcttcacgccttttgtttacttattagcttctgtaagcatataagattgttatctatttcttgcatttgttggcaggaggggtttccttagagtttaagaggcagcag

SEQ ID NO: 368454 - DNA, 590 bp, Homo sapiens
atctacagattacttccaaatttacatcttcaggctggtgcttttccccagaccttctagagtccataccacttactaatcaacaacttcacttggaagcataatagccatcctaattttagtatgtctaaaattcagctgctgtacccccactcttcaaacctgttscatctctattcttccccaaatcagttagcaataatccatccttacagatggttatgtaaaaaatctgaaagaacctttgacttctgtctttcttttagagctcacactcaattattcaatgaatcctcttgagaaagacagcaaagtacatctatcacccgacgactgctcaatcatttcattggtaacacattaatcaagtcacattaagtcactgtaatctctcacttggtttattccaataaactcttatttaccttgttctgccttcccaattccactctttctgtgcttaacagaaaatagtgtaactggttaaactgaaaatcaatcacgtaacttctctgctcaaaatgtgcaataggtttccatatatctacaaccaaaatccttgccatgactgccaaggccctaaaacattt

SEQ ID NO: 368455 - DNA, 610 bp, Homo sapiens
tctcctctagccacactggcctcttgtaaaacttgcctccttctttaggttatcatgttgggagaaatttccatgtttatacctgtctggtcctactctcagacctcattgaatccaaaagcagctgttyagcatgatctttctctgacagacttcaatatttttcataatatacatagtccgtgagagacatggtaggactatttcagtccccttctctttctaaaatgacacaatagaatttgtactatactgtgaacagcacccattaagagtcgttcatttccaaaattcccagagaaaaatggaactgaaacctttctccttagacttctaattacctttattcactctcatcctccatcttgcttccttcttcttcccgtagtaattacttgccctggcctagaaggacttttattagcgttctctaataaacaaaatggcccttatgtctaatgctctaaacattagagaaaaaattctctagagtaaaagttgtctattagagtaaaatgattctgctgtgaatccactgagatctgactctcaaagtaaagtcttaaacatttatttactttaatgcttagtttttgcaaacaaagagcac

SEQ ID NO: 368456 - DNA, 620 bp, Homo sapiens
tttactttgatttggtcaccttgctttctttgctcttgattgttttctagccctacttctgtgactacattaaataattctttagctaataataatccttccaataaattcactcttctgcttgaatgattcacagttgtttctctttcctgtttatggaaaattctatttaaataactggaaaatgtataccaccagctcagacttctcttctgagcttctgattgatgcagacaactgaacatactatatctcctattagaagaatgtcacaaagcacatcaaaacaagaaattcaaaactgaactagccatctttctcttcaaaacctaaccttttttgcaatattcccaatgtcagtgaatcgtaccaatagccatccaattgtgtaagtgagttgcgaatctctgacttactcttgtcgcatatttggttatcagtaagtacattcagtatcttaaataccttaattctgattacatcgttctgattgcaccacattccttgctcaatcyattgttgtttctcatttggactactgaaagcacctcctgactacatctaatctgaattatttacaattagtcagagatatagtttcaaaacttatgtaattgtgt

SEQ ID NO: 368457 - DNA, 620 bp, Homo sapiens
tttactttgatttggtcaccttgctttctttgctcttgattgttttctagccctacttctgtgactacattaaataattctttagctaataataatccttccaataaattcactcttctgcttgaatgattcacagttgtttctctttcctgtttatggaaaattctatttaaataactggaaaatgtataccaccagctcagacttctcttctgagcttctgattgatgcagacaactgaacatactatatctcctattagaagaatgtcacaaagcacatcaaaacaagaaattcaaaactgaactagccatctttctcttcaaaacctaaccttttttgcaatattcccaatgtcagtgaatcgtaccaatagccatccaattgtgtaagtgagttgcgaatctctgacttactcttgtcgcatatttggttatcagtaagtacattcagtatcttaaataccttaattctgattacatcgttctgattgcaccacattccttgctcaatctattgttgtttctcatttggactactgaaagcacctcctgactacatctaatctgaattmtttacaattagtcagagatatagtttcaaaacttatgtaattgtgt

SEQ ID NO: 368458 - DNA, 549 bp, Homo sapiens
ctccaccagcgagggcaaagggccaatgtgacaactttcttgggtacccacactttgtggttcctgaattcttgtctggtgcccaagaagaatgaggtcacgcagacaaattgaaggatgatgtatgtggagaattatattgagccatgaaattggctgtcagtggagaggggagctagaaaggggataggaagggcaggtggctctcctccaaagtcacgttgcctctctctaatgtccagccatcatctctgaagtcaagtcatctctccttgatgtccarccacttctctctaccagataagtttggggtctttacaggcacaagatggggggatggggcttgctgtaggtagttttgggaaaggcaacatttgattgatataaagacattatgcagaaagaactaatcgagagaaagcaaacagtaacaaaagttcttacattgggctgcagatttcaggctgcttttggcttgaaggtggggattccacgaggaacctgctcttgtctgcctagaatttctctgcctcctgcctctatcattaa

SEQ ID NO: 368459 - DNA, 576 bp, Homo sapiens
tttattcattcacacctaggttgggctcttcgtttgcaagaatgagaaattaattgcgatgtctcaaatgtaggataatgaagtttaaaaatatccactacttgtaaaggtgtaatatgtttcctaattgtgtccaaaatggaatttttatgattacagagtcattcttcaattctcaaccttctgaaataaacatctgaatatgactataaattccccatgggtaagactaggtcttctattgttagttatctttaagctaggttctgggctcaatagcattgccttctctattgcataaccttaatcattatataatgatgcctcagaagaagtgttgtcctcaaaactggcaaactccagaatgtttcacagaaattaattttctgggtgtttgttctaacttgctgaatctctgacaccatcaccagcaattctgattcttaaggactggttgggtatarggaattggcatttttaacagatttcccaagatattctagtcatagagttttctaagcacactttttttgagaagtacaacccatgccctctgaaccattctggatatgcgtt

SEQ ID NO: 368460 - DNA, 652 bp, Homo sapiens
tgccctgtgtcccagctgctccacttccagctgtggctaaaagggcccaagatacatctcaggccatggcttcagaaagtaaaagccccaaacctcagcagctttcatgtggtgttgggcctgtgggtgtgcagaaggcaagagtttgggagtcttcacctggacttcagaggatgtatggaaatgcctggatgtccagacagaagtctgctsctggggcggagccctcatggtgaacctctactagggcagtgcagaggggaaatgtgggtttggagtccccacgcagatgcccagtggggtactgccctagttgagtagtgagaagagggcctggttctccagacaccagaatggtagatctactgtaagcttgcaacttatacctggaaaagctgcaagcactcaacaccagcctgtgaaagcagatggtggggttatgccgagcagagccacaggggaagagctgcccaaggccttgggagaccacccctttcatcagtatgtttgtgagacatggagtcaaaggagattatttttgagctttaagatttaatgattgccctgctgggtttcagatgtgtatggggcctctattccctttgttttgggaaatttctccttttctgaataggagcatttacccaatgcc

SEQ ID NO: 368461 - DNA, 652 bp, Homo sapiens
tgccctgtgtcccagctgctccacttccagctgtggctaaaagggcccaagatacatctcaggccatggcttcagaaagtaaaagccccaaacctcagcagctttcatgtggtgttgggcctgtgggtgtgcagaaggcaagagtttgggagtcttcacctggacttcagaggatgtatggaaatgcctggatgtccagacagaagtctgctgctggggcggagccctcatggtgaacctctactagggcagtgcagaggggaaatgtgggtttggagtccccacgcagatgcccagtggggtactgccctagtygagtagtgagaagagggcctggttctccagacaccagaatggtagatctactgtaagcttgcaacttatacctggaaaagctgcaagcactcaacaccagcctgtgaaagcagatggtggggttatgccgagcagagccacaggggaagagctgcccaaggccttgggagaccacccctttcatcagtatgtttgtgagacatggagtcaaaggagattatttttgagctttaagatttaatgattgccctgctgggtttcagatgtgtatggggcctctattccctttgttttgggaaatttctccttttctgaataggagcatttacccaatgcc

SEQ ID NO: 368462 - DNA, 597 bp, Homo sapiens
attatttttagtggtttctctaggtttaataatatatttcttaacttattcaagtctattaacagtgaatattatgccattttacacttcacactttccagttcagacatggaataaccttacaatactctaccatggtttttctggtgtctcagttgaatgcctgacgtgttactaaggtgttgaacctgtctttctagtctggctgggccagcacttcaatgttcttggcacttctggatcactagcatctctgttccattctccactctttggtaagcctcacacaattcatcttgctcacgtgaagccctatccttggtcaaaaacttatgcagaactcctcctacccccattgatgtgcagactctgwgccccctcctctctggagcttccagctgctacagcttcctcaagttagcaagaccatcttgttttgctgatttcagcttgctgggtttcagtaccgatagtcctaggcagggagatgagacaaatgtcagattccctttggtagtttccattctttcaaagacttcagtcatgtatagcctgttgtctagttttacatgtgtataatgtagatgggctagtcca

SEQ ID NO: 368463 - DNA, 597 bp, Homo sapiens
attatttttagtggtttctctaggtttaataatatatttcttaacttattcaagtctattaacagtgaatattatgccattttacacttcacactttccagttcagacatggaataaccttacaatactctaccatggtttttctggtgtctcagttgaatgcctgacgtgttactaaggtgttgaacctgtctttctagtctggctgggccagcacttcaatgttcttggcacttctggatcactagcatctctgttccattctccactctttggtaagcctcacacaattcatcttgctcacgtgaagccctatccttggtcaaaaacttatgcagaactcctcctacccccattgatgtgcagactctgagccccctcctctctggagcttccagctgctacagcttcctcaagttagcaagaccatcttgttttgctgatttcagcttgctgggtttcagtacmgatagtcctaggcagggagatgagacaaatgtcagattccctttggtagtttccattctttcaaagacttcagtcatgtatagcctgttgtctagttttacatgtgtataatgtagatgggctagtcca

SEQ ID NO: 368464 - DNA, 569 bp, Homo sapiens
agtgggcattcagtaaatacttgtttgctgaatgaatgaatcaccttttctctacctgcacccccacagggggtatggtagccatgcggagacagcttcaacagccagacagaggagaaggcaaattcatcttattcaaacctatgtggaagacttataatagcaccccatggaaaaggtcacaaatatacagggcaaacagtgaaaagcatggttaactttggcaaccaactaaagaaaacaaaacctcacacaagccacatttaccaaggcacctggtataaaaccaggggaaagggcaggacttttattgctcattttttacaaactgaggttttaaaaaagtgaggttcttatatgctggtattaatatcttcctscctgtgagtgggatgatgaaagtaaccagtagagagcaaagtaataccaaagaaagtcagcttactgggataagagcttccagagttaaggcacagaggaaggcatcttgacaccttctctcagctaagtggggaaatacttgcctgagtaagtagtctcaactgaaaattgagtattcaatgaaaata

SEQ ID NO: 368465 - DNA, 608 bp, Homo sapiens
aaatgaaaatgatttttccataaaatctgaaaaaatattttgggtgtactagataatgtatagtatattgcagcaatgatgttactagttacattgtatgtaattagtaattaactaagtttttggtttttgttcttgtggcttatcaggattaattagttgtgtacaaatttagttaattcacttattaattgactaattagttaattcattaattactaattacatacaatgcctctgctttaaacttgttggtgctatcccattgtctgtaagattaaagctcaatcaagttcctyaaaatggtttacaagacctattttcacctgctaatttctacctccctaacttcatatctcctttgccttgcatcataatcacaaaaaataccaaattgctagtaattctcagctcatcagccattcctttctttcttaactttggccatgtgcccctctctgcttagaatggctccttctcccttctttgcctgataatttcaatgtatccttaatcagcccctcctaataccacatctccaatcatgcatggtaggtactccttctttatgtcattgctgagtttctatctttatcactatgcagata

SEQ ID NO: 368466 - DNA, 590 bp, Homo sapiens
ggatgcaagaagagcatgagatcatgtctgtatagagcttcatcaactgtgaamtgctcttcaaatagtcagtaattctcttagctcattttctgttgctgtaactgaatacttgagactggataatttataaagaaaataaagttatttctttaccattttggaggctagaaagttcaaggtcgagaggctgcatctgctgagggcctttttgctggtgaaaacattctggagagtcctgaggcattgcagggcatcagtctcttccccgtgaggactttgcataaaaactgttgaattgagtaagacttcacctttttttgtaacacagagctctgacgcaaagagtcattatcaaatcatcccatgaactttaggaagttttttaaatgaaagcagcaccaaaatccagctggatttgggtctcagagcagagggcatacagggaatagtgatactttcagagaaactgagttgaatcttaaagagataataccagtggccaaactgtatcactaaaattgcttctttattaggattttctccctaatctggaaaataataagggccctgacataacttacccagaa

SEQ ID NO: 368467 - DNA, 623 bp, Homo sapiens
gagggcatacagggaatagtgatactttcagagaaactgagttgaatcttaaagagataataccagtggccaaactgtatcactaaaattgcttctttattaggattttctccctaatctggaaaataataagggccctgacataacttacccagaacattatgtatagttatttgtttaattaaagatgagggaaaatcaattctaccactacatgcaatattttggtagagattgtctgcttaaaaacaaaacacatgcacttcatttggacttactttcaagaaaatattcggaaagaaacttaccaaaagggacataatgttttcttccactacttctaaaaatagtagagctctaaactttcctcttttcttcttccaagataaaagtgttaacagatatatacaagccataggcaggttttgagatttgwtgtggttgtttctgtttgtttgttttttaaaatgagagatagaaggggaaagaagagagaaatttggcacttttctcagcagtggtttagtgttgtgccttcttcccattctttggcttatgatttgggaaaggcaaaagcagctagccagaaggacttgacactcaattccattcatagcagcagc

SEQ ID NO: 368468 - DNA, 570 bp, Homo sapiens
gcaagttagttacttccttgatacaaggggcatacaggccttgagtaaatatacccattacaaatgggagaaattggccaaaacaaataggctacaggccccatacaagtccgaaatccaatagggcaattattaaagttccaaaacaatctttgactccatgtgaaaggattcacattcaggtcatgctgatgcaagagrtggtctctcatggctttgggcagccctgccactgtggctttgcagggtacagcccccttccagctgctttcaaaggctggagttgagtgtggccctcttctcacagctccactaggcagtgcccagtggggactctgtgtgggggctccaaccctgtatttcccttctgcactgccctagcagaggttctccatgagagctccgtccctgcagcagacttctgcctggacatccaggcatttctctacatcctctgaaatctaggcagatgttccccaacctcaattattgacttatgtgcacccagaggccgaacaccacaggtaagctgccaaggcttggggcttgcaccctctgaagccatgggct

SEQ ID NO: 368469 - DNA, 581 bp, Homo sapiens
ggccttatttggaaacagaatctttgagatgtcatcaagttaagaagaggttacactggattcaggcaggccctaaatccattatgacctgtgtatttgtaagaaaaattcagacacagagattcagacacacagaaasattgttatgtggtggcagaggcagatattgtagtgatgcatttccatgccgggaaatgctaaggatggctgttaataaccagaagctgggagacaggcatggagcagattcccactctggatgcccaagaaggaatcaaccctgctatcctcctgactttagacttctagactcctgaactgtgaaagaacatctttgtattgccttaaatcacccagtttgtggtagtttgttatggtaacaataggaaataatatagtaactaatatagatgcttagtaaccattttcccatcccaaaattgactaaggaagctaataagaaggggtagaaaagtggatttcgaaatagcctttaatgttcaataggtgttccacttcagcacaaatggaaatttccttcctggttcttgtgactgctctagtatttatttacaaattga

SEQ ID NO: 368470 - DNA, 581 bp, Homo sapiens
ggccttatttggaaacagaatctttgagatgtcatcaagttaagaagaggttacactggattcaggcaggccctaaatccattatgacctgtgtatttgtaagaaaaattcagacacagagattcagacacacagaaagattgttatgtggtggcagaggcagatattgtagtgatgcatttccatgccgggaaatgctaaggatggctgttaataaccagaagctgggagacaggcatggagcagattcccactctggatgcccaagaargaatcaaccctgctatcctcctgactttagacttctagactcctgaactgtgaaagaacatctttgtattgccttaaatcacccagtttgtggtagtttgttatggtaacaataggaaataatatagtaactaatatagatgcttagtaaccattttcccatcccaaaattgactaaggaagctaataagaaggggtagaaaagtggatttcgaaatagcctttaatgttcaataggtgttccacttcagcacaaatggaaatttccttcctggttcttgtgactgctctagtatttatttacaaattga

SEQ ID NO: 368471 - DNA, 549 bp, Homo sapiens
gaggaacctaaaagacctcgtgtttaagtatattatatgaagctggactgagtatgcagagaatccaggatttaaatccagccaccttgattccaaaattatgctcctaaccagtatgctatagtactcccaaaaagtaagaagatctatgaagggaaaagccagaggataaaactcaatagaatttagggaatttataactatgcctatattagcaaaaagagtctagttgattcatattttaaggatgcatatatgacttaaagcctagttgttagaaaagtgttagctaatatattgtcactaaatttattgcactacactctgggattattcaaacagcccacagaaaacaaaatgggcaatcataacactaatctgatagtattttmatttaaaaattttaattactaaaatattagtcttttgtcaactgcaagaacaacgatttatcttctcactcagaataatgtagcatcacaatagcattttttcctgttcagaaactccaggaattcaccctgtgcaaaaatgtgatcttgcccaaaa

SEQ ID NO: 368472 - DNA, 522 bp, Homo sapiens
ttgtgtaaatttaaaaaccaggaagaactaaactctattatttagggatgcacatataggttataaaactacacacccacacccacacccctccatatacatatatattatacacacacatatatacatacatatatgtgtatgtatatacatatagatatgtatatatacacttatatgtgtatatgcatacacgtgtgtgtgtatgtatgtgtgtctgtgtgtatttagggaagctattattctaaaggtcagaatagtgtttatctccaaggttcaaggaagggagggtccccaagtagcttttaaggtactagcaatgttctataggcagtgattaaatgagayttttgtattacttattaagtatatggttcataaatttttctgtgtatgagtattataacaaaaaatactaatgccagaacctataagtgtaggaaattgtcttctattaagacttttgattttgtctgtatggtatctgtgagttatgtccataccttagataatgtttatttt

SEQ ID NO: 368473 - DNA, 522 bp, Homo sapiens
ttgtgtaaatttaaaaaccaggaagaactaaactctattatttagggatgcacatataggttataaaactacacacccacacccacacccctccatatacatatatattatacacacacatatatacatacatatatgtgtatgtatatacatatagatatgtatatatacacttatatgtgtatatgcatacacgtgtgtgtgtatgtatgtgtgtctgtgtgtatttagggaagctattattctaaaggtcagaatagtgtttatctccaaggttcaaggaagggagggtccccaagtagcttttaaggtactagcaatgttctataggcagtgattaaatgagacttttgyattacttattaagtatatggttcataaatttttctgtgtatgagtattataacaaaaaatactaatgccagaacctataagtgtaggaaattgtcttctattaagacttttgattttgtctgtatggtatctgtgagttatgtccataccttagataatgtttatttt

SEQ ID NO: 368474 - DNA, 577 bp, Homo sapiens
tttgtattacttattaagtatatggttcataaatttttctgtgtatgagtattataayaaaaaatactaatgccagaacctataagtgtaggaaattgtcttctattaagacttttgattttgtctgtatggtatctgtgagttatgtccataccttagataatgtttatttttctgtaaacactgtggcgcctcacctaggggtatatcaaattgactggtacctgagtgaaataaacagaaaggaataattcagtaatattagcatagccatgactattagattctgtccttacttgtaaaagacagacaatgacttagataagtccgtattgtttccaattttaatttgatggttcatttagaacatataaaaatgtaagttgtgtttgattggtagggacaactcaaaaaacaaatttaacttaccaagattttaggcattgtctgacaaaacagactatagtgaattttcctacaagatatatagtcaacctcagtgatctcatattgtataatgtgaaaagggaattcataatataattccacctttctttcctctcttctttctaaaatg

SEQ ID NO: 368475 - DNA, 537 bp, Homo sapiens
aaaatgtcacacattaaaatgtacaaaataaaacataatacaacagtaacacaaagagctggagggaaaaatggacatatatatttgcaagggtcttatattatacaaaagttatacaatattatttgaaaataggcttcaataagttaaagagacttaacataaacccaataccatcaacaaaatataaaacaaatcagtcaatagtaaaggtagagtcccaaaatgtaaatacataatcccaaggaagacaagaaagaggaaaattgaacaaagtacaragaaaacaaatggtacatgaacagaaaatgatagatttaatagcaacaatcatagtggtaattacattaactataaatgatctaaacatgctttttaaaaggcacagattattaaatgggaactgcaaaaaaagatttgtataatgtctattttaaaaatcagatagattaaagtgaaaagtaaaagaatggaaataaatatacccttcactcagtaatgtaagcataagaaagttggcatggctatattaatatt

SEQ ID NO: 368476 - DNA, 631 bp, Homo sapiens
cattcaatatgacactagctgtaggtctgtcatttatggcctttattaggttgagttatgttccttctatccccagtttttttagggttttatcatggaggggtgttgaattttatcaaatgctttttcaccatcaattgaaatgatcatatgatttttatcattcattcagttgatgaaatgtgtcacattgattgatttgtgtatgttgaagcatacttgcatcccagggataaatctcacttggtcatgatgaatggtctttctaatgtattgtttaattatatttgctagtattttgttaaggatttttgcatcaatattcaccagagatattagcttgtagtttttttttgatgtgtccttgtttggttttagtaatcagggtaataatgtctttgtagaatgagtttggaactatttcttcctctttttttgtatattttagaatagtatgaataggatcagtattaattcttctttaaatatttggtagaattcagcagtgaagccattggatctcaggcttttctttgctggragactttttattacaacttcaatttgttacttcttattttctatttagattttgtatttcttcctggagcagtcttggtaagttttatat

SEQ ID NO: 368477 - DNA, 539 bp, Homo sapiens
ccaacttaacactgcataaacaaagaagcaaaaagaaaactaataagaactactgcctttacttcatctcccccagttttartctttttgttgtttctatttatttatatcttgttgtactgattgtgtcttgaaaagtcgttgtagttactgtttgtaattggttcattgcttagtgtttctgcttaggataagaatactttacacaccacagttacaatgttataatattctgtgtatttctatatactatcagcattgagttttgtaccttaaggcgattacttattactcactaatgtactttttttctgattgaagtactccctttagcacttcttatagttctggtattgatgaagttcctcagcttttgtttgtctggaaatggctttatttctccttcatgtttgaaggaaatttttgcctggtatactattgtaaggtaattttttttcttccacactttaaatatgtcatgccactctctcctggcctataaggtttccactgagaagtctctgccagatgtattggag

SEQ ID NO: 368478 - DNA, 539 bp, Homo sapiens
ccaacttaacactgcataaacaaagaagcaaaaagaaaactaataagaactactgcctttacttcatctcccccagttttagtctttttgttgtttctatttatttatatcttgttgtactgattgtgtcttgaaaagtcgttgtagttactgtttgtaattggttcattgcttagtgtttctgcttaggataagaatactttacacaccacagttacaatgttataatattctgtgtatttctatatactatcagcattgagttttgtaccttaaggcgattacttattactcactaatgtactttttttctgattgaagtactccctttagcacttcttatagttctggtattgatgaagttcctcagcttttgtttktctggaaatggctttatttctccttcatgtttgaaggaaatttttgcctggtatactattgtaaggtaattttttttcttccacactttaaatatgtcatgccactctctcctggcctataaggtttccactgagaagtctctgccagatgtattggag

SEQ ID NO: 368479 - DNA, 575 bp, Homo sapiens
ttttgtccttcattgctaagcaaccaaaaaacgtggttagataacctgaagagtatagtataaacctgtttgggtttgttttgttgaaatcatgcctagaaaattgcatttgtgaacaaaataattatatttgcaacttaattagtacttcacatatgtcaggaactttatgtgtattattttatttaaccctcacaacagttcagacaacctcactttaatatattaaagtcagwttatagatcaactacttaaagtcagattatagatcgactacttataagataatttatatttagaagtatttaacaagcctttgaaaaattggttgagcaatcgaggggttgctatattgtgctaccatgctttctttctaaactcaggcactcattttgatatgagagcaggccagggaagtgctaggtacagaagggccgaatccctggagagggctccacccttgggcctgtgcccacagacctaagtgagaacagacacttctcttttcacacccgaatgttgcgttttccaagaccactctggcctgcgacaccccccatccagtgcccatgtaa

SEQ ID NO: 368480 - DNA, 575 bp, Homo sapiens
ttttgtccttcattgctaagcaaccaaaaaacgtggttagataacctgaagagtatagtataaacctgtttgggtttgttttgttgaaatcatgcctagaaaattgcatttgtgaacaaaataattatatttgcaacttaattagtacttcacatatgtcaggaactttatgtgtattattttatttaaccctcacaacagttcagacaacctcactttaatatattaaagtcagattatagatcaactacttaaagtcagattatagatcgactacttataagataatttatatttagaagtatttaacaagcctttgaaaaattggttgarcaatcgaggggttgctatattgtgctaccatgctttctttctaaactcaggcactcattttgatatgagagcaggccagggaagtgctaggtacagaagggccgaatccctggagagggctccacccttgggcctgtgcccacagacctaagtgagaacagacacttctcttttcacacccgaatgttgcgttttccaagaccactctggcctgcgacaccccccatccagtgcccatgtaa

SEQ ID NO: 368481 - DNA, 649 bp, Homo sapiens
gtggggtgaccaagcaggcgagtcacacccctgttgcacatcctgcaatgggaatcagggaactcttccatttcaattttccctgctgctggggctgtaaagctcctgagagctckctgttgagcccataaaaaagaatgagttcacatcttttgttggaacgtaggtggagttggaggccattatccttagcaaactaatgcaggaatggaaaagcaaatactgcatgttctcacttataagtgggagctaaatgatgagaactcatgaacacaaagaagggaacagcagacactgggatctacttgagcgtagagggtggaaggaaggagaggagcagaaaaatagccatcaggtactaggcttagcagcggtgattaaataatctgcacaacaaacccccgtgacacaagtgtacccatgtaataaatctgcacatataccccgaacctaaaataaaagctttaaaaattataaataagttataacatcttatatttgtaaaaaatacttagccttacaaaatgcatttacaaatacttcattattgcatactcataactaaccctgaaagatagaacacattttgttgtttttatcttataatgagaaaatgaaagcttccatagaagaacccatgatcactttc

SEQ ID NO: 368482 - DNA, 625 bp, Homo sapiens
aatggccaataggtatataaaaagatgtccaatgtgactaatcagcagggaaatgcaaatgaaaaccacaatgaggtatcatctcaaacctattagggaggctattatcaaaaagtcaaaagataacaagtgttgaggttgtggaaaaactcgaacccttgcacactgttcatgggcaacagttatggtgcaatcactacgggaaatagtatggaagtttatcagaaaacgaataataggactaccatataatccactgataccatttctgggtatttatctgaaagaaatgaaatcatgatctgaaagagatattagcacttacatgtttattgaggcaccctttacaatagccaatatgtaaaagcaacaagaatgtccatccaatagatagatgtgaaaatatatatatatatatattcacacacacagacacaatgcaatgttatctagcctttaaaagaaagaaatcctgcaatatgtgaccacaaggatgaacctggaagacgttatgctaagtaaattgtcagtttcagaagacaaatgctacttgattccacttacatgaagtatatttctttaattatytgttttctatacatatatatgtctatgtgtttgtatg

SEQ ID NO: 368483 - DNA, 537 bp, Homo sapiens
ttggagattaagtccttctggagaagaagtagcatatattatataataattttaataaagaaatgtgcgttactttagaaattaaatgtattgcgcatataaaaaatagcccagtcatttttatgtgccaaataaaactagctggtttcttcagattatttagtagtttacaaacaatgatccatcttaatggttctcaaatgtgttcaaatggcagygacatcatgagactcttcaaaatattataatctttgtacagcactttgaaatttttatatttaattccttaacacaaaccaggaactactttcttagcaaaagaaacaaaaacaaacactaaaattatattatatatgtaatagatagtcataatcattagtacacacaccctttgaaaagaaaaatgaattatcaaattaatatgttgaatcattttcaagtttttctgtatttactcatttgctacttttaagttttaactctgttattatattatttatgaaacaatgagaaaattcgtatcattcaattttagcc

SEQ ID NO: 368484 - DNA, 506 bp, Homo sapiens
gcattgtgttcacctgatgtatatttatttccttatagcttgactctactctcaccagcatttaagatccatgagagcaaatattttgttgtttcctattgtatccccaagatccaaaccagtgcaaagaataggatctcaatagatatttgatacataagtaaatgaatgaatgagagtctttctgacctcaattaacagtcatatattacagggaaaaaaagacgcaaacaagcacaggattaatcataacctattttgccaagtatgagcattttaaaaattgctaactaataatgactgattttctaaatcaaagaaatctttaacactaaaaaccatcaagaatctattatatcagaarcaaatgcatatatttagctgttccagaaattcaatgtatttttcgtattttctttcatgctagtaaatatttcagcaaggaaatcactgctccagatacattggctgtcaacccttatctgggccacaccacaatgctaact

SEQ ID NO: 368485 - DNA, 574 bp, Homo sapiens
agacaaagtgctatgcatttattctaggtttttgttatgaatttctgttcatttacaattgccatacagatcaacttcagccttcaaarggtaattttttgggaccaatcttttaaatttgtgataatgagtaagagagaaacatttttcaggaacctaaatctagaactgtttagcatcttaccccctgaggtcctcatttactgttttcagctgaagctgaactgatctaatacatttattttataaattatcaatgttatttctgtcctcagaaaagttcttaggtagcattgtcttagatgtgacattctccttcttggagagactctccctgaagacttgagactttcagaaaaaggcttcatctcttacatccatagaaatttacattattttgaccagaactatgtcaagttctattttgttccaatttagactttggacctctcacataagaattgtcagtccttgctgagagtcccctccgtctgtgagttcgtggtaaccactcattgctaaccacattcaataacagactttttatttgtagcccaggtttattaccacccag

SEQ ID NO: 368486 - DNA, 574 bp, Homo sapiens
agacaaagtgctatgcatttattctaggtttttgttatgaatttctgttcatttacaattgccatacagatcaacttcagccttcaaaaggtaattttttgggaccaatcttttaaatttgtgataatgagtaagagagaaacatttttcaggaacctaaatctagaactgtttagcatcttaccccctgaggtcctcatttactgttttcagctgaagctgaactgatctaatacatttattttataaattatcaatgtyatttctgtcctcagaaaagttcttaggtagcattgtcttagatgtgacattctccttcttggagagactctccctgaagacttgagactttcagaaaaaggcttcatctcttacatccatagaaatttacattattttgaccagaactatgtcaagttctattttgttccaatttagactttggacctctcacataagaattgtcagtccttgctgagagtcccctccgtctgtgagttcgtggtaaccactcattgctaaccacattcaataacagactttttatttgtagcccaggtttattaccacccag

SEQ ID NO: 368487 - DNA, 415 bp, Homo sapiens
cttgtccgccactattgaacccttgttaaatgacaaagatgtacatacaatggatctaagtgacctgaagtatcttccacttggaactttctgtgcttctttttgactttcttcagtgtctctataccttgaagctttgcactactcatgtttgtgccttacttctgagtttttaggaggcatcttrgtatgttaactattctatacaacacgcatttgtatttccttgatttttacatttataatctctaactgagatgaaaactttaccaattagggatgtgctgatgggttcctgaacatgacatactcaagttctgctgtaataatatttcttagaaacgtatcaggaggaaacttcagttaccatcagctataaactaatgtgaaacaagtttctcatgcagtggagtcc

SEQ ID NO: 368488 - DNA, 587 bp, Homo sapiens
cctggctgggaggtcttgtccagtgatgaggagtgaatcagtgtctcacttaaagaagcagtctggccacgatatggaaaagcaactgtgctgtgttgggggagacccttcctcatctgggccatttggactcttcaaagcctgcacgctggaatggctgaatggaccaaaccacagagatgayggccacacctccccttgggagctcctaccagccttaggcaaattccaccctgttgccattggctggctagaatttcaagccagtgagtgagtcttatcttgtgaggtgctacggaagtgggaaccacagaatgatgttgcttggctccctgaattcagcccccttcctaggggtatgcacggacctccttccttgcctgagttgcagacaccattgttggggatcctggggatggagtgtgtaaagctcctgtgtctctgtgtgtgcctggtcagctgctctgccgagactccacacagctctgtgtgttaagacccaaggccctggtggcacaggatcatgaggggatctcctgatccatgggttgcaaagattcgtggaaggagtgtggtttcccaggtgg

SEQ ID NO: 368489 - DNA, 587 bp, Homo sapiens
cctggctgggaggtcttgtccagtgatgaggagtgaatcagtgtctcacttaaagaagcagtctggccacgatatggaaaagcaactgtgctgtgttgggggagacccttcctcatctgggccatttggactcttcaaagcctgcacgctggaatggctgaatggaccaaaccacagagatgatggccacacctccccttgggagctcctaccagccttaggcaaattccaccctgttgccattggctggctagaatttcaagccagtgagtgagtcttatcttgtgaggtgctacggaagtgggaaccacagaatgatgttgcttggctccctgaattcagcccccttcctaggggtatgcacggacctccttccttgcctgagttgcagacaccattgttggggatcctggggwtggagtgtgtaaagctcctgtgtctctgtgtgtgcctggtcagctgctctgccgagactccacacagctctgtgtgttaagacccaaggccctggtggcacaggatcatgaggggatctcctgatccatgggttgcaaagattcgtggaaggagtgtggtttcccaggtgg

SEQ ID NO: 368490 - DNA, 594 bp, Homo sapiens
aacgtacacatgcatgtgtcttaaggtagaaaaatttatatccattttggtatrtaaccaatcatagaattgctgggtcaaatggtagttctattttacattctttgagaaatccctaaactgttctctacactggctgaattaatttacattcccaccagcagtgtataagcattctcttttctctgcaacctctccagcatctattatgttttgactttttaataatagtcattctgactggtatcttatcattttgatttgcatttccctaatgattagtgatattgagcattttttcatgtttgtttgctgtgtgtatgtcttcttttgagaagtgtctgtttatgtcctttgcccatttttcattgtgttatttgttttctgcctgtcgatctgtttgagttccttataggttctgaatattacacctttgtcaggtgtatagtttgcaaatattttctcctactctgtaggttgcctggcctccccaattgctggagctacagccaccgttgccggagatccaaggtccctgggtctctgcatgtatctgagctatgggtctgcccagaccccatgcagctctcttgc

SEQ ID NO: 368491 - DNA, 526 bp, Homo sapiens
ttcttattccaactttgaaaacggatttttttatgaattaaaagaaatattaaaatatagattataaatatattacttggttcaaaagtggctacagaaagaaactacataggaaatatagagcttgacattatgaaaaaacaaaagtgagatagagatctaaattttttaccaaagattcggaatatctcaattgtttatatcaaagaatgggggaaaatgtagctaatgagaatgaaagctaggatattaagccctgcctcctattcgttatgttgctactgaaaatatatccaccaaaaaaatcatatgatgataagaagacaaaagatgttctatagcatttgacacctaattaaagtgcttagaaagctaagaatatcaatttaaatgcagcagctgcatcatgcctactagtagaatactggagccagtcctattaatatcgyttataaaagaaggagcttgcagccatcattactgtttaacttagtattacatgctcagaactcaaaatagtcaacta

SEQ ID NO: 368492 - DNA, 526 bp, Homo sapiens
ttcttattccaactttgaaaacggatttttttatgaattaaaagaaatattaaaatatagattataaatatattacttggttcaaaagtggctacagaaagaaactacataggaaatatagagcttgacattatgaaaaaacaaaagtgagatagagatctaaattttttaccaaagattcggaatatctcaattgtttatatcaaagaatgggggaaaatgtagctaatgagaatgaaagctaggatattaagccctgcctcctattcgttatgttgctactgaaaatatatccaccaaaaaaatcatatgatgataagaagacaaaagatgttctatagcatttgacacctaattaaagtgcttagaaagctaagaatatcaatttaaatgcagcagctgcatcatgcctactagtagaatactggagccagtcctattaatatcgcttataaaagaaggagcttgcagccatcattactrtttaacttagtattacatgctcagaactcaaaatagtcaacta

SEQ ID NO: 368493 - DNA, 568 bp, Homo sapiens
tcatgtaatgtctgtctatctttctcttctcctttaataatgtgttagctattctggaatgtatgcctctccattataacctttataatcagttcattgatagtcactagatactttgggggattttgactagtattgcattaaatttatagatcaagttggcaagaactgacattttgacaatattgagtcttattattcatgaacatagagtatctatttacttagttctttgattctcttattagaattttatagttttcctcatatagatcttatacatatttattagaattatatctaagtattttatttttggaagrtactaatgaaattgtattctttttaatctcaaattccacctgttcattgttggtataaagagaagcaattaaccttttatgatagccttgcatcttgcaaccttgctataatgacttatcagttccaacatttttgtgttgattctttccaatttccaaatagacaattatgccatctgcacacagttttatttcttccatctcaatctatatacattttcttttcttgtctttcacagcagcta

SEQ ID NO: 368494 - DNA, 560 bp, Homo sapiens
taccatcctggtatcccaactctctctttctctttggcttgttttttcctttttcgtaggtttttcttacctaagtcatctgttgcttgaarcaaagagaatatcttttctgttcttctcattaggaaatagtaactgaaaactaaaagtttgatggttatagtagctggttgctatgagctttgtgtgaggcatatactgagacttttatgtgtattttctcatataaatataacaattctctggtatagatgcaatttttacccatcttatttgttaggaaactatgacccagttccttgagcatggctacactgccagtaagtgacaaggctgtatgttaatactgtcagtctaactaaaaacctgtacccttcactatgattatctggtgtactaaaatcattttattagaacttgtgcattgattgcatcaattatattactaacatcaatatttaaaattaatatgatagtgtagtgacttgcaatataagaaacacatattatacacaaaactaaaacaaaagtttcacaaaccaatgtcaaccttactgtct

SEQ ID NO: 368495 - DNA, 560 bp, Homo sapiens
taccatcctggtatcccaactctctctttctctttggcttgttttttcctttttcgtaggtttttcttacctaagtcatctgttgcttgaaacaaagagaatatcttttctgttcttctcattaggaaatagtaactgaaaactaaaagtttgatggttatagtagctggttgctatgagctttgtgtgaggcatatactgagmcttttatgtgtattttctcatataaatataacaattctctggtatagatgcaatttttacccatcttatttgttaggaaactatgacccagttccttgagcatggctacactgccagtaagtgacaaggctgtatgttaatactgtcagtctaactaaaaacctgtacccttcactatgattatctggtgtactaaaatcattttattagaacttgtgcattgattgcatcaattatattactaacatcaatatttaaaattaatatgatagtgtagtgacttgcaatataagaaacacatattatacacaaaactaaaacaaaagtttcacaaaccaatgtcaaccttactgtct

SEQ ID NO: 368496 - DNA, 567 bp, Homo sapiens
atggctacactgccagtaagtgacaaggctgtatgttaatactgtcagtctaactaaaaacctgtacccttcactatgattatctggtgtactaaaatcattttattagaacttgtgcattgattgcatcaattatattactaacatcaatatttaaaattaatatgatagtgtagtgacttgcaatataagaaacacatattatacacaaaactaaaacaaaagtttcacaaaccaatgtcaaccttactgtcttagggtatacaatgaactctgatagtttcgatattattctagtctagtccaatctagtgttttttaaatattatccattcactaaattgattttataacccactgagttataacccatattggtggaaacrttaaataatatttagcttttacttttcttctataagatatatctaatgatttatcaaattagatgcaaaagcaaattttttaatttctgataattttattttttaaaagaaattcataaaccattcagactgcgtctaaagaacagaaacctagaattcagttcttcagagggtctggtaa

SEQ ID NO: 368497 - DNA, 560 bp, Homo sapiens
atgggaattttttcctcgagccaacaaaaccaagtctctaggttcctcttatcagatatgtcctcgaggcatagattcaggtatagaacttcttttttttaatctctgaagagttccttaacttttaaaaactcagttatagaaataaaaagaaatcttctgacattttattcagcattcctaggtattttttcttgggagttttttcaggaaatctagtttgctattttttctcccagtttcttatgtaattctctctcattctttaagttatagattaaaattcacctcctcagtgaggcctttgtaaatagctcaagcaaccaacctcctctatcccatatacttcattttctatcacttgctgaatttaaattatttacatattaattmattatttcttaaatttaatataaaatatatatgcataaatatggaaatttgtttaatttatttatttactaacatggccattttttggttgccatatgctagtcagaatggtgaaaagtactgggactttgactcattcatagcagtatccttaggacttataaaac

SEQ ID NO: 368498 - DNA, 599 bp, Homo sapiens
aatgtggggaatttatctaacttgtttacacatgtggtcttaagactaacctttgttctacagtgggtgcttaattgctttctactcgggaagtctataatgtcaattaccctctagcrgtgttggctcaagcctttgtcaattaatctttactgaataaatgcaagtctcactggctggtcagggccctgtcacaactgtttacagcactctgtgtggagtctgtaagcggcccagaaactcaactggactggcaaagcagagtatctgtgtgtcagtgtactttattcatccatcgttgggtcaggttctacaggacagacccccacaaaatagaaatgaactgactgggacttggagcaaaggtcacccttgttatgctgcagcaaagaacttagctccattgtgtccatgccctagggctttgtggaaggccaaacttaagagtaataacctatagtacctggtggaagaaatttccaagcagcaaagtcttcaagaagtgcaatggctacttctaacagcttacaattagataccgcagcaaaaaaaaaaaaaaaaaaaaaatgacctaaaggtggaatttttaattaagaggg

SEQ ID NO: 368499 - DNA, 599 bp, Homo sapiens
aatgtggggaatttatctaacttgtttacacatgtggtcttaagactaacctttgttctacagtgggtgcttaattgctttctactcgggaagtctataatgtcaattaccctctagcagtgttggctcaagcctttgtcaattaatctttactgaataaatgcaagtctcactggctggtcagggccctgtcacaactgtttacagcactctgtgtggagtctgtaagcggcccagaaactcaactggactggcaaagcagagtatctgtgtgtcagtgtactttattcatccatcgttgggtcaggttctacaggacagacccccacaaaatagaaatgaactgactgggacttggagcaaaggtcacccttgttatgctgyagcaaagaacttagctccattgtgtccatgccctagggctttgtggaaggccaaacttaagagtaataacctatagtacctggtggaagaaatttccaagcagcaaagtcttcaagaagtgcaatggctacttctaacagcttacaattagataccgcagcaaaaaaaaaaaaaaaaaaaaaatgacctaaaggtggaatttttaattaagaggg

SEQ ID NO: 368500 - DNA, 646 bp, Homo sapiens
ttcaatggtgacagcagttggtcagctgtcatgagagggaacccatgctgtttgggtccttacatggcttttacctcaactagaattgcttctctgttctagagcccattgcacaagcagagttggcaagaacagatgctggctaccatctactggccaagtcattttgtcaactttataatttagtttctcttccatgatgaattccctcttgtgagcaatgacttatgacacaaagatcattatgtattgtattcactttcacagttccatcccaatgcttctttctcagacgtccttgtccctaacttaatatttttactttcaggtctctaaccaaccatacaaactatttataatgttcatgagtcaatttttacccttactgtaaaatactttgtcttctcaaagtaaatgacaagatgcactgcttgagttccttccagtggaagatttttcactcatcactgtcttcagcgccatccctgggtggaatgtggcataatagcagttcattttcagcttgtacccacrtaccaagacaacccacctttgaaccaacctcaggctttttttctgtactaccagatctaaataaaatctgtttggggtccttttttcttttattctggtaggtatggaaaag

SEQ ID NO: 368501 - DNA, 464 bp, Homo sapiens
attctgacattcttataagaagtattgtgcctagtgtttagctctgtcttcccttggctgaaagagatggaattatctttaaatgctgccaaagaggcctccaattctcacattttattttatataaataattaattaatagatctgagctggccatttcctctctttaatctatcagyggcacttagcagcattgaaatgtttccaaaagtctttatagctactatttcctcagtatatctcaaaagccagatacacccttaggtgaatgctattgtacctgcattccactccaattcaccacaggtggaagccttagtgattggatcactgcagatgccagggtctggcaattctccacctgccattgaggctagggtgttaattactatacagctgtcaatgatcttatcccctgatatggtttggctgtgtccccacccaaatctcatcttgaattacag

SEQ ID NO: 368502 - DNA, 552 bp, Homo sapiens
agatctgatggtttcatgaggaggagtttccctgcacaagctgtctctttgcctgccgtcatccatgtaagatgtgacttrctcttccttgcattctgccatgattgtgaggcctccccagccatgtggaactgtgagtctgttaaacctctttcctgtataattacccagtctcaggtatatctttattagcagcgtgagaacagactaatacacccccagaagcgcatccttaaagtaagattcctaggaccaattacgacacactcttttaggttgggttctccagattgagtttcctagaagcagagcctgaggtaaagatttgtgtgcaagtgatttactgatggagtacttccaggaaaatctggaatgagaaaagctgacaagggtaggtggggaaaggtaatcagggatccagtctcagctggagtctaccttcagcttgattccacggggaacttgagcatgactttcaccatagagttggtctcactttgaatcaaagggcctgacttctgtatgccaatgtcagtcagtcattgtgtgttg

SEQ ID NO: 368503 - DNA, 597 bp, Homo sapiens
tctaatcagcaaaacaatttaactggtgaaaattacaaaatatgattatttaaagtctctgaaagtcattcgaaggacatatagcaaatggaaaaatattcattcaagaaaacttattaacccttggtaagaatagcaagattttatggaacttgagccatgacccactcctttataaccttcccccagctctttgttagctctacttcratgaggtactccagctgtggccaagaagatgggggctcttctctcccagatcctagtcttggattatggtctcaccctaggaggaggagtcttccaaatgttttcacccctgcagctctgtgttgcagaaaccctatatcaagtcagcatgatgaaaaagatcccacctccctccaacgcagcccctatttatagggtgaaagctctaccccaggcatgacaggccaaaaatactggggtcccaattatcccaatttactcatggggtaggggttccatgccaggacagtcaatccaggaagactaggacaccacccccaataccttcttgtagagaagggctctcactttgggaatagtgggtctttcccccagctctggtacata

SEQ ID NO: 368504 - DNA, 552 bp, Homo sapiens
agatctgatggtttcatgaggaggagtttccctgcacaagctgtctctttgcctgccgtcatccatgtaagatgtgacttgctcttccttgcattctgccatgattgtgaggcctccccagccatgtggaactgtgagtctgttaaacctctttcctgtataattacccagtctcaggtatatctttattagcagcgtgagaacagactaatacacccccagaagcgcatccttaaagtaagattcctaggaccaattacgacacactcttttaggttgggttctccagattgagtttcctagaagcagagcctgaggtaaagatttgtgtgcaagtgatttactgatggagtacttccaggaaaatctggaatgagaaaagctgacaagggtaggtggggaaaggtaatcagggatccagtctcagctggagtctaccttcagcttgattccacggggaacttgagcatgactttcaccatagagttggtctcactttgaatmaaagggcctgacttctgtatgccaatgtcagtcagtcattgtgtgttg

SEQ ID NO: 368505 - DNA, 597 bp, Homo sapiens
tctaatcagcaaaacaatttaactggtgaaaattacaaaatatgattatttaaagtctctgaaagtcattcgaaggacatatagcaaatggaaaaatattcattcaagaaaacttattaacccttggtaagaatagcaagattttatggaacttgagccatgacccactcctttataaccttcccccagctctttgttagctctacttcaatgaggtactccagctgtggccaagaagatgggggctcttctctcccagatcctagtcttggattatggtctcaccctaggaggaggagtcttccaaatgttttcacccctgcagctctgtgttgcagaaaccctatatcaagtcagcatgatgaaaaagatcccacctccctccaacgcagcccctatttatagggtgaaagctctaccccaggcatgacaggccaaaaatactggggtcccaattatcccaatttactcatggggtaggggttccatgccaggacagtcaatccaggaagactaggacaccacccccaataycttcttgtagagaagggctctcactttgggaatagtgggtctttcccccagctctggtacata

SEQ ID NO: 368506 - DNA, 543 bp, Homo sapiens
aatgatttcttggatatggcaccaaaagtgcagaaaaccatagcaaaaatagacaagaggggactcatgaaacgataaagcctctgcattacaaaggaaacagtcaataggtgaaaaggcaatctacagaataggagaaaatatttccagcactttgggaggctgaggggagcgaatcacgaggtcaggagttcgagaccagcctggccaacatggtgaaaccctgtctctactacaaatacaaaacattagctgggcatggtggcaggcacctgtagtcccagctgcttgggaggctgaggcaggagaatcacttgaacctgggaggcgaaggttgcagtgagccgagattgcgccactgcactctagcccaggtgacagtgtgaggctccatctaaaaaaaaaaaamaaaaaacaaaaaacaaaaaaaactacatattgtattaggagttaggagttagtatccaaaatatatgaggaactactatatctcaatagcaaaatataaataatctgattttaaattggtcaaaacaagtaaat

SEQ ID NO: 368507 - DNA, 538 bp, Homo sapiens
aaaatgaactatatagattcaacttctacatctgggaatttataatttatgttggcacttagatgaggctcagacagcagaataagagcattaaaatgacagacagtaagatgttaacattatacacaagacaaaggtgagtgtattttagggaagtaaatggattaataaaagattttataatcaaactgactcgtttgcatgcctttctactactggctggctgtgtggcctaaggcagtcacttaacctctctgagcctcagtttcttcatcagtgaaatgggttttgggtttcatcagtgaaatgggttttgtaaatgatttgcatgtaaatcatttacrtaagatgcctggcgtcatgtccaattcgtagcatgtgctcaatagtatagctatgctcacattctaggattgttaaatagggatgagttcctagtggggtgagaggagcaagagtcttccgatccactccagggaagctgaagactcattacttctttcgatgaatgcccccaaagccgttcgcttcctaatag

SEQ ID NO: 368508 - DNA, 588 bp, Homo sapiens
ttgtgtgagaaacactgaggttaagtgacttgtgcaaggccattcagatagagaatggtgaaatgaagtccaaatcatacccatggacttcagatatggtgttatctgatgcaactcctctcagctataaaagaggaaccaaagctgtcagaggattctactatcagtgataacacaagctggactagaacccaggacatctgacttcattttgacagattattctcctgccacacattcaactgcttccttggagacatctgagctgtctgtgagtacttaactcacagccggcctcagacagatgggcctcctgagctgttcttggctttcagctttggactgagcccctggtgaagtcacctggctacctatttctacacaatttacggctctccaggtgacaggcctcagagctccaccacaaatccccctcagactttgcctygtaatcacagctccatctggtacagggagctccccctactaatatttcacttgaccagaggcagcccatggcatgaaacccaaattcttcctatctctgctcatcgtggctggctactgctaaacccctctgtttggtgt

SEQ ID NO: 368509 - DNA, 563 bp, Homo sapiens
tagtgagctgtgattgcaccactacactctcacctgggtgacacagtgagaccttatctcaaagaaaaaaaaaaggaggaggaggatgataatacstatttcacagggttggtgtaagaattaaaggagttagtgcttagaaaatggcctggcgcatagtaggtgccatgacagtgttagcccttataatattaatattaatgatgctgataatgattcatattatcattttcctccagagaaatttttaagaaaataggagagggtcttggcagtgtgggacagtgtgcatatgatcttgtgggtggattaatggctatttgaaggcagtggcatgttttattcattgggatattctacctgtcacatggtatattttaaataaatgtttgtgtcacgaaataatgccttgagacagagagacagacaaggcgctgcagcagggctgctactgtcagaaagcttgtttggctgtttctcccaacatcttcatctcgggctctaggctcccctgcccacagtagcaggtgggcagctagacaccagcactcgggagcttcagg

SEQ ID NO: 368510 - DNA, 548 bp, Homo sapiens
agatgaaaacagataactccctaaatgttaactggctctactcccctaatattaaacataaaaaccacgtgggaaatatagaaattcaaatagaagtaacataaacctgtcataaattgtaaacaactatttgtgggacagcatggatgacaaatggtctactgtgtaaattttagaacgaggcagacaaaagttggaaggccggttaattttcccctccttctcctgcttcagctttgtctcctcgggtatccgatrtccacaatgtcaagttgtctctcagtaattgcattattagtgtgctgtctttggatgactcttcacttaatgtatcaagttcagcaatggcttcatcaaaagctgtctttgcaagagagcaggctttctctggggaattcagaacgtcataatagaacacggagaagttaagggccagacccagtctgataggatatgttggttgcatttcctttttgctgatttcaaaagcttcttggtgtgcttgttgtgactgatccacagtccctttcttatcatcaccagcggca

SEQ ID NO: 368511 - DNA, 611 bp, Homo sapiens
gatttccctctggctagggctccctgcatgggtgtcagctgtcttgccccttccaccgtgtgaggacacagcaagaagttggcagtaagcaacctggaagaggccccttaccagaaccccrtcatgctggcacccagatcttgaacttcccagcctccaggactgcaagaaataaatgttttgtttgtattttgctatggcagcctgaatagtctaagacaggaggcatatggtttgatttgttctagtattgatgatgttaggtttggttaaagtgatgccttaacctatgggaagatactctgaggcaatgaaaatatcctgttcctcatcaaactttcacctactagttttagcaaccattataaattttccaatgtcaattccttctatatttataaactgtcattcttctgtaagaaagaactttaccttctcccatacgtgtttacattagtatagactaattaattcttattttatttaatgggttatatacattattatcattatttatttgtatgctcaaattatccccaacttgatcagtggtggcctctttacgatggctgctgtatccttttgatatgtcttcatgattctttgagtac

SEQ ID NO: 368512 - DNA, 609 bp, Homo sapiens
cattccacatgaccaattaaattgtcaaggctccagtgctttcctcagaaatctttcacggtatgtttttccatttttttcactgtgactatgtagtgactgtgacccatagtaagaaatataatttatgaaatgatcctgccrtatatttttataaatgtttatagatctgtaactgaattcaaagttttgtgaaacaatcctacttttattatatgtgatgctctctaatattttctatcatatttcaataaaaaaaatctctaaaggtgactctctaaaatgattttgtgacaataataggcctggacctgcagtttgaaaaatacagccttaggatcattttacattttttattaaagaaatacacttttgtcattttgtttaaagttggttacctctaaaagacaagaagaatattgtggagtataggtaagctttgtccttgactgcagtgatgcaagaacagaattctcaagcttaagagtgtgtgatagtatattctcacttttttgtggaatctaaaaatcaaataaattgaactcacagatatagagtaggatggttaccagaggctgggaaggatgtggggtttgagaggaaggtgaa

SEQ ID NO: 368513 - DNA, 595 bp, Homo sapiens
tttttaggtataacatcaaagtcatgatctgtgaaagaaataattgataagctggacgtcattaaaatgaaaaaagtcttctctctgaaagacaatgtcaaaagaatgagaagacacaccacatactggaagaaaatatttgcaaaatacacatctggtaaaggactgctatccaaagtatacaaagcactcttaaaactcgacaataataaaataagaactgaatttaaaaatgggcaaaagacttggactcctcaccaaagaaggtatacagatggcaagtaaacatgtgaaaagatgttccacaccatatgtccttagggaactgcaaattaaaacaacaagacaagattacatagctattaaaatggccaaaatccaaaacattgacaatagcaaatgctggcaaggatgtggaagcaacaggcactctcgttcattgctggtrggaaaatagcacaaacactttggaaaacaggctggtaatttcttataaacctaaatatattcttgccatatgatccagcaagtgagcttctttgtatttatccaaatgaattgaaaacttatagccacacaaaaaccacatggatgt

SEQ ID NO: 368514 - DNA, 608 bp, Homo sapiens
acttcaagtagttgaaatgtctcttaatgctcttttaatacatagattctgctccattgctttaacttttctccttataatttttttgtggaagaaactagatcctttgtccatagtcctgattctgctgattgcatccctgtggtctatcatgtttgtttgccctctgtatttcctaccaattatatgttgctgaatttgatttgctaaaatgttaagaacttttgcattcatgttcatgaagaatgttggtctctagttttctattcttgtaatgtctttggatttggtatcaaggcaatcctggcttcaaacaatgaattgagaagtattctcttctctttaaatttttgaaagaatttatgtagaattggtattatttcatactcaaatatttgttagaattcactagtgaagaaatatggtcataaaaaaataagagttttcttgacaagaatttttttgagacaagatttaaactacaaatgcaatttctttawatggatataaggccattcaggttatctatttcttcttaagttttgatagtttgtgtctttcaaataatttgtccagtcttagtccatttggtgctgttattacagaat

SEQ ID NO: 368515 - DNA, 602 bp, Homo sapiens
  misc_feature (1)...(602): n = A,T,C or G
nntcggcttcttcctgtgaagttctcctagctgaagaaacagaagatagtgagtgttatgtggaamtggagaggattcagggacatcctataagaagctgaaggcttttaatgagaagatactgaaaaccccagagtcagaacactaagtcacatctgtgtataacttaaccgtttacgatgtgttgttctgcaccttgtctcatttgtccttcaccatcacactgggagtgaggaaggatcatcacatgcccattttatggagaacaagactgagagttgaagagacttccacaggtttgtaaaactagtaaatgacagagttgaggacttctgccctaattcctcattctttattctcaggaggataagatagagaattttttaatgtgcctaggctctgattttccacccaaggaagtcttccatgagaaattgtccctggggggtactagagtctgcagtggttagagcacctgctgttagcaccaggggtcatagagggtcaggatccgtgggaacctcactcacagcagaagcgaattagaggagagactgggactttacctcttgatgttctatctccagacttttgttggactc

SEQ ID NO: 368516 - DNA, 671 bp, Homo sapiens
ccttctggccacagtggtcgttccagtaatggccacatgacccaggtcattccaatcaccaaccttcccttagatttttttttccgtcatrgaatctttattgtacacatttgcatcatagcaaggtaatccatcccatgcatcatcctgatttgaacttccacccattatgtttctgttaatactctgtgattgtcagtgtttaaaaaaatattgaaaactctttctgcatcctaatctaacctgaaaagcaaaacgatatttataaatctgcaaccccttaccaaatgaaactaatttctggattaaatatgtctgactttgttgtgaggtcacatgattagacaatgccaggttacaatctgaagaggctgctcaagtagtcaagaaattccctatgtggacaggattttcagatcctttccattgtagtatcttaaatgctaagaaggctgagcctctgatcctcctatctgatctggctgcccactacaaaacctcaaaccttactgtcctcggggtgtttcactttgaccttcactgacttcatctagaaattctccttaccaaacgggttttgagacttcctgccattagacttgcagccattagaattctaatagaccctgattaaacataaacaaatccttgctccctcacctacttgtgcc

SEQ ID NO: 368517 - DNA, 624 bp, Homo sapiens
aggtcctgggactgcagaatttctggggtcctggcagtggctccttttccctgcattccagaaagccagttcctggtactgcagacagcaagtgacccrgacctacatcacaaagttatgccctggatgccaacggccttgatcagcagcaacaggccttaccaggtactgtcactgaacaccctaagctgctccgagtcttgtctgtggaagccattgagaaactggagacaactttacggcacaagcatctggccttcctgtcggggctgcctgctctgtattatgtggcgctccccagggccctggccccggcagtcactagccaatctgtcatcacagagatggagcctagtcccgtggaaatcccagcagagcctctgatttagatggtttcatttgaagaacagtgtataagtcttgggccatgccctcaaggcaacaatgagagttgtacagacgttgcaaaagagttccagcctgcagtgccagtaaaaggaacaatggagacgctgcctctagaaagccagacgcatcctactagcccccactcactccagacacatatcttgaccaaactaaacttccacctgagaaaaaaggtcctagagatacaatggggaa

SEQ ID NO: 368518 - DNA, 624 bp, Homo sapiens
aggtcctgggactgcagaatttctggggtcctggcagtggctccttttccctgcattccagaaagccagttcctggtactgcagacagcaagtgacccagacctrcatcacaaagttatgccctggatgccaacggccttgatcagcagcaacaggccttaccaggtactgtcactgaacaccctaagctgctccgagtcttgtctgtggaagccattgagaaactggagacaactttacggcacaagcatctggccttcctgtcggggctgcctgctctgtattatgtggcgctccccagggccctggccccggcagtcactagccaatctgtcatcacagagatggagcctagtcccgtggaaatcccagcagagcctctgatttagatggtttcatttgaagaacagtgtataagtcttgggccatgccctcaaggcaacaatgagagttgtacagacgttgcaaaagagttccagcctgcagtgccagtaaaaggaacaatggagacgctgcctctagaaagccagacgcatcctactagcccccactcactccagacacatatcttgaccaaactaaacttccacctgagaaaaaaggtcctagagatacaatggggaa

SEQ ID NO: 368519 - DNA, 436 bp, Homo sapiens
gtgactgtgatagcttgaagacatttaataacctgcaaatcttactgcttcaatcctctgctcaaagtyctccaaaggaccccagtgccaatcattcatcacccattggtttgatcatcttattccttgactttctagcaattatgtattggataacaggccctgtgctagaggttggagatatggcagtaaagaaaataggcatgggaatcccagaattcttagagctcatatcttgtatgaggacagaaattaagctagtaattttaacattgtaacgctatgcagatctgtatttttccttgatatctcatacacaattatgtttccaatatctaattatgttcccctgcagccattccaccaatgtagtcccaggaaatgggaatgatgaatgtctctttagaaagaaacatgataaaagggaaaccctctc

SEQ ID NO: 368520 - DNA, 536 bp, Homo sapiens
cactattttttaactttagtcacaatgttgtacattacatctccagaacttatttatcttgcataactgaaactttgtactcatcgaccaacatcttcccatttctctcttccctcaggccctggcaaccaccattctactctctgcttctatgagtttgactattttagattcagtacatgagagatcatgcattatttgtctttctgtgactggcttatttcacctagcataatgtygtttgggtttatccttgttgtaaatagcaggatttccttatttttatacaccacattttatttatccattcatttgttgaggaacatttaggttattttaatatcttggctattgtgaataatgctacagtgaacatgggagtgcagatacctctttgagatacttactccatttcctttggatatatatatccaggagtgtgattgctggatcatatttaatttttaaaggaaactccatactgttttccataatggctgtaccgatttatgttcttaccaagagtgtgcaaggat

SEQ ID NO: 368521 - DNA, 576 bp, Homo sapiens
agggtgatgggttgtttttcttttagcactttaaggtctccattgccttctggcttgcattgtatttagtggtaaagcagtgatcattcttrtctttttattttaattcccctacctatatgcatctttttttggtcgttttgggattttctctttaactttgttttccagaaattttattattacgtgttttggtgatggtggtaaaggcagaggtgtgtgtgtgtgtgtgtgtgtgtgtgtgtgtgtgtgtgtttatattgcttgggatttgctaagcttctggatttgtgggttgacattgtcatcacatttgaaacattttatgtcttttaaaaaatcagtagactttactttttagggaagttataggttcacagcaaaatttagtagaaagtacagacttccgatatacccctttacctctcacacatatagcctcctccaccatcaacatcccacatcagtgtggtacatgtattataaccactgaaccaacatcaacacattattatcaaccaaagtccatagtttacaatagagctcactcttgttgttatacattctatggatttt

SEQ ID NO: 368522 - DNA, 612 bp, Homo sapiens
atgtgactgaacagatgttgacgtggagggcattttatggatctatgtttatggatctatgtttaatgatgatgcctataagacattaaatgcaaatttcttgatagtaaaataactggttaaggaaatttcaacaagataatatgagttccagggaaaaccatggtatcaattggagaaagtgagcagatggagctagaattctgacaggcacaactgcaggagtggcagtagctggccttgggcacacattggatacagctggaatcrttgcctctcttaccctagaatgcttcacctgaaagtgtctgcctcctgattttgttagtgttttcaatagggaactaaagtgggtaaattttgtaataagatgtgttttgaattgctatcctatgcaaagtgccttgaaaagctggttctgtctcactaatatacactggttttgcaaggagagatgttagccagtggttttgagacatcaaaactaagtgtaaaaacatcaatgagctgaataaatttattgttcaccttaatgatgaagtgactcacaaaaccagcttatttagcaagtttcttctttcaaggttgaatacactcaatcaaaatctgtaa

SEQ ID NO: 368523 - DNA, 590 bp, Homo sapiens
acttccattttcaccagactrcaatgagatgtcctatcccccactagtgtggtgtcagaaaaggccaagtagagatctgggacttctatctctgccaactgttaatgagacttctctgtgtggtgtcagtagagataacatggggagcctggacgtccacccctgcccagtggtatcaaggtgctcctcccacttcccacttaagtggtatcagaggaggcctagtggagagccaggattttcaccaccacccagttaatgaggccactccactaccattacccttgttatgttagtggaggccatctggaaacaaagtatttctccctcttcccgcccagatggtatcagtagaggcctaatgtagaacctgaactcctactccaacagagcagtaacaagcagttcttgccccactacaatgtcagttacggctgaataaggaaactagactttcttttttttttaattttatttatatatatatattttattatactttaagttctagggtacatgtgcacaacgtgcaggtttgttacatatgtatacatgtgccatgttggtgtgctgcacccattaactcgtca

SEQ ID NO: 368524 - DNA, 590 bp, Homo sapiens
acttccattttcaccagactgcaatgagatgtcctatcccccactagtgtggtgtcagaaaaggccaagtagagatctgggacttctatctctgccaactgttaatragacttctctgtgtggtgtcagtagagataacatggggagcctggacgtccacccctgcccagtggtatcaaggtgctcctcccacttcccacttaagtggtatcagaggaggcctagtggagagccaggattttcaccaccacccagttaatgaggccactccactaccattacccttgttatgttagtggaggccatctggaaacaaagtatttctccctcttcccgcccagatggtatcagtagaggcctaatgtagaacctgaactcctactccaacagagcagtaacaagcagttcttgccccactacaatgtcagttacggctgaataaggaaactagactttcttttttttttaattttatttatatatatatattttattatactttaagttctagggtacatgtgcacaacgtgcaggtttgttacatatgtatacatgtgccatgttggtgtgctgcacccattaactcgtca

SEQ ID NO: 368525 - DNA, 609 bp, Homo sapiens
aactcacttcaacaataacaatataggcaagttgaaagtgaaaagatggaaaaagagatatcatgcaaacattaatcaaaggaaaggaatggctacacaaatatcagataaaacacaatcagagcaaagaaaattaccaaaaatgggaatagaaatgatataatgataaaaggatcaacccaccaagaagacatagcaattctgaacrtatatgcaccaaacaaaaaaactgcaaaatatgtgatgcaatatataaaaggaatcatatatcacaatcaaatggaatttatttcaggatgtaggactgattcaatatttgcaaatcaatcaacgtaattcaccatattaacaggctaaataaataaatacaatattattttcaacaaatgatgttggagtaataggatattcataggcttaaaaaaggaaacttgacctaaaccttacgtaaaaaaattgactcaaatacatcctagacttaaatgtaaaacataaaactataaacacttttagaagaaaacatgagaaaatcttctggacctagggcttgatgaagaactcatcaagtttaatataacaccaaaagcacaatctatacaggaaaaaagt

SEQ ID NO: 368526 - DNA, 563 bp, Homo sapiens
acacttaaactttctggcccttgatttccctatgtgtacagagaggaagttgaaatacagttctctgaggatgcttctcattctaaaatgacagtgatgctgcaaactgctcactaggttgtgcagcccctctgaacctcagtttgctagctattctaacatcacttggccttggaaaattgcagattatctaaaaaggcaggwttcgcacaaatactcaaatgtgaatgccatgccatcaaacacatagacccacacaactgggacacataaatgctaagctattcaccttcacacacacacaaaatttgcacatgccctcaacttcacactgacagtgcccatgcactcatacacacacacacacacacacacaccccaacagcctatgttctatacatccttatccaacttctcaaatgtggcccttgaaataagacatggatgacacagtatatgatcagtttgtgggtggaagagcaaacgcattttgcaacagactcaagatttcaaggttctgctgggttggatggccaaaaagatgaactccagtcgagatgagt

SEQ ID NO: 368527 - DNA, 594 bp, Homo sapiens
ctctatgttttcttctagtagttttaccttttaggtcttatatttaagtccttaatccatttgagttggtttttgtgtatgatgtgagataaaagtccaattcattcttctgcatttggctatctagttttcccaacaccgttcattgaagaaaccgtccttttcccattgtgtgttcctggcacttttgttgaagatcaactgactaaatgaatgaatttatttctgggctatttactctgttccattggtctatatgttcatttttatgccaatactatgctgtttgaattactataactttgtaatataatttgaaactaggtagtgtgatacctccagttttgttcttttttctcacaattgctttagctattcagtgtctttgtggttttatataaatttcaggktttttttctatttctgtgaaaaatgtcactggattttgatggggattgcattgaatctgtagatcactttgaatagtatggacattttaacactattaattatgccaatccatgaacatgggatatcttttcatttatttgtaccttccttaatttctttcatctatgttgtatagttttcagt

SEQ ID NO: 368528 - DNA, 592 bp, Homo sapiens
taaagattaatatattattttgtgacacttttgttttgggtgcatataggtgtagttaactgggcagaatgtaaaatgaatttcttactctgaattgtggtttaaaaaaaaagaaacccactgtaagagaagaacagggaaaagctggtctctggaatacagtaaactatggggagaatcatggcattgagagttctgcaggacaaaaagatccagaccaaaagaagtggccagagcggcaggagggagggaaaaggcagatgagcataaaatcgtggaagcyagggaagaaagggtttggcacagcagaggctcccaaaaggggtaacatgagagtgagggatgaacatggaggtcatgaatgagctggatgaaaatgatgacccggagtgactgagaacaaagcttgggtggagagcattaaaaagaggatggaaggtgaagaattggagtcagcaaccaaagacagtcttttgagaaggtttggtcttgcgaaggaacaaaataaatggcgtgggtgctggaagaagaatgatgccacttgggaagcagtaactgaccattccccacttggctcagtcccaatcaggcc

SEQ ID NO: 368529 - DNA, 537 bp, Homo sapiens
cactcattaccattttggctgcccagaagctccacatgagctaacaaagttatatggccacttacagaaaagtgacctagttaggctgcatcaatagaggtattatgaccagagaaatggaggagagagtccctctctgttctgtacractcagaaagaatgccccgaaaggagaggcctgaatggaggtagagcctgaaagatgtgtgccatgaaagtattcaagaaaacccgggagaggagcctcagagctcaggagctgtctgtaatgacctgagggtcatcagaggtaatggaggggagcctagggcagcctttctccaggcccctttcacacctccaccttccccagcccacggcattatggccgccccatcacaccccacccagtggagatgtcagacttcctgatctgctgcagggaaggctagaagccacaggtggcctcttagggcccaaactgatggcttctggcttgaacggttatccagacggcacagagaggtaacttcacattgccggttcaaacaatagaat

SEQ ID NO: 368530 - DNA, 600 bp, Homo sapiens
taattcacttgaattctcacaacaatctgaggcagacagtctctcatttaacagatgtggaagttgagctgtagagtttacttatgttgacctcactgaaggtatccataatccttccatttctcctctgatgctgctttccccgctctggtgccaagaggtgggaagagtagatgcagcccctagcccttggtggaagcccagggctcaccttgttcatcccccaggaaccttatgtcctggggagctccatgtaggttttgggtgtgaaaagtgggagtagacgagcagaagacacagggttgttgtcagttctgcagaatcccagagccctggagccttgagaggtcggtatgtccactscctatccttgagctctggcaggaccaggactgacctggtgtgatttccttgtgatttgcagaatacatccagggacctggtaaagtcataaaaagcaaggctgtcatgccctgctacccagtgattccttcttaagtgctcaccttagagaaatgcttgccatgagcacctggagacaccagcagaaatcttcacagcagtggtgatcataaaaccccaaactgggtgagcagggtg

SEQ ID NO: 368531 - DNA, 600 bp, Homo sapiens
taattcacttgaattctcacaacaatctgaggcagacagtctctcatttaacagatgtggaagttgagctgtagagtttacttatgttgacctcactgaaggtatccataatccttccatttctcctctgatgctgctttccccgctctggtgccaagaggtgggaagagtagatgcagcccctagcccttggtggaagcccagggctcaccttgttcatcccccaggaaccttatgtcctggggagctccatgtaggttttgggtgtgaaaagtgggagtagacgagcagaagacacagggttgttgtcagttctgcagaatcccagagccctggagccttgagaggtcggtatgtccactccctatccttgagctctggcaggaccaggactgacctggtgtgatttccttgtgatttgcagaatacatccagggacctggtaaagtcataaaaagcaaggctgtcatgccctgctacccagtgattccttcttaagtkctcaccttagagaaatgcttgccatgagcacctggagacaccagcagaaatcttcacagcagtggtgatcataaaaccccaaactgggtgagcagggtg

SEQ ID NO: 368532 - DNA, 560 bp, Homo sapiens
ggactaggaatgtggtataatatagcagaggagaggattgagcagatcctaactgttggacctcgggcaagtaacttaacctctctgagcctcaatcaggacaatagcttatgggcctaattaaattatatacacaaaacagtgacaaggctgggcacagtgactcatgtctrtagtcccagctcctcaggaggctgaggcaggaagattgcttgagcccaggagttcaaggctgcagtgagccaagatggtgccactgccctccagcctggaggcagactgagaccccatccaaaaataaaataaaataaaaagcagtgacagtgcttggcacacagtaagcacccagtaaatgatgattattgtcctttttctgacaactatgaacaaaataaaacacacacagccccttcccaacctctccttctgaaggttaaatgatgcattgactaagccacatagcaacctgacaaccacacagaagagacagcatctgtctgccggaggacttttctacagtttgaactactttagacattaaccaatgtgagggaatgatg

SEQ ID NO: 368533 - DNA, 528 bp, Homo sapiens
tgagtggacgcatagcacagtggtggcaagcagggctactggagccagggtgactggcttcaaatcccagcatctccattcactggctgtgcatcataaagcaactctctcaacctctctgttcctgcattttctcctctgtaaaatagcgataaaattgtcatgaatrttagatgaacttacatatataaaacacttacagcagtgtctagaacatagaaaaaaatttaaagcatatacatgtatatatataaagtatatatattaaaaagcatatatgtgtgtatacatacacatatatgatattattatttttattttgagaatgcatgaaagcctgccatgcagggaaaagaaaggcattctgggcagtagaaaatcaggtggaaagggactaaggtggtaaagaacaagagaggatgagtagttctgtgtgactgatggcaggctacatccaggggcaaggacaaaggcatcttcatggatgatactaaaagggcttccctcctagttcttgtccatgttatc

SEQ ID NO: 368534 - DNA, 556 bp, Homo sapiens
tttaactcctgtctttgtaaaagatgaattacaccttagtggcttctgggctctggctcactgcacagtcgccgagttgcctgtgacacttccagctgaatttgctccctgctgtcagctgtagggagggggttatttcactgagagggaggagggttatttgggttatttctctgcttctacttttgcccgtctaccatctaatcagcatggaacaaccagatgaggcttcaaaaacctaagtcacatcacatcactcctctcttgaaacactgtcaatagcttcccatcctatttacaataaaaactaagcctccatcatggccycccaggccctgcataatctggtcctcactcacctctgtgacctcattaccaactctctgcccttcacctctgactgatgctctggccacaatacacctggacactcctgccccagggcctttgcacttgctgctccctgcatctggaacactctttccccagatgtctatgggatggcctccctcgcctcactcttctctctgctaagagaggccatcactacccactg

SEQ ID NO: 368535 - DNA, 583 bp, Homo sapiens
gtgtctgtgccctgcctcctctgcctccaggctctagcccatcctggtctccattttatcagattctatccttcctagctcctgcctggaccagcctccagacaggcacagrctgggtggactcctggactgcaatctccactgccagcccccgtcttattgccttggtttacgtgctgccttctgcatgggtttcccggttgtgtcccccaggtcctagctggaaatagagtcctgcccagcataccagcccatctgtctggaactctcatgtgcccagttcccatccagcttttccagttttgtcctgtcttccaggccgaatcctgttctctgtgtccctggccaaacctgacataccacaagaaattattatgttgccatcctctgctccatgtgtctgtccactagatctgacagatccgtggatattggactaaggccacccctcctggaaactaaaaatcctggatccagtttttgcccttcccccaccttttcctgatctggtcctaaattgtaggaaggctgcagaatgagggacatctgcaaacttagtggcttgtgcctgtgtgaccttggg

SEQ ID NO: 368536 - DNA, 583 bp, Homo sapiens
gtgtctgtgccctgcctcctctgcctccaggctctagcccatcctggtctccattttatcagattctatccttcctagctcctgcctggaccagcctccagacaggcacaggctgggtggactcctggactgcaatctccactgccagcccccgtcttattgccttggtttacgtgctgccttctgcatgggtttcccggttgtgtcscccaggtcctagctggaaatagagtcctgcccagcataccagcccatctgtctggaactctcatgtgcccagttcccatccagcttttccagttttgtcctgtcttccaggccgaatcctgttctctgtgtccctggccaaacctgacataccacaagaaattattatgttgccatcctctgctccatgtgtctgtccactagatctgacagatccgtggatattggactaaggccacccctcctggaaactaaaaatcctggatccagtttttgcccttcccccaccttttcctgatctggtcctaaattgtaggaaggctgcagaatgagggacatctgcaaacttagtggcttgtgcctgtgtgaccttggg

SEQ ID NO: 368537 - DNA, 583 bp, Homo sapiens
gtgtctgtgccctgcctcctctgcctccaggctctagcccatcctggtctccattttatcagattctatccttcctagctcctgcctggaccagcctccagacaggcacaggctgggtggactcctggactgcaatctccactgccagcccccgtcttattgccttggtttacgtgctgccttctgcatgggtttcccggttgtgtcccccaggtcctagctggaaatagagtcctgcccagcataccagcccatctgtctggaactctcatgtgcccagttcccatccagcttttccagytttgtcctgtcttccaggccgaatcctgttctctgtgtccctggccaaacctgacataccacaagaaattattatgttgccatcctctgctccatgtgtctgtccactagatctgacagatccgtggatattggactaaggccacccctcctggaaactaaaaatcctggatccagtttttgcccttcccccaccttttcctgatctggtcctaaattgtaggaaggctgcagaatgagggacatctgcaaacttagtggcttgtgcctgtgtgaccttggg

SEQ ID NO: 368538 - DNA, 583 bp, Homo sapiens
gtgtctgtgccctgcctcctctgcctccaggctctagcccatcctggtctccattttatcagattctatccttcctagctcctgcctggaccagcctccagacaggcacaggctgggtggactcctggactgcaatctccactgccagcccccgtcttattgccttggtttacgtgctgccttctgcatgggtttcccggttgtgtcccccaggtcctagctggaaatagagtcctgcccagcataccagcccatctgtctggaactctcatgtgcccagttcccatccagcttttccagttttgtcctgtcttccaggccgaatcctgttctctgtgtccctggccaaacctgacataccacaagaaattattatgttgccatcctctgctccatgtgtctgtccactagatctgacagatccgtggatattggactaaggccacccctcctggaaactaaaaatsctggatccagtttttgcccttcccccaccttttcctgatctggtcctaaattgtaggaaggctgcagaatgagggacatctgcaaacttagtggcttgtgcctgtgtgaccttggg

SEQ ID NO: 368539 - DNA, 571 bp, Homo sapiens
tgatgagtatttagattatttctaccttggggctatgatgaatagaatatatatgaatattctgttatggaccygtgcactcatttctcttgggtatatacctagatgtgaaattgctgggttatagcataggtgtgtgttcagcttcagtagaaaccattttccaaagtggttgtaccattttcaactgcaccagcaacatatgagagatccagttgctccatattttcaccaacgcttaatactgttggtctttttcattttacccatctaatgtttagtgggatttctttgtgactttaatgtactttctatggtgagtaatgatactgaacagtgtatcattatgtacttatgtccatctgcatatgttgttttatgaaatgcctcttcaaattttttgcacatattttaattggacaccttaatttctaaaataatcaatactaaggaaataatcagagaagcagacaaaactttatgcatgaagatgggcagcacagcactgcttgtaacagcaaaaaactagaaaaacgtaaatgtttatcatatagagaattaaataaattat

SEQ ID NO: 368540 - DNA, 586 bp, Homo sapiens
gtccttttcttctgagcgcacagaagaccaccctgcctagcttctttgcagctatgtggagacacatgattagtctggccaatgggatgtgagaagagataatgaaactcagaggagaacttgtgagatttatgcaagttatttaatcactccatgcctcagtttccccatgtataaatgatgataataatatttatcttataggattgtggtgaggatttaattagctatgataggtgagatgcttagaaggtgcttataaaagcgtagtatgattattgttttaaaatgatgttattagagaaagaaaaatacatatgcataacaattgtcaatagaaagatcacataacagtgcaaagaggcttacaaaattctccaggatgtayatgtatctacacaaacatcatagagaagcaaaaaaaaaaacgaacaaacaaaacagatgccaaattaagggggagcctggaggtaagcccacttttctggcatttggagattctgtcttgaatgaccctccacttctggatggctggcccctcctagtgtgctccagccagatccatatacatcctaaaacaagtgtg

SEQ ID NO: 368541 - DNA, 586 bp, Homo sapiens
gtccttttcttctgagcgcacagaagaccaccctgcctagcttctttgcagctatgtggagacacatgattagtctggccaatgggatgtgagaagagataatgaaactcagaggagaacttgtgagatttatgcaagttatttaatcactccatgcctcagtttccccatgtataaatgatgataataatatttatcttataggattgtggtgaggatttaattagctatgataggtgagatgcttagaaggtgcttataaaagcgtagtatgattattgttttaaaatgatgttattagagaaagaaaaatacatatgcataacaattgtcaatagaaagatcacataacagtgcaaagaggcttacaaaattctccaggatgtatatgtatctacacaaacatcatagagaagcaaaaaaaaaaacgaacraacaaaacagatgccaaattaagggggagcctggaggtaagcccacttttctggcatttggagattctgtcttgaatgaccctccacttctggatggctggcccctcctagtgtgctccagccagatccatatacatcctaaaacaagtgtg

SEQ ID NO: 368542 - DNA, 531 bp, Homo sapiens
cttacagcatttggaaatgttcttaagggcaaaggagccactgaaggttttcaaacaggtttgtgacaaagctgggagtgggacccagtatccttcctcctagtcagttattttccctgcatcatctgccttcaactcttctgcaaaatggagtctcaggtctgcaagacccagagaaagcaatccagcaaaaaagtggtgagtcacacacacagctcttcacaatagtctcagaggaaatacaatttctctgcctctttttcccaatgactgtaagactgyttgtgcctttgcaatccaaggggactctgcctgtgctgagggtgtggtgacatctgagggatgagctggcttagcttggagggagggagactgaggggcactgtggctgcctctgaaggattgtgtaggcagtgactgggagctgccatcgaccctgcccactcagggacccagagaacaagatgggtggggccctgcagaggacatgggggcaggtgaaatatccccagccttgggccagagactcac

SEQ ID NO: 368543 - DNA, 429 bp, Homo sapiens
gcagaggacatgggggcaggtgaaatatccccagccttgggccagagactcaccaggacctctttcacagagctgggggatgctgggggaggggtgcctgagaaaagtgggccctgaaggggcaatcgcaccacctaagaccttgaktcttcatgctgtgtggcaagtttgagcttagttctgggaatatcagtgtaaaacaaaggctttgaagtcaatctaccgtatgttcaaattccagcacagctacgacttactgtgtgactttgggcaaatcatttagcccctcttttcttcactttcctcatctataaaatgggtataatagtaataacacccatttcaaagggttgtggtacagtttaaatcagtccatgaagtacttagctttttgctgttgtgacctagagggtgaggcaaggcagcaag

SEQ ID NO: 368544 - DNA, 612 bp, Homo sapiens
agcctgagaaagttcccagttactctttacccaaaccagttatagtggcttatcaatcaattccccagtttctcatcttcagcacaccctatgtaatgcttttcttatacaggcaagataaccattaagtgctaatgaattcaattatttctgacaggaaattcatgctaacaggaggcaatattaattagggaaatctaaatttwgaaatatatgcagttttattgtattaattgtaatatctttagcttctgacaaggtaacaccaagatgttgtggacaaatatttactaattatgacatttgtaacttggcaacattattaacatgtcacaaaatgcttaattatttcaggcatttagattaaatatgctttttccttctatgttcacttcttccatttcatttacccttgaaatggcttccttcatggttggcaaactgtagtccaagctttgtctgaaaccattgctaagtgagtacaatatgaaattggaaactagacaaggtatatgagctcaactacaaacctgatccccagatgcaggttaagacatgatgatgcagccataatgaagaggagcatgtaaggcccataatcagaaaagatca

SEQ ID NO: 368545 - DNA, 612 bp, Homo sapiens
agcctgagaaagttcccagttactctttacccaaaccagttatagtggcttatcaatcaattccccagtttctcatcttcagcacaccctatgtaatgcttttcttatacaggcaagataaccattaagtgctaatgaattcaattatttctgacaggaaattcatgctaacaggaggcaatattaattagggaaatctaaattttgaaatatatgcagttttattgtattaattgtaatatctttagcttctgacaaggtaacaccaagatgttgtggacaaatatttactaattatgacatttgtaacttggcaacattattaacatgtcacaaaatgcttaattatttcaggcatttagattaaatatgctttttccttctatgttcacttcttccatttcatttacccttgaaatggcttccttcatggttggcaaactgtagtccaagctttgtctgaaaccattgctaagtgagtacaatatgaaattggaaactagacaaggtatatgagctcaactacaaacctgatccccagatgcaggttaagacatgatgatgcagccataatgaagaggagcatgtaagrcccataatcagaaaagatca

SEQ ID NO: 368546 - DNA, 558 bp, Homo sapiens
aattctctctaaaggcccttactttgctccttactgtataaaatgatataaaatgaattgcagaaagagtcctcaaaaaaactaaaaataaaattaccatatgtsccagaatcccacttctgggtatatatctaaaggaaatgaaatcagtatgtcaaaaagatatctgcatgctcatcttcactgcaggcattactattcacaataggcaagatatggaatcaagctaagtgtccatggttggatgaatggacaaagaaaacgtagtatatacacacactggaaaattatacagcgttttttaagaagaaaatcttgtcatttgcaacaccatgggtaaacctggaagacattatgctaaatgaaataagccagacacagaaagacaaatactgcatgatctcacttacatttggaatcaaaaaaagtcaaacccgtagaagtattgagtagaatggtggttaacagaggctgaggaggcagggggagtggaggagatgttggtcaaagggtacaaagtttcagttagacaggaggaataagttttagtgatctatt

SEQ ID NO: 368547 - DNA, 557 bp, Homo sapiens
gtgaggtttatactttcatatgtttttgtggtagtagttatcatcctttcatttctagatattggactctgttaagcatttctcataagaaagagcagttccctcatatgtgacttgaagctttttctcttgctgtttttagaattctatctttgacttctaacagtttgactataatgtgcctcatagataacccttattaggttgaatctatttggggaccttcaaacttcctggatctgggtggatgtccatatctctcccaagatatgggaagtttccagctattatttcattamgtgggttttctgttccttttactgtcttttcaccttcttgaatttacataatgtaaaaatttattaacttaatggtgtcccatagactttcttcattattttttattactttgtcttctgggttacttcaagaggcttgtctcaagttcagaaattgtttcttctccttgaactagtctgttgttgacaccctggattgtttttttttttatttcgttcactgacttcacctccaagatttctgtttttttctctttt

SEQ ID NO: 368548 - DNA, 593 bp, Homo sapiens
caccccaagatgactgttagagtagacttgggcagatgaaaacctttctgagcctctgtttcctcacgtataaaaatggaatgatgatatgccagattcattagattcttatgaggagttcaagagttgagatgtataaagtatttagcacttattaaacacttaagttctcaaaaaacattagccaagtcttctaattgtctacccaatatccatttcccattccttcttgctaaagaatctctattttggtggggcaccatctaccaagctaagaactatattccttccattctcttacacagagaggtgacaatatcacacaattctgaccactgagatattaagtagaagtcactggacaggcttccaaaaaatctttaaaagaggaacagattcaagaggcttatrtttttctgccttttgccattcttccttttttccccttggaacataaacttgatgactagaactggagcagccattctgtgactgcatgaaagaatgagagaatcacagaaatcttggcccagataaacttaagccactaaattaacacagcaattgtctgccaatggattctaatgctgtgg

SEQ ID NO: 368549 - DNA, 582 bp, Homo sapiens
aattgtctacccaatatccatttcccattccttcttgctaaagaatctctattttggtggggcaccatctaccaagctaagaactatattccttccattctcttacacagagaggtgacaatatcacacaattctgaccactgagatattaagtagaagtcactggacaggcttccaaaaaatctttaaaagaggaacagattcaagaggcttatatttttctgccttttgccattcttccttttttccccttggaacataaacttgatgacyagaactggagcagccattctgtgactgcatgaaagaatgagagaatcacagaaatcttggcccagataaacttaagccactaaattaacacagcaattgtctgccaatggattctaatgctgtgggaaaaaataaacccctatctccaggcctggaaagcatgaggattaagatgtgcttcctaaacttacagtacacacacaactcttaatatttaagcagacccaaaacaccttacccaaatgccttaggcccagaaaggctgcagaattcagatagctaatagggtccatttatcatatactacca

SEQ ID NO: 368550 - DNA, 582 bp, Homo sapiens
aattgtctacccaatatccatttcccattccttcttgctaaagaatctctattttggtggggcaccatctaccaagctaagaactatattccttccattctcttacacagagaggtgacaatatcacacaattctgaccactgagatattaagtagaagtcactggacaggcttccaaaaaatctttaaaagaggaacagattcaagaggcttatatttttctgccttttgccattcttccttttttccccttggaacataaacttgatgactagaactggagcagccattctgtgactgcatgaaakaatgagagaatcacagaaatcttggcccagataaacttaagccactaaattaacacagcaattgtctgccaatggattctaatgctgtgggaaaaaataaacccctatctccaggcctggaaagcatgaggattaagatgtgcttcctaaacttacagtacacacacaactcttaatatttaagcagacccaaaacaccttacccaaatgccttaggcccagaaaggctgcagaattcagatagctaatagggtccatttatcatatactacca

SEQ ID NO: 368551 - DNA, 582 bp, Homo sapiens
aattgtctacccaatatccatttcccattccttcttgctaaagaatctctattttggtggggcaccatctaccaagctaagaactatattccttccattctcttacacagagaggtgacaatatcacacaattctgaccactgagatattaagtagaagtcactggacaggcttccaaaaaatctttaaaagaggaacagattcaagaggcttatatttttctgccttttgccattcttccttttttccccttggaacataaacttgatgactagaactggagcagccattctgtgactgcatgaaagaatgagagaatcacagaaatcttggcccagataaacttaagccactaaattaacacagcaattgtctgccaatggattctaatgctgtgrgaaaaaataaacccctatctccaggcctggaaagcatgaggattaagatgtgcttcctaaacttacagtacacacacaactcttaatatttaagcagacccaaaacaccttacccaaatgccttaggcccagaaaggctgcagaattcagatagctaatagggtccatttatcatatactacca

SEQ ID NO: 368552 - DNA, 547 bp, Homo sapiens
cccctaactctaatcctgatccaggcttctgctgttactagctcccaagtctgcactatcccctgctgtttcgttatatcttacccaatgcattaattatctattatctaygaggtctgacagatggtggccatatctaggtataggataataaaactactagaagagatgaaagagaaggaggaagaggaggagaaaggaagaaagagaataaatcttaaaagcaccagagaaaaagaattcctacgatggacaacaattaaactaagagctaaattatcaaaagaaataatagaagtctgatgaactatggaaaaatatattcaaattacctaaagaaaataattagcaattggccgggtgcggataatcccagcactttgggaggccgaggcaggcggatcacgaggtcaggagatggagaccatcctggctaacacagtgaaaccccgtctctactaaaaatacaaaaaattagccaggcgaggtggtgggcgcctgtagtcccagctacttggaaggctgaggcaggagaatggcgtgaacc

SEQ ID NO: 368553 - DNA, 644 bp, Homo sapiens
tttttatcactcctcttttgtcaatgaataagaagcaagaggatcaggggagagtacgagctgggtgttgtcagtctgaggagagaggagaagctatgaaggtttgccttgttggagaacacagcctgggaaaattcagggggaattccacgtgagctgaagtcaatctgcacaatgatggagttctccactcacattctccagtcacattcagggactagggcacagcctagcrgacgcagaaaatagagtccaagtggagaggagtttggccaggtattaggactgaggggcagaggaacaggagttgggggaatggggttcagtgcactagtggaggtgacagcccaatcacagtaggttcaaggaatgggaggagggaaagcagggacacgttatttccctaactcattctcaccactgcttcctaggtacaccttcaaaaacaaaaatcagatgagatcccaccctaatggaagtccatgatggcttctttgtgcccacatgataaactgtaaactccttggcaagactctaggattctttatcactggacttggccttcttccctcccccagtgctaactctgatttgaacacaatgaatgtcttgctcatcccttatagcacagccctttgcacatg

SEQ ID NO: 368554 - DNA, 644 bp, Homo sapiens
tttttatcactcctcttttgtcaatgaataagaagcaagaggatcaggggagagtacgagctgggtgttgtcagtctgaggagagaggagaagctatgaaggtttgccttgttggagaacacagcctgggaaaattcagggggaattccacgtgagctgaagtcaatctgcacaatgatggagttctccactcacattctccagtcacattcagggactagggcacagcctagcggasgcagaaaatagagtccaagtggagaggagtttggccaggtattaggactgaggggcagaggaacaggagttgggggaatggggttcagtgcactagtggaggtgacagcccaatcacagtaggttcaaggaatgggaggagggaaagcagggacacgttatttccctaactcattctcaccactgcttcctaggtacaccttcaaaaacaaaaatcagatgagatcccaccctaatggaagtccatgatggcttctttgtgcccacatgataaactgtaaactccttggcaagactctaggattctttatcactggacttggccttcttccctcccccagtgctaactctgatttgaacacaatgaatgtcttgctcatcccttatagcacagccctttgcacatg

SEQ ID NO: 368555 - DNA, 644 bp, Homo sapiens
tttttatcactcctcttttgtcaatgaataagaagcaagaggatcaggggagagtacgagctgggtgttgtcagtctgaggagagaggagaagctatgaaggtttgccttgttggagaacacagcctgggaaaattcagggggaattccacgtgagctgaagtcaatctgcacaatgatggagttctccactcacattctccagtcacattcagggactagggcacagcctagcggacgcagaaaatagagtccaagtggagwggagtttggccaggtattaggactgaggggcagaggaacaggagttgggggaatggggttcagtgcactagtggaggtgacagcccaatcacagtaggttcaaggaatgggaggagggaaagcagggacacgttatttccctaactcattctcaccactgcttcctaggtacaccttcaaaaacaaaaatcagatgagatcccaccctaatggaagtccatgatggcttctttgtgcccacatgataaactgtaaactccttggcaagactctaggattctttatcactggacttggccttcttccctcccccagtgctaactctgatttgaacacaatgaatgtcttgctcatcccttatagcacagccctttgcacatg

SEQ ID NO: 368556 - DNA, 597 bp, Homo sapiens
acattgccttgcattaatttcctgcacctatttccccaactacatcaggaactatacctttctgaaggcagargccacttgttattcattttagaagccccatatattcaacatgtattgtgttgaacaatgtccccacaaaaatccatgtccttcctagaacctcagaatgtgacctcatttggaaatagaataattgcaggtatagttagttaagatgaggtcatactggaatagggtagatctttaatccagtattactggtgtccttataagaagagaagagatggatacagatggaaaatattatgtaacagatgcagatacagggactggagtgatacaaatacagattagagggatgtatcttcaagttaaggaatgccaaaaattgccagcatcactagaggctaagagaaaggcatgcaatagattctctccatggccctgccaacaccttgattttagacttctaacctccagaactgtgagagaataaatttctgtcatattaagccacctagtttgtagtaacatgctacatcagccctagggaatgaatacacccacacaaggtctagagcacagtgcctttgc

SEQ ID NO: 368557 - DNA, 631 bp, Homo sapiens
tccattcgctccaaatcgttatacaagtttagcacaatttctatcaaaatgctggcaagagtttttgtagatgtgcacaagattactttaaaatttatatgaaagtcaaagaaacaaaaatagctaaaacaatcttgaataacaaaaataaagtggttcaaactcatcaaattatatacattaaacataactgggtttttagttttggttttgggttaatatatcaattatacttcaataaagctgtttttaaaaagaaagtaggaggaatcagtctaaccaatcacaagacttgatatatagcacagtaatgaagackatgtggtattggaaaaagaatatagattcatagaacagaatagagattccagaaatagacccatacaaatatactcaactaatttttcacaatggtgcaaacgcaatttgtgcaggaaagacagcctttttaacaaacggcatgggaacaagtggacatcaataagccagaaaaggaaccaggacctaagtctcgcatcttatttaaaaattaactcaaaatggattgtggacttaaatataaaacataaaactaaaaaagttttttttagaaaaaaaaagaaaatcttcagaatctagggctaggcaaact

SEQ ID NO: 368558 - DNA, 569 bp, Homo sapiens
cctactttccatgtgggtgaattcttctcaacttttaggtctcaaattaagtgtcatctccttatagaagccttccctgacaccctctctcaaatagattcttcacccacttctttcttctgttactttctatttatcaacaggatttttattatactcatcaggaattgtaatacatctatctatttttttacttgtttatagatgtctctcttactagatcataagccccatgaaaacaaagtgcttgtctctctacttaccatcacaaaattggtccttaacacaaggcctggcatatagtgttgaacaaaagtcacttgaatgaagaattagctcaacaatttataaaacaattagtactagacctaagaaatgagatatacagcaacacaataatagtgggggacttcaacactccactgacagcactagacaggtcatcaagacagaaagtcaataaagaaacaatgtatttaaactatacccyggaacaaatggacttaacagatatttacagaacattctacccaacaaccacagaatttacattctattcatcagcacat

SEQ ID NO: 368559 - DNA, 578 bp, Homo sapiens
ccgtgcaagagaagacgagggctatggaaatgcagcgaaagggagagatccagattgccagaaaagttggagcaaaaccaagagagagttttcacagaagccagggtaagacaaaattttgagaaagataattgtcagcaaatacacaaggattgaaaagcttctttyggtatatctaatagaaatcttatggtgagaacagcccacgtgggtgctgagggtggatgccagcttgccctgggttcaacctgagtggtgaggaggttgaggccaagtgtgaatttgtatttccagaaaatggtctgtgcctggagggagcaaaatactttatattcacgtgatagagttccttaagatagggaatccagagcagagctggagggcttagccttaaaatggaaaagtctcaccctttgctctaagaaaatagaaaggtagctataggtataggaataataataggtgtgggagaaagattgtgagggagttgatatttgatagctttgattatctgggtcaaataaaagctggggtaccttttgaaattgagtatgaaaagttggaacagctataatagc

SEQ ID NO: 368560 - DNA, 628 bp, Homo sapiens
gtaagagatcgaaggttctggataagagagggttttgaatgccatcccagggggtgtgaattttactcgtaggcactggaaagccactggaggatttcctgccaggaaacgacgggattcgattaaaattttagaaagaatcctgaatttctatttatggagacagattggaggaggttacacctgagccagggagaccaactgaaatgctttggagtattccgtgcaagagaagacgagggctatggaaatgcagcgaaagggagagatccagattgccagaaaagttggagcaaaaccaagagagagttttcacagaagccagggtaagacaaaattttgagaaagataattgtcagcaaatacacaaggattgaaaagcttcttttggtatatctaatagaaatcttatggtgagaacagcccacrtgggtgctgagggtggatgccagcttgccctgggttcaacctgagtggtgaggaggttgaggccaagtgtgaatttgtatttccagaaaatggtctgtgcctggagggagcaaaatactttatattcacgtgatagagttccttaagatagggaatccagagcagagctggagggcttagccttaaaatggaaaagtct

SEQ ID NO: 368561 - DNA, 578 bp, Homo sapiens
ccgtgcaagagaagacgagggctatggaaatgcagcgaaagggagagatccagattgccagaaaagttggagcaaaaccaagagagagttttcacagaagccagggtaagacaaaattttgagaaagataattgtcagcaaatacacaaggattgaaaagcttcttttggtatatctaatagaaatcttatggtgagaacagcccacgtgggtgctgagggtggatgccagcttgccctgggttcaacctgagtggtgaggaggttgaggccaagtgtgaatttgtatttccagaaaatggtctgtgcctggagggagcaaaatactttatattcacgtgatagagttccttaagatagggaatccagagcagagctggagggcttagccttaaaatggaaaagtctcaccctttgctctaagaaaatagaaaggtagctataggtataggaataataataggtgtgggagaaagattgtgagggagttgatatttgatagytttgattatctgggtcaaataaaagctggggtaccttttgaaattgagtatgaaaagttggaacagctataatagc

SEQ ID NO: 368562 - DNA, 571 bp, Homo sapiens
ggcagggcatcttgcctccctaaggcagcatggrtacacatgctcccaggcttccaggacattgactgggtatcctggggctgttttctggcccagtgctccctaagttcccacagaaagtacaagccatgcctcagacccctaggaatattctccagatgagcaggagctataaagtctcaccttcatgatgcgattcctctgagatgtttgcagttattttatgaagaccaagtgggataatattcatgtaaaagttttgtaagctgtgaagtgctacatggatgctatgtattaattcatccagctaatttttattgacagcctgctatactggcagtgttctgggtgctgaggacacagtagttcctgccaagacagtgtgtacattctagtgtgtgaggcatcaacaataaatgtaaagcctctagtatactaaatggtgatagatgctctggagaaaaatgaaacagggaagggggtctgggagttgcgattttaagcgtgtgagggaagtcctttttggagaagttaacatttgagcaacaactccaatgagatgagtgaggac

SEQ ID NO: 368563 - DNA, 571 bp, Homo sapiens
agacaaggctttcaaattaacccaatccaacaaaaacaaagaaaaaagaattttaaaaaatgaacaaagcctccaagaaatttgggtttatgttaaacatccaaacctaagaataattggtattcctggggaagaagataaatctggaagtttggaaaacatatttgagggaataatcaagaaaaacttccccagccttgctagagatctagacatccaaataaaagaagctcaaaaaacaccaagaggagtcattgggaaaaggtcatcgyctaggcacacagtcatctaaagccaagacaaaggaaagaatcttaagacctgtgaggcaaaagcatcaggtaacctataaaggaaaatctatcagattaacagcagatttctcagcagaaaccctacaagctagaatgaactagggtcctatttttagcctccttaaacaaaacaattagcagcccaaaattttgtatccagcaaaaccaaacttcataaatgaaggaaagatgcaatcttttccagacaaacaaatgctgagagaattcaccacaaccaagccatcactacaagaact

SEQ ID NO: 368564 - DNA, 448 bp, Homo sapiens
caatatgagagaaatagattctaggctacttggattaatttcatttccttgggagaagaaaacctgaaatttgtattctgagaagatggagatatggtttgataaaaccagattctcttttctgtgtcctttggattttatttggccaatgaaaaagatttcagttttcaggcctctagaaggaaaaagccataaattatcacaactgaatacgcagtttatttcatggtttgaattataaacagaaaggaagtggatggttttaagcaacatttgtaaatttccttcaatgattgttttctatggagactgcagatgtgccttttgggtacattattggattaaacaaatggaaggttgcaagctatcccatttttagttcaaagctctctttacactcagtaaccacatcctkcccctgaatgtagtcaacagacctgttaaataa

SEQ ID NO: 368565 - DNA, 591 bp, Homo sapiens
  misc_feature (1)...(591): n = A,T,C or G
aggtaggatggggataagggaaaaagagtgggaggaatggaaagttgcactcatcatgtagaatgctagtgtgtaagatttcagagttggagtggtttccagtgatgatgtggagtaaaggtaaagatcattggcaatgaggaggtcaaagaatagagtgttgaatgatttttcctcatggacattaaagtttcccatgctgacagcaggagattggctgggaagcaggataaaagattcaggggctgtaagggaggggccaagaaattggtatgcaagataattaatgaaaatactaagtctaatttctggcatatttgtaagcattaaacagatgttacccattcataattagatagcagtaaagagggtgtggtattgctcaatggcatgaatgttaagggagaggagaattttggkttttgagtgccaaatagcacttctttggaagatgcaagtgtggagcttgaaaagtctctactattaactccaggatgtaagggagaagagggaaaaagcagggtgctggcggaaagcaggntttcaactaaatcaagaaggtggtgagaacaacctatgaagatgttgagg

SEQ ID NO: 368566 - DNA, 568 bp, Homo sapiens
gagggcctggactcaggtaaagacagaacaaatagagaagctaagctgaagagagctgtctacctgattgggtgttggggaagaagcaaagagtgaattaaggaagctcagactcagattctaacagtgccttccagggttgggctcacaatggtttttaatcagtctcattagtcacttgttcaggttaaccctaaatatccgactatgaycctattttatagaacccagtgtctagaaagcaattcccaaagtgtgaccaggaactctagagattccctgagaccctttcaggggtccttacattcaaaattatttccctaataaaactaagacattactgtcctttttgactctcattctctcacaaatgtacagtgagttgagtttccagaaaccacatagtatgtaatattgcaatgggctgaatacagatgtagatatgagattccagcttcattcattaaggtagggtcaaaaagattttcaaagtctaaaagaacagcactcttgacacaaaattatttctaaaaatatgccgatagtcaacatgcaataactttattac

SEQ ID NO: 368567 - DNA, 521 bp, Homo sapiens
tttgactctcattctctcacaaatgtacagtgagttgagtttccagaaaccacatagtatgtaatattgcaatgggctgaatacagatgtagatatgagattccagcttcattcattaaggtagggtcaaaaagattttcaaagtctaaaagaacagcactcttgacacaaaattatttctaaaaatatgccgatagtcaacatgcaataactttattactcttattcttaaatgaatagatttttaaatttcagttttaacttctaaaacaatatgtattgagatatatatctsacttatgagatatatatatatatttttatcattatctcatacaaacaaaagctctttgggatttggggatttctgataatgttttaagattataagggagtcttgagaccaaaaaaatgagaaccactgatataaaagaacaatggcaaagacaagctctcaaaatgtatttgtgtttaacttccactaactggtgggccaggcattctactaggtggtttatatt

SEQ ID NO: 368568 - DNA, 600 bp, Homo sapiens
actgttcccatgaggagtgatgcagaccaagattgggggtgtaataatgggaacctgaagaagtgaaagacaccaagggtcttgtggatgctgacttttcaggcagaaaatgatgcagaaaaaaagggaaaaggtccaggggctggagatggggcatggggcctkggagctgggaagtcagtgccactactaagaaagttaagaaagttaggaggaagagctgctttagcagttcaaggcaagcctgttgatcttgagaaagagaagaatagttcacacagtgtcttatattccatttatctgttttatgtaacaggatctaataatcacttggatactgagcttcttggggtagggacagtatctcctatagcttggaatccttgacctctgaaaaccacacctcactttcaaaataccttttcctggctcttctgcacagcttcattccttaaataccacatctcacaggcagtgctaaaagctggcctcactaaggatgctgggctacatgtgggcagctcagaagagtggaggggccccaggaagaccaggatgaacagactccaaggaaacatcaaatgccagtaagtcaaccaa

SEQ ID NO: 368569 - DNA, 603 bp, Homo sapiens
ataaaagcaataactccagcagttatttattcagcacttgctatctgccaggcaccatgccaggaattccacagacattatatctaagcctgtcaatcactctgccaatgaaatagagccattacctcctccattttacagatgaggaaactgaagytcagaaaagaacacctagctttgggaacttttcaaagccacatagagagtgagtaactaaggggatgtgagggggagaacaagagaccacctccaccacctatgttcatcagaaggtttaccatcttgacctccctcatgactccccacaccatcagctccttaaggaggcagaagcagaggcaaagtagcagcacgagaggaagaagagccatccctgaaaggtgactgtagggatctggacataggacaggtcttcgatacacacaaagttggtatctgcagttacgatttatgaatctcccagttcctccacttcctagctgattttaggcaaatgacttatcacctttctgtgcctgttttcttacctgtaaaatgcgaataatagtcccatctcacagggttatcaggattaaattagtcaatatgagttaagagtagccc

SEQ ID NO: 368570 - DNA, 553 bp, Homo sapiens
gggggcacccaactgaaacgcatagtagtaggcagaacttttttaaaaaaccaggttatagagaaaaaatcaagctgattgctggctagaaaagaactctaacgataaattggaaatgaaaggctttttctcctawaaaattctgaacactgccccattcccaaaataaaaataaaccaaaaatgaaattaaacagcattctcatgctcccgagaagggagtagcaattattattttcttttttttttctaattacagaaaagaaaaagttaactgggaagagcaagaaacaaacactgttattaacaacaataaaatcatgacatctgaaagttaaattttcaaatttttccaaaaagttgttatacatcattatctcatttagttttcacttcggccaagtgagattgtcaggagagcctcttacctctaatccacaaaaatagaggatacagcccaaagcacagagcatatctaagatttgaatcaaagtctctcaactagaaatataaggacacagctccaacaagctcttcctgctgtggaggactaa

SEQ ID NO: 368571 - DNA, 553 bp, Homo sapiens
gggggcacccaactgaaacgcatagtagtaggcagaacttttttaaaaaaccaggttatagagaaaaaatcaagctgattgctggctagaaaagaactctaacgataaattggaaatgaaaggctttttctcctataaaattctgaacactgccccattcccaaaataaaaataaaccaaaaatgaaattaaacagcattctcatgctcccgagaagggagtagcaattattattttcttttttttttctaattacagaaaagaaaaagttaactgggaagagcaagaaacaaacactgttattaacaacaataaaatcatgacatctgaaagttaaattttcaaatttttccaaaaagttgttatacatcattatctcatttagttttcacttcggccaagtgagattgtcaggagagcctcttacctctaatccacaaaaatagaggatacagcccaaascacagagcatatctaagatttgaatcaaagtctctcaactagaaatataaggacacagctccaacaagctcttcctgctgtggaggactaa

SEQ ID NO: 368572 - DNA, 582 bp, Homo sapiens
tccagccaatgtgatgtgaacaaaagtgatagacaacttcctagtcttattctcaaaagtaaggagtatgaccagctttccccttccttttctttctactttctggaataagaacacatggctggaaaaaaaagccatatgggatcccaatatgaaagtcatgtgttgaatacagcagagaaacctgggtctctgacaactgcagagtagccaggccaacccyaaacttttagaaaattttgttgatgccacttttggtctctgtccaacagcagaacccatatcctactttttaaaaagtgtggccaatagcactgaagcaccaaagacgccttccaaaatgtcagggtcttctcaattgctctgattcagactaagaagtcagtaaacatttactaagagcccactatgtgttggaagtctcctaagaatatctttacagcctcctggcaattgtgacccacattgttttagaaaaatcagtatgttggtacagaatgcaaaaagggatactcagcaaaggtgaaatgcaaagaaacaagaaatctttaaataaggtcatgaaggaggcggggaaaagcc

SEQ ID NO: 368573 - DNA, 587 bp, Homo sapiens
gaaactgcccaaagctaggagaagaatgacccaaaaggattattaaaaaacagtgactggtgcttgcacaaggttgggaagaagttcagttcccaccaggccagctgtattgacgggacattggattgagyagtcagaagggtctttccttggcagtgggaaataattgtccctagactaaataatgctctgggtccacttaacaaatcttaaaggtaagactcaaaggatcaagttgtttccaaataatttaactgtgttccagaataaagctcaaaaatacgtgtaggaatacaaaaatatccagtaccccaaaagtcctattcacaatgtctgacattcaataaaaatgaccaattaagcaaagaaagaagaaaatacagtacatgatgaggagaaaaatcagtcagccaaaactgactcaaccgttacaggtttttagaagtagtaggcaaagacattagttattataactatattccatatgtttcaatatttaagtagagacatggtaaattttttgttcaaatcaagcttctagagatgaaaaagcattgtccaagataaaaaatgcattaggtaggatt

SEQ ID NO: 368574 - DNA, 587 bp, Homo sapiens
gaaactgcccaaagctaggagaagaatgacccaaaaggattattaaaaaacagtgactggtgcttgcacaaggttgggaagaagttcagttcccaccaggccagctgtattgacgggacattggattgagtagtcagaagggtctttccttggcagtgggaaataattgtccctagactaaataatgctctgggtccacttaacaaatcttaaaggtaagactcaaaggatcaagttgtttccaaataatttaactgtgttccagaataaagctcaaaaatacgtgtaggaatacaaaaatatccagtaccccaaaagtcctattcacaatgtctgacattcaataaaaatraccaattaagcaaagaaagaagaaaatacagtacatgatgaggagaaaaatcagtcagccaaaactgactcaaccgttacaggtttttagaagtagtaggcaaagacattagttattataactatattccatatgtttcaatatttaagtagagacatggtaaattttttgttcaaatcaagcttctagagatgaaaaagcattgtccaagataaaaaatgcattaggtaggatt

SEQ ID NO: 368575 - DNA, 517 bp, Homo sapiens
aatgtagtggtccagcttacggccactcgcccaagacggagcagccggacaacttttagagagctgaacaggctgctgatgccctgggagaagaggaacacagcgtcagggccaaagaaccaaagatactactctcgtcccctccgccccacttgggccattattttaagcatagtgtatttccatgagatgcaattttatgcaacccttaaaaaaagtaaaattagaattttattccaagatgtatggaatggaaattccyattagcattttctacttccattaaaaagcaaataagcaagcacacaaaacaaatataattagaattatattgtacataagtaaacaaatacctgtgggcatctttccatatcattacttactttaaaaaattttaagggttgcataatatttcatctcatggaaatgagatattgcataatatgaaaaattttaagggttgcataacatttatttcatattgcataacatttcatccaaattatattgtgcataa

SEQ ID NO: 368576 - DNA, 560 bp, Homo sapiens
ttttacttggggtattttcagaagtggtcaggggcaaagcatgatcataacctcattaatatgtccccatctaaatctcaggcattggtatcaaaacaataatgattgcttagtggtttttcaatttcgagatgatagaaggatattaaataacctcagagaagtaatatgtatctctgcttgtgtaaacttgggaagatttagaggatgatgttatgagcctcaacctaataggaattctaagaatgtcagataaaatggaggggagaaaatcaaatgtaaaatattttgaaaattctgagagcagaagaaaatcagactcctgattaaacatgttcactgaatttccagcacaagaactgaaaaaagattctcattagaacactagaaataaagagaagatactaaaagcatctagaggggaaaactttgttactctaaaggagcaggwgtcagaatggcattggaattctcaatagcaagatttgcagacagaaacaaaacacaaaaaccaaaacaccaagctttaaaaatattgagtaaaaattgtttttaagtta

SEQ ID NO: 368577 - DNA, 589 bp, Homo sapiens
tggagcgtagaaacatttagccacaaatatataaaagctaagctaatgaaagaaaccaagacaattaactccaggaaaaacaaaagactatatgagaaaacatacataagcatagagcatctactataccaactgactcagarttcaacaatagttacattacatcataacactggaaacgctgattcttaatttaaccaaataatgatctaggcctatatttctttatgctaaattctgagatctgaaaagcaacaggtttttataagtttgcagcagcatcatttcatggcaaaacctgacctgaactgacaggacagtttatttgtagtctttatttattccactttgtatcaatattcttatgttttgttgcagcaatataatgtctttcattacagagtgttgcctcagatcccactggggagaattaagtaatgcatggtaggtgatattaactttccaaagtccttcttctgaattctgaaacatatctggcaccaagggttgggataaaggaactgaggacctatctaaatatactgagagaatgggggtggggtaggtgcatcaggaaggaaggagctgc

SEQ ID NO: 368578 - DNA, 540 bp, Homo sapiens
aactgactcagagttcaacaatagttacattacatcataacactggaaacgctgattcttaatttaaccaaataatgatctaggcctatatttctttatgctaaattctgagatctgaaaagcaacaggtttttataagtttgcagcagcatcatttcatggcaaaacctgacctgaactgacaggacagtttatttgtagtctttatttattccactttgtatcaatattcttatgttttgttgcagcaatataatgtctttcattacagagtgttgcctcagatcccactggggagaattaagtaatgcatggtaggtgatattaactttccaaagtccttcttctgaattctgaaacatatctggcaccaagggttgggataaaggaactgaggacctatctaaatataytgagagaatgggggtggggtaggtgcatcaggaaggaaggagctgctattcaggaaagctaaattctcaagcagagagtgacgagaatagcaatgtaatcatcttagacaggaatatgtaggtaaat

SEQ ID NO: 368579 - DNA, 567 bp, Homo sapiens
ggcaagttatctgccatgctttawttgaaaacacctgctgttggaatgtgccaactttctctggtgaagagtggaaagctagtgtgtgtgcccaagttatgagtgtaggcttcagtgtcagatggatgtaggctgaaattcttggcctgccaattgttagatgtttgttctcgccatgttacttttcctcattgagtctcagttttctctttataaaatgggatgataacaacgtcccccgctaacccagatctcaatcgtataccattgacattttgggctagataattctttgatgtaagggactgccttgtgcatcgaaggatgcttcacagcatctttgcccctattcactagatgctaggatcccagcccctgctgccattgtgacaaccaaaatgtctccagacattgtcaaatgtccctggggaaggttgcaaaattagcttcaaggataacccctcaaataaattgaaaaccttcatcattcagactttataaggattttataaaataatttattcaaattgcttagcacatgcagtcacttggaaagcacaaaaagca

SEQ ID NO: 368580 - DNA, 600 bp, Homo sapiens
atagctatagttaatgagtcaggcactgtgggaagtgcttcatatatctctttgcgatcaaacttcataagaaccctgttataattactttgttttagtagataagaaactgaaacttagagatggcaagtgactggctcaagtttatacactgcataaatggcagaagaagaatttgaatggacgtatatctaagtaaagagcccacgtctttaaccaccatgctacaatgccattttcagtaatagttgaagtagaattgagttgctttgcgtgcctaaaagctctacttccttgaatccctccttcwtgctgccaccaaagaggtccatctatgatataaactggattgtgttactcttccctttggctcacgcctgtaatcccagcactttaggaggcagagtcgggcagatcatgaggtcaggagactgaggctggtagtatcacaatgtgttcggtggacaactctgcggggccctcttgcccaactccaatccaggtatttagaggttacaatctctttggggttgtcacctgtccactgtgggttggagcattaggcccatgaaaataggagattgacccactccaccacag

SEQ ID NO: 368581 - DNA, 603 bp, Homo sapiens
ccccaccttcccttcaaatgggtcactctgtaacaatgtaccacaggtttcttcttgtgttctaaagcacctccagctgtttctggatttgggtcactgtgggtggttgttttacagattaactctgcaactctgctctaggtctcccactaaatgctcccttaacaccctttccctctccttcatatcacttattgcaattatgataattaattatgcatcaagctatttaatgcctacttccctcccactacgatatgagtttcctggaggcagggattgaatctgtcccaatctgctgcatttctgctgcctgacatagtgagtgacccagccactgaatgaagcactagtctcaaagctcttgtaaaatctgccaggttacctgagagcttgtcctctstgatgaagtgtttttgtcctcttgctcagttttaggaataactgttagcttttcttttattttcaaatcactttaagataattaattttcaaaataaagttttccaccccaccaaggaaaaatagaaactttcacattatatgcaatggtggatgtttgtgcctttagtaataaattcgctgatcttgaaatgtttctag

SEQ ID NO: 368582 - DNA, 516 bp, Homo sapiens
attaagagctatgtaagcattaaaattattattatattattcttattaaataatacttttggccaggtgtggtggcttacacctgtaatcccagcactttgggaagctgaggtgggcagatcacttgaggtcaggagtttgagactagcctggctaacatggtgaaactcgattctactaaatatacaaaaaaagttagtcggacgtggtggagtacgcctgtaatcagctactcaggaggctgaggtgggakggtcccttgaactcaggggagggaggttgtagtgagctgagatcttgccactgcactccagcctaggtgacagagtgagactctgtcaagaaaaaaaaaacgtttttacttaaaaagagaaatgtaaattaacaaataaacaaaaacataaaaattactagtattccagatataggcaaggtatgttttcaatcagacattggagtatatctcaaaactcaatgtaataatactttataattttttcccagcaatatgtttta

SEQ ID NO: 368583 - DNA, 516 bp, Homo sapiens
attaagagctatgtaagcattaaaattattattatattattcttattaaataatacttttggccaggtgtggtggcttacacctgtaatcccagcactttgggaagctgaggtgggcagatcacttgaggtcaggagtttgagactagcctggctaacatggtgaaactcgattctactaaatatacaaaaaaagttagtcggacgtggtggagtacgcctgtaatcagctactcaggaggctgaggtgggatgrtcccttgaactcaggggagggaggttgtagtgagctgagatcttgccactgcactccagcctaggtgacagagtgagactctgtcaagaaaaaaaaaacgtttttacttaaaaagagaaatgtaaattaacaaataaacaaaaacataaaaattactagtattccagatataggcaaggtatgttttcaatcagacattggagtatatctcaaaactcaatgtaataatactttataattttttcccagcaatatgtttta

SEQ ID NO: 368584 - DNA, 516 bp, Homo sapiens
attaagagctatgtaagcattaaaattattattatattattcttattaaataatacttttggccaggtgtggtggcttacacctgtaatcccagcactttgggaagctgaggtgggcagatcacttgaggtcaggagtttgagactagcctggctaacatggtgaaactcgattctactaaatatacaaaaaaagttagtcggacgtggtggagtacgcctgtaatcagctactcaggaggctgaggtgggatggtcccttgaactcaggggagggaggttgtagtgagctgagatcttgccactgcactccagcctaggtgacagagtgagactctgtcaagaaaaaaaaaacstttttacttaaaaagagaaatgtaaattaacaaataaacaaaaacataaaaattactagtattccagatataggcaaggtatgttttcaatcagacattggagtatatctcaaaactcaatgtaataatactttataattttttcccagcaatatgtttta

SEQ ID NO: 368585 - DNA, 607 bp, Homo sapiens
aagagagtagggcagtcaggaagagaacagagatttggtggccatggagtggtgcagcccacaygaggaacaccacacagtgacagccaacgtgtaggtagtctttcccctcttttccctgcaactttcaaacctgtgcagtaggaaggtgcacagatagcgaattttcctaatgttgcaactagcattagtaatacacacctgcctgatcgtcacaggactccagagtataaaccaaaatcaggaaaagtataattccaggcatcacccagatacaagagatagtataaccaggtgtgtcagaaacaaaagcaaaggcttggggtaccaccccatcgattctattaaagaccaagaaggttcaaaaagcacaaaccctctctcactcctccaaagctcaattcatttggcttaagaggctttgcgtagtttagttagagttgatatgacacacagaaaagcatctcattttcactttttcctaaaatctaaaattaacattaacatctgtgtttatttccttgaaaattggagaaacaagaattagtgtcattaaaatcaattattaaacactttaaaattgtgattacaaatagtagatagcatg

SEQ ID NO: 368586 - DNA, 607 bp, Homo sapiens
aagagagtagggcagtcaggaagagaacagagatttggtggccatggagtggtgcagcccacatgaggaacaccacacagtgacagccaacgtgtaggtagtctttcccctcttttccctgcaactttcaaacctgtgcagtaggaaggtgcacagatagcgaattttcctaatgttgcaactagcattagtaatacacacctgcctgatcgtcacaggactccagagtataaaccaaaatcaggaaaagtataattccaggcatcacccagatacaagagatagtataaccaggtgtgtcagaaacaaaagcaaaggcttggggtaccaccccatcgattctattaaagaccaagaaggttcaaaaagcacaaaccctctctcactcctccaaagctcaattcatttggcttaagaggctttgcgtagtttagttagagttgatatgacasacagaaaagcatctcattttcactttttcctaaaatctaaaattaacattaacatctgtgtttatttccttgaaaattggagaaacaagaattagtgtcattaaaatcaattattaaacactttaaaattgtgattacaaatagtagatagcatg

SEQ ID NO: 368587 - DNA, 573 bp, Homo sapiens
acatacatttattggctatatagtatttaatagatgtatattgatttgtttggtatctcctattattggatactcaggttatttcaaatttctattaaaatagtgcattgacaaatactagtgcaattaaatctgaaaatacactttctgctatttccttcaaagttaaagggcatgaagctggtaagggtttttgatatacactgccccactgcttaccagaaaggtggtcccttttctaaatttcaagccctctctaaattctgcttatggggtctgaggctgtccagataacctcaggataagaaattgcctcttgccacagacttgtcaacttggaacaggacgctggaaggggagttgctctctaagtgttgctggagggcacaacataataagayattcaggtgaatatctgtgatgtaggccttatatgcagaatttagagaggacatccctagactcttgaatctttagggagagcagagatgtaataaggtttcagagagaggatttcaggagctgtcagaagtgcaattttgggtccacaggaaataattttaggtctcatta

SEQ ID NO: 368588 - DNA, 573 bp, Homo sapiens
acatacatttattggctatatagtatttaatagatgtatattgatttgtttggtatctcctattattggatactcaggttatttcaaatttctattaaaatagtgcattgacaaatactagtgcaattaaatctgaaaatacactttctgctatttccttcaaagttaaagggcatgaagctggtaagggtttttgatatacactgccccactgcttaccagaaaggtggtcccttttctaaatttcaagccctctctaaattctgcttatggggtctgaggctgtccagataacctcaggataagaaattgcctcttgccacagacttgtcaacttggaacaggacgctggaaggggagttgctctctaagtgttgctggagggcacaacataataagacattcaggtgaatatctgtgatgtaggccttatatgcagaatttagagaggacatccctagactcttgaatctttagggagagcagagatgtaataaggtttcagagagaggatttcakgagctgtcagaagtgcaattttgggtccacaggaaataattttaggtctcatta

SEQ ID NO: 368589 - DNA, 617 bp, Homo sapiens
tgtattaatataaataaatttcacaagcagaattttaaggagaagaaagacaggttgctgaagaatatatagtgtgatttattttataaaaatggtcaaacgtattcaaaagtaaactgtattaattagggtataattttttaaaactcttatgctawagataaaacttaagatgttagtaactttggggaataaacagaggagcacggaatctaggagaggtattcatatataggaattttaatatatagtaatattattctagttcttaggctgggttgtagagatatgggagttcatttagttattactctttgttccttatatttagactcacttcctctgtgtatgtatgaatacttgaaaattttaaactatgctgttagtagaaaagtttgagataatcataaggagtgcagattttaaaaaagcaaactgatttctgtaacaagaaattaacagacaacatgtagattaaaatgaggtagcataaagttaatgtctcagaatgacagaaaaatagaatagaaaaataacttgatatattaaaagaaagttttattaaaataaaaaagcgatttgctgatagacaaaatacataagggccataagaacat

SEQ ID NO: 368590 - DNA, 603 bp, Homo sapiens
tgtaacaagaaattaacagacaacatgtagattaaaatgaggtagcataaagttaatgtctcagaatgacagaaaaatagaatagaaaaataacttgatatattaaaagaaagttttattaaaataaaaaagcgatttgctgatagacaaaatacataagggccataagaacatttcctacagtaatgttcctatgcattatgaaaatatattctgctaaagattttgggtttaaagaataaagaattaattccttgagcacccaggcagaaaaataaatcacctaaaaactgaaagaaaatcaggctgtcattagcctcttctatgaaggcaataaaacaacgtttacaatatttagaaaaaacaaaagtgtggccaaaagattaaatccagagaaggtgttattcacctataaagataataaatggacattgtcaacatgaaagaactcaggacatgtagcacacatgagacctccttkaaaaaatgctgaaccaaagtggcaacaaaatctacataaataagagatgaatctaaagaaattagtaataaagaagctataatttaaaaaccaatggttataaattaacctatcaaattata

SEQ ID NO: 368591 - DNA, 543 bp, Homo sapiens
catttgacggcttgttggcagaaaaacaacagtgcaaataccaagaaacctcagcagtaagtcagtttcaagcaggtcagatgccctgtaatatgcgcagtgtgatagtttaatcagagaatcatgyggtattattgcttctgcctgagaggaagagacttttttcttttcaagaaagcgcttttcagatagctattaggttgttgaatgaggaactgcacaaaagaaatgctggctccttgtggtctttcagatcattaaaaagtgacccaggtggcaaaaccagttatcattttctcagctgcagtagataaaagagcaagattggacaccaatctgtggctacatgatggcaaaaccatcagcccagagcaaaagagggttcatcaattccgtggaaaatatggagtcaacgtgattacttggcattgtgcaggtgccaacctgttgatttgactgattttgcttttcagatgttgatctagtcttgaaaagtctcatacacccaaactcactgatcctgtttttctctctcttgcagca

SEQ ID NO: 368592 - DNA, 613 bp, Homo sapiens
ggttcattgtgtagacatgccatgtttcatctctgccattcatgggcacttggcattcactgtgtgtcaggaattttatttgtttgaaaaccaactggattttaagctgtgtgctctatgtcctcccagggcttagaataatacagactacattggatcaggtgatgtattcaatttctagaaagcttttgcttacaactaaaggactcacaacctgtcgccttgtggcttttcctaagcttttggtatcatcctgctggctccctcattctaactcttttcctttgatttactgtcaytttttctttatcctctatcagcttccttttggtagcccaaagtcagaatcctggatcttgaagcacatgctgtggcataccagacaaatccttgcttctggaccaaggcacccatttccccaactgctgggaacattggcagatgatggctctcggtgagtcatgttctaagtgctgcccaggagagccaccttacccaaggtcacacttcttcctcagtgtgtgtgcattaaaaaaatgtggaacataaagtcccccacctcaaggtggttcaactctgaagggccaccccagctcaagaactccctgtgcga

SEQ ID NO: 368593 - DNA, 574 bp, Homo sapiens
ctgggtgcttgggatacatcagtggaaactgacagcactgctgaccttgcagtgcttacattttatcaagagggatacagaccatagataataataggaaggggttatatatcttttaggatgctgtaagtgttcgaggaaaaacacagaattgaaaaagaagggttgggcatggtatgggtacaatttaaaataggatggtcagggtagatytcattgagaaggtggcatttgacaaagacttcatggagttaaaagaattgaccatgtgaacattgaggaaaaagtattcaaagtaaaaaaaaaaaacaaaaaaaactgcaaatgcgaaggccctaacttaggagcatgcctgatgtgtctgaggatcagcacacaggcctgtgcagcaggagccaaatgaacatggtagtaggaaatgagactagagagtacctaggagccagactatgaagaagctcctgcgaggctttggctctgttgagaagagacaggtaagaagctattgcagtaatctagatgagagatgatggtgttgagaaaacgaggaaacagagaatataataaaaattgg

SEQ ID NO: 368594 - DNA, 505 bp, Homo sapiens
ggagccaaatgaacatggtagtaggaaatgagactagagagtacctaggagccagactatgaagaagctcctgcgaggctttggctctgttgagaagagacaggtaagaagctattgcagtaatctagatgagagaygatggtgttgagaaaacgaggaaacagagaatataataaaaattggtgtgattctggatacattttgaaaatagaaccaatataattacttgacggtttggattcaggagataaagaaagagaggccttcaaaattcttggcttgaatgatggagaggataaagttgttatcaactgagacagaaaaactgtgagtacagtaggttttgggtagacattgggagatcagaagttgaattttgcacacagtaaatttctgcaaggggggaaacatccaggaggcaattggctaggaaaatacaaagtttggaggatacgtctgcactggagagggacacttgggaaccattagtctatggatggtattt

SEQ ID NO: 368595 - DNA, 505 bp, Homo sapiens
ggagccaaatgaacatggtagtaggaaatgagactagagagtacctaggagccagactatgaagaagctcctgcgaggctttggctctgttgagaagagacaggtaagaagctattgcagtaatctagatgagagatgatggtgttgagaaaacgaggaaacagagaatataataaaaattggtgtgattctggatacrttttgaaaatagaaccaatataattacttgacggtttggattcaggagataaagaaagagaggccttcaaaattcttggcttgaatgatggagaggataaagttgttatcaactgagacagaaaaactgtgagtacagtaggttttgggtagacattgggagatcagaagttgaattttgcacacagtaaatttctgcaaggggggaaacatccaggaggcaattggctaggaaaatacaaagtttggaggatacgtctgcactggagagggacacttgggaaccattagtctatggatggtattt

SEQ ID NO: 368596 - DNA, 563 bp, Homo sapiens
cacaggtcattagtttaaaaataactgagagctgaaccatttatatttagaaaattagtgaatcatgtcagtttaacaaaatttatgtaaatgaactgcttataaagaaactgatttataacatttacaaaatcatttcaactacgcctatagaaaaataattacattttcaatatctataggttttgtacttttaaggtgataataacaaattgtccattgttttcatagaactaagaatagtatcagatttttcaacaaagaaacacagaggcgccaaccctttattttcctagttattaatatcaggttgggtgcctatgttgatactaggtacctaaccattttactctaacaaacgagtatccaaactgctcagtccttagaattactaaggaaaccttttcaaatctgattctgatactccattcccagagattcagttgtattagttctaggatagagtataggaatcttaatkcataaaaactcttccttggtggttctcaaacttggttgcacattaaaatcagcttgagaggttcattccaacatctgtgcta

SEQ ID NO: 368597 - DNA, 259 bp, Homo sapiens
taagtagtataaaagtgtttaatatttaattttctgctgcagtaatgtgacataacaaccttaaattcttggtactttaaacaagatattttttttctcccaaatttctaggttatttaagggcagttctgcttyatattgcagtttgcctgggctttactccaggctgtgtgttgaagttaggtctaatctattgtatccctacacatcccacttagaaaagctaataaatttcctttggacttcagtcagttcgatt

SEQ ID NO: 368598 - DNA, 519 bp, Homo sapiens
aaaatctagggcagggcaaattgtcaaggagaggacaactaaactggcaatagaaacctggataccacctgttactcactgctatagtttggatgtttgtccctgtaaacctcacattgatatttgatcaccaatgttggagatggagcctaatgggastaagcatcttaaaatctgtgatgggaggagaacacagtccaggaaggaccatgtatctataagtaatgcccatgtattttttgacctgtaaagggaatgagtaccaaaatagatacaggaaataactttcaccctgaacgacctttctactggggagaagatactttcaaatatttaacagagtacaaaacaaaagatgatgtgtgcaacatcccttaatttctaggaagcatggaggccttgtatggctctgcatcccagcatataacagtgttcagagattggaatgcattagttattcagtgcatattttttgaatgaatgagtaaaaagtatagttagtagaaggaggaaagaaaa

SEQ ID NO: 368599 - DNA, 493 bp, Homo sapiens
attcttaaatcacaatgtaaaaaagcattcaataaaatatttgtatttttctagagacattctgaaactacaaagtaaaatagcattcaataaaatatttgtatttytctggagatattctgaaaccacaatataaaaaagcattcaataaaatattgtattttttagagatattctcaaaccacaatataaaaaagcattcaataaaatatttgtatttttctagagattctgaaaccacaatgtataaaagcattcaataaaatatttgtatttttctagcgacattctgaaaccacaatgtaaaaaaaaacattcctgggggcgggggggacagtaacatttctttttcaactctcctttgaccagtagagcatgatgcccctcagggacattttggcttgacccaaatggtgtgtgcagattctagctactataaaccacactgttctatggcttgacaagtccacttcatcaagaaaaaaaaaaatgc

SEQ ID NO: 368600 - DNA, 516 bp, Homo sapiens
tcaccaatgttggagatggagcctaatgggactaagcatcttaaaatctgtgatgggaggagaacacagtccaggaaggaccatgtatctataagtaatgcccatgtattttttgacctgtaaagggaatgagtaccaaaatagatacaggaaataactttcaccctgaacgacctttctactggggagaagatactttcaaatatttaacagagtacaaaacaaaagatgatgtrtgcaacatcccttaatttctaggaagcatggaggccttgtatggctctgcatcccagcatataacagtgttcagagattggaatgcattagttattcagtgcatattttttgaatgaatgagtaaaaagtatagttagtagaaggaggaaagaaaaatattcccttcaactattcatttcatcaagcctttcttgaattcctatgtttacagttcagggtcagattatttggggatacacagattaatcaaaaagaatcctacctttacaatgtcaaatt

SEQ ID NO: 368601 - DNA, 339 bp, Homo sapiens
atttaccttaacagtttgccacccaaccaaggaataaataataatgaaaatgtgtattamaacattcattttatttttcacattctcagtgagtgaaaagtaattgaaacaggatgtagggggaagagcagtcctgtctcatgactactctgaggctgtttcctcatctgtaatgtctgtgctgttagttttgataggtgactgtgtaatgcagagatttgaataacttgccagctgctttttgtcacatgggttgccaaggaataactgtgatgcaaaggacagttaaggcaaacgtacatgctagtattgcctgctgaggatttgaccgtgttaccc

SEQ ID NO: 368602 - DNA, 581 bp, Homo sapiens
ttctacctagtaatcccttcttcatccttagataattcagccttcattcctaaaataaatgtggagcgatggcagtagttgttaactacgggaacaagctttaagtgtactacagaaaatgtaatggagaatattccaaaaataataacttggaattttatcttaggagaaaagaaatttcttccacctcaccacagccctgcgattgtcaggagaaatttcctgttagcaaggccagatccaggagaagagtccagatgtctctctgctagcctaaacaccatttggcatctctttcctttttactgaagctttgaagaaaataggaatagaaccagatctagtaaattacctggggactgaaacatctttgatatrcgtcttgagaacatcgcaacatatttcttttcctccttcagagcattagctttgccgcttctcggaaccctaaatgacagaaacaatgacagacggattggacagcgagtctcgcttccctggtgccaaatacagaccaaaatagcctaagcgcccctttccaaagtcttgagactgaaaaaatatatatatgatatgcatat

SEQ ID NO: 368603 - DNA, 687 bp, Homo sapiens
cataatgacatccgttgccaaaagtaatccaaaagaaaaaacacacccttgattggttatctggcattaaaaaataaagtaaggccaggcacggtggctcatgcctgtaatcccagcacaccgggaggctgaggcaggaggatcacttgaggccaggaggtccagaccagcctgggcaaatgkcaaaacctcatctctatcaaaactacaaaaattagccaggcatggtggcacaagtctgaaatcctagctagtcgggagactaaggcatgagaatcacttaaacctgggaggcagaggttgcagcgggccaagatcgcactgctgcactccagcctgggcaacagagtgagacttcatctcaaaaaaataataatagtaacactaataacaatttaatagtgaagagtctatctttggttatcatgcatcaacacaaataattcattattttgctcaaatgccaagagaaattacagtcatctctgtacccaactgccaataaagtttctaatatctatgaaattatgatacacaaaatatctgtatgagttaatattgctaatacttgtggtggttacaagacagggagatgttattgacttgctgtagttttatcattcatgtagacatgatcttcaaagggtgagaaaatacaaacgtctgtaattttcttttcctaacttg

SEQ ID NO: 368604 - DNA, 492 bp, Homo sapiens
taaggtaatcattgtaattcccgttacttaataggttattctaaagcacattttggcttcaggtctctagaaataatcatcttctcatgatatgtgcaatagttaaaaattaattacaaacagttttcataccatctatgaaattasaacatataaatcatgctttggagttttttaaacgagaagcagaatatgggctttttaccatattttacctctggttccctgaaatttaagtcttatgaaaatattaggagatacataatatagttaatagcaaatatccaatatgtattttcagtgagtgaagagagaaggataagatgcttatgctggatacgtgtttcatgaacattgtcccatgaggatgaaaacgtaacagatcatggtacttggattactgtattgccagtcacagacagcaagtgaaacatatcattgggttgtactgtggaaatacccacaataagtaagcaatgagacatagtatta

SEQ ID NO: 368605 - DNA, 492 bp, Homo sapiens
taaggtaatcattgtaattcccgttacttaataggttattctaaagcacattttggcttcaggtctctagaaataatcatcttctcatgatatgtgcaatagttaaaaattaattacaaacagttttcataccatctatgaaattagaacatataaatcatgctttggagttttttaaacgagaagcagaatatgggctttttaccatattttacctctggttccctgaaatttaagtcttatgaaaatattaggagatacataatatasttaatagcaaatatccaatatgtattttcagtgagtgaagagagaaggataagatgcttatgctggatacgtgtttcatgaacattgtcccatgaggatgaaaacgtaacagatcatggtacttggattactgtattgccagtcacagacagcaagtgaaacatatcattgggttgtactgtggaaatacccacaataagtaagcaatgagacatagtatta

SEQ ID NO: 368606 - DNA, 631 bp, Homo sapiens
atgttggtaggagttatagacttttacaaacacatgcagtctagtttatacatgcattcacataaatgaagaaatagtatgacacagagcaaagaataaatgccatgttaccagactgtttccagcttctggctgaaatatccccctgaaacctctgcatttaattcctccttwtagagctcatacttactctcctctgttttatctgatgacattactgtttcaagaatcattttcttgttttattttttgtgctcctactatttttggaaagttctttctattgacacccatggatactcatacatcactttaaatgctgagccattgccaatggattggaataactgatgggaaatttaaagaggtgcccctgtattctcttaattagagggatcataacatttctcactaaaactagtacatcatagacattggaagggggcgctattaatgattacttcagggaaacaaaaatctaccaagagtggagagagtcttagcaggaacaggaatgccttcagggtataggattaagtttgcggtagattcttattcagtatatattccattctcctcttcacccatgggacttgctttagcctaagagtggaccaaaagaattctgact

SEQ ID NO: 368607 - DNA, 444 bp, Homo sapiens
tgaaccccccacaagtcagaagtacgagaattttgttagcaatttacattatctgcaaaaccagacgcaaagtaaccatcagtaccattatccgaaggtaatagttctagatcatttgcaggtggggcattaagtctatggattataagattgtaatattagactggkattaaatcatctctgcacagttgaaatgatagttattactaggacagctgaaaagagaaaacagtttagtaggttttgaagggcagataattgactagaaaaaggataaggcatctaaggatgagcttaaaataatgcaattgaaacacacctgaccagcagtctaccactatttagacacaaaatctacatttacattgcctgaagctatccaagaataactaaatccttaattagtgggatatatgcgcatagaggcctaatacatttttgcat

SEQ ID NO: 368608 - DNA, 518 bp, Homo sapiens
aatttctttgacaatagtatcatcatcaaaaccaagcgcaaaaagagagcatgaagctcaagaaaaatactgcattaaacaacattttcttacccaagaatgaaccccccacaagtcagaagtacgagaattttgttagcaatttacattatctgcaaaaccagacgcaaagtaaccatcagtaccattatccgaaggtaatagttctagatcatttgcaggtggggcattaagtctatggattataagattgtaatattagactggtattaaatcatctctgcacagttgaaatgatagttattactaggacagctgaaaagagaaaacagttkagtaggttttgaagggcagataattgactagaaaaaggataaggcatctaaggatgagcttaaaataatgcaattgaaacacacctgaccagcagtctaccactatttagacacaaaatctacatttacattgcctgaagctatccaagaataactaaatccttaattagtgggatatatgcg

SEQ ID NO: 368609 - DNA, 609 bp, Homo sapiens
gagaacaagctatgatgtctctgcttatatcaggacaccaatcctattagattagggccccacccttatgacctcatttaatcttatttatctcaataaaggccttatctctaaatatagtcagagaaggggttatggcttcaccatatgactttgaaggagacaacacttcagtccataacaggaagtgaaacattttttaatgcatgcaagaaatttaacaaaagttaaaaagagacataaattttaaaatktaaacaacttagcaaatgccatgtaggttttttttaagttctacatctcatagtaaaatttaagaacaggataaggagaatatgttctcatcttccataagacattgagtaggaagttaaaacaagtcacatacaaaggaacaagaattatacttaaatttaacgtttaagtataatcactgggtatcataagacaatgaagaaaaaattcattttcaacctaaaattgtctacccagctaaaattataaattacacaggtaaagtaatatttcattttcaggtataacaagggcacctaaattttacattttacacactttacttagaaagtcggttgaggataccacccagcc

SEQ ID NO: 368610 - DNA, 609 bp, Homo sapiens
gagaacaagctatgatgtctctgcttatatcaggacaccaatcctattagattagggccccacccttatgacctcatttaatcttatttatctcaataaaggccttatctctaaatatagtcagagaaggggttatggcttcaccatatgactttgaaggagacaacacttcagtccataacaggaagtgaaacattttttaatgcatgcaagaaatttaacaaaagttaaaaagagacataaattttaaaatttaaacaacttagcraatgccatgtaggttttttttaagttctacatctcatagtaaaatttaagaacaggataaggagaatatgttctcatcttccataagacattgagtaggaagttaaaacaagtcacatacaaaggaacaagaattatacttaaatttaacgtttaagtataatcactgggtatcataagacaatgaagaaaaaattcattttcaacctaaaattgtctacccagctaaaattataaattacacaggtaaagtaatatttcattttcaggtataacaagggcacctaaattttacattttacacactttacttagaaagtcggttgaggataccacccagcc

SEQ ID NO: 368611 - DNA, 398 bp, Homo sapiens
atatatggatttttttcaataagtacacaaatacagaatggacatgactccaatcacagtcaaaagacacattaatgcaatattaaatcataactgcataaaattaactggtacatactttactactgtaataattttgtagccacctcctgttgctgttgcagtgagctccagtgttgtaagtatccatttaaaaagtcatrtgtcactaatcatctaacattgagttgttcctctctccggtaaattgcacagtaaaaagtgacctctcgtggtcctcccatatttttcattgtgtttagtgcaataccataagccttgaataacaccatgggacccatacgaagtgccaatagtgatgctggaagtgctcccaaggagcaaagttgtgacattac

SEQ ID NO: 368612 - DNA, 504 bp, Homo sapiens
ccaagccatctcttatctctggaccctgctatgaccattgttctagcagggtctagagaaaagagactctcttgttatacttactggagaacaagtgttataggtttgaggcatttatgtttggagggcagcttgtacctggtacacaaaggggtgggcaaccgagattttgagagcytgagccttgtactctctaaccaggatgtagacccaagtcttctgggttgctggcttacatgtggtcataggtttgaccattgttctccaattagagaataacaataacacaacaacagcaacaaaagggagcaagctttaactatgacatagttctatctccctgaagttttcctcagccaacctttttggaacctgacttctatttggaaggggtatctgcatttgacatgaagtctgatgtttgtacaggtaggacctcatgataaatatagattctgagaagctctgagttaaatcaatggccctctccaaggtaattaaagt

SEQ ID NO: 368613 - DNA, 504 bp, Homo sapiens
ccaagccatctcttatctctggaccctgctatgaccattgttctagcagggtctagagaaaagagactctcttgttatacttactggagaacaagtgttataggtttgaggcatttatgtttggagggcagcttgtacctggtacacaaaggggtgggcaaccgagattttgagagcctgagccttgtactctctaaccaggatgtagacccaagtcttctgggttgctggcttacatgtggtcataggtttgaccattgttctccaattagagaataacaataacacaacaacagcaacaaaagggagcaagctttaactatgacatagttctatctccctgaagttttcctcagccaacytttttggaacctgacttctatttggaaggggtatctgcatttgacatgaagtctgatgtttgtacaggtaggacctcatgataaatatagattctgagaagctctgagttaaatcaatggccctctccaaggtaattaaagt

SEQ ID NO: 368614 - DNA, 580 bp, Homo sapiens
actgtcaaactcaatctctatgtacagaaaaaataattttataggtaaagttgaggcatttcacacaaaacctgagagaggccaggtactgaggctcacgcctgtaatcccagcactttgggaggctgaggtgggcggatcacaaggtcaagggattaagaccatcctggccaacatggtgaaacccgtctctactaaaaatacaaaatgtagccaggcatggtggcgggtgctgtagtccagctactcgggaggctaaggcaggagaattgcttgaacctgggaggtggaggttgcagctagctgagatcgtgaacattgcactccactccagcctggtgacagaamgaggctttgtctcaaaaaaaaaaaaaaagaaaaaaagaaaaggaaagcaaagaaaacctgagagaatatactgcagtaagactaatacaggaacataaaaagaaattcttcaagctaagaaaaattacatcagatgaaagtccagttctgtagaaatatatgaaaataaccagaaagtgtacatatgtagataaatataaaatatcttttaactctgtctaaacacacactc

SEQ ID NO: 368615 - DNA, 573 bp, Homo sapiens
ttttcaacaagaggcagaatccctgttttaagtgctctctgattaggccaggtctatctgcaagaatcctgcttttgatgaactcacagtcatctgcttaattacataatcatatgataaaatgccatcatatgggattttacaagtcctggtatattctctttgaaagtggactgggcataataaggtgttatgagtagaaaagaaaaaggcagctcacgctaataatcccagcactttgagaagccgaggctggtggatcagttgacgtcaggaattcaagaccgtatggccaacatggggaaacccatctctactaaaataaataaacaaatatatattctttaatttgactactcataacacaagttcatcccacattgaaggcgaatataccaggcatgcacattagaaggaaggaaacttgaaggctatctcagaattcttcctagcatactgaccaataaaagaatcaaatctgaatatttctgtatttattaawtaaattaaatgcagagtttttaaaaattctattaatatattttaagcttagccttactggttgctatacaa

SEQ ID NO: 368616 - DNA, 554 bp, Homo sapiens
tcaaggaaataaatagcttaaagtaaaaacaataagaaatttargaaactttggatacacttttagaaatgtgaaatgctctggaaagtctcagcaataaaattgaacaagtagaagaaagaaactcagagcttgaagacaaggtttttgtatcaacccaatccaacaaagacaaagaaaaaagaataagaaaatatgaacaaaacctctgagaagtctgggataatgttaaacgagcaaacctaacaataatcagtgttcctgaggatgaagattattctaaaagcctggaaaacatatttgtggaaataatcaagaaaaactcccccagccttgctagagacctagacatccacatacaagaagcacaaagaacacccaggaaatttatcacaaaaatatcttcacctaggcacattgtcatcaggttatccaaagttaagatgaaggaaataatcctaagagctgtgagacaaaaacacaacgtaacttataaaagaaaacctatcatgttaacagcagatttatcagaagaaaccctacaagctagaagg

SEQ ID NO: 368617 - DNA, 554 bp, Homo sapiens
tcaaggaaataaatagcttaaagtaaaaacaataagaaatttaggaaactttggatacacttttagaaatgtgaaatgctctggaaagtctcagcaataaaattgaacaagtagaagaaagaaactcagagcttgaagacaaggtttttgtatcaacccaatccaacaaagacaaagaaaaaagaataagaaaatatgaacaaaacctctgagaagtctgggataatgttaaacgagcaaacctaacaataatcagtgttcctgaggatgaagattattctaaaagcctggaaaacatatttgtggaaataatcaagaaaaactcccccagccttgctagagacctagacatccacatacaagaagcacaaagaacacccaggaaatttatcacaaaaatatcttcacctargcacattgtcatcaggttatccaaagttaagatgaaggaaataatcctaagagctgtgagacaaaaacacaacgtaacttataaaagaaaacctatcatgttaacagcagatttatcagaagaaaccctacaagctagaagg

SEQ ID NO: 368618 - DNA, 549 bp, Homo sapiens
aagacttaaacctaagacctgaaactataaaaattctagaagataacattgaaaaaacccttgtagacattggcttaggcaraaattttatgaccaagaacgtgaaagcaaattcaataaaaacaaagataaatagctgggacctaattaaactaaagtgcttttgcatggcaaaaggaacagtcagcagagtaaacaagcgacacataaagtgggagaaaatcttcacaatctatacacaaaggactaatatccagaatctacaataagttcaaacaaatcagtaagaaaaaaaaacaagcaatcccatcaaaaagtgggctaaggacatgaatagacaattctcaaatgaagatacacaaatggccaataaacatatgaaaaaatgctcagcatcgctagtgatcagggaaatgcaaatcaaaaccatgctgcaataccacctgactcctgcaagaatggccataagaaataataaataaacagtagatgatggcatggacgcagtgaacagggaacatttctactctgctggtgggaatgcaaact

SEQ ID NO: 368619 - DNA, 574 bp, Homo sapiens
tcatacttcagcaccttctctctttaaagctcctagtttttaaaaaaattctcccatgtggacaaaatacagcatgggtttccatcagagactacttatgttgcaagtcttactagctgactgcagccacttggtcatgatgcctgagcacagtggacattatatatttgcttgtgttaaaagccccattttctaggcccttcatcccagctgatgggacttcattgagcmgatcaataatggaacagacctgaaacagtcctaattccttagtattgaaccaccactaaattccacctttttttgttttattgtgttatgaattatgagatacaattgcctgcaatgcattattttaatccctggtgacgtaatatgtttctctttttcttatttaaataaacaaacatcactcacctgtcttgtagtagcttgcttgcatgcttgattatttggattaagccatttcaattattcagatagtttattttaaggggaacaatatttctgtggaccttgtataaacatagaggtttttatgaatgttacaaatatatatgtgttttcacagaat

SEQ ID NO: 368620 - DNA, 593 bp, Homo sapiens
atttccagaagaacaaacaattaccatattgatatatgcacatgtacatattcactttcacacaacactgttcacgtgctatcagtgtaattgcagaacacagaggcgagtctcctgggtcacatctggaacaatgttccttccatctggaaatatgctaattattgatcacttagtagtaaggtagtggtatggtttggctctgtgtccccactcgaatctcaccttgaattgtaataatccccatgtgtcaagggtgggatcaggtgaagataattgaatcatggaggcagtttcccccatgctgttctcctgatagtaagtgagttatcctggatctgatggttttataatgggcttccctatttgcttggcactcattctctctcctgctaccatgtgaagaggggccttctgccacgattctaagtttcctgaggccttgccagccatgtggatctgtgagtcaattaaacctcttttctttaaaaattcccaggtctcrtgtattttttcatagcagtgtgagaatgaactaatacaggcaggctgcacaattacttttatataatttccaatactgttttaaatga

SEQ ID NO: 368621 - DNA, 526 bp, Homo sapiens
tgcacttacactctgatacaaccattacataatgttagcttccctgtaggtagaatacttgggtatgggaaccagacttgaagtaggaatgtctctgctggaccttattatcagtgacccwggacatttttgctttttttcaaaactttaggctctgtaaatctgcagatctgggttcccagaggaaggacgtatccatcaggtgagaaacctagaccagcagaggtaatagccgcagatgaagatagtaaagaagaaagctaatgaagatcagttaaagcttcaagaccagcaaaggctatatagttcaagtcaccaaccttcctcttacacattattaataaatgatatcaataagaatcgtgcagaagctgtacacagaagaagtaaagttactataggaagcaatgcaagggatgacttgtagtggatattacttttatcacccagatctctctttcaggacactcattctcttagctatcaaaaatctaggattcttagcttgatggccgatagctgctac

SEQ ID NO: 368622 - DNA, 526 bp, Homo sapiens
tgcacttacactctgatacaaccattacataatgttagcttccctgtaggtagaatacttgggtatgggaaccagacttgaagtaggaatgtctctgctggaccttattatcagtgaccctggacatttttgctttttttcaaaactttaggctctgtaaatctgcagatctgggttcccagaggaaggacgtatccatcaggtgagaaacctagaccagcagaggtaayagccgcagatgaagatagtaaagaagaaagctaatgaagatcagttaaagcttcaagaccagcaaaggctatatagttcaagtcaccaaccttcctcttacacattattaataaatgatatcaataagaatcgtgcagaagctgtacacagaagaagtaaagttactataggaagcaatgcaagggatgacttgtagtggatattacttttatcacccagatctctctttcaggacactcattctcttagctatcaaaaatctaggattcttagcttgatggccgatagctgctac

SEQ ID NO: 368623 - DNA, 422 bp, Homo sapiens
attgcacattgatttactcaagtttatatgtgtttaasttttgtctcagactctcagttcccaagatagcatgtgagctttattcgctgttgtatctctagggtctagcctggtgttttgtacatagcagacacacacacacacacacacacacacacatacacaaatgtagagccttgtttcatcaagattaagagcattgagtaataacatctttattagagatgatttaatgagaaaaataactggataaaggtcattttcaaaggtcataaacatgagtaggacattccacttgccaaattcccacttctgactaagatggactaaaagcagatagaccctcatgcctaaaacactaaaacgctagataaaatgtaagaagaaaatggttctaaagatattgaacactgggcaataaa

SEQ ID NO: 368624 - DNA, 422 bp, Homo sapiens
attgcacattgatttactcaagtttatatgtgtttaagttttgtctcagactctcagttcccaagatagcatgtgagctttattcrctgttgtatctctagggtctagcctggtgttttgtacatagcagacacacacacacacacacacacacacacatacacaaatgtagagccttgtttcatcaagattaagagcattgagtaataacatctttattagagatgatttaatgagaaaaataactggataaaggtcattttcaaaggtcataaacatgagtaggacattccacttgccaaattcccacttctgactaagatggactaaaagcagatagaccctcatgcctaaaacactaaaacgctagataaaatgtaagaagaaaatggttctaaagatattgaacactgggcaataaa

SEQ ID NO: 368625 - DNA, 616 bp, Homo sapiens
accacttggtaagtactcaatatatagtacttagtatatatattatagatagttttgtgtttatgttatcatatggaagtattgctatttggggccttttttttttttttttttttttaagacggagtctacctcttgtcacctagactggaatgcagtggcacgatctcggctcactgcaacctctgcctcctgggttcaagcgattctcctgcctcagcctcctgagtagctgggattacaggcgcccgccaccacgcccagtgaatttttgtgtttttagtagagacrgggtttcactgtgttggccaggctggtcttgatctcctgacctcgtgatctgcccaccttggcctcccaaagtgctgggattacaagcgtgagccactggacccggtgggggccattttttacccctaaaaggcaacagtttcatacggttcaacctcatatttgtgttacacacctctgtctgcttacgttgagccagaatctgcttctctataacttttaccactcaattaagatgttgtccctagggaccatacacacaatgcatcaatttctttttcccacctggaacatttcaaaagaataaactagtcacaaataagtt

SEQ ID NO: 368626 - DNA, 661 bp, Homo sapiens
acacagagggaaaagctttacattgagttaggatgaaagaaggtaagaatgtgggaagaagatgagtttgagaagaaaggcagagggagacctgtgggatatttacccaataagggatacctgtccaatggctccagtttttctaaaaggcatagaagaaggtcacctgtggagaacaatgaaggcaggggcagcggaagggaggagaggagagtggtggagattgggagcaactattccagggaaaacaggagaaggaactgagcaggtacatacacagttgattattaagcagtgctgagttgagctgtgcagcccaaatgcagaaaaataaacagctagactgaccttagggaaggggtctgcaaggtggatattatggaagaacaaaggataaaggagatagtacatgttggctaaaaatgattaaactaagaaatcatgaggcccaaggctggagagacaagttattaaagtttcatggggactgagagactgacaaaagacccgagggcttagtcaacatcaaagaacaggtgtgtagggtgtgagggagtacaggctggaagcrtcaaaggctgtggtctaagattgggatgctgtacatttaagattttaaaagcaaaacagacctgggtcataaaaagtccaggttgtgaat

SEQ ID NO: 368627 - DNA, 573 bp, Homo sapiens
aaccagcagtttctattggcacagtctgagctccagcaggaagtcatctctttttctcagtgcattacttacatgtgaaagttggggtgggggtgcaaaagaaagtatatattgagcccaacatatcgccttatttgtctcccctctctatgggcatggcatctgtgttttgaagagtcaatgggggagaaaacagttgtgttagtgcttgaaataggatgcagtacattccctctcttcttgtcttctcttccttccgcccccggtctttccccttttggaaaggggagttatcgagagactgagatctcagagccaacactgaaaacgacaccaaattatagctgtgtccagatacctaggatcttgactggccttatcataagaggcaaggactgcggtaaactgcacatcagggaatttgatttcttggtaggtttaaacagctgaaggtagaaggaaaaaaaattaagttcttcctgttatattattmacttatgagaacagcgaaatctaaaagaaattgttctgcatagttgaaagtaaagatagaatactcaatatattttctac

SEQ ID NO: 368628 - DNA, 609 bp, Homo sapiens
ctttacactaggaatttttatccaaatgaaaatggggattatttacagggttatcaaaaaaaaaaccccacaaaaaaccatagctccttcacacttggtggccagaaagaagtaaatacaagaccctagaaaagtggtactctcattttgatgtgtgtgacactctgaggagtttacagaaaaggcagattttgaggctaccccagaaatcctgcagcaggcccaggaatttgcatttctcatgagtacttcagaggtgctgactgcccactgatgctgatggtccactttaagaaacactacctgggagggtccagctcctcctagatgcygtaggtcaatctagagcgcaaaaatccagctgagaggtaaatcccagactgtgacaaaatggggaaatttccataatgatttcaaactataagatcttcaaggcctactctgagtttaagcacaaattctgaagcaaatgttggcaaatttggaagtgtttcagctctaaaaatggaaggatataagcattatatccagttctctcaatggctgttttataccaaaaaggaagtgatatagaataaaaacaataatttaaaaattgatgtcaagctt

SEQ ID NO: 368629 - DNA, 633 bp, Homo sapiens
ctgctcgaacaccccccatgctcagaccagtcgatccccaggtacagtctgcctccattccatcaggcattccaataagttgcacaagaaaacctattattaaaagcctagggaattgtaacatggattcaggcacaggatcaaattatgacccttaatatagaatttatagtaaaataggtggccccactgatttttaagagtagaagaacaggtgagaaagaaaaaagcatcacccttaaacttgagtcaaccacaaactcacttctatttaaattggcctctctggggacccataggagttcctgcaaggtgagaacaagcattcttttagttgcaattgccaaaactagaattcatagaaactttgaggtgtgtgtatgtgtgtgcattatatattttttgttttcttgggactttggcatgagcctgaaactgaaaaaattaaatagacttggttaagtaaaattacgtcttytaagccagtggttctcaaagtgtaaatcactggaccagcagcatcaaccatcacccaggaacttgatagaaatgcagattattgggcccacttcagaccaactgatcagcaactctgggggtgggggaggcctggcagtctgtgatttaacaaga

SEQ ID NO: 368630 - DNA, 632 bp, Homo sapiens
  misc_feature (1)...(632): n = A,T,C or G
tttacatctcacactaactttgtgagagaagtggcattatccacatttatagatgtagaataaagaacrttaagcaatatgtccagggtcagagagccatgaagtgtcagaactaggatattccacgagactgacactgtgcagggctcttctttgccagtaggctaacctgctttctcttacaatgaagtggagttccctaaaggggtagataacaaaaggttgacatatgtctttctcatacccaagcctgcactgaggcatgactcccaagaaaaccacgaattaacaagacccaaactcaagtaacccagaagtaaacaagttttaaacctagcaataatgtcactcatgtggctaaagtctaccataaatggcgtggcttatatcttcaaggatcctagatttacaattcaggtaacagcccacaggaattggaatgagtttttttttttttttctgatagtataaacagtgtactttataatgttccccccttttggctttggttattgggaaaaataactagcaagttctctgtggccctgtaatttcaatttgcttttccttcaactggctttctaatcttaatattgttttnnnnnnnnnnnnnnnnnnnnnnnnnnnnnnnn

SEQ ID NO: 368631 - DNA, 632 bp, Homo sapiens
  misc_feature (1)...(632): n = A,T,C or G
tttacatctcacactaactttgtgagagaagtggcattatccacatttatagatgtagaataaagaacattaagcaatatgtccagggtcagagagccatgaagtgtcagaactaggatattccacragactgacactgtgcagggctcttctttgccagtaggctaacctgctttctcttacaatgaagtggagttccctaaaggggtagataacaaaaggttgacatatgtctttctcatacccaagcctgcactgaggcatgactcccaagaaaaccacgaattaacaagacccaaactcaagtaacccagaagtaaacaagttttaaacctagcaataatgtcactcatgtggctaaagtctaccataaatggcgtggcttatatcttcaaggatcctagatttacaattcaggtaacagcccacaggaattggaatgagtttttttttttttttctgatagtataaacagtgtactttataatgttccccccttttggctttggttattgggaaaaataactagcaagttctctgtggccctgtaatttcaatttgcttttccttcaactggctttctaatcttaatattgttttnnnnnnnnnnnnnnnnnnnnnnnnnnnnnnnn

SEQ ID NO: 368632 - DNA, 459 bp, Homo sapiens
catttaaaaggatgttttggagttattttgtatttttatctagaatctttaratattgatagctcacgcttttttcaagttatctagaatgcaatattactagaaccagatttcttacataagatcctatttttatgaaaataattctttgtatttgtctaacctatctgacatatgtacagaaaatacttgacataatgttgtcctaatgttaatgatagtggtttatgggagcagaaagtaaaaaaaaaaaaaaaaaaaaaaaaaggatttttaaaaacttttttgtacttttacatattgtttaaatcctttagagtgatcatgtatttttttgtgaaaataacttttttcttttaaaagttaaactaagtgtgtggaaaaattgttttgatttgtgatgaagaattttttatcactttcccttacatctgtaaacatgatccatatttacctatg

SEQ ID NO: 368633 - DNA, 459 bp, Homo sapiens
catttaaaaggatgttttggagttattttgtatttttatctagaatctttagatattgatagctcacgcttttttcaagttatctagaatgcaatattactagaaccaratttcttacataagatcctatttttatgaaaataattctttgtatttgtctaacctatctgacatatgtacagaaaatacttgacataatgttgtcctaatgttaatgatagtggtttatgggagcagaaagtaaaaaaaaaaaaaaaaaaaaaaaaaggatttttaaaaacttttttgtacttttacatattgtttaaatcctttagagtgatcatgtatttttttgtgaaaataacttttttcttttaaaagttaaactaagtgtgtggaaaaattgttttgatttgtgatgaagaattttttatcactttcccttacatctgtaaacatgatccatatttacctatg

SEQ ID NO: 368634 - DNA, 467 bp, Homo sapiens
acagtgtcccggccctcagcctcagctcaccgtgttctcaggccaggctttcccatccccgggcactcagagcaactgaggacagaaatggaagaggctgctggtgcctgagaccygtgcgggttgggaggggccgccagcgcctcgcagggtctgtggagcccctggggtacacactgagccatcaccaaccagaggctgcatgccagaggagctggtgcccctgcgatgcctcatccgccggggcacctccatctgaaacagaccctctctatggccctgcggaggcatatcactcactctcaaggatccagtgcttggctgtcacctgcacctcccagcaccatcgcggcagccccgcaggtgtcctccctgggaccccatgcgcgcacaccctcgtgttgtctgtgtgttgtcattactgcaccccgcacctcccagcaccatcgtggcagcaccccgcaggt

SEQ ID NO: 368635 - DNA, 467 bp, Homo sapiens
acagtgtcccggccctcagcctcagctcaccgtgttctcaggccaggctttcccatccccgggcactcagagcaactgaggacagaaatggaagaggctgctggtgcctgagacccgtgcgggttgggaggggccgccagcgcctcgcagggtctgtgragcccctggggtacacactgagccatcaccaaccagaggctgcatgccagaggagctggtgcccctgcgatgcctcatccgccggggcacctccatctgaaacagaccctctctatggccctgcggaggcatatcactcactctcaaggatccagtgcttggctgtcacctgcacctcccagcaccatcgcggcagccccgcaggtgtcctccctgggaccccatgcgcgcacaccctcgtgttgtctgtgtgttgtcattactgcaccccgcacctcccagcaccatcgtggcagcaccccgcaggt

SEQ ID NO: 368636 - DNA, 590 bp, Homo sapiens
attcttgcaaaatatagtaattacgaaaattaattttttatcacaaacccttgtagcagagcacatctcctcatatatacaagtatcgtacccagggtggatgcgttccttctcctactttcaggaatgtcctactctgtctatggagtagctgtcgtttcaccactgtactttcttaataaacttgcttttgctttgcacactggactctccctgaattatttcttgcatgacatctaagaactctctcttggggtctggactgggaccccttttctgtaacatatttctggagaccacagaagagacgatactgaagaaacccctccaacccaaaggaaatagactgcagcaatgattggacgactttggataagtgcgggggtacctgggtaaagaataggatggggttaggggaggtagagtctctccaaagacagaatgggttagacgcctctcttaataaaaaaaggcaaggacgcttgactgacctyggattagaggcccaacttaggagggttagagtcccttctaagatttagggggttacaggctcctctcagtaaagtccttcttggctgaaaatgggt

SEQ ID NO: 368637 - DNA, 487 bp, Homo sapiens
ttgcttttgctttgcactgcggacttgccctgaattctttctcacgcaagatccaagaactctttcttggggtctggattgggacccctttcttttaagagttacaacaattataaattgttacaagcctctacttctcccacaaaagtgaggtgttgggtcagaatctcaatatgctcctgtttgtgtgtattataaatgagtatcatgtgctatgtgtatcattatataaaacaaattggaaataagtggcataacatgacaaaatgacattaaaawcttaacacaaggaaataattatgatctgtattaaggaccaaaacagtaactataatatgactgtcacttgaagaatgaggtttatacatttggaaaaaagaactttatttctcaataagggtttgagcctacagggtggccattctgacaggctgggtggtgtagcctctggccagaagccagaaagagacacctcaagggtaagaag

SEQ ID NO: 368638 - DNA, 559 bp, Homo sapiens
tgtctcagaaatctttcttttagttgctttgaattattttatttggaggaagccagaccattaaagatcctggaccatattattgtggccacttttacatttgttgttggtgaggcagttcaggttcttgagtttgttgtgcaaacaatttgagagtgagtccaagtaagagtaggacaagaagtttattgcaaagcaaaagtacacctggaaaggcagaccaggctgctcaaagggtgaaacagcccctagtgccttaagggaaattccctttatgtgaactgtacatacatattcataaaatactggtgaggtcaagcatgcaaaggtggacctgaagctgattcatgcactcagaatctacaagctctaacatgcatcacatgcatcattagcatctaaaatctctacctaggggtgtgttttttctattaaaatgaagaaaaggtcactataagctaaatcttgagcytagctgcacagatgagacccagaaatgtccctagcctccccaaggctggaatttgtagctaatagcttcttgggattttggtgctga

SEQ ID NO: 368639 - DNA, 632 bp, Homo sapiens
gttttccttttctctcttctgagttttgcatctcttaggcctaggtgtgactacaaaaccagagactggcttttacaagcacactggagttcttacctgcaaacaggagcccatctttcaaagatctttccataggaacctctcatataattgcttaaacatgaaaactttcttagggaattgcattcatggccagtttttaaactayaaaaggaaacttagactcattttattatttatttattatttttgtttgtttgtttgtttttttgagacagagtttcgctcttgttgcccaggctggagtgcaatggtgtgatctcggctcactgcaacctccgcctcccaggttcaagagattctcctgccttagcctcccgagtagctaggatgacaggcatgcaccaccacgcctggctaattttgtatttttagtagagatggggtttctccatgctggtcaggctggtctcgaactcctgatctcaggtgatccacctgcctcagcctcccaaagtggtgggattacaggcatgagccaccacacccagcccaatttatctttttatttccacaagagatactcaccagtttggtgagcaagcagtgaaaagtaagccaggctggtatgt

SEQ ID NO: 368640 - DNA, 632 bp, Homo sapiens
gttttccttttctctcttctgagttttgcatctcttaggcctaggtgtgactacaaaaccagagactggcttttacaagcacactggagttcttacctgcaaacaggagcccatctttcaaagatctttccataggaacctctcatataattgcttaaacatgaaaactttcttagggaattgcattcatggccagtttttaaactacaaaaggaaacttagactcattttattatttatttattatttttgtttgtttgtttgtttttttgagacagagtttcgctcttgttgcccaggctggagtgcaatggtgtgatctcggctcactgcaacctccgcctcccaggttcaagagattctcctgcctyagcctcccgagtagctaggatgacaggcatgcaccaccacgcctggctaattttgtatttttagtagagatggggtttctccatgctggtcaggctggtctcgaactcctgatctcaggtgatccacctgcctcagcctcccaaagtggtgggattacaggcatgagccaccacacccagcccaatttatctttttatttccacaagagatactcaccagtttggtgagcaagcagtgaaaagtaagccaggctggtatgt

SEQ ID NO: 368641 - DNA, 582 bp, Homo sapiens
gaagtggggagcagccacactctgcctctaataaaatggggagaggaagtaattaacagatcctggggatgaaataaataagcccctcagacactgtaacttcagctatttggcagatcttatccagaagtttttctgctctctcatcagggtggcttctttgaggatttcccacgattatgtctgaaatgcattcccctcaatattccaattccagagcagtctgacttgacaacaacaaacaaatcagaccagacaagcagtattgatccagcaggcgtgaattcggagccaccacgttgctttctttgtgattacaatacgataatggaatacccacggtgtcgccagccctgagcagcaacaaggcacaaatcctgcctcgtgtcatctgaacatcacaaacttgcaacaaaaagaaacgatggctcagtcctgtgctgaccctgcaaatgcaatwcgagtctccttccctcttctccttccagagattataggcacagatctggccatgggggtgaaaagtgcttctcctcttctgaagagattcaacaataaataaatatcacaagtaaaagctac

SEQ ID NO: 368642 - DNA, 526 bp, Homo sapiens
tgaaacttttatttattagtcaggttaaaaggaagagttaaattcttagkttaaaaggaagagttttaaaagttacctgcttattgcttattctgagtatgtaaatacaaagactgctttcccgtcaaattttgatttgctagaatctgtcatttgacagtaaagggaaatgctgtagaaaaaaatgaacaatatctttttcacacctgcaaaattgactaacagcagacctcatttgattcaaataaatgaaaaatcatttgactttggaaatagatgaaatccggagagttgcagacataagctacaacttgtaaagatgggaaacggatgaaaactggcaaataaaagggggtttccaataaaaacatctgtaagtgtacctgtgacatcgagcgtgctgtggatcaaatttggcagtactgcagcttaacttttctcattcttcataaagtaaaagccctggttaaatgatggcttatttgtcaagcttcaggcaaacagctcataaaaatcaaccagctag

SEQ ID NO: 368643 - DNA, 613 bp, Homo sapiens
tggcacaatcatagctcactacagctgacaacttctgggctcaatggatccctctgcctcagcctcctgagtcgctgggactataggaggtaccacctatataggcaccaccatacctggctaattttttttttattttttagagacagaatctcactatgttgcccaggctggtctcaaaccctrgcctcaagtgattctcctatcttggcctcccaggtcattgggattgcaggtgtgaaccaccatgctgagcagacattttaaagaaactttaattagtcctgaataaactaggcagaagcctcagtatttgggtaaagtctgacatttgattcatattaggccgtcagaaggaaactggacacgtacctgtatcagtgtcatcgctggatcactaaacttgtgagtgttcagcactcacatggtccagagactgccatcatatccaatcagcataaaaattccaataatgtggacaaagtatgttacttggatttattgtcaatatctgaatattgattgtcaaaatcatgtaagtattacagatatggcttggagtgaaaatctcctaatgttttatgtattaaaattattttaaccagttgaggtc

SEQ ID NO: 368644 - DNA, 531 bp, Homo sapiens
tttggtagcgtgcttatgagtcactgtgttgtgtcctgcactgtgtacagggcacggagattattgccaccaccgatgactgtgcagcttgaggtatcgatacactggactgttcagaggaaaaaatagctacttgttcttctatcaagtagggcaggcaggaggacacaggcaggactgcatcctaaaaatagccccacacccgcttggagagctccagcagctcagccyggggtgcatggggcagctcctggtagaagctacttttacttcaccatgagactttgagaatctgaacttgcaggaagagggttgtagtgtatttttgtatacttttctgatttcccttaagcgatgggggagattgggttttctctgtaaggacagtgtaggttcatggctgtttcttagtggaatgtgcccatgtggacactaagctgaagtctgaatgaaggcctgacacccacaacctggtcagtgtctcccttctcatcgtcaggaagagactcgtccacacccaggtttagaagg

SEQ ID NO: 368645 - DNA, 575 bp, Homo sapiens
caatgcagtgtagtaaacactggatatatatcagcccaatgaatgcacagacatacagaggtgaacaagagacatgtgttccctgcccactgagcttgaatacaagggtcatgtcacagacttctttgaatcattcacctctggcagtttattttgcactacaggtcctctgtcctctgtctctagttggtcgtcctgtgggcaaaagaaagtctcactcaacaatgctctaattttgatctatatagttactgtaaatcaaaattaggcttctaaaatgtatgtacaattgttggcattaaagtgagtcagcagcaatagcagttttattattgtcgttctaagggaaacttaagctataatgagttcatctaacctagagagtaaaattctggtacaagtatggaccttgggaytacaaacaggaaaattctgtaatggatgaaattgttcactgggaaaccaggccagtctttgagaggtaattggtacctttccgtatctgctcacaagattctggccttagaattgctaaggactcacttgttaaacaattgtgtttcctaaagtggaat

SEQ ID NO: 368646 - DNA, 597 bp, Homo sapiens
tgttatcacaaaggacagtgagcatcacaaataacagtcttcagctgtgaatagtcatgtttcaacgacctctgaaaaagctttcctccacaaccactgatctttctctcccacagaaaacccttcacaagtatgtgcatagcttttgtgaaatgtttaccttctagcaaagctgtgaattacgtcccatagctatagctkgtctcagctggcccctatcccgaggcgagtgacacatggtgaagagaatgaaactgtaggtgctagaaaaagtagcttccagaagaaaacaaaattgtccacataatatccagagggttcttttatggataaaatattgtaattcttcagcgtggtagatgctggtactttaaggagacaattctcaactcaatattaaaaaatattctctttctcaaatccatccacagttggaattacctgtctctactcatagtgagcttctttttactttcagaggacatttgagctgtgggcaaaggacgttgaaccacttggctacactctctaagacaaattagatctcagagattttgaaaagaaaagtagtccaatctgactgattaaaggcataag

SEQ ID NO: 368647 - DNA, 584 bp, Homo sapiens
ttggaattacctgtctctactcatagtgagcttctttttactttcagaggacatttgagctktgggcaaaggacgttgaaccacttggctacactctctaagacaaattagatctcagagattttgaaaagaaaagtagtccaatctgactgattaaaggcataaggatctctatgctctgaatggattccacccaaataaactaaggaagaagtcataacttcatttcagaatgaaatgtaattagctagctgtaattattgccttaggaaagacctagtaaatgagggacagagtggtgtggtggaaaagaacataacttttgagtctggacaactttgattcaaatcctggttctgtcatttattagctgtgtcatcttagacaatttacatgacctctctgagtctcagttgtttcctctaaatatagataagaatgcctcattatagagtattgtaagaagtctatgagatattatacatatagtgactaccgcactacagggcttacaataggcactaaacaaattaaacctatcatcactaatactttaggtgcaaaccacagtgatcccagctttt

SEQ ID NO: 368648 - DNA, 604 bp, Homo sapiens
tgacaaattaacacctattgcataaacaaagagaaaactaattaaaagtttatattttaattgtgtcccccactttttaactttttgctatttctatttatatcttattacactatctgtatcttgaaaagttgttgtagtttatttttgattggttcatctttagtctttctacttaagatgtgagtagtttacacatcaaaattatggtgtcaaaatatagtgtgtttttctgtatacttactattaccagtgagttttgcaccttcagatgattttttttgctcacttacaaacttttctttcagactgaagaactcccttacatttcttggaggacatgtctgatgttartaaaaccccttagttttatttgtctgggaaaaatctttatttctccttcatgcttgaaggagaatttcactggatctactattttaggatacaagtttttctccttcagcacgttaaatatgtcatgccactttctcctgatctgttaggtttccactgagaagactgctaccagatatattgaagctccattgtacgttattcatttcttttctcttgccacttttaggatcctttctttatctttgac

SEQ ID NO: 368649 - DNA, 533 bp, Homo sapiens
gttttttttgatacattttaagattttctttttaccattatctttcagcactttgattataatatactcagtcaaggttttctatttacatggtttagggtttactaaatgtcttgaatctggagggtaatttttaaaacaaattttgaattttgaattttgttttttgcttctttttctctccctaccttttcttctctcctactttttctcctcctccgtctccttttcttcttcctctggattttcacaaatagttgaattttctgaggtaccagggctctgcttgttcttctcaatcattttcttttcattgtcttcagattggttaatttatattcacatgttttcaaattcattgaccctttattgtagtgtctaatctgctgttcagccyatctagtgaatttattcagggaaagtattttttattatagaattctcattagtcctatgttatagttttcttttctctcctgagatttcccaactcagcattgtgaatatattatttctacatttttctttaagtt

SEQ ID NO: 368650 - DNA, 540 bp, Homo sapiens
cacttactagtaaatcattgccagccctcctgatgtcgaaatggccagaaatactgaaactgcccactgtgctgactcagtgtggggcatggcacaaaagtgcatggcaagagattgaattgtgttgtgaacataccccatggggaggtgaagtgtacaggaattaatcgtgggaaattctcccacgtttcttagctcatatgtgaaatatttgagaaatcaaggaaactgagtttgttttaaaatcaaatttgatactagtctaaatatttacatgacrttagcaataatgagtggtaaagctgaatttaacaattcttaactttcacaattaaaaataagttagtcacattggaggtgagactgatcatctgttttacagaaaatattgttaacatttatgttacaggatgaaaacatttacagacaaaaattataaagaaaaggtattaaagctgtgtctgaattttgtgatgttaatttttcaaatgcgcaatttggtctaaattctttttcttatatttagtaaatatttgcttg

SEQ ID NO: 368651 - DNA, 540 bp, Homo sapiens
cacttactagtaaatcattgccagccctcctgatgtcgaaatggccagaaatactgaaactgcccactgtgctgactcagtgtggggcatggcacaaaagtgcatggcaagagattgaattgtgttgtgaacataccccatggggaggtgaagtgtacaggaattaatcgtgggaaattctcccacgtttcttagctcatatgtgaaatatttgagaaatcaaggaaactgagtttgttttaaaatcaaatttgatactagtctaaatatttacatgacgttagcaataatgagtggtaaagctgaatttaacaattcttaactttcacaattaaaaataagttagtcacattggaggtgagactgatcatctrttttacagaaaatattgttaacatttatgttacaggatgaaaacatttacagacaaaaattataaagaaaaggtattaaagctgtgtctgaattttgtgatgttaatttttcaaatgcgcaatttggtctaaattctttttcttatatttagtaaatatttgcttg

SEQ ID NO: 368652 - DNA, 641 bp, Homo sapiens
cagacaactcattctcaagatacatttaagagagtaaaaactgaattgcgcatatatattcctgaacaaggagtggaggtatttgttggggtaggcacttcctgtatctccatgaaaatatcccctggaggrtaggtaagctcaggacacacaagcactgtttccatgttgctgtaaaccacatgttattattatcattattattgagacgaagtctctctctgtcacccaggttcgagtgcagtggcatgatcttggctcactgcaaccactgcctccggggttcaatgcctctgggattcaagtgattttcctgcctcagcctcccgagtagctgggactacaggtgtgtgccaccacacccagctagtttttgtatttttcaatagagacagttttctccatgttgcccaggctggtgttgaactcctgacctcaggtggtccgatcatctcggcctccccaaatgctcagattacaggtgtgagccactgcacctggccccacatgttattcttctaagagcctcaagctcagtattccttcattcattatttcttttatctattcactcattcattgaggtaacgtgcttttactgagggccgtttcctgggcattctcataggcagtagagagaa

SEQ ID NO: 368653 - DNA, 641 bp, Homo sapiens
cagacaactcattctcaagatacatttaagagagtaaaaactgaattgcgcatatatattcctgaacaaggagtggaggtatttgttggggtaggcacttcctgtatctccatgaaaatatcccctggagggtaggtaagctcaggacacacaagcactgtttccatgttgctgtaaaccacatgttattattatcattattattgagacgaagtctctctctgtcacccaggttcgagtgcagtggcatgatcttggctcwctgcaaccactgcctccggggttcaatgcctctgggattcaagtgattttcctgcctcagcctcccgagtagctgggactacaggtgtgtgccaccacacccagctagtttttgtatttttcaatagagacagttttctccatgttgcccaggctggtgttgaactcctgacctcaggtggtccgatcatctcggcctccccaaatgctcagattacaggtgtgagccactgcacctggccccacatgttattcttctaagagcctcaagctcagtattccttcattcattatttcttttatctattcactcattcattgaggtaacgtgcttttactgagggccgtttcctgggcattctcataggcagtagagagaa

SEQ ID NO: 368654 - DNA, 641 bp, Homo sapiens
cagacaactcattctcaagatacatttaagagagtaaaaactgaattgcgcatatatattcctgaacaaggagtggaggtatttgttggggtaggcacttcctgtatctccatgaaaatatcccctggagggtaggtaagctcaggacacacaagcactgtttccatgttgctgtaaaccacatgttattattatcattattattgagacgaagtctctctctgtcacccaggttcgagtgcagtggcatgatcttggctcactgcaaccactgcctccggggttcaatgcctctgggattcaagtgattttcctgcctcagcctcccgagtagctgggactacaggtgtgtgccaccacacccagctagtttttgtatttttcaatagagacagttttctccatgttgcccaggctggtgttgaactcctgacctcaggtggtcsgatcatctcggcctccccaaatgctcagattacaggtgtgagccactgcacctggccccacatgttattcttctaagagcctcaagctcagtattccttcattcattatttcttttatctattcactcattcattgaggtaacgtgcttttactgagggccgtttcctgggcattctcataggcagtagagagaa

SEQ ID NO: 368655 - DNA, 641 bp, Homo sapiens
cagacaactcattctcaagatacatttaagagagtaaaaactgaattgcgcatatatattcctgaacaaggagtggaggtatttgttggggtaggcacttcctgtatctccatgaaaatatcccctggagggtaggtaagctcaggacacacaagcactgtttccatgttgctgtaaaccacatgttattattatcattattattgagacgaagtctctctctgtcacccaggttcgagtgcagtggcatgatcttggctcactgcaaccactgcctccggggttcaatgcctctgggattcaagtgattttcctgcctcagcctcccgagtagctgggactacaggtgtgtgccaccacacccagctagtttttgtatttttcaatagagacagttttctccatgttgcccaggctggtgttgaactcctgacctcaggtggtccgaycatctcggcctccccaaatgctcagattacaggtgtgagccactgcacctggccccacatgttattcttctaagagcctcaagctcagtattccttcattcattatttcttttatctattcactcattcattgaggtaacgtgcttttactgagggccgtttcctgggcattctcataggcagtagagagaa

SEQ ID NO: 368656 - DNA, 340 bp, Homo sapiens
aactgcaaataaatgctccttttcttctctcaacttataaacaaagagttgtgtgcattgggaagaatatcagggaagtagtttatggtgaaaggataggctcaatgctcccatctggctcatgggccagcaatccatttgcccgactctgtgttaagcacagcagaagagagaagggaacccagactttttctgaagcctargatacttgcaccatgccaattaaccttccaaattgccacccctcccttctttctttccctctccatctgagattagaaagttagagaaatatgtctcttgcttcagagattgccattttccaatttagcaaaaaaaa

SEQ ID NO: 368657 - DNA, 655 bp, Homo sapiens
caaccctctcttatgttggtagattattcagaggatcaggacaggaggcaagccaaagtcatattaaaatttaacattataaattatataacaaaaatttttgacctcattaacctgtgactaaaaagtaaattcacttttatttctcaagtcctgacagctgggctcattgagtagactgccgatttttcattttcttgctgtttttctgtcaccaagtaatttctaagaaacactgtaagtatttatacattccacaaatttatcctggtgtttatttgacatatccaccaactttcctcgaaaactcagaaccgctgaggcgcaagaactttgccactctcctctttcagtcttaagaaaaaacagactgtgggtctttggaataatttgctgaattcctacagaaaacaaaagtgtattacagtgcagaaaatggaaatgttaagctagatattagctatcactgcttctacagcccttaggccatgtgcttccstagaagagcctcttcgtcttctctctttaacttctagcctagatatgcataatggatattctttgtttcctctagcaattaggcgctactcccaattccatagagaaaattcctgctcccattccaacgttagttgcttttcttactgccacatga

SEQ ID NO: 368658 - DNA, 655 bp, Homo sapiens
caaccctctcttatgttggtagattattcagaggatcaggacaggaggcaagccaaagtcatattaaaatttaacattataaattatataacaaaaatttttgacctcattaacctgtgactaaaaagtaaattcacttttatttctcaagtcctgacagctgggctcattgagtagactgccgatttttcattttcttgctgtttttctgtcaccaagtaatttctaagaaacactgtaagtatttatacattccacaaatttatcctggtgtttatttgacatatccaccaactttcctcgaaaactcagaaccgctgaggcgcaagaactttgccactctcctctttcagtcttaagaaaaaacagactgtgggtctttggaataatttgctgaattcctacagaaaacaaaagtgtattacagtgcagaaaatggaaatgttaagctagatattagctatcactgcttctacagcccttaggccatgtgcttccctagaagagcctcttsgtcttctctctttaacttctagcctagatatgcataatggatattctttgtttcctctagcaattaggcgctactcccaattccatagagaaaattcctgctcccattccaacgttagttgcttttcttactgccacatga

SEQ ID NO: 368659 - DNA, 621 bp, Homo sapiens
taagtacttcaaactcaagggaagttgtgccaaacataaagtacaggatgtagatctgcatttgtgtctggaacaggtacttgcttattcttgtttatttttcaaagaacataatgttttcagcatacttatacactccaaaatgtatatctaaattgtcagatacatgtaaacaccagccacacattttatctctgcagccagaacatccccactcttaagtccaaaacctccatcataaacaagcctccactggaatcagaaatcacaagaaaaatcacaggtgaggtaaggtaaaacataactcttttgctggaaatcttcacagttaaatcttttattcaggaggcctgagtagcaaagacaacaatatctattaataccactaccacaacaagaacaacagctacttcttctaagcattttctaggggctagatcctgtgccaagccccttacatgaattttttttattattatactttaaggtctagggtacatgtacacaacgtgcaggtttgttacatatgtatacatgtgccacgttggtgtgctgcacccattaactcatcatttacattasgtatatctcctaatgctatcccttccccagccccccaac

SEQ ID NO: 368660 - DNA, 574 bp, Homo sapiens
agtaaattttgtttcataaaacttgtttcaggggtgtgtgcatgtaccctgggttgtgatataacatgtatgccttaatgggatcataatcaaaaaggttttaaaaccttgatcattgctggtataaaattcttgtgtaggaaccctcaggcctttcccctaattgctttaagtacccagcaagttgagcagggagctgtgagaacacaaaggagagagagccctcaattctgggtttattttggaaaagttaacagttgttggtagattcgagctgaactttgagaaaaagatggaatttgactaatagcaactggagggagctggagtaaaggccagattacggggagagagaagcaacacggagctgtggacagagcaatgagtttgaagatctggctgctagtcatccctcagcccctcagctatggaactstagttccaggcctgccctgagccactattttctaatctgtaagatgagtataatcatatttgccccacaaagtaactgtaaatttcaaatggaaaaaggtgaatgaaaccactttgaacactagaaaataccaaacaa

SEQ ID NO: 368661 - DNA, 574 bp, Homo sapiens
agtaaattttgtttcataaaacttgtttcaggggtgtgtgcatgtaccctgggttgtgatataacatgtatgccttaatgggatcataatcaaaaaggttttaaaaccttgatcattgctggtataaaattcttgtgtaggaaccctcaggcctttcccctaattgctttaagtacccagcaagttgagcagggagctgtgagaacacaaaggagagagagccctcaattctgggtttattttggaaaagttaacagttgttggtagattcgagctgaactttgagaaaaagatggaatttgactaatagcaactggagggagctggagtaaaggccagattacggggagagagaagcaacacggagctgtggacagagcaatgagtttgaagatctggctgctagtcatccctcagcccctcagctatggaactgtagttccagrcctgccctgagccactattttctaatctgtaagatgagtataatcatatttgccccacaaagtaactgtaaatttcaaatggaaaaaggtgaatgaaaccactttgaacactagaaaataccaaacaa

SEQ ID NO: 368662 - DNA, 574 bp, Homo sapiens
tagttggaatgtttttgaaaacatccttagaactggagttgggctatcacattctctaacagtagtaactagatggtctcagtaaggtagacagaggctggagtcgtcaaggcccctgagagctttcaaaatggatccacatgggctccctcctaggacagggccctatactgaggagaaactgcctggaggaattagaattgagcaggatagggtcagtagagacaagggaaagacagactaggtctagatcagctggggagggaaacagcaggaaagctcatcatgcaaacygccatatttcacactgtgaaaaaacaaccgaagagagaactctgaagcttagaaagttttctaaatcctgcctcattctcttaggaaaatgaatttcacgtaaaagtgaataatagaaacgaatagaggtcagttcctataacagagctattataagaaaaatgagggtgtggaatagaataatgttcctacaaacaatgaaaacatgccggaaagacatgctcataaaacaaatcaaaattataacatattacatcaaacaagttaagagactaagaaa

SEQ ID NO: 368663 - DNA, 615 bp, Homo sapiens
tgaatccagatctttctgactccagaagcaccagcttttaagctctaagtaattctgcctccactgggagccttagttcatacacaccctatgaacatgtacagataaagcaaatatcaatacacattgcatagcttactgaggatacacaatcccagtagaataacaggtctattccacaagaaatgacataaaatcaaaatgtaattatgcctctccaaaatataaataacaactaaaatctacatcaatatctagtgtatgccattcttaccagacatgctttaactatggaaatagtcattccctgttgccagcacatgaactattttttgttctgtgtakctgccacctgaaacctccaatgtgtagtattttctgacatattttcttataaccactaacacttacatttttttgctgaatattcctaatacatttagcctcctacagaaatttctgaggcaagcaaaataatctctcccaaccacttactactacacacaaaccaaagagtttaaaaagaataacagtgaccacacaaatcaaaaaggacacatcccaacatggaattttctttcacttagaatataaagccaaactaaaaacctaaag

SEQ ID NO: 368664 - DNA, 611 bp, Homo sapiens
  misc_feature (1)...(611): n = A,T,C or G
tgccagaaccttttgttttctctcaggggttcaaataagcacaaaacagagtaccatcataatttttctgttgctccctctctagagggtgttaagtattaggggatcacctaaaagaaaactatccactgcctgctattctgtcacttcccaacctctggtctattgccttatttaaggagaaaaagatatcaaatggcccatttctaaaagtttcscagaaaaacagaggttaataaaagagccagaaaatcccaatgtatcaaacattctgctgcttagagtatctagttaaataaaagttgagattcaacatgcttgactcaccagttcccatttatagctgtgaaacatgaggctcagagttggcattattaataatagtattattactaaaatgttgtaactaaactcaaatcttggtcttcagnttctggcacctatgcttgttctaacatgcacaccacatcccctctggaataaagatcctcgaaagagaagaaatattgctaatgataagaaaaataccatcacagntccagattcaacttgtgatgactgctcacatctattgtccttgaggtgtgagctgatctctgcttcagaagaat

SEQ ID NO: 368665 - DNA, 611 bp, Homo sapiens
  misc_feature (1)...(611): n = A,T,C or G
tgccagaaccttttgttttctctcaggggttcaaataagcacaaaacagagtaccatcataatttttctgttgctccctctctagagggtgttaagtattaggggatcacctaaaagaaaactatccactgcctgctattctgtcacttcccaacctctggtctattgccttatttaaggagaaaaagatatcaaatggcccatttctaaaagtttcgcagaaaaacagaggwtaataaaagagccagaaaatcccaatgtatcaaacattctgctgcttagagtatctagttaaataaaagttgagattcaacatgcttgactcaccagttcccatttatagctgtgaaacatgaggctcagagttggcattattaataatagtattattactaaaatgttgtaactaaactcaaatcttggtcttcagnttctggcacctatgcttgttctaacatgcacaccacatcccctctggaataaagatcctcgaaagagaagaaatattgctaatgataagaaaaataccatcacagntccagattcaacttgtgatgactgctcacatctattgtccttgaggtgtgagctgatctctgcttcagaagaat

SEQ ID NO: 368666 - DNA, 550 bp, Homo sapiens
tatgattaggtttaatgtttggcaaattttattaaaacagcagcacaattttttgttagcctagtaaagtaggaagagcactgcaatgggattcaaagaccaggagctgctctagccctgccaccagttgtcctttgacagttctgtgcccaagactttctcatctgtaaattgggagtgggagaaagtgtcccttctccctgtgtaattccacatgtctttgaaaaactccaaggaaagttttcttctagaagctaaagcaggtataatgtttaagactaatctcttgacaattgctttattgaaaattgcaattaawgtgatttgtccatttttggataggaacaaaaatggaatggtattcatctacatattatttgggcctctgtactttttatgttgtaaatgaaggagataatttattcttaccacatactgctcaccacaattttgccgtgtatgtagaaattcaaggccttgtcatcaaatgttggctatcacatacttaaaatattccactatttgtgaacttaaagagatttacaaatga

SEQ ID NO: 368667 - DNA, 550 bp, Homo sapiens
tatgattaggtttaatgtttggcaaattttattaaaacagcagcacaattttttgttagcctagtaaagtaggaagagcactgcaatgggattcaaagaccaggagctgctctagccctgccaccagttgtcctttgacagttctgtgcccaagactttctcatctgtaaattgggagtgggagaaagtgtcccttctccctgtgtaattccacatgtctttgaaaaactccaaggaaagttttcttctagaagctaaagcaggtataatgtttaagactaatctcttgacaattgctttattgaaaattgcaattaaagtgatttgtccatttttggataggaacaaaaatggaatggtattcatctacatattatttgggcctctktactttttatgttgtaaatgaaggagataatttattcttaccacatactgctcaccacaattttgccgtgtatgtagaaattcaaggccttgtcatcaaatgttggctatcacatacttaaaatattccactatttgtgaacttaaagagatttacaaatga

SEQ ID NO: 368668 - DNA, 569 bp, Homo sapiens
tttgtccacttttgatttcagtctcccctaaaagctatttatgaaatgactcaaactcaaaaaccttgtatataaggaattttacctgtgtatttcttcttaacattaagatcaatctaatgattgtgaaattcactagttgaggacagtatgaatatattcaggcatggcttcmtgcatttaatgctactctgaaaggtgttggatcaattaagtatttttatattgaagtctgtattccctctgatctctattatagagaagtgtgttttcctaggaaaataaatggatctaaggcggggaacttgctcataacatttctcctaggatcttcatatattttagtgtaaaatattcatttactggatattctatataaacacataaacatatgtatatatgtatacatgtaattctttcatagaacctcttcaagatgctacaggacttgtttatgctagaaagtttactagaaagtctattttgtgcatgtctgtattcccaaaatttagaaatagcatctggtacatagaagttgctcagtaaacgtgatgaattcgtattacagg

SEQ ID NO: 368669 - DNA, 569 bp, Homo sapiens
tttgtccacttttgatttcagtctcccctaaaagctatttatgaaatgactcaaactcaaaaaccttgtatataaggaattttacctgtgtatttcttcttaacattaagatcaatctaatgattgtgaaattcactagttgaggacagtatgaatatattcaggcatggcttcctgcatttaatgctactctgaaaggtgttggatcaattaagtatttttatattgaagtctgtattccctctgatctctattatagagaagtgtgttttcctaggaaaataaatggatctaaggcggggaacttgctcataacatttctcctaggatcttcatatattttagtgtaaaatattcatttactggatattctatataaacacataaacatatgtatatatgtatacatgtaattctttcatagaacctcttcaagatgctacaggacttgtttaygctagaaagtttactagaaagtctattttgtgcatgtctgtattcccaaaatttagaaatagcatctggtacatagaagttgctcagtaaacgtgatgaattcgtattacagg

SEQ ID NO: 368670 - DNA, 499 bp, Homo sapiens
acgtttcatcccttggtctaaatttacattgtaygactatgacctgggatgactctcttgccctcccttgtaactcaatacagttatgaatggatgattatttttataaaatcctactctggagttcccaaattgacaggcattggaggctcccaaaccgaccccatctcaggtatatattctcaagaccaaaagtttatgaaagctaagcccccttaagcccccactactccaaaggaactgcaaaacagcacatgaacagtgaaaaagatcctaaagaaattcacctcccgatcacaccaaattaatgctatcctgagatacatccagcgaaaggaattcatcatattccatataagtgccaaaagacatttggacagactttcagcctaaaggatagtgagagggatagtcttaaaaattttaaagatttctttagaactttcttagaattaagtgtcctattcagcttaattgttctgctaccagcaaaagtgat

SEQ ID NO: 368671 - DNA, 499 bp, Homo sapiens
acgtttcatcccttggtctaaatttacattgtacgactatgacctgggatgactctcttgccctcccttgtaactcaatacagttatgaatggatgattatttttataaaatcctactctggagttcccaaattgacaggcattggaggctcccaaaccgaccccatctcaggtatatattctcaagaccaaaagtttatgaaagctaagcccccttaagcccccactactccaaaggaactgcaaaacagcacatgaacagtgaaaaagatcctaaagaaattcacctcccgatcacaccaaattaatgctatcctgagatacatccagcgaaaggaattcatcatattccayataagtgccaaaagacatttggacagactttcagcctaaaggatagtgagagggatagtcttaaaaattttaaagatttctttagaactttcttagaattaagtgtcctattcagcttaattgttctgctaccagcaaaagtgat

SEQ ID NO: 368672 - DNA, 584 bp, Homo sapiens
tcacatagtgctggaagtgcaagccagtgcaataagtcaaggaaaaaaaaaggcatacagacctgaaagaagaaacaaaacgatccctatttacagatgacatgataatctatacagaaaatcccaaggaatctacaaaaacatcttctaaaatgaatgactttagcaaagtcaaaagacaccagttaaatattatatttaatcaattgtactttaacatatgagcaatgaacatgtggacatcaaaattaaaatattttaacatgtagacactaaaatgaagattacaatagctgaaataaaaaatagttaaacatgaatccaacaaaacatgtccaggatacatatgctgaaaactgaaacccgctgatggaaaaaaaatcaagggagatctcagtaactgaagagacatacagtgttcatgaattagaaaactaaacatagcgaagatggcaattctctccaaattgatatacagatttgacacatcctataatcttgtagacacagcaacacagacaagattctaaattctacatggaaatgcamaggaactagaatagctaaaacaatttgaaaaaaaa

SEQ ID NO: 368673 - DNA, 540 bp, Homo sapiens
gccactgggaatttgcttcttgccactgggaatttggaagtcccaaggacagagtgatggtcaraagttcatatactttatggcttttactctgtatattaataaggtcagcattaagttgcaaaaagtatcaaattttatataatctttaggcaaggtacaagaacagaaaatggtgctactgaaatttttttcctcatatagaggaaatactgtttggtttcagaagaaatagacatttctattttaagatttttatggtgctgttcccagtgtgaaggtttaattaatttagactccttaaagcaggggtccccgacttcctgggcctcggactggtactggtccatggcctgttaggaaccagtgttgcacagcaggagctgagcaccacctgagctctgcctcctgtcagatcagcagcggcattagattctcataggaacctgaaccctactgtggactgcatatatgagggatctaggttgcatgctccttatgagaatctaatgcctgatgatctgaggtggaacagtttca

SEQ ID NO: 368674 - DNA, 414 bp, Homo sapiens
tggacatgtcctgtggaactggccacggccttccaagggtgtctctggctgtcagtttctcctatgcacaacactctcacccttaacaaaatttaggaagcctttactcctggatttgcccatgtggtgtggaagacagtgccatggccttggaagcatgcagtcagagacagatgaaaacacaaggacagccaggctgaccctaccaaaataaaacccagtctgacagtgaactctgaactgaggccaagggtaaggttttaggttatagagggttaggaaatgagagagaagtagttgattrtgttccactgatctgttaacaaatacttaacaaggccagtattacgggcacttctcagtacccaagcttccattgcttaaggactgtgttgggtgttttacatgcatttt

SEQ ID NO: 368675 - DNA, 440 bp, Homo sapiens
ctctgaactgaggccaagggtaaggttttaggttatagagggttaggaaatgagagagaagtagttgattatgttccactgatctgttaacaaatacttaacaaggccagtattacrggcacttctcagtacccaagcttccattgcttaaggactgtgttgggtgttttacatgcattttctcattcagtccttgtatgaactgtattttacaggtgtggataatctgggatcgagggagggtaagtgacatggtgacacagccaataaagacaaattcaaggagggccaccagagagtgatctcagaactgttctcactactatggaaaaaggaaaagtgtggaaggttttttttttttttttttctggttaataagaagagacagaaacaaagaagaaaatattaggcatccacaatcttaccagccagagtaaagg

SEQ ID NO: 368676 - DNA, 594 bp, Homo sapiens
agaagaaattgagaaatgcagagatgagaaatggaactaatgttactgagcagggaggaatgttatttcatttaattctcttcatttaactactctttttgttttatttaattcttacaaccaccctcttatgatgtggaggaaacaaattcccagataacttaaataactttgtttccatagctagtaagtgtcaatttyatgattcaagcccagattagtctgaccctaaagtccatcaagatacctaaacaaacttgattattaacattcctatgtccatgatatctcttactctacctgtaaatcctcatgtctcagtatgttcacaaagtcaccattcaaacaatgaataattaggactccttacatgatacagtccagagctcacatcttgaacatttattggtactatatcggtgtgataacaaggttacaggtttttgttggtcacacagaaagcaccaccatgaaggaatccccgacttctgaatcagatcctcaactctttaggggcagaaagttaaatattcagagacaccaggagtggttcagtctaataggaggtggactcactgtagccaagctcaaagg

SEQ ID NO: 368677 - DNA, 527 bp, Homo sapiens
gagagcaaccaaaaggtcaggactccactgtcttccaacaactagcccttctcctgagaagtcattggaagggccaagtggcttccctttttgccaaactgagatgaaggaaaagatgatccagttagggtagaacaagggttcctaacttgggacacaaggcctcatccagatgttgtgtggatrttcacttacctgggaagagactctataacatcctcagactcccaaagggtctatagcctaaacaagtttgagaatcactactctagagtgaatagagtcttccttaaagagctaaaaatcagaaccaagaaccattgatattccctctatatttgaattgaattcttaaatattccttagttagaaaaggaagtataattcagagcaatggatgtaccatttcagctgactctttggaccttactgataatataaccattaagtatgagaaaaaataccctaaaacataactgtcactcaggctgcagtggtttcacgagaaacagaatacagaccacaca

SEQ ID NO: 368678 - DNA, 567 bp, Homo sapiens
cataacccacaaaagcatttgtctatcttaaaagaaaatatgcatcactgattatgaagacttggaatagtagmgtacatcaggaacaggtattaaagacagaatcttacataaaaatcaatgtatgtgtatatttgtattcatgtacaatatatcctatatacaaacatatgagatatatgtctttctgaaatcaagcccagcttgtattttgttatttttaatatttgctgcatttgtttgaactctaagtcaagaaaagcaaactcttccaaccttccttaggaaaacagacacaaaagctaatttacagttgccctccatagaaaactatttgcttgtttcctaaaggatattgaggttgatttttccttacaaactattgttctactacatttctcatttgttcactattgtcataatttggcttctatctaaatgaatttttttaaaaatgtgcacctagatttgtctggcactgggcctgaggtaaacagctggttcaggagggtaatgtgcaggaaataaaagaatccagatttgtgaccttaaaattgactgaccttc

SEQ ID NO: 368679 - DNA, 607 bp, Homo sapiens
agttgccctccatagaaaactatttgcttgtttcctaaaggatattgaggttgatttttccttacaaactattgttctactacatttctcatttgttcactattgtcataatttggcttctatctaaatgaatttttttaaaaatgtgcacctagatttgtctggcactgggcctgaggtaaasagctggttcaggagggtaatgtgcaggaaataaaagaatccagatttgtgaccttaaaattgactgaccttcctatgagtctttgtttcccaggtgtatttgttttcaatcactggccatcattttccatcagatatcttctttatcattagaaaattatctttattactctaagtccctgaacaaataatgtgcattccaataaacacttacagtcaattatgaatcaagagcaaataaaagttcctttgcattcatagaccttcttagcaatacattcaaaagtattttacttttggtacctttaagtctgatgagtacaacatccctggtttacaatttcaaaattaaaagagaaaaagggaaactggatacaaagaagactgagtcatgagtgaaaagtgcaaatttaaattgtaatta

SEQ ID NO: 368680 - DNA, 575 bp, Homo sapiens
cttcaaaatgaaaacagacctgttaataattccttttttttttttttgccctgtaagaaagtatgttaagtttatttgtcttctggtaaattattatattaaaaaatatgacttcagggtcatccctaaatagttaaatatataatttgaaccctatatatttacctaaatatattccatttttggagtgtcaccttcatttattctagtcagggtcatcaatctccatcagggtttacyttctactctctcattgggtatgccagctctgtcataaaggcaaatgtagaacttgctgtggtcctctcaaggtggcaccagcaacaactggcatgggcttagagccattgcgtcaaaagatacagctaggagcagtaactctgtttgacccctgggtagttatctccccttcttattattgttgggtacatatggacattggaagtggccagtggaaaaccattgctttaacattcatccccagaattcaccatacctagcagtagcagcagatttaggccaaatgagaagtctgttacacaggtctattatatttgctccctcctttgttttta

SEQ ID NO: 368681 - DNA, 575 bp, Homo sapiens
cttcaaaatgaaaacagacctgttaataattccttttttttttttttgccctgtaagaaagtatgttaagtttatttgtcttctggtaaattattatattaaaaaatatgacttcagggtcatccctaaatagttaaatatataatttgaaccctatatatttacctaaatatattccatttttggagtgtcaccttcatttattctagtcagggtcatcaatctccatcagggtttaccttctactctctcattgggtatgccagctctgtcataaaggcaaatgtagaacttgctgtggtcctctcaaggtggcaccagcaacarctggcatgggcttagagccattgcgtcaaaagatacagctaggagcagtaactctgtttgacccctgggtagttatctccccttcttattattgttgggtacatatggacattggaagtggccagtggaaaaccattgctttaacattcatccccagaattcaccatacctagcagtagcagcagatttaggccaaatgagaagtctgttacacaggtctattatatttgctccctcctttgttttta

SEQ ID NO: 368682 - DNA, 600 bp, Homo sapiens
ttttattgttttgttttgttttgttttgttttgttttgttttgttttgttttttgagacagagtctttctctgttgcccaggctggagtacagtggcacgatcctggctcactgcaacctccacctcctgcattcaggcaattcccctgcctcagtttcctgagtagctgggattacaggcatgygccaccataccgagctaattttttgtggggttttttttgtgtgtttttttagtagagacagggtttcaccatgttggcccagctggtctcaaactcctggcctcaggtgatgcacccacttcagcctcccaaagtgttgctattacaggtgtgagccaccgcgcccggccttgactcacctttcagctttctgaaatgctctaacttatggaaagccttccctgacctccctttttccccttgcacctggtaattaggtagtctctcttttagttttcataacattttgtatattcccccccagcataatccacatttatttgtttgcatgtgtgtttaccctctaaagagtgaacttcttaagacagatactatgtcttaggcttttaaaaaaaattccaattgcctaacaaag

SEQ ID NO: 368683 - DNA, 482 bp, Homo sapiens
atcttggcatcactacatttagtggtcactaattaaaattcattaattaacaagatgattaaatagggtggaaatagcaactagctttgaagcaataaaactcaggtctgaatttccattgcaatacttacatgctattttgtcttgctttgattgcttgacttcttagaccaccagctrtctctttcataaacttataaaacttacctcccagaaattttataaaaattagttaagattacatatataaaaagtgtggtcaattataggtgattaataatagtagccattattatatcaataccaaaaactcctctacatttttaaacatattcttgtttcaaaataaattttctgaagacctcccagaacacataaatacatgcatagacatttctaccttaacactttcaaaccaatagatgatttatgcacacacacacgagcacacatacacaatcatgaatacaaaacatgtgttt

SEQ ID NO: 368684 - DNA, 482 bp, Homo sapiens
atcttggcatcactacatttagtggtcactaattaaaattcattaattaacaagatgattaaatagggtggaaatagcaactagctttgaagcaataaaactcaggtctgaatttccattgcaatacttacatgctattttgtcttgctttgattgcttgacttcttagaccaccagctgtctctttcataaacttataaaacttacctcccagaaattttataaaaattagttaagattacatatataaaaagtgtggtcaattataggtgattaataatagtagccattattatatcaayaccaaaaactcctctacatttttaaacatattcttgtttcaaaataaattttctgaagacctcccagaacacataaatacatgcatagacatttctaccttaacactttcaaaccaatagatgatttatgcacacacacacgagcacacatacacaatcatgaatacaaaacatgtgttt

SEQ ID NO: 368685 - DNA, 622 bp, Homo sapiens
gagttcaaatactgagtgcaccaaaagtttctcaaagagaattggcctttattttcaaataagaaagttagtatgggcaaaaataaaaataaaaataaaaggcattttccaaatgtgaagcaatcacttagtacttgtggttttctaagtggggaaacgtttcttgtgtcagcagttcattcgacgggccaatgatgaagtgacttcctctgctcatgttaaatggtgaagtgcttatttcccagtccattgggaagatttagagctgcagcctacaaagcgagggccacctgctctttcactcactcgttgtttggtagtacatcagtaatttcagggacctgtgatggcttgtggccttgtttgtcactgtagctttatgcataacttgtcaatttatggcagtgattatatatccatcttcatagaatacacacccagggtttgaattacaagatctttaaccctcagatttctggacctgtgtgaagcagttgcatgaactstctaaaatcagaggcaagtgatattttggagtgccagatgatgagttttagaagctatttgtctttgtaaaatgctttgatttactaccttaagtgtgtttcttaaatacaacagt

SEQ ID NO: 368686 - DNA, 594 bp, Homo sapiens
ccagatatgcagagaacatttctatatggacctgggcaagtcagttgtcctctctgggcctttgtatatatctgtctttctatctctctttctctttctctgttgctaatggagttaagaagccataatggcatttttaaggatcaaatattatgtcatgattattagcatgaccacagctgctcctggcattatttggggatcaattgtgttctttcattcgctttcccttygatttttcactagtgtgtaaccatttgaagttgcaattaattgatatatattccataagattagaatacaggatttgaacagaggcattcctactttgattttttttttttaatttggaaagggaagtacctcttttgagctaactagtggtgtttacaacagtctaagaattttttaaacaccttaagaggacatagtcttttaaagagatttggaagcccttcccttgacctatatgctatagatacaaatattacaaaagatgtgtttttctttttctttaaaaaaatttccccccacaaaaaaaaattcccccaaatatcctagtaggtagtgctctgcttagctaattttgatggt

SEQ ID NO: 368687 - DNA, 509 bp, Homo sapiens
tatgccaaccatacaaagtaaatattgacttagtaagaactgacaaaaaaaatatggaaaaagtgatttgggtttatccacacacacacamaaaaaatggaaaaagtgattttgtttagtccaaatctgaggttcagcacatcttctaggtattactttactctagtctttctaaagaaatactcaaaagaggcctccaaaaatatatgttatattcttctttttcttaaggccatagaacttgtagattttcagagcactttgatgcttcatttagacaaagattagctaaaatgaaatcttacagacttcattgtttccatatgctcatgaactctctcttctttactttggctgagtactctgtttctccaggattagagcataatagtaagtagatgtatttgttagtttcatgtaactctggctgctgtatacatcaatcaaaagatgcatagtggctctaacaaattagatacttaagttttgctcatgtaatatccaaaata

SEQ ID NO: 368688 - DNA, 597 bp, Homo sapiens
agaaaaaggagtcaaattattgattctaaagaagctcagtgagatgcaatagaactccaaaaagcaatacgaacaaataaaaacaattcagtatatgaatgagaaatttagcaaaggggtacctatcataataagagaactaaacagtcattctggtactgaagaattcatggaatgaagtataaaatacattcagaagcttcaataatagactagatcaagcagaagaaagaatytaagaacccaaatacagttcttttgaaataatccaatcagagaaaaaaaaaaaaaaaaagaacaaacttttgtgatatttgggatactctaaccaaatatgtgaattataagtagcacagaaggcaaagagagagcaaaagagttaacaaatttgacaaaataatagatgaagacttcccaagtatagaaagagatttacaggacacaggaggcccagcaatctccagacacaatgcaaaaaatctccatggcacattatagaaataatatctcaattcacttacaaagagagaattctaaaaacagtaagggaaaagcatctaatcacctataaaggaaccctcaccagattaacagcaa

SEQ ID NO: 368689 - DNA, 574 bp, Homo sapiens
tatgttattttttgccatactttctatttctctgccagctctctagtagaattaggtaaagctagaaagaaaacaatgctttcttctacactgcttattaagtagaagagtttgtgggaaaaaaaaaaaatcattcttacccttcactgaaatagggatttgagtctgactkatggaactcgaggttatttatttttccttttatctatctattaattcatattcattcttaaatctacaaatattgttgtaatatatgagatatcgaagcaatgaaaactaatgcagaacaggagttctagccttaagatatcttcactctggatggtacacaaaatataatccagggtagaaaatatttgtttgaagaaaatagcagatacagtgccatgaacgtctagagcaactgaaataatcttttcctataaaggaggtagacggggacacagatattgttaaccagtatttgttaaacttaatgtcaagggtatgtaatttataaaataaatcctttgatgaaatgtttcatttaatcaacattgagtactcagtatttctagtcatgagatgtagc

SEQ ID NO: 368690 - DNA, 609 bp, Homo sapiens
gattttaatctacagagtaaattattttatatacattggaaccagttaatgcccttagacaatgtatagttgtttcataaagcaggacagacaatgcagagggaaataggtgcccaaaagcacagtcacagaggcttcagaaggtctagataccactacaaatcaatgctggagatcacttctaaaacaatcarcgttcaagaggaatgctttaatgtggagaaaataccactccctccctcccacccccaaacctcccccacttttttataaccttttcaattcactatcaaaagtcctggctcttcagatatactttaaactataaataaacactgcatagttctcttttgtttgttttgttttttgttttttgaaaaattattgcagtacaattactcctatttggaatttagtaaggagcaaacagcacaggagtgtgggcggtccgaatgggtccgggagctggccgcaggagtgccggaggaagcgcagaagtctggaacagtgttgctgctggagcagttcgaagactgaagggggaactcactgccactgctgctgcggctgctgcagctgctagaggatttggtagaattcgtggagcca

SEQ ID NO: 368691 - DNA, 594 bp, Homo sapiens
actgaatggtagagaggttgccatgaggcatcacaggtggaacttgctaaccctctagggtgccagtagaagtggttcatrggaaaatgtctcactagaggcacaatgttacaaaactgctttaggggtgtgttgagagaggccactagtctgtgggcatttctggacaccatgcactgcacaagctgggcatctttcgaagaagctatctgcaccgcaggagtctggtcagtgaacatccaagaccaagaagacagacctcttcctcctgcgatgtctctccagtgccccctgctgacaaaggttaacatcatgccagcttataaagaaggatatgtaaagggtctagatccattgtcacaagatgggaatggtcaagagtgtcctgccctgcagttttaccagtgccctttggaggggggactgcctctgcttgcattagtgctgagcacaaatagcaggactctttgatccagattctgaagtgtcagggaggagagggagaggtgtggtaggtttgagatgctctcctggaatacagtgggtataatcaaaagagtcccatcctacaaggctgtctcttccaagtttaga

SEQ ID NO: 368692 - DNA, 623 bp, Homo sapiens
gaaatgtaactttactcagtttcatagggcaatataggaaatgaaacaatagcgtgtgttcatttgcaaacaatgcccacattaattcagtggctgctattttttttattgagaatcatctttttgggagatgaaaaaatcttaattagcctatctaactctaaacttgtgaggtttagatttcatatgtgctttcatatcttcttctccttcctgctcattcccaaattatttccagtattcctgttacatcatttccctcccaagtccagttatatgtatattttctcctttgattaaagtaatatggatatttagccctctttttggagaaatctgagtcatgctagcactggtattgtaattgttctcattttcattatctaaactgtcagaaaacgtattcataatattcaaaatattaaaaattaaatctatacttttttattatactttaagttttagggcacatgtgcacaacgtgcaggtttgttacataygtatacatgcgccatgttggtgtgctgcacccattaactcatcatttaacattaggtatatctcctaatgctatcccttccccctccccccaccccacaacaggccctggtgtgtgatgttgc

SEQ ID NO: 368693 - DNA, 651 bp, Homo sapiens
gcagtatttgggtgggaatgacccgattttccaggtgccatctgtcacccctttctttgactaggaaagggaattccctgaccccttgcacttcctgggtgaggcaatgcctcaccytgcttcagctcacgctcagtgcactgcatccactgtcctgcacccactgtccgacactccccagtgagatgaacctggtacctcagttggaaatgcagaagtcacctgttttctgcgtcactcactctgggagcagtagactggggctgttcctcttcggccgtcttggctcctcccccacatctgtactatcttgatgtaaggcatggaagtcagtccatagacaaagtcaaagatggattgttaaaactcatacttacagaacagttaaattacatttttatgttatctaattgtaggccttaaagcaaaaaaaccccacaatgtctatatttttaatagactttgctgtgtttttacataaacaaattcttcactcgggggatgggtagcatcgaataaactatttgctaaaagttgtcttaaaatattcaagtcttacaaaacaaaaacagctcacatctttggatgtcagtcctttcagtttctaccattctagtaaatatttgcaattttcagttagggctgaggccc

SEQ ID NO: 368694 - DNA, 595 bp, Homo sapiens
atagtggtgatgtacaaagttctgaatatactaaaaccagttaattgtacactttaaatgggtgaattctatggtatgtgaattatatctcaatgaagctgttattttaaaaagtaatacgttgtgaaaattcctcttacattctagttcctttgtttcttgtttactatgagggagcacaactatcacctgggagggtaagaggggagcacaggttctatgaaatgttaactcatatgttgatacagggtagatttcagaartctcaagacaggagacagctgctgtgctatttaagtgcttttgggctatcctgttgagagtgtgagcctttgactcaaggcgcaacacaaaagtcatggtagaagtttggtgattccttctctttaggcttataacaccttgtctatattgctattttggtactaattatgttactataattattttttaaattactaacctttttcccagatggtgaatctcaaaagggcactatctggaatatggtaagctcctcaataaagtacttattatgtggctggctggatgaataattgaatctagtgttgtatttatctctgtttcaaggaaa

SEQ ID NO: 368695 - DNA, 595 bp, Homo sapiens
atagtggtgatgtacaaagttctgaatatactaaaaccagttaattgtacactttaaatgggtgaattctatggtatgtgaattatatctcaatgaagctgttattttaaaaagtaatacgttgtgaaaattcctcttacattctagttcctttgtttcttgtttactatgagggagcacaactatcacctgggagggtaagaggggagcacaggttctatgaaatgttaactcatatgttgatacagggtagatttcagaaatctcaagacaggagacagctgctgtgctatttaagtgcttttgggctatcctgttgagagtgtgagcctttgactcaaggygcaacacaaaagtcatggtagaagtttggtgattccttctctttaggcttataacaccttgtctatattgctattttggtactaattatgttactataattattttttaaattactaacctttttcccagatggtgaatctcaaaagggcactatctggaatatggtaagctcctcaataaagtacttattatgtggctggctggatgaataattgaatctagtgttgtatttatctctgtttcaaggaaa

SEQ ID NO: 368696 - DNA, 528 bp, Homo sapiens
tgccccttcttcatctcattagcttaaccctcagttgcctgacccaagtcaaggtgtgtgacctggtcctgatcaccacctcttttkgggggcttctgcaactgtgctctgtcctggcaacctgcttctgtaatctgtttatccccaaatttgaatgagtaataggaattgcctaaattttggataaattatcctacaaaataaaagcattctcacattgccctctcaaatcacatgatctttgtagaaaatggccggtccctatgaagctaattgatctttggcatcaatagggaaattcagctgggcgcagtggctcccacctgtaatcccagcactttgggaggccgaggtgggagggtcatttgaggtcaagcattcaagaccagcctggccaacgtggtgaaaccccgcctctactaaaaatacaaaaaaattagctgggcgtggtggtgtgtgcctgtaatcccagctactcaggaggctgaggcaggagaattgcttgaaccagggagatggagcttgcag

SEQ ID NO: 368697 - DNA, 515 bp, Homo sapiens
tgagtcctgctttctaacttaraaaacgcatgtgtgttcatcacctggtcactgagaaacagctctggaataggtgccatgcagaagaagagagggaactggaaagacccactgatctgtgggtctcacagcctcccgttacacagaaattgcttcttttctctcatgttgcgttcttcctcttgattctcgacccttctccactctttcatttactccactcttactttgctttcacctccttttgtaaccgttcatcatcactcttcatatggattaatgtgattatcttaaaagcatgtaatatgtagttgctgggtttgtatgagtaatgagtgaacctgaagccaacataatgatcccgtttagtgctcccgagttaagattccagagttgcctgactttggacaaatcacatctccctttgcctttcaccccctgtaaactgaggataatggctcttacctcaaagcattgttaggattggagagaacgcatgttacatacttagaaga

SEQ ID NO: 368698 - DNA, 568 bp, Homo sapiens
gcagggctgggggccttgggctaaccctttagtgcctctggctgcatcactgtcagagtaaggtaaccaacaagaggctacagaaacaaccagccagttccagaaatagaaaaacataattggaaggaagccaggaaatggacaggtcctgtccagtgtagataaaatgacagcagctaaggcaggttgaggggcagaggagaggctgggggatcggtattatagcaatgcaggagtcctgtcctgagtggctgctcagggtattgacatgccattttgataaatacatgaattaatgagtgagtttcgagagtagggggagagagaataactgggcatccccttctgtagatcctcagtcttctagtctyatctctctagaaggatattcacccatactcaccttgtccactttgtgccagagttgaacattcttaagaaattaagaaggtgattctttgccaaccatattccagttctttatttaggagctatattatcagctttgcttatggctccagaagtggccattaatacctggagctaaaacactgttttggtttagcat

SEQ ID NO: 368699 - DNA, 527 bp, Homo sapiens
ctagtttctttggtgaaattaaaccaattacataagcaaaaaggtaggttatcacaaacatgtataattattagaaaaccattagaaatttaattacaaaatgcagaattgttaaaatgagacaaaaataaaactgaattttcaaccattatttcattaaaacatttaaaatgccacttataaaagcagggagggctcttaattagctgatgttccctgcaagcaggaagttttcagtagcaactgaaatatcacagaaaaagacaaaagtaaactttctcacgattacagaaaaccagtattttcacatttccctattccatttaaatttcagaccatggaacatcagaggatgcaaaccagggatcagacacatagttytgtttttgtctgcaatatcccaatatcccaatgtaactcaaaatcactttcccccaatctaacagtgactttataacttaagttcatcaaatttaagtggattgctcaacaaacccatcataaaatagttctctataccatggtta

SEQ ID NO: 368700 - DNA, 527 bp, Homo sapiens
ctagtttctttggtgaaattaaaccaattacataagcaaaaaggtaggttatcacaaacatgtataattattagaaaaccattagaaatttaattacaaaatgcagaattgttaaaatgagacaaaaataaaactgaattttcaaccattatttcattaaaacatttaaaatgccacttataaaagcagggagggctcttaattagctgatgttccctgcaagcaggaagttttcagtagcaactgaaatatcacagaaaaagacaaaagtaaactttctcacgattacagaaaaccagtattttcacatttccctattccatttaaatttcagaccatggaacatcagaggatgcaaaccagggatcagacacatagttttgtttttgtctgcaatatcccaatatcccaatgtaactcaaaatcactttcccccaatctaacagtgactttataacttaagttcatcaaatttaagtggaytgctcaacaaacccatcataaaatagttctctataccatggtta

SEQ ID NO: 368701 - DNA, 430 bp, Homo sapiens
ttttattagccagacagcatttaatgaagaagtgtagaagctgcaagcagttaaatttccaaggatgttttactaaacatccaagcaaaattctgctttgtgattttgaaatattagtaagtgaccaagagtttatttcttgttcttgttctagacacaarcccttccatcccagtatgtttttttaccatggtgtgaaggggaaacttcaattaagctgtgcaaagcctgtggtactttcgtgtccatatttgtaacaaactgaactcagagcagccgggctagagtagggtgcttagaatagaggaaggacagagtcggccaagttccactgcacgaaatttagtttggaaaaaagtgttccattgctcatgttttataaggtcccttgcaggcctaaaattataaaattctatatattaaactgctt

SEQ ID NO: 368702 - DNA, 582 bp, Homo sapiens
aaaaaattttgaaactagatacacaacataccaaaacctctgggatacagcaaaagcagttctaagaggaaagtttatagtgttaaatgcctacattaaagagataggaagatctcaaattaacaatctaacattgtacctaaaaaaaaaaaaaaaaaaaacctagaaaaccaaaaacaaacaaaacctatggctagcagagaaaagaattaaaagatcaaagcagaactaaatgagatggagaccaaaaaaatgatacaaaggagcaaaaaatgaaaaattggctctttgaaaagataaaaaatattgatagactgttggttagaataaccatgaataaaagagacaattcaaataaacgcaatcggaaataacagggacattacatacctgccacttgagttgatttcatgacttcgtctttggaatagtgctgtgataaacatatggatgcaggtgtcttttcaatayaattatttcttttcctttgggtagtgatatgatttggttctgtatcgctacccaaatctcatcagtagctcccataattcccatgagttgtgggagggacgcagtaggaga

SEQ ID NO: 368703 - DNA, 564 bp, Homo sapiens
ctcaggttgcaagcatccaatagcgtaaagtatgtataatgtgctcagcacactgcatagcacctgacaaggctcaactatccacttttcttatcacaattactcatccaggagagtcaggatacattaggctttggtgtccctcactgcatatcccccagttggcaccatttgctccaactcaaytgagctatttgaagttttgcaaatgtgacctcttttttctgccaccttcttgcttctgtctatgctgttccttataccaagaacacccttcctctaatccccatttcttccaaaatgtcttattccacaagaaacagcccatttcaccactcagtcagtccctttctctgaattctcttcatgccctttgcacacctctgtttcaacacttccttccctgtataatgattcctgaattcctatcttccccatggctgagaggctactgaggacaagcatgtcttataaagccccgcagctccagtacctactacctcctggctatgtttgatgaatgactggacaagtgaatgaatggatacacaaattattaacaaa

SEQ ID NO: 368704 - DNA, 438 bp, Homo sapiens
ttaggcgtttgagaacagcctgggcaacatggagaaatcctgtctctaccaaaaatacaaaaattagccaggcatggtggcatgtgcctgtggtcccaactactcgggaggctgagactggagaattgtttgaaccyggcaggtggaggttgcagtgagctgagatcgcaccactgcattctagcctgggcaacagactgagaccctgtctcaaaaaaaaacaaaaaaaaaaaatcctcaacaacagcagcagatgtcaacactaatctagcacttgatgtgtaccaggcactattttcagagccttatgtctatcaattcatttaatcttcacatttatcccacctggtagggactgttagactattactacctccattgaacggatgcagaaactgaggctcagacagtctaagtgattaccaacacaaaagaaaa

SEQ ID NO: 368705 - DNA, 438 bp, Homo sapiens
ttaggcgtttgagaacagcctgggcaacatggagaaatcctgtctctaccaaaaatacaaaaattagccaggcatggtggcatgtgcctgtggtcccaactactcgggaggctgagactggagaattgtttgaacctggcaggtggaggttgcagtgagctgagatcgcaccactgcattctagcctgggcaacagactgagaccctgtctcaaaaaaaaamaaaaaaaaaaaatcctcaacaacagcagcagatgtcaacactaatctagcacttgatgtgtaccaggcactattttcagagccttatgtctatcaattcatttaatcttcacatttatcccacctggtagggactgttagactattactacctccattgaacggatgcagaaactgaggctcagacagtctaagtgattaccaacacaaaagaaaa

SEQ ID NO: 368706 - DNA, 465 bp, Homo sapiens
acacacacacacacacacacaactccaggaaatggtgaattctaatggctcaaagggagaagaaaggaggtggaatctgcctttggtggaatttgcaggatttctgagacctcacttgggccatgtgggctcrtgagagtgtttcctccctttccctttccatcagtctctcctgagtgcctcttttatgctcatcactctgtgccatgatctggtttacatactcacttgttaagtgtctgtctcctccatcagaatgccagctgcatgagactaggcaatgtgtcttcattcaccactccacattcaaagcccaacatgttgcctgcaactgaaggcactcattacatgtttgttgaatgaatgaatgacctgaatttcatgcactgcccagggctgcagttttttctcttcaaattttcttcttggccctcagactgtgttcatccattcattttgttaaca

SEQ ID NO: 368707 - DNA, 597 bp, Homo sapiens
cactcattacatgtttgttgaatgaatgaatgacctgaatttcatgcactgcccagggctgcagttttttctcttcaaattttcttcttggccctcagactgtgttcatccattcattttgttaacagtatttattacgcatctactgtgtaccagctactgtactaggcactaggtttggaccagggaacaaaccagacatggcccctggattcacttcctattgttattgtaacaaatgaccacatacttygtggcttaaaagcacacaggtttattatcttatggttctagaggccagatgtccaaaacgggcttcattgggctaaaaaccgagatgtcaatagggctggtttgttctggaaggtctcagggagaatccatctccttgccttttgccagcatctaggggctgcccacataactttgcttgtcgcccctcctcattctggcctctgcttgcatgatcacatctccttctctgaccctgccttcctcttctgaggacccttgtggtgacattgagcccacccagatgatctaggataatctccccacctcaagatccttaagtaatctcatccaaagagtcccttg

SEQ ID NO: 368708 - DNA, 429 bp, Homo sapiens
tctgcaaacccttgacctacagcagtctgaatagtgggctagttgggcatgttctggggtggcccagcgctcgaggccttctcagaaaagggggaggcagtggaaggcccaggggctttggtcaaactggacccagctcctgctgcatgtcctggcagagaggattactgggcaagtcattcaatctcttgagccactacttcctcattggagggacgggaggatgaaaagctccccctcaggrctcttgtgtgggtagaatgagtacaaggcttatctcaggagcttgggaaactttgattcccttgttcctcagcctctgttccttccatttccaaagaggccatatagcttagtggttaggaataagatgctagtatcaaatagaattagggtagaatgccagttctgtctcatatatcttagcta

SEQ ID NO: 368709 - DNA, 458 bp, Homo sapiens
gtcctttgtaatcaagaaagtgcacaatttgggaggtgcgagcttgtggctggcgattggagtctggtgaaggaggcataaacagactcatccaccactcatgtgaaacggggaagggtgttttgagttattccctgtgctgggtaccttacaaatgttttctcactcaattcttagaacacctcaatggatttattatccttgatttacagttgagagaaatagggctttgagtggcaaaataaatcccaaacccaytgggactctatggttaaaagctccaactctagagtacaggatattccaggtgaatctcagcaccatcattcatcactgtaaggcatgtcactgagccatctgaagcctcagtattctcacctgtcaattgggagcaacatggtatctgcttccaagggtgcttgtaaaaattgtgagacaatgcacataaaaggcttaac

SEQ ID NO: 368710 - DNA, 570 bp, Homo sapiens
ttctgactttcagaaccatgttcttgttgtttgttgtttcaagccactaagacagtggggcagtaagtgctgcctcgtgagcagatgggaggttgagatgaaagcacacaagcgcttcatccagtgtccagctaaagcgtttactccttcaccagctgctcatattatcactaataatattaccatgaatattattgctaataatattcttcttcctgaatgamgacaactgttcctcactgtctctctggcttccccagttcattcttcgtccagtactatgagcgattgcttcaaaatgcacaattgatcaggtcactccactgctacaatgactccccagcactctctggatagagagtctcccagtgcctggaggtcccatatagtctggctcacacacaccattttccctcttctcatatgactctccctgtcattcacggagttccaatcacaccagcccatctccgagcctttgcctctgccatttccttggcctgcaatgcttttcccacttgcctcaaaagcctcccatggcctctccaactaggtcactccccccaatag

SEQ ID NO: 368711 - DNA, 581 bp, Homo sapiens
actgatttgctgtaagtcacacagcaggtaatacagcaggcagagctgggatttgaactggggtctgaacgccaaactgtgctcctaaatcattgcttttaagagtgttagacagactcagggctgcatttcatttagggctaattatttcccactactcaggcaagacccttctgaagaatctgaccgatgctctgtgaattatgaggctttccagtctggctcgtagcaacaggcactcttcccaggactgtgtgagaggctgtttcctctaatcccctcagatggtgtccccagccttgggcaatttcctctcagtcaccatcagcagtcagctgaaccctcaaggggacctccacaaacaatcattgaggacccacccaccagggggataaggcaccaggtgctgaacgcctgctctgtgctayggggctttatacttaatcctccagtaactctctgaagctgtgctgtccaatgcaactgccacgaaccacaggcagctacttccacttaaattaattacaattaaataaaatttgaaaaccagttcctctgtcacgccagccatatttcagagt

SEQ ID NO: 368712 - DNA, 587 bp, Homo sapiens
ccacgtggggtctgggtctatgccagggggatgagcgcctgccagagtgcccgcaagtcagaccaaaaagagcccatgagcttcactgaggatcagacctaagaacattctggaatcccatgctctagcttggagctcccagagggccagatggcagcagacaggtatgtaattctaccagtgagaaaaccagggcatccaatgtgttggggagaacctgcattgcctgagaatagtaatataataattattattgttatatgttgtcatggctaattattgctatttattgtcacggttaattattaaagtggacagccatgtctgcattggtcactgctatatccccaatgcytagaagggtacctggcacataataggtgctcagtgagttcttctgtggaataaatgcgtgaacaacaacaataatagctacttctatttgctgagcacataacacaaggaattaatatttatttttgtgggggttttacatttgtctgtctccaccacaggggcatgagtgactgactttggttttttggggttttttttgtttgtgtgtttgttttttgagacggagtttc

SEQ ID NO: 368713 - DNA, 587 bp, Homo sapiens
ccacgtggggtctgggtctatgccagggggatgagcgcctgccagagtgcccgcaagtcagaccaaaaagagcccatgagcttcactgaggatcagacctaagaacattctggaatcccatgctctagcttggagctcccagagggccagatggcagcagacaggtatgtaattctaccagtgagaaaaccagggcatccaatgtgttggggagaacctgcattgcctgagaatagtaatataataattattattgttatatgttgtcatggctaattattgctatttattgtcacggttaattattaaagtggacagccatgtctgcattggtcactgctatatccccaatgcttagaagggtacctggcacatartaggtgctcagtgagttcttctgtggaataaatgcgtgaacaacaacaataatagctacttctatttgctgagcacataacacaaggaattaatatttatttttgtgggggttttacatttgtctgtctccaccacaggggcatgagtgactgactttggttttttggggttttttttgtttgtgtgtttgttttttgagacggagtttc

SEQ ID NO: 368714 - DNA, 582 bp, Homo sapiens
tgtgttacctggagaatcttttgtttggtgagtgcccaccttggtttagtgtgaaagtctgactgtaggtcagagcaaagcagaattgttctgcttcgaagagggcagtatcagtcaagtgaggccatgctctgctacagtaacagacagcccccacagtggcataacacaagaaaggtttatttcttgctcaatacagtatatatcagtcatgaaggtaggaggccagtaggagggtggaggctgttcatcagagtcactcagcaaaccagattgatggaaacttcctcttggtctttgcttccagcaccgtcttggcaggaggcagtggtgaactgctctggctaagagcttccatccagaagtgtcacgcatcatgtggctcatgttacattggctagagcaaaccacycagcactcagccacacttaactttaggaaactagaaagtgcaatcctacaattgcccagaaagaggacgtaataggagtatttgtgaatatccttaatgacatctacaaggggtgaagactgctctagtgaaaaggtgaggcttttggagggcgagtgaaggacttgggc

SEQ ID NO: 368715 - DNA, 548 bp, Homo sapiens
aaagacctgcctgcaactcccaagagaactaaatgtttccctccactaggggagggttactggtgggtttgggcttaggctggtttgttggaaggtggctgacactgcagtttggctcacccaatggtggagtccaaccttgcctgtcctcgaagatggaaagctgaataatcaccttccagcctcccttgcagctataggtgccacgccacatattctgcaggggaagatgtctgataaaaagcaggagggaacagcttaacctgatattgcccttcccccttttctttctaccttgaaatggacccaaagtctgaagctctccatctctcttgcagccatgagtgaaaagccaagggaatcctgacatcctacagacactaycttgacatgatgtagcagcagcactagtgccagaaacccctacatctagacttctacttgtaggaaaaactgcttttctctctgttacatgaagcccaaggaatcctaactaacacagaagtcaagagtgacaggcacagacacatgaaaaaatgctcatcatc

SEQ ID NO: 368716 - DNA, 478 bp, Homo sapiens
tgatctcacctaagctattaaagattctctgagccttggttttctcacctgtaacatggggacaagagaagaataatgtttgccacttgtcttctacacagtcatactcaatgtgtttatacatgatttatatctcattccattttgatcaacarttacccaacagagagcctggtctctccagatactcaataagattattgaattattgattattgaataaaaatatgacaatgtgctttcacatatatttcttctctctctctctcttcaaatttcattttcacagcaatctggttcaaggttgtttcagcccagcacaggacaaagaggattataaaattaaaccacatgtttctgactctcagtgaacttacagtttactatgttttattaacaatgtatacaacacttagtctgccccagctactgtactaagtactttataaatattaggtcatgtaatctgcataataac

SEQ ID NO: 368717 - DNA, 600 bp, Homo sapiens
gcatgcatactgcattagaaggtgcaccctcattccgcacgggtgtrtcagggactggcagggtcggggatggcttccctgggaaggtgcctttcaagctggccagtgactaaggggtcactcatcctccagggaatgggtggatagagagcactctaggccacaaacaaagcagagaatatacactgctgtagggtatgatctgagggatatgggagatttcaggggaaagagcttactttaagttttttgaagtgataaaatatttgaattttatcttggaagaactatggatccgttaaaggtctctcagcgtaggaatgaaatgagctgaatctgcatgttacgatgtttcctctgtagagcctaaccccctccacttgtgttcccaagagccccagcatcactcaggagcttataagaaatgcagagtcccaggccccattgctaaacctcttgaataagaatctgcacttttcaaaagtttcattttctaaattactatacagtaaatttaattttttatttttggtgtaaagttctacgaatgttagtatatgtgtcaatttgtatagccaccaccataatcaagatacagaa

SEQ ID NO: 368718 - DNA, 576 bp, Homo sapiens
aggccacaaacaaagcagagaatatacactgctgtagggtatgatctgagggatatgggagatttcaggggaaagagcttactttaagttttttgaagtgataaaatatttgaattttatcttggaagaactatggatccgttaaaggtctctcagcgtaggaatgaaatgagctgaatctgcatgttacgatgtttcctctgtagagcctaaccccctccacttgtgttcccaagagccccagcatcactcaggagcttataagaaatgcagagtcccaggccccattgctaracctcttgaataagaatctgcacttttcaaaagtttcattttctaaattactatacagtaaatttaattttttatttttggtgtaaagttctacgaatgttagtatatgtgtcaatttgtatagccaccaccataatcaagatacagaacaactctgccccaaaaactatcttgcattatcctttatgatcacacctatcacccctacccactaataaccactaatctgtcctctgtcactacagttttacctatccaaggaagtaacataaatgaaattga

SEQ ID NO: 368719 - DNA, 573 bp, Homo sapiens
ttactttaagttttttgaagtgataaaatatttgaattttatcttggaagaactatggatccgttaaaggtctctcagcgtaggaatgaaatgagctgaatctgcatgttacgatgtttcctctgtagagcctaaccccctccacttgtgttcccaagagccccagcatcactcaggagcttataagaaatgcagagtcccaggccccattgctaaacctcttgaataagaatctgcacttttcaaaagtttcattttctaaattactatacagtaaatttaattttttatttttggtgtaaagttctacgaatgttagtatatgtgtcaatttgtatagccaccaccataatcaagatacagaacaactctgccccaaaaactatcttgcattatcctttatgatcacacctatcacccctacccactaataaccactaatctgtcctctgtcactacagttttacctatccaaggaagtmacataaatgaaattgatataatatgtaacctattaacgctggcttttttaattgagcaaaatgttgttgagattcatccaagttgttgctt

SEQ ID NO: 368720 - DNA, 452 bp, Homo sapiens
tctgcagctttttgggaattgtggccattatgtttttactatctcccattgtaagaaatttctgaattctttttatggtgaactcagtgggtgggtgggtgagtgaacaaactttcttcagatcttacgtgatatgtccacagttttctcaggcagaggatagaaggggttagatattagaaacagtacaaagaaagggcacctgtgcaaaccaatatgtggttacgtctaatttggaacaacaacaataataataacaataaaactaattataatattaacatttatccttactggggttgtacaatgtggcaagcactttytaagctattcgggtgcattatctcatttaatttttataataaccttatgaactaagtattatttttgttatcatttttatagatgaataaactgagggacaaagaggtgaagcaatttgcccaaggtct

SEQ ID NO: 368721 - DNA, 553 bp, Homo sapiens
tgtgtgcatttttggagggtccgaggctccaaacagattattcactcagtattacaaacactctcccgtattacaaatgaattctatgacgaatctgcctccctccatgcacaggatcgcacgctgtgaccaaccatctcagaactcttcccaacctttccaaatcggacacaggacaacacagcctccttcgactacctgcatggcctgaggstgctcaccgctcctgcacccttggctggagcatgcaagccccaggactcaccagctcccttttccgcttgctctcacggccgccatccgccttcttgagttcagccttgaaggcctcgggatcgccagactgtgcatccttggccagcacgtccatcaggtaggcgatgtagctggtggctaggcgcagagtcttgatcttggagagcttggtgtcggccggcacgttggggatgcactcgcgcaactccgcgaatgcgctgttaatgctctcagtgcgtctccgctccttcttgggtcctgagcctttccgccggccaagacggccgccaagcgcctc

SEQ ID NO: 368722 - DNA, 523 bp, Homo sapiens
ctctcttgtgcttatttctagagactttacagtttttgcttttgcatttagatctttgatccatctgaaattaatttttcagtacagtgtaaggtaggggttgagatgaattttttttgcatatcaatatctagttgttacagacacttgttgaaaagccttttctttcccccttagattactttggtatcttttgttgaaattcaattgacgatatatgtacatatatatgtatataatatatagtcaattacatataattgactacatataaattrtatatagagtctatatatatatagtttctctctatatataatgtgtgtgtttgtgtatatatatacatatgccttttatgggggactattcttgacactaccatattctctggattattgtggctttagagtaagtcttgaaatcaggttggataagtccttcaattttgttctccttttccaagattgatttgaatattctaggttttttacatttctatataaattttagaatctatatgtgc

SEQ ID NO: 368723 - DNA, 492 bp, Homo sapiens
tggctttattctaataaaagataaatgtgtttgttttcattaacttcgttcattaatttaaatttctggggccagttttaaatcgttgctgctttctttgccattagcctaataggtgctagttctccaactttagtgggtgtcacaatccctttggggaatatgtttcaaatgcagggaacccttgtaggtgaggagtgagcatgagatytgcattttcaagaaaactcaatagcagattctgatgcaggaaccatgcctctgagaatgtgatttatatagatatagtaggtactcaagagtgatctattcaccaaagaaaattattttccttgttagctgtgggattctatccaagttaatatacatatatagttaaatatgatacatgtctattgtggaaaaatcagaaaatatagagaaacataggaaggaaataaacatttccttgatctttacaagctatttacattctttgggctgtagttttct

SEQ ID NO: 368724 - DNA, 599 bp, Homo sapiens
ttcctttgtgatttttaagggctctttatatagctcttcatatactgatcatattaattcttttatgtcataactgatgccaatatattgcataattttggttactacataatgrgatttattatttgaaacttataggtaatttatggtaaaatctggtccttaaattttttcttagaattatagtttttttttgttttttaaatacaaggtcttttataaatcaggtctttctaatagtgtttttattatttattatcattgatttaaattctaattttttagtaatagcaaatatatagattttttagtataattatgtgcttagttctttgatttttgcaaaaggatcattaaatttatttagaagtactgaaagtaataatagaccaaataataatcaagaatcaagaagaggaagttatgaagcaagaaagatgtgttacaaaatgcagtaggtatgtacttatgaaaaacattttaaaatcttagaaataaaaagtattgtcgtttaaaacgagcaaagtaatgaaagaaagcaatgtatgacaacagaggaagagtgtattaatgaactgctatcaatctgagggactctc

SEQ ID NO: 368725 - DNA, 565 bp, Homo sapiens
gggctctgcccacgtcacatgccaatcacaatccatgctgtccctggagctgctctcctttcttctgaccaactggctataaatcagaagttcctatgaccccctccttgggcttgatcatttgctttgatggctaacagaactcagggaaaaacttaygttgctggtttattagaaagaattgatcaagaatacagaagaacagccagatgaaaaggtgcatagggcgatgtctggaagagacctaagcacagaggcttctgtctccgtggagttgggatgcactacccccttggcatatagaggtattctccaacacagaagctctctgaacactccagttcaaagatttttatggaggcttcaccacataggtgtggtcaattattaactcagtctccagcccctctccctttctcacaggacaggggtgtgggactgaaacttccaagcttctagccatggctttgtgtttctggtgaccagcccccatccaggaacacaccaagccataggaacaaaagacgtccctattgctagaaaattctatgggattaggggccat

SEQ ID NO: 368726 - DNA, 565 bp, Homo sapiens
gggctctgcccacgtcacatgccaatcacaatccatgctgtccctggagctgctctcctttcttctgaccaactggctataaatcagaagttcctatgaccccctccttgggcttgatcatttgctttgatggctaacagaactcagggaaaaacttacgttgctggtttattagaaagaattgatcaagaatacagaagaacagccagatgaaaaggtgcatagggcgatgtctggaagagacctaagcacagaggcttctgtctccgtggagttgggatgcactacccccttggcatrtagaggtattctccaacacagaagctctctgaacactccagttcaaagatttttatggaggcttcaccacataggtgtggtcaattattaactcagtctccagcccctctccctttctcacaggacaggggtgtgggactgaaacttccaagcttctagccatggctttgtgtttctggtgaccagcccccatccaggaacacaccaagccataggaacaaaagacgtccctattgctagaaaattctatgggattaggggccat

SEQ ID NO: 368727 - DNA, 597 bp, Homo sapiens
ttaacagacacatgtattacagtagtgactgtccagagtggccactggaagaaagaaatctttcggattccccacagaaaycatataaaaatgaccatcctgttccctggataagataatggcatgtggagtctgccagtcactgggactctccagaaattaggaaggcctatggtccatgagccttggatgtgaaggcatgagattgtgattttggtgatcctcatgggttggtcaagaagtctattccaaaaggagaatagacttgttagacaggtttatcaattataggataaaaacttagagtgacagcacaacgggcatttggactaaagttttggttttacttgcaaaatgcacttaaagggaattgtaatggttgaattacagatttcaatgcatgcttaagatgtggtatttttaggaacagctcaagtatcagaaaagcaggaaacaagcatccagttgtggggcctagggaatgtttactcttcaccttctgaaggttctctgaaaatcaaatgacaaagcaaagcttaataggagaaaagagacatacaaatttattttaatgtgtttagcatggcagagtcccag

SEQ ID NO: 368728 - DNA, 597 bp, Homo sapiens
ttaacagacacatgtattacagtagtgactgtccagagtggccactggaagaaagaaatctttcggattccccacagaaaccatataaaaatgaccatcctgttccctggataagataatggcatgtggagtctgccagtcactgggactctccagaaattaggaaggcctatggtccatgagccttggatgtgaaggcatgagattgtgattttggtgatcctcatgggttggtcaagaagtctattccaaaaggagaatagacttgttagacaggtttatcaattataggataaaaacttagagtgacagcacaacgggcatttggactaaagttttggttttacttgcaaaatgcacttaaagggaattgtaatggttgaattacagatttcaatgcatgcttaagatgtggtatttttaggaacagctcaagtatcagaaaagcagraaacaagcatccagttgtggggcctagggaatgtttactcttcaccttctgaaggttctctgaaaatcaaatgacaaagcaaagcttaataggagaaaagagacatacaaatttattttaatgtgtttagcatggcagagtcccag

SEQ ID NO: 368729 - DNA, 507 bp, Homo sapiens
aataccagaggtggtgggaggcatgtctcttctgcccattagaggcagaaaaataaatgagaaaaaagatactatcacactctggatataaaccaaagctttaaaccagaggtaaatctaaacaaatgacttaaaaccaaaacaartaagcacatgtgataataaaaccaagaagccctttatggggttaaccaaggtctctaaaaaggaagcaaaagctgcagccttttcaagatccagacccctcacaatgatgactgaaagaagggaaggtttgcctgtggcaaatggggagcgacccacatctctggccatattctccagggctctcaccttttcggttggctacctgtattcaaaaacccaacaagcttgtacactgatagatggaaaattcaaagagacaaacagtaaaacaaataggaaatcaaaagctatcactggggggaagaaagaatgataataaatgggtaccccaaagtcaaggaacatacaaataatttaaac

SEQ ID NO: 368730 - DNA, 507 bp, Homo sapiens
aataccagaggtggtgggaggcatgtctcttctgcccattagaggcagaaaaataaatgagaaaaaagatactatcacactctggatataaaccaaagctttaaaccagaggtaaatctaaacaaatgacttaaaaccaaaacaagtaagcacatgtgataataaaaccaagaagccctttatggggttaaccaaggtctctaaaaaggaagcaaaagctgcagccttttcaagatccagacccctcacaatgatgactgaaagaagggaaggtttgcctgtggcaaatggggagcgacccacatctctggccatattctccagggctctcaccttttyggttggctacctgtattcaaaaacccaacaagcttgtacactgatagatggaaaattcaaagagacaaacagtaaaacaaataggaaatcaaaagctatcactggggggaagaaagaatgataataaatgggtaccccaaagtcaaggaacatacaaataatttaaac

SEQ ID NO: 368731 - DNA, 442 bp, Homo sapiens
tcaggagcctccaaaaatcctgccaagcccatcccgcagcgtgccaccacctggccagcttgtctttcgtgaaaaagaaatgcatatcggttttgtttaacccaagtctactacttctggggacagaaggagtgattaactctcctatatgtgacttccaggttagaagactaaaacagttccagaatgactcacagttatctataaagaccagatgagaataaaagaatakatatcttaggacacaaaggggacaataatgtcctaaaatgacagaaggaattaatgtttaatttttcaagcctagttaatagctgaagtaagagcaatatgttttttctttatttatattggtattcgcatattaactattcccatgtgaatgaattgatgtgtttcttacagtttgtcactgtaatagggcagctgttttgaatgatat

SEQ ID NO: 368732 - DNA, 511 bp, Homo sapiens
ctttggttgtatgtctaggggaggttcattaacctcttggtgcttcagttcctcatctgagaaacaaggtattttagtgagttctggctgtcataacaaaaccccataggctgtggacttaaacaactgaaatgcgttttctcagagttctggaggctggaagtctgagatcagggtgccagcttggttggtttctgatgaggactcttcctggcttgctaacagccaccttcttgcttaagggtctttctggcttatgggaagggacagggtgagctctccaaagtctcatcttataagggcactaattctgtcatgggcacctrtatttaatccattttcacactgctataaagaaccactgggtaatttatgaagaaaaaaggtttaatggactcatagttctgcgggcttaacaggaagcatgactgggaggcctcaggaaacttacaatcacggtggaatgtgaaggggaagcaagcaccttcttcacatggcagcaggagagaaa

SEQ ID NO: 368733 - DNA, 571 bp, Homo sapiens
cagtaacttgcccttgtagcagttcttttattttctgtgrtaattgacttacatgttttttgactttgagaccttgtaggatttcaagttcactttcctttcttttccttcctttccctttccttcccctccttcctatccctttccttcctctcctttttgcttcctgtcttccatcagtttcttctttcaaaaaaaatatgtgttggatctctaacgggaggcgggaaactcgctgtactctggggatgcagcgcagagtccactgggatgcgtctgcaggagtgcgcagcagtgagcaacgtgactgagtaaaattctgggaggacacataagagagggagttacgtttgcctgtgtactctggaaagtttcaagagcctaatacttaaaaaaatgtgtcctgaaattgcaatttatattttaccaataaagagggagtagaaagctgagcaaccggaaaagcgagtgggagtgtgcagagccggtgcgcgattctgcaaacagagctgctttccggggcgagcagctcctggcatgtctaggggaggaggtcccttttgggatgtag

SEQ ID NO: 368734 - DNA, 513 bp, Homo sapiens
gcagacctaggaagcacccagtctagctccaaggttccaggagagatgtcctcaaaagatgaaattggtagaaccagaattgtggatataattttgagacaaattgtattcaacttggggagaatttggtgttggattggtgacatatacataaaaaactaagcagagggggaaaaagattaactccagggaataaatgtggatcaggaaagtacagtcatcacagctcagctgtgaacagcgttttcagggtcaaartagtataatcactgaatattgatctaataaaattacactataactgtttggaaagatggcagatgggaagcaggggtgtcgacaggcagtggggaaaacagctaactcttcttcttctccagtgaggagtcaatacacaatgctgaaaatggaaaattcaagtagcagaaatataaatatgacatttagagatacatattttaaaaattagctaaattactaaaagtagatgcctctagatagtagaaaattgtt

SEQ ID NO: 368735 - DNA, 594 bp, Homo sapiens
ggtttattatttccagttacatctatttatttgttcaactctagcacatagaatgttgtttcaaaatcgctaactcatactctgtatgagttgcttacatgttatgtgactctcatagttcataactgagaaactaagttcacagactacaatgtagtatttgagtacagttcttctctttagctttacaatatattaatacagttggctaacaatgaattgcattgattttcagatactgattcagccttgcattcctaggataaatcccactcagttgttatttttttaaaatgtattgctggatttgacttgttagtgttgttttgaggatttttgtrtctgtgttcaggagaaatattggtttatagtttcttttcttgtaatgtgcttctctggtttgggtattagaattacgctagcctcatgaaaaaaggtaaaagtcttccatgcttttctatgttctggatgagatttgtgcaattggtattatttcttccttaaatattaggttgaaatgaccagtgaagccatctgggcctggagttttatttattggaatgtttcaaactatctgtaacagacaaaggacct

SEQ ID NO: 368736 - DNA, 610 bp, Homo sapiens
aattttgtaattgccttactctattaccgacacggcatctgctcaatgctctgagacctyttcctctcatcactgaattttgcatttaatttgcataatgtgtcaaagaaagaaaataatggatctggctgaactttcaactgaagtaaatcatggggaagcaatgcagaagcagacatctctctagaaatgcattaaaatacaagggaagtcaacaaggagtcttaaaatgctcatttccaagtactgaaattgcattttttcaaacttttacatgaaagctaaaatgttagtcctctttttaaaatattctttcaaaagcttatatttcaaagaaaatgagtattagtccttttttttctacaacccacccacttggtaaaaggcactagataaggccctaagcatcacagatttggaaatacaaggaatgggatgatgaactaacttcagcattgattatgtcacatacaagagtcctggttgcccaaacaatctcttcgtcatctgccagcttctaaatcttattcccgaatttagattcatgaaatgccccgcaagtgtgcaaagtcagcaatcagccgagagcctacaccaagtgcaccacctt

SEQ ID NO: 368737 - DNA, 414 bp, Homo sapiens
actacttaccttattgatatagttttcattacaaaaatcaggctggtggcatcaaacatgtgggccatggcctcactccaaactgctgaagctcatttgggatcacaaacgatttgctaaagcctcaccactgctgccaagacagggagattgtactgaaatgtacatttcagagccaaatttagtgctttcttggctacgaaaggtgaagccaggacagcagaaaggaaacctaacaatgggaagacaggaccctggagtaacttcaggaaaaactaatccaagtaagaaggcrtgggatgtgcagttgccgcttgttttgggatacatgtaattcattttttaagttattaactacacacataaatacacactcacacatatacctgcataaacatagaacacgattgtggt

SEQ ID NO: 368738 - DNA, 604 bp, Homo sapiens
ataattaagattagaaaaccaaagctggaaaggctggtgtagtagcttcctagttagagagagagggcagaacaggggaaggagggaaatgactgaaaaagaaagttcatttgtctttatgatgttaccaagaggaagtagtttgaagtgttagttttcatctttttcagatgagttgagaaaaccaatttaactaaattaatgcaattaattagtggtgacctgaaatgcaatatatctacctatgctttcacaatcaaaaagcatttgttatgcttcacrtattgacacaagtgatctatccacaacactgcaaatttcctctgcagatgagcgttttcaaatgtttgccttacccaatatttcaaactttcccccactcaaacaagctaaaaattacaaagaacaaaggaaaacaaaactgcaagattttaaatttaccttaggtgtccaaatacttatggatttttatttacttacttactattttttcaaatacaggtgggatgttgctatattgcccaggctagtcttgaactcctgggctcaagcaattcgcccacctcggcctcccaaagtgctgagattacaggtatgagcaacc

SEQ ID NO: 368739 - DNA, 578 bp, Homo sapiens
gtaatgtgaaatctaaattttacatcatgaacctagattaccgttacatcctttaatgaagaaaaaattacactaataacctgaaaaatcaataaaacaataaagaaatagcttttataacctagcatagaaaaatgaaaacctaatttcttttattatttaaatattacaatatgttttctttatttaatatatgatgttaacatatttaaaaaactaatgttgccargcacggtggcttacgtctgtatcccagcactttgggaggccgaggcgggtggataacttgaggccaggagtttgagaccagcttggccaacatggtgaagctccatctctactaaaaatacaaaaaattagtcaggcgtggcggctcgtgcccgtagtcccagctacttgggaggccaaggcaggagaatcccttgaacctgggaggtggagtttgcagtgagccaagattgtgccactgcacactccagcctgggtgacagagcgagactctgtctaaaaaaaaaaaaaaaaaaaaaagctaatgtcaagtaaatataatatgcgcagaatttatattttgtgtgatt

SEQ ID NO: 368740 - DNA, 577 bp, Homo sapiens
cctgtccacatctaaggttagatgacgacccctctactttactattagatgtgccaaggatcagcagctcctgaaatctttttcctgtgcctgtgtgggggaggggattcacggcgtggaaggcctgggacagggaagaaaggagctgtccctgggttatcaggaaagggaccaaacgtgggccccacatccacctccacgcctgagttaagaatctggagctgactcctcagaatggctgtaattggtcctttactcatttccttggagaagcagcggtcaacttctactaraactcccggttgataggcggcttccctgccctgtcttccggagcacttacgttaaggcgaaatcactataatcaaatctctacgtcttgcctgctgctaaaacaaggcgctttcttcctgggattttgcagggacgactgatacacacacggtctccctacacacaagctcgcacacaccgacacagtgtaactcccacagcgtcctcgctccttctccctccctcacccccttgtctctctcaaggattgctgaacattttgctccaaactctccaagtcacc

SEQ ID NO: 368741 - DNA, 577 bp, Homo sapiens
cctgtccacatctaaggttagatgacgacccctctactttactattagatgtgccaaggatcagcagctcctgaaatctttttcctgtgcctgtgtgggggaggggattcacggcgtggaaggcctgggacagggaagaaaggagctgtccctgggttatcaggaaagggaccaaacgtgggccccacatccacctccacgcctgagttaagaatctggagctgactcctcagaatggctgtaattggtcctttactcatttccttggagaagcagcggtcaacttctactaaaactcccggttgataggcggcttccctgccctgtcttccggagcacttacgttaaggsgaaatcactataatcaaatctctacgtcttgcctgctgctaaaacaaggcgctttcttcctgggattttgcagggacgactgatacacacacggtctccctacacacaagctcgcacacaccgacacagtgtaactcccacagcgtcctcgctccttctccctccctcacccccttgtctctctcaaggattgctgaacattttgctccaaactctccaagtcacc

SEQ ID NO: 368742 - DNA, 629 bp, Homo sapiens
ggagttatagatgagagaaaattgattcttgaagaaagattacttattctaattcttcactcaatgaaagaatcaaagagtaagagaggtaaaatgttttgtcscaaggtgtagcaaacactgttggctgactaatcccacacctattccccaaattattgtctcttactcattttcaacatagagtgtgggaatgctaaaaactaatttccctagtttctcttgcacttggggtggccactgagataattctagcccatgagaagtaaatgaaggacagtggggacttctaagatatctttgctttcttgatgaagaaacagggtggctattgctgtctctcattctgcttcttgaactggaagtggatgtgagggaaggagttactgtagtcattttgtgaccattagagaagcactgagatgctgcctctaacattgtattgaaccaaggccagcatctgactccttttagacttccttatttgttttaaaagactgtcagtggggttttcttgcagccaaaagcattcctgactgacacacagatattacagaaagtggcaaagtttagattaattttatatttcctaatgctcaggcaggtagatttttcattacatatactaa

SEQ ID NO: 368743 - DNA, 665 bp, Homo sapiens
acagcttgtacacatataataatgtcaccaaatgtcacttaaaataatatttttctttttaaatgttaaaatgattcttttcagttagtctaacaaaagcttttttaaactcacattcacattttcaaatataaagtgagtttcagtagtaccwgtgtttcattgctaaacttttgaattctgcttttttccttaatgataaaactagcatcacaatgattacttctcatctatattcataaatgtacctaatggctacactggccaaatagctaacataatttcaatttctagaaaacaacatttctagaccacatcctccccaaaatattttttaaatgatttcttatattttttgctcacatttcactaattgtataaaaaatataaaatttatttatttatttttttacctcaggaaacatatggtgtaaatgcttaaggaaatgtgagtcatgtctttgatgaggcaactactaaaaaatcagttccttctgctacaatataaatagcatgataagccctatcaaaggtcaaaatctaattttaaaatacgtatttcaagaatttttattttagccatcttgccatgaattagaaatatggtctgttcagtggccaactctgacattttctagtgcacttgcttttcagtttttggagca

SEQ ID NO: 368744 - DNA, 589 bp, Homo sapiens
attttgtgggtaacagggcaacatgttacagaataaaaattattttggaaaggcagagcaagatgaccaaatagaagcctccaccaatcatcctccttgtaggaatacaaaatttaacaatgatccacacaaaaaggtaccatctaagaaccaaaaatcaggtgagcaatctctgtacctggtttaagctatatatcagtgaaaaaggcactgaagagggtaggaaagaaagtcttgaatggccgatgccacccctcccccatgcgtcagcagtggccacgtggcacagagagtgaatctttgtgctcgggggagggagagtgcagcgactgggggactttgctttggaactcagtgctgccctgtcacagtggaaagcaacactgggcagaactcagctagcgccagtggagggagaatatagaccagccmtagccagagtgaaattgcccattccagcagtcagaatctgaaatccagcaagcctcactgccataagttaaagtgttctggggtactaaataaacttgaacgacagtctaagccacaaagactgaaattcctgggcaagtactgatgctgggatggg

SEQ ID NO: 368745 - DNA, 657 bp, Homo sapiens
aaaactataaaagagactacatggtcactatataaggataaaagggtcaattcagcaagaagatataagaattgtaaatatatatgcactcaacactagagcatccacatatataaagcaaatattattagagctagagagagaggtagaccccaatacaataatagctggagagttcaacactccactttcagcattggacacatcatttagacaggagttcaacaaagaaacatcggacttgatcagcatgatagaccaaatggaactaatagatatttacagaagatttcatcaatggctgcagaatacatatttttttcctcagcacatgaatcagtcttaaggatagaccacatgttaggccacaaaataagtcttaaaacattaaaaaaaattgaaataatagaaagtatcttctctgaccacaatagaacaaaactagaaatcaataagaggaattttggaaactaaacaaacacatagaaattaaacaatatgctccygaatgagcagtgagtcaatgaggaaattaaggaaattgaaacatttcttgaaacaaatggttatggaaacagaaacataccaaaacctaacgggtacagttgcaagcagtaataagagggcagtttataccctatatcaaaaaaagaagaa

SEQ ID NO: 368746 - DNA, 456 bp, Homo sapiens
acagcatggaaggccagacgatttcacgtggttttatggggctgactgtgggagaatgaaaggaattgaatctggagaaattgacaggaatcagaacacagagggcctgaatgtcaagaagagaagtttaaattttatcctgaaggcagcagggagccatcgatggatactgagcaggaaagtgacacagcaggtctggattttagaaaatatgaatcttaccttatgtacatctcctccctgttgttatctttgtagaaattctaggtaggggaggaaaaacaatgatgagtgttgttctctgcaatatcacagcggtcaagggtgtggtgatgaagatgagaggaagattgctgtctagtrtctgggtaccctgagataggaataagaaacttattttcctggatgccccaaagatgcatcaaacagcctaattggaagattctgctttgaaag

SEQ ID NO: 368747 - DNA, 601 bp, Homo sapiens
taatgataaaaactctgatgtgggtgtggtggcctccatggctccacgtgccccagcttgtgctctgatgaccctcataagccccctgtgagggtgcttatttccccaacttaggcctggtgatgctaggcctcacagcctgtaaatgtcagagcaaggcccaaagcaaagawgtggcagtctgttctgggcttgggtccttggctctgccttggggctttgtgaaccaacctgcaacctccctgttatccagcatgtacttctcttagctcgagtctgatgctatcagcaaccacagaacgcagactgatcatctatccactgctctatgcttcccccacagtggatagaactcgctggaaggggcatgcaactgctgcctaaaaaacccatgggaactggcagataataagaggtctggggaagcaagaagcgtagtctgaagagggaacaaaaattaaatccaagagatgggcacaagttagtacttgcaggaaagtcaatatccacacccagggcagagcaatttagaatcagagagtcaaggagggacagaaaaataaaaaattcattactgttcgttcatccatccacccatcca

SEQ ID NO: 368748 - DNA, 508 bp, Homo sapiens
tatgatggctctctgtgagcggcaatgagccctcgtctgtcctgcctgggcaacagggttcacgagagtcatgtcttggggtatttggggctgacatggggatggcttcttcatgctgagcatgggctttgtggaagtctggctggctraggcattagccaggctgaaggtggtcttggtgctctgcggctttttggcttctgatgtgcttgtctgaagaaatgtagatcaatacccccctctggcggccgtctctttaaaagcgggaagtagattgcagggcttgggtgaaatttcagggcaggcaagagtcttctctcggttcctttaaggacaggagacagagagatttcagtgtcaggttcccgggagaaacagtcgcttagagaaaaagaccttactcctgctgcagtgggaatagtgagagctgggttgggaatggggaaaggtgtcttagaaggcagcccagcagcaggcagactgacctgagtcagaatcagactcctcc

SEQ ID NO: 368749 - DNA, 594 bp, Homo sapiens
tttaccgctaggaatatttgtgatgccttctattccactcaaatattttagctctctgacagaactcttaaaagctgtttgtttacattgattaatacttggagttgtcatgatcaaatacgatttattgctgtctaaaggtgagcccacaccatcttttacatttgataagctgagttgagaatatatagcaaatgcagttcaataaatcaattcaggtttgtctctttctagtttagaaattacgatcatggattttagttaatttgctatattttcattttcatataagaattaaatgaatgagtattcrttgttttcttgacctggctctgagaagacaggatagaagatttttttttttttttttaagcagggttctctcttactgttggaatattccctttcgagtatcatttttctgaagactgatgctatcctcattagagtgctcaggagtgcacctattggaaacaaacaagtagcgttattgtcaagtatgtttgcatgtagtgctgttggtggacacttcatggcttctataggtttctactctccagaattttctgtgtgaaagcttttgcttgtcagtga

SEQ ID NO: 368750 - DNA, 586 bp, Homo sapiens
tggtagtcacaggctgtaaaggtgtctcccacattcagaaagccaggtgacctcctggctatagagcacaaagagatctttggagttttatgagtggtcagatctcaagtcctgctggaggaaaggtcctgattccaacatcaaattatttgaatccagtggtgaactgaataactaaagctttaatgaagcccagacacaactaatctatagattagattgactcagcccctcatattggtggcatgacagaagtaggatgtgccttattcggcgggtaaatattacttaggcttcactgttggcttacacacaatgttgagtacacaatacaaaaatttaagtcatgccaagtggtaagaaaatttgacccatagtcaagaggaaaactggtcaacagaatcagatgcagagacggtcaagtataaaatayatcagatcaggactttaatagtgctgtgataaacacaccaaagagtctagtggaaaagattaaaaacaatgttttatttagttttggctatttttttctattgtgtcatataaatagttagcaacataggactggctacttttgcttaatgtc

SEQ ID NO: 368751 - DNA, 515 bp, Homo sapiens
atggtagaagacagagcaaaatgtattggcaaggagaaaaaacaggttatccaaaatgcagcaacatgtctctctttggcaaaaaaagatttccctacaaagaaagaaattataaaatcctctcctctagtctctcctgccatagccccttggctttctatctatgcccttgtgtatttgtgtgcctgtgcttcaaatctgtatgaatcagggctctccagagggacagaaccaataaaatacacacacacacacacacacacataaagagagagagagagaggtgtgtgtgtctgagttatcagggagaactggctmacctgattacaatgatgaagtttcacaataggctgtctgcaagctgggggatgagaaaaaaaaaaaaaaaaccatagtgtggctctgtccaagtttgaaagcctcaaaaccaggtaagctgacagtgcagtccccagtctgaggccaaaagtctgagatcccccgggaggtgactggggcaagtcccagaatccaaa

SEQ ID NO: 368752 - DNA, 562 bp, Homo sapiens
gtggctctgtccaagtttgaaagcctcaaaaccaggtaagctgacagtgcagtccccagtctgaggccaaaagtctgagatcccccrggaggtgactggggcaagtcccagaatccaaaggccaaagatcctggagtccgatgtccaggggcaggaggagaaaagacatctcactccggaagagatagtggaaaaggaagctaagcaagccaaatatcccccttcttttatttgctttgttctagctcactggcccaattggatagtgcctgctcccagtctgctgactcacatgccaatctcctctgtaaacaccctcacagacacacccagaaacaatgcatcaccagccatctagacatccctcaatctagtcacaatgacacctaacattaaccatcacattcacatttgaataaaaatgtccccgcattctggtgataaggcaatcccctacacaaattcaggatttcctccaattcatagtattttggcaacttcacagatgtaaaagagacctggctatagttcagcaatagaagaagagaaacactgcctaata

SEQ ID NO: 368753 - DNA, 556 bp, Homo sapiens
ttcttctggaatcccaggaaggaagactggaaagacarcacatctgacccagtacccatgtgcaagcactcggtctgtgccaagcaaatgcaaagatgcagactttcatacaatcatacactgtgatcatttatcaatctccttgaggattcatagtcaacacaatggcatagtttaccacaggcctctgcccttcagaactcaaccagtctcttggcagctgcttctagaatgggggttgggggtgcagtccaccacgagagctttgaggcaactgggcagcttcaggcacctcacggcttctccttctgagataattcccaccacaacaaacctgtatgcctacaggagtggcgaaggtagccaccatcccagaaataaatggtgcataccatcggggttaaacccagtgctgaagatttgtaaattccatttcctgcaaagtttctgggggagaaaagtgggtggggctgtagagtgcaaacataacaacattcacgtacctcagaggacggtggaaagaaatggctaataaaaattattacaaatcacttca

SEQ ID NO: 368754 - DNA, 491 bp, Homo sapiens
ctacatttttacttacagtgctttataatgagactcaacttttacatttcttgggccatatttaccagcaattctgaccatacagtgagtaggaaaagtaagtaaggtccatagaccagtagcctcagcatcacctgggtgcttcttggaaattcagtgtcttgggccccaccccaaacctactgaatcagaacctccatctaatcagatccccatgcaactcytatgcacattccatttgagaagcacacaaggtcctggcaaaaaaaaaaaagatgtcaacctcagatggagtgaatggagaggtgacaatgaagggatggcttagtggggtgtggcaagaggtagatgaagaaagggatgggaggaacctttggactagcaatagctgcagtcattacaaccactggggctgaagggatatacaggagaaattgtgatacccgagtccattttgcactggagtcctggaggaggggcagcctggtgaa

SEQ ID NO: 368755 - DNA, 549 bp, Homo sapiens
aggcacagtgtctttgggtcccttccaggccaaacctgagagcactaaagagggttgggggaatggcatcttaatatacttcaattaactattgtcctgaacttggtgtcttcaatcaaataaaggtgagtacagcaagggaataaacaaccagattagtcaagcaacctagatactgtctttgccgctgactatgagacacagaaacctctgtgtattgtgggtgaaatcaatcagagtctggtggcattgtcagctggagtcagctctgtgtccaaacttggactgtatgtctagaatctgtgtcttaatgtaaattggcttatggctccgtctccctygggcataagcttccatcgtccagatggcagggtgaccccggtggaaataaacatatggtaggctatatctgtcgctcacagaggaagaataagtacactgtttgtaagagccattaaacaggagtcagtgccacaaacagtggacatctctaacaatagattaacaggaaagtaaaactttgcggtaagggctattgataactgggga

SEQ ID NO: 368756 - DNA, 572 bp, Homo sapiens
ctcctgggggtacctgcgtcttccctgagagtggaattttgcctggtactccactagactgtaatgtgcccagatcacacacttcccagcagcaggtgcaatgctggcttgttcccaagaggctgctcattccccatgcactagacttccatctggcccaagccaccagcctaagccaagagaggcctggaccctgcaaatggatggcagaaaacccaggctcaagctgagatcctctgcacaggcatggtctctggttcctgattttgaaatagtaattggaagacctggctgccggccctctgctgtcygttttctttctgattatagggctcaccaaactcttccgagagaaaaagcatacattttgaaatattgagttttgactctctgtgaaggcctgcagagggatgtcagggatacctgaatggttgctgtctgttgcctttggcctctgctgtgtcacagctgtaaccctgcttgggcattacctgaaaaatctcagaagcgtagtcttctacagatttctggctatcttccgacagattcagaatttagtgtgatctgagttg

SEQ ID NO: 368757 - DNA, 594 bp, Homo sapiens
aagaactccctgacttggaaacactcaagtttcccacacatgactggatggccctggycacactgggaacggaatgggggcctcccattggaactcagggtggagggggaagctcgaccagctattgtggcccccacttccattgacaaagtaagtgttgcagacgtgggtgggtgggatacagggtgtgggggctggttagtgcctggcatctggaattaaaacctaaacacatttccctttagaaacaatattattcacgagggccaaaagcccactaacccccccaagagctgaacgctacggtgtaagttctattagtgatttttaattctggctgtgcattaaaatcacctggatgtgctttaaaaccctgcatgtgttcctccagcagaggttctgattaaactaatctaagcaagaacccaggcatgcgtactttttaagtttcccttggccatgcgcggcggctcatgtctgtaatcctagcgctttgacaggacgaggcaggtggatggcctgaggtcaggagttcgagaccggcctgggcaacatggtgaaaccctgtctctactaaaaatacaaaaattagct

SEQ ID NO: 368758 - DNA, 594 bp, Homo sapiens
aagaactccctgacttggaaacactcaagtttcccacacatgactggatggccctggccacactgggaacggaatgggggcctcccattggaactcagggtggagggggaagctcgaccagctattgtggcccccacttccattgacaaagtaagtgttgcagacgtgggtgggtgggatacagggtgtgggggctggttagtgcctggcatctggaattaaaacctaaacacatttccctttagaaacaatattattcacgagggccaaaagcccactaacccccccaagagctgaacgctacggtgtaagttctattagtgatttttaattctggctgtgcattaaaatcacctggatgtgctttaaaaccctgcatgtgttcctccagcagaggttctgattaaactaatctaagcaagaacccaggcatgcgtactttttaagtttcccttggccatgcgcggcggctcatgtctgtaatcctagcgctttgacaggmcgaggcaggtggatggcctgaggtcaggagttcgagaccggcctgggcaacatggtgaaaccctgtctctactaaaaatacaaaaattagct

SEQ ID NO: 368759 - DNA, 581 bp, Homo sapiens
tagctattttggcaaacaggagtggagtttagctattttacttatcaattccttgttaacttttgttagaagtttccatgacttaaaatggtttgaaaacccctggaggagatagtctctgaggttcttcctgtctttaaaattttatgtctcttctaagtgtacttcgggtttcattattaaggtacttcatagaggagctgtttaattgatgaaagaagacatgaaggtttgagttgttcaagaacaaaccaaggtttgctgtttgtcacagttgcagattcaaatgcctttgggatcaagcaggtaatctaaaggaggaatgactgtgtcatgggctgagtgtgtctcctccaaattcacatgttaaagtcctaamcctagtacctcagaatatgactgcatttggagatagggtcttgaaagaggtaattatgttaatggagattctttgggtaggccccagtctgtataactgatatccttataagaagagggaatttggatgcaggcacgcacagagggaagaccatatgaagacacggggagaagagggccatctataagccaaggagagaggc

SEQ ID NO: 368760 - DNA, 590 bp, Homo sapiens
tcaggggaaggtaccacctcaagaaaactgaaggaaagtctgtgggaagtgaaactttgcctgagagctatagatatacaaacctgtcctacaactgtaaatctgataaagagattccaacacactgcatgtgaccagacaaggggtgagaagggccagagaaaatcaactkttcacaaacctaccaagaaacatcaaggaagaataggaagaaacttacaaaatcctaatgtgagactaaagagaaggcttcctattgaaaatattaagtttttttctatagattaatctataatttaatgccatcccaataaaaatcttaatggcattttatttggaatttgaccacataattctaaattattcagaagaatgatcatttaagaatagctaatatatttttgaaaagaataataatgagggtgtctttttgccttatcagaaaattaaaaccatcttaaattcataatgattgtaatgtatatagtatcagctcaggaataggcaggtgggctaatggaactcaacaatttaagtccagaacatacccaaggctatgtatgtatgtacccttgtgtatttgtgttgtt

SEQ ID NO: 368761 - DNA, 584 bp, Homo sapiens
cggggggtgctggtggtagtcactgaatagaggaagggcagagaaggaaaactggtagaactcagttttgctttgactgatgtgagcaattaaatgttgcccccagccctgaaaaccctactctacaaatccaaaatcctttagttagcagaatctgttctcctatgaagacaacagagagacatatgttgttatttgaacatgctctcagagggctgtgcagtcccacccatgagggaaaatacagttttcttggttattttgtttttagtgattttaagagctcctgtggtatcatatgttgacaccaaggaaaggtgttttattgacccactctttaccagggcccacattctgtgtgagccaagagaagtggacaaacagyggcttcccctaccccctacttcctctgccccctccctgggttggggggagcaggaagcaatagacagcatgtctgggcggtggggagaggtgaagggatcagggaggtctgtaagagacagggtcacacagtgtggcctacagcagagcagaaaagacttgatctgggagaaattgatctgagagggaggttgcagctc

SEQ ID NO: 368762 - DNA, 606 bp, Homo sapiens
ctacttctggagaaaagggctaagggaaggtgatagtggccttcctgcttttgctgttttctcaaatgccaaagtgtcatatttgatgttcaaagatgtgtgcartctttgactttccttagcacatagaagcatctccccaacctctgcttttgtcttcctcatggtgttcttcctgtgtgtgggtttgtccccaaatttccccttttcataagaacaccagtcatattggattagagcccaccctagcgacctcattttaacttgatcgcctctgtaaagatcctctctccaaatacatcacattctgaggtactaggggtaggacttcaacatatggatttgaggaagacacaattcacccctccgcagaagtcggggtcacatggtgggtaggttaataagccagtgctccacaggagtgggaaggaaaacactcccaagactggaggctgccaagagaacggctccgatgtgtttagatgagggtgggtcaaacttcagcagaagccagggtagcaaggccacactcaggcttctgctggcacctagcatgagtggtcaccgaatggctcccctcttttcctggcaacgcctgggcccctg

SEQ ID NO: 368763 - DNA, 606 bp, Homo sapiens
ctacttctggagaaaagggctaagggaaggtgatagtggccttcctgcttttgctgttttctcaaatgccaaagtgtcatatttgatgttcaaagatgtgtgcagtctttgactttccttagcacatagaagcatctccccaacctctgcttttgtcttcctcatggtgttcttcctgtgtgtgggtttgtccycaaatttccccttttcataagaacaccagtcatattggattagagcccaccctagcgacctcattttaacttgatcgcctctgtaaagatcctctctccaaatacatcacattctgaggtactaggggtaggacttcaacatatggatttgaggaagacacaattcacccctccgcagaagtcggggtcacatggtgggtaggttaataagccagtgctccacaggagtgggaaggaaaacactcccaagactggaggctgccaagagaacggctccgatgtgtttagatgagggtgggtcaaacttcagcagaagccagggtagcaaggccacactcaggcttctgctggcacctagcatgagtggtcaccgaatggctcccctcttttcctggcaacgcctgggcccctg

SEQ ID NO: 368764 - DNA, 606 bp, Homo sapiens
ctacttctggagaaaagggctaagggaaggtgatagtggccttcctgcttttgctgttttctcaaatgccaaagtgtcatatttgatgttcaaagatgtgtgcagtctttgactttccttagcacatagaagcatctccccaacctctgcttttgtcttcctcatggtgttcttcctgtgtgtgggtttgtccccaaatttccccttttcataagaacaccagtcatattggattagagcccaccctagcgacctcattttaacttgatcgcctctgtaragatcctctctccaaatacatcacattctgaggtactaggggtaggacttcaacatatggatttgaggaagacacaattcacccctccgcagaagtcggggtcacatggtgggtaggttaataagccagtgctccacaggagtgggaaggaaaacactcccaagactggaggctgccaagagaacggctccgatgtgtttagatgagggtgggtcaaacttcagcagaagccagggtagcaaggccacactcaggcttctgctggcacctagcatgagtggtcaccgaatggctcccctcttttcctggcaacgcctgggcccctg

SEQ ID NO: 368765 - DNA, 519 bp, Homo sapiens
aaccagggaggtgaaagatctctacaaggataactacaaaacactgccaaaagaaataatagatgacacaaagggaaaaacattctacactcatggattggaataatcaatattgttaaaatggccatactgcccaaagcaatctacagattcactgctgtcttattcctatcaaactaccaatgtcatttttcacaggacctgaaaaaactattctaaaattcatatgaaaccaaagaagagcccaaataaccaaagcaacgctaatcaaaaagaacaaagccygaggcatcacattactcaatgccaaactatactataaggctacagtaattaaaacagcatggtagtggtacaaaaacagacacagaccaatggaacagagtagagaacccagaaataaagctgcatacctatagctatttgatctttgataaagttaacaaaaatatgtagtggagaaaggactccctatttaataaatggtactgaaatagctgcttagccatatgtaaaaga

SEQ ID NO: 368766 - DNA, 613 bp, Homo sapiens
cctgattccatccaaagccagtctcattcctagaatagctaacaaccacagctaaatatttcccaagtaaacccagctaagaatagttcyttatttcgagagctctgacacaagaaactcaacaccctgttggagtcagataagctgaacttttttcaagagctttgtcaaagtgagactgaggaggatggagcctgagaaaaatccagactgagccttgttagactttccacatcacctataaggtggtatcgagtgaggctgcattagactcaaagtgcctttaggcatgactagatgctgaactgactgtcagtgccttgggcaccaaaaagattgacattaactctgaccaacactcacattaaacattcattcttaatattttgcagttcttaaatgttagtactgtctgacatctctcccacttgttctactaaaagttgctggaaagccgaagctctgttttgcttctttaagccagaaagacatgtttatttcttaagaggttcaatttatgagggcttattattagtcccaaaatatattactggtttgccattgatatggtactggatctccttttctttcttttttctttttttttgagaca

SEQ ID NO: 368767 - DNA, 613 bp, Homo sapiens
cctgattccatccaaagccagtctcattcctagaatagctaacaaccacagctaaatatttcccaagtaaacccagctaagaatagttccttatttcgagagctctgacacaagaaactcaacaccctgttggagtcagataagctgaacttttttcaagagctttgtcaaagtgagactgaggaggatggagcytgagaaaaatccagactgagccttgttagactttccacatcacctataaggtggtatcgagtgaggctgcattagactcaaagtgcctttaggcatgactagatgctgaactgactgtcagtgccttgggcaccaaaaagattgacattaactctgaccaacactcacattaaacattcattcttaatattttgcagttcttaaatgttagtactgtctgacatctctcccacttgttctactaaaagttgctggaaagccgaagctctgttttgcttctttaagccagaaagacatgtttatttcttaagaggttcaatttatgagggcttattattagtcccaaaatatattactggtttgccattgatatggtactggatctccttttctttcttttttctttttttttgagaca

SEQ ID NO: 368768 - DNA, 545 bp, Homo sapiens
aaattctcccacttttgtcagtcctgaaacatgcaccagggctcctcagtcaccagagatcagctggtaacttttaataatacttaattgtggctaggagataatagaagcaaaccagagtaaattaatgattcttgctaaaatktatcactccaagagtccgcaggtctgaatatgacctcagaggtgcttcctgggccagctccctatctggctcctgccctatctccacactaatccccatgccccagagttcactagccctagaaagaaaatagcatctttttgtcctccaaatccaaggctgtcttgtatttatccaaaagtagccttttcctaggatattgagctttgggagtagccattcccttggagttgcttaactacccaagcatttgatctgacgtcaaagactaggccagaaaccctgtaggaatccataagtttgagaatgtatttttcaaagtgtggattagtcaatctgagataacaccaaatgtaggataccagtaatccagcctagcaagtcttataccagcttagtc

SEQ ID NO: 368769 - DNA, 545 bp, Homo sapiens
aaattctcccacttttgtcagtcctgaaacatgcaccagggctcctcagtcaccagagatcagctggtaacttttaataatacttaattgtggctaggagataatagaagcaaaccagagtaaattaatgattcttgctaaaatttatcactccaagagtccgcaggtctgaatatgacctcagaggygcttcctgggccagctccctatctggctcctgccctatctccacactaatccccatgccccagagttcactagccctagaaagaaaatagcatctttttgtcctccaaatccaaggctgtcttgtatttatccaaaagtagccttttcctaggatattgagctttgggagtagccattcccttggagttgcttaactacccaagcatttgatctgacgtcaaagactaggccagaaaccctgtaggaatccataagtttgagaatgtatttttcaaagtgtggattagtcaatctgagataacaccaaatgtaggataccagtaatccagcctagcaagtcttataccagcttagtc

SEQ ID NO: 368770 - DNA, 545 bp, Homo sapiens
aaattctcccacttttgtcagtcctgaaacatgcaccagggctcctcagtcaccagagatcagctggtaacttttaataatacttaattgtggctaggagataatagaagcaaaccagagtaaattaatgattcttgctaaaatttatcactccaagagtccgcaggtctgaatatgacctcagaggtgcttcctgggccagctccctatctggctcctgccctatctccacactaatccccatgccccagagttcactagccctagaaagaaaatagcatctttttgtcctccaaatccaaggctgtcttgtatttatccaaaagtagccttttcctaggatattgagctttgggagtagccattcccttggagttgcttaactacccaagcatttgatctgacrtcaaagactaggccagaaaccctgtaggaatccataagtttgagaatgtatttttcaaagtgtggattagtcaatctgagataacaccaaatgtaggataccagtaatccagcctagcaagtcttataccagcttagtc

SEQ ID NO: 368771 - DNA, 589 bp, Homo sapiens
taggtcaggggtagatctttaacaaacaggcccagggtgtggcgcygggctgtctgtggatttcatttctgccttttagttttttacttctcctttctttggaggcagaaattgggcataagacaatatgaagggtggtctcctcccttaaccttaggtacacaatacttgggcagccatggaaggctatgtttatcaccatatatcaattggcccagataaagctcttgacaccagtacagcatttccaataattagcgtttccaagctatttctatcattttgtacatctggttactattcaggggtaaaacacaacaaaaaaaatctatgtcagaagatttttcttgtcaagtttctatacaaggaaatgattctttgggtgtctacagtagcatcctggaaagcatgccactggtacattttaaataagatcttttgttgcaagatgcttttatctgcaagaacagtaagtagctgacagcttatgaagagtctttaagcagtccccctcagttttcatcttgccaccagactacaaggttgaaatagtgaatggaagagactatcatgcaaaaactccactgcg

SEQ ID NO: 368772 - DNA, 589 bp, Homo sapiens
taggtcaggggtagatctttaacaaacaggcccagggtgtggcgctkggctgtctgtggatttcatttctgccttttagttttttacttctcctttctttggaggcagaaattgggcataagacaatatgaagggtggtctcctcccttaaccttaggtacacaatacttgggcagccatggaaggctatgtttatcaccatatatcaattggcccagataaagctcttgacaccagtacagcatttccaataattagcgtttccaagctatttctatcattttgtacatctggttactattcaggggtaaaacacaacaaaaaaaatctatgtcagaagatttttcttgtcaagtttctatacaaggaaatgattctttgggtgtctacagtagcatcctggaaagcatgccactggtacattttaaataagatcttttgttgcaagatgcttttatctgcaagaacagtaagtagctgacagcttatgaagagtctttaagcagtccccctcagttttcatcttgccaccagactacaaggttgaaatagtgaatggaagagactatcatgcaaaaactccactgcg

SEQ ID NO: 368773 - DNA, 329 bp, Homo sapiens
ctttctggcgggaggtttcacaccatcctctaactctgaagggtggaggcctcttagtgaagtggcttccctctacacacagcttaggtgtcctcccacagtggcacacatgtccttggagatgcagtcactccagtgatgctggcatayggctttgtgagaaaatgttgccaacagtctttctgcctgttcagatgccatcgtaaccaaagtctaattacctccaacttgggggaccatagagcatgggctgagatggctaccaatgctgtgcttatctaacacttagaacaaagcaccacacctagactgggttataaattctgcac

SEQ ID NO: 368774 - DNA, 525 bp, Homo sapiens
cattcctaagagagcattcctcctccacaaaagccaaaacaaayatccaaagaaactgctgcgccaagtgcaaggtgaagagtcttttactcctgcttacgaagccagtttccctgtcccagagactagataaagttagggaagggtggagatgagacagagttatgacccaaaagggaggcaagcatacaggagggaagagggctcctgaaggtcaggggtgagggaacaaactcttctgccacaagaaggagggaatgaagtgcagtagaagctgttctccagtgaagcccatcagcaactcaccatctgtggaaagggaggagaccacccctcatattgtcttaagcccaatttctgcctccaaagaaagaagaagtaaaaactaaaaggcggaaatgaaatccacaagcagacatcccggcgccacaccctgggcctggttgttaaagatcaacccctgacctaatcggttatgttatttatagattacagatattgtatagaaaagcactgtgaaaatcc

SEQ ID NO: 368775 - DNA, 542 bp, Homo sapiens
tttcacgaggtctcaaacacaaagatatatttagtaaagtgtggtaaatgcaataatagaggcatgcaagtgctagggtagaacatgaattaaaaacctactctacacaaggcgttgttttctggtgtatgggggacacccggcacctgccctcggagaccttaccatctcatttgggagataacagatatgcaaagtgatacaaataaagcaaygcacaaccacttttttaaaacaggagaagcaattaagttttggggtttgtctgttgtttgtttgttttaactcaaggaagacaaatgagaagtgcaaaaccaaactagtttgattcaggaaaacaagcctaggccatagattaatgaagtagggccagagaaatgcaaattaggcacacttattggtgtttagcctggcacacagtaggcatttgagaattgttgtattaatacatgcagatatgtaatcatcaacgaatggtttgctcctctgaccattcctattagctagtaagagtaacagtttacaaggatccaccttatgct

SEQ ID NO: 368776 - DNA, 541 bp, Homo sapiens
aatttttaaaagtaccccctccaaggcaaacaaaaaatgtcaagctgtgagacgtaaataaaactgcaaactacctttttcccaactactcaactcacaactttccccaatccctctttagtgtttgcttataccggacaaattasgaaactaaatctgctagggaaggctaagttcataaggttttgggtaagtaactccaacaaccttcattgattattaacattatgggtccctccattctcacaagtgatcgaaccaagtcaacacttggcacattttcaaaattctgctaagaaatagcagaggacacagaagtattatataatatggtccctgccctcaaggagttcatagtcagattatccataccagtttaattcttaagatgactgctgtaagaaactgaagcccaacagacaacatcatgatagtttttctgttgaaaaggaagattttcatcagttgaatggacagtgacaacatttcacttttggagagaggaaatttggtcctctaaacatgaggttctatgatgggc

SEQ ID NO: 368777 - DNA, 541 bp, Homo sapiens
aatttttaaaagtaccccctccaaggcaaacaaaaaatgtcaagctgtgagacgtaaataaaactgcaaactacctttttcccaactactcaactcacaactttccccaatccctctttagtgtttgcttataccggacaaattacgaaactmaatctgctagggaaggctaagttcataaggttttgggtaagtaactccaacaaccttcattgattattaacattatgggtccctccattctcacaagtgatcgaaccaagtcaacacttggcacattttcaaaattctgctaagaaatagcagaggacacagaagtattatataatatggtccctgccctcaaggagttcatagtcagattatccataccagtttaattcttaagatgactgctgtaagaaactgaagcccaacagacaacatcatgatagtttttctgttgaaaaggaagattttcatcagttgaatggacagtgacaacatttcacttttggagagaggaaatttggtcctctaaacatgaggttctatgatgggc

SEQ ID NO: 368778 - DNA, 639 bp, Homo sapiens
tttcttcgtggtttgctccacaaagaaaaaggtctcttgggagtcaaatctgtttgaaattattcagctcaaagactgacactgtgaaattagagagaaagaggtcaaataaccttatcggtggattttcagagtaaagcatggtctggcatcatgtggacgttttcagatggccacagacactgaagagacmaaaagaattttccaaaaaagaagaatttttcttacagtaaagagatccaagtcccacccacatcattttttgttgttgttgttttgcccttgacccttcgctgctaacactgcttctaaattactgcagacacagtggaatttggaatctccattaatatttacaaagcttgccacccaggctatgacccaccctgctgtttcagaatgataaattcatctgcctctaccaggacttgagaaatcttatttcactggggaataagcataatttctgccatacacatgatgcgattatcaagtctggtttattagccagcagatctcctaaggctatttcatggcaaaaaaaaatgtattcaatacaactttggaatgactagaatatcattttctccaaaagtcttacttccttagtagccattaatgtcactaaagtacgagtag

SEQ ID NO: 368779 - DNA, 639 bp, Homo sapiens
tttcttcgtggtttgctccacaaagaaaaaggtctcttgggagtcaaatctgtttgaaattattcagctcaaagactgacactgtgaaattagagagaaagaggtcaaataaccttatcggtggattttcagagtaaagcatggtctggcatcatgtggacgttttcagatggccacagacactgaagagaccaaaagaattttccaaaaaagaagaatttttcttacagtaaagagatccaagtcccacccacatcattttttgttgttgttgttttgcccttgacccttcgctgctaacactgcttctaaattactgcagacacagtggaatttggaatctccattaatatttacaaagcttgccacccaggctatgacccaccctgctgtttcagaatgataaattcatctgcctctaccaggacttgagaaatcttatttcactggggaataagcataatttctgccatacacatgawgcgattatcaagtctggtttattagccagcagatctcctaaggctatttcatggcaaaaaaaaatgtattcaatacaactttggaatgactagaatatcattttctccaaaagtcttacttccttagtagccattaatgtcactaaagtacgagtag

SEQ ID NO: 368780 - DNA, 605 bp, Homo sapiens
cccagctaagttttttaaaatttttgtagagataaggtctcactaggttgtccatctggtctctaactcctgggctaaagcgatcctcctgcctaggccacccaaagagctgggattacaggtgtgagccaccacacctagcattagttactattattaaccacattttgcagaggaagaaactgagcacagagagatgaagtaaatttaccaaaaatatgtcatatcaaaggagtagatttgggaaggaacccaggtctttatgagtccaaaacctactactttgattattagatccaactgactcacgaaaatttatttacactccatcattttactaaataactatwaaagaataaagaagctgttttaatttgaaacagagactgtttgatggaaaaaacaaatctacttatcaagtaatgtgggttcttcatgggaaataaacatcatatccaaagtatcactattcttataaaaataatttgctgagaaggaaaaagacaagtttcacctcccctcatcacccacagtgacacagcaatttgaattagttcacaattagcccaactcagagtcagctgttattcacacttagtgtagca

SEQ ID NO: 368781 - DNA, 605 bp, Homo sapiens
cccagctaagttttttaaaatttttgtagagataaggtctcactaggttgtccatctggtctctaactcctgggctaaagcgatcctcctgcctaggccacccaaagagctgggattacaggtgtgagccaccacacctagcattagttactattattaaccacattttgcagaggaagaaactgagcacagagagatgaagtaaatttaccaaaaatatgtcatatcaaaggagtagatttgggaaggaacccaggtctttatgagtccaaaacctactactttgattattagatccaactgactcacgaaaatttatttacactccatcattttactaaataactattaaagaataaagaagctgttttaatttgaaacagagactgtttgatggaaaaaacaaatctacttatcaagtaatgtgsgttcttcatgggaaataaacatcatatccaaagtatcactattcttataaaaataatttgctgagaaggaaaaagacaagtttcacctcccctcatcacccacagtgacacagcaatttgaattagttcacaattagcccaactcagagtcagctgttattcacacttagtgtagca

SEQ ID NO: 368782 - DNA, 603 bp, Homo sapiens
taatgtgttcatttactgctcttgttaattctctaaatgataaactcctgaacctagtgctatagatggaattgtgtcccccagaaatttatcttctgaagccctaaccctctatttgatggtatttggagatgaggccttcggaagttaattagagttaagtgagtgcatgagggtagcagtcctatgatgagattagtggcattgtaagagaaagaaggagaaagagctctctctctactatgtgagaacacaagaaratggccatctgcaagccaggacgcaggcccttaccaggaagcaaatcaaatgacaccttgatcttggactttccaggctcgagaattgtgagaaatatgttattgtcactccatatatggtatttttaaaggcacctcagcagactaatacacctagtttatcatataggctggtaacatcataattcttctttttaaatcttccattacagggagaagacatcgcaagggtgctgacaacccactcagcagtgaggaagtaacagctgtgggaactttcaaaatcagagcaatgttgatcaccctgcatgtgcaaaccaaatatagtgactagtcaaatcta

SEQ ID NO: 368783 - DNA, 634 bp, Homo sapiens
gataagaatcaagaaattgccatcaaatttggcaactaggagggcaatggtgaccttggaggaaagaggagaatgggaaaatgaaagctttactgaaaaggagtcaatgggaggagatagagaaagcaatgagtacagattgctccttttcaagacatttggtagagagaaagaagggagaaggtgaagtagatggaaggattcttttagagtaggacaaatcaatttgggagaattctcagtgaaaaatgagcctgaaaaatggagattaaagctgtagtctagaagaakaataattgatgggcgatatcccagaagagctgtgagaagatgagatgcaggacttttctcccgtctattttccaaaagtaatcaaagcaaccttttggttttggttttgcccagtttagaaatattatcacaagtataattcatatacaatgaataaaatttagaaaatacagataagtaacatttttaagcatgggtaatctcattttgctaaaggtctctccaggccatctgctatctgtttgcttatgtatatgttaacatgtacacaaacaaacacactaatgcaatcatattatgcagacaactctgcagtccaatttttttcatgtaatgaattgtg

SEQ ID NO: 368784 - DNA, 622 bp, Homo sapiens
ctcattttgctaaaggtctctccaggccatctgctatctgtttgcttatgtatatgttaacatgtacacaaacaaacacactaatgcaatcatattatgcagacaactctgcagtccaatttttttcatktaatgaattgtgaaatccttcctatatcaataagcacaataatctttttaaaaaaaaaaactctagttgttatcaccttccctgcttaataaagtatttcactggccaaatactatatttagaaataaaaaatccaatctgcataatttgatctacagccctgagtgatctggcctcagcctcacctgacatcactttatgcctgatcatttgttccaaacacgctttcttgcagttcctcgaactcacaaactttcttgattctctgttcctctgcccagattgtcctttttgagactctttgcatggctaagtcctgatcctctgggtctctcttctctgtatagtcaaatgaaagtccagtttcctgaatggtgaccatggatcctgacttacctggcatagtctggttttcacctgtttttccaatataatacttaatgatgcctccttccactctcaagagtgccccagtttggataatgaattaca

SEQ ID NO: 368785 - DNA, 470 bp, Homo sapiens
tctggttttcacctgtttttccaatataatacttaatgatgcctccttccactctcaagagtgccccagtttggataatgaattacagagttactccactcatagcccctggatctttccyttcacagcagtcattgcaatttgtaattatgaaattgtctcttcatttacctatttgctgtgtgtcatttattagcccataatctcagtaacagtgggaaaaaaattggtatccactacatagatctagtccttgggctttgacccttgctaaacattggtaaacgtaggtggagcattaaatgggacagccttgataaattagactgaggggagttggggaagaggtgcaggagacagaagctgggctgaagtgacctgaggaaagtgaaaatgtgtaggaattccacagataggagaagcaattgatttttatagtcactgttaaaatttacttatctgtttctgga

SEQ ID NO: 368786 - DNA, 470 bp, Homo sapiens
tctggttttcacctgtttttccaatataatacttaatgatgcctccttccactctcaagagtgccccagtttggataatgaattacagagttactccactcatagcccctggatctttcccttcacagcagtcattgcaatttgtaattatgaaattgtctcttcatttacctatttgctgtgtgtcatttattagcccataatctcagtaacagtgggaaaaaaattggtatccactacatagatctagtccttgggctttgacccttgctaaacattggtaaacgtaggtggagcattaaatgggacagccttgataaattagactgaggggagttggggaagaggtgcaggagacagaagctgggctgaagtgacytgaggaaagtgaaaatgtgtaggaattccacagataggagaagcaattgatttttatagtcactgttaaaatttacttatctgtttctgga

SEQ ID NO: 368787 - DNA, 587 bp, Homo sapiens
gtgccaaaagttaatctttgtaaagggaaagttaacctaatgacatagttttaaatactgacctatttattcatgtacgtattattattttgattaatctttagttgcatgttggataatagttatggaaaaatattaacataagtgatgtataacaatgtttcctgtctttttaagctactcagacaaaaaaatggaaaaactcacattgtgattttataaatagaagtttttatgaaaacttttctcatttagatgttagtacyatatggagaatacggtaaggtcaggcctaaaaatcttggtatctcagaatctatattatataatagtgtttacatgaaatgttgcattatttaaggacattatttaaaattcacttacactttcttctgatactaaaactacaaaattactctaaatctctaaatgcagggccatttttaatcagtaaagaataataatatgtataaggggcaattttaggcactttcatgatagttgattacatgtatttcttctaatttttgcaagaaccccaagaaatcattttctatttcttctcattttttgggagagaattattc

SEQ ID NO: 368788 - DNA, 579 bp, Homo sapiens
gtcttacattacacatccaatgtgacagaaaatctgttcacttaaaaacttcccgcactttcacagctaccacattggcttaagccactgtcatttctcctcacaggtattatgaaagcttggttattgatctttctgcttytgttttttttttaaaatatataacagtcctaaataaactctttgagagctaagccatagtttattgctcacttcaccaaattcttccaattgctcctcatctcttttgaagtataatttcagggccatgatctaccacagatacaagatgactcgcctcctcctttaattcaactctgtctgcttgatatggtttggatatttgtcctgtccaaatctcttgttgaaaggtgattcccagtgttggagatgggacctagtgggaggtgtttgggccatggagagtggatccctcatgaatggtttcgtgccctgcctgcagtaaagagtgagttctcaatctattagttaatttgagggctggttgttaaaagagcctagcacgtcttactctcgcttgctctctctagcaccatccaagagaaggatcatgcctga

SEQ ID NO: 368789 - DNA, 402 bp, Homo sapiens
ttgtttgctttttccatatgataatcattctgttttttttaagcttcatgtgtacctgtgcaggtttgttatataggtaaattgcattttatgagggtttggtgtacagactctttcgccacccaggtaataggaatagtatatgataggtagtttttctgtcctctttctcctcccacccttggccctcaagtacacatgtrtactcaatgtttaactcccacttataaatgagaacatgcagtattttgttttctgtttctatattacttagcttaggataatggctttcagcgccatccatgttgctgcaaaaatatgattttattcttttatatggctgtgtagtattccatggtatatacatactacattatctagtctaccattgataggcaaatt

SEQ ID NO: 368790 - DNA, 547 bp, Homo sapiens
catttagctaaatgactaggcacattattgrtttcattaaaaaagaaatcatgttagttcaacattgtttcaattttagagagtttctaaattagtggatttagaaatattaaaaatgttaggtgtaacatttttgagaaatttgacgagtttttgtttgtgtctttgttattgttgagattaaaaagctctatatgaactagatgctggtaaaattgatcctgttaataatgatttaaaagacttatttaaacgctgctgatgaatggctcagtgccagtttaaggaaaagttttagagttggtgttttaatttttttgtatttttctggacatagtcattataaatgacctagatagggaaggcaaatatatagttgttaagtttgcaaataatgtaagtctaaaaattacagtgctctattgaataaaaatacatatataatataatctcttaagtagctcaacagctaaagaaagacacacagaagagggtaagtgatttcaacacagaaaaacatgctatagtggagatttgctgttattgg

SEQ ID NO: 368791 - DNA, 555 bp, Homo sapiens
ctttatgcttactgtttgtttttcatttatttttatttaactgtgcttcttttagtactttattaaattagaagacatacagactatttttcattatgatagtagctatttttctaaytatcaaagtaaaaatcatatagcatcagtcgactcttccaatgtaagaagaaaaaatcagcatgtgtccgctgtctatctgcacccaatctaatattgttagttttaaaaaagatcacttttttctcaagagaaatgttgactttttaaaaaagtttgctttcaaaaataaatttttaaacataaagcttcactgttcattaattattcttttttaaatttgacaagttttctcttaaaaattttttttatatgaaatagggaatttccccccttggatcctcattttaactcccagtacataatgcataaaatgaaaaccctccattacagaaactgtgcttagagaaagtctatttgggtaattattagtaccacattcaattctcagctgatgtgaacagaaggcttagaaaatcccagctgtatagtgagatc

SEQ ID NO: 368792 - DNA, 609 bp, Homo sapiens
acacagaaaaacatgctatagtggagatttgctgttattggtagagtgcataatagagacacctaaatccgatcctgggattggttaggaaagatttctaagtgagactggaatactatcttgtaggtaaaaactaaagtattaccraaagtacagatatataaaagcaaacagcatagaaaaccctaagctaggaaacttcaggtagccagaatggtagaagctgaaaaattttccatgccatgtaaaatattgtaacatttgtatttcgtccaaaatcattgagtattcatccaagaatttttaaatgggaagaaagtagaaaactaaaaatgcttcacaggtaagatacaattggtcctgagctttaaagaaagtgccaatttgagaacagcagagaatgaaagaaagtaactcccaggctgtggaaatggttgtcagtaaatatagataaattaaactgtatcctttttaagaaaaaaaaatagtttgtcctatttgactataattgagagttctttcagatcagctggagtttagctagagagtttgtatgaatattaaaaatggctttcagtgagaaagtgatgattcacatggcagttctga

SEQ ID NO: 368793 - DNA, 576 bp, Homo sapiens
ttcctgttcctgacactggacattttctcaaggcactaaactagggtaatcgcagtactcacttaatttttctcccacctctcagtgatcactttcccttttggtcttcaatttttggttgtttccaataaggaaatgaatcttacaccacttactttattgtctggaaggataaatctttaatgctttactgataacctaattgtattatgaaagtaataataattacagctatttaagcaagaatatatattcctctttggtaaaatataatgaactctrtacacattgatattgtagaatgtttcaaaaatcccccaaaagcttgtgttctggtccttaatgtgtatttccttacaacccgttttatacagcgtggctagcattctgatttgcttctcacaacaactttgtagtgttcatgagaagaaaaccattgactgataaattcctattagatgaactattttggtagcaagtccagtgtcaatcacatatcagaaaagaaccccagaacacttgcataatgaagaagcaaagtttatattttggcccagaccctttaaaaattacatg

SEQ ID NO: 368794 - DNA, 579 bp, Homo sapiens
aatcaagcataacattattttctttatttcaaatttattgaatagttcattttatgtgtagcctagttgcatttggtatagctgcatatgtgcaaacttaaagtaattattatggaatagcatttttatacattattttcaaaagccagcaaaacatgctcctatatatctgtatgtgtcaataccacacttttctatataccattagccaagttttggtgacttgttatttaagaaagccatttctaagcagtgatgtgacatgcaagttcttctgttttaggaacagagagtaaggctgtgccctaagagactggtcaaaatggccaggtaataggagaaaccatcaagctaattaacacaagagcacagaggtractcttaaatctcattaacgtcaacttaagcagtctttggcaaatgcacaagtagctcatatataacctgtataaatgaatagttagctgtacactatttctttcactcatcctttgagatattcaaaaaatttaaactgatcaatttttgcagatttataaattaaaaaaattatttcctatcccaatattttacttgcct

SEQ ID NO: 368795 - DNA, 594 bp, Homo sapiens
gcaccagtttgtgctggttatgagcaccagtttttgaagctaggctgcctgggatctgattcctagagccatcaccttcaagctatggtgtattgggtaagttacctaattatatttgcctcattctcatcatattcaaaaggtgataacatctacatgttaataattttgtaaaaattaaatgatgtaatacacacaaacaagtacacacacacacatagacacacacacacacacgtatgctaaaaatttcctgacacttacacactcaataaatgcaggtggtttcagttattttaatgtgcatttgctgttagttacttactttgtttatttatatctctttactgaaaccttttacatttatgtcaatgctttctcttatttgtgtttgattttaataattaactagttattcgattaactgtaacaaatatattaaattttctctctttttttacattctcctaatttgtaaaatttgctcagttttttatattatgraatattactgaggagaagttttataagctagtgttttccctttgttcttaattttatttctatatgattgtgcgatgataaagaatttta

SEQ ID NO: 368796 - DNA, 601 bp, Homo sapiens
tttgttagttttctttctaacagtcaggaccctcagctgcaggtctgttggagtttcctggaggtccactccagaccctgtttgtgtaggtatcaccagtgcaggctgcagaacagcaaatattgcaaaacggcagatgttgctgcctgatctttactctggaagctttgtctcagaggggcacccggctgtatgaggtgtcattcggcccctaatgggaggtgtctcccagttaggctacttggaggtcagggacccacttgaggaggcagtctgtccattctcagagctcaaacactgtgctgggagaaccactacttcttcgagcttttmaagtgtttaaacaaaaggaaaaaagaaaacacaaaggaaatcatcaggagaataaattcaaaaattaaaaactctttttgtcaagtaccataaataaaaagataaatcgtagtaattttaaaaagtcgaattatattttgaaaagttataattcatggagagtttttataagtttaaaaggtaaattattctaattttagtgatttattttgagtaataatcagaacgtaaagcaattaaaaagtatatatagttgtcagtttttaaa

SEQ ID NO: 368797 - DNA, 601 bp, Homo sapiens
tttgttagttttctttctaacagtcaggaccctcagctgcaggtctgttggagtttcctggaggtccactccagaccctgtttgtgtaggtatcaccagtgcaggctgcagaacagcaaatattgcaaaacggcagatgttgctgcctgatctttactctggaagctttgtctcagaggggcacccggctgtatgaggtgtcattcggcccctaatgggaggtgtctcccagttaggctacttggaggtcagggacccacttgaggaggcagtctgtccattctcagagctcaaacactgtgctgggagaaccactacttcttcgagcttttcaagtgtttaaacaaaaggaaaaaagaaaacacaaaggaaatcatcargagaataaattcaaaaattaaaaactctttttgtcaagtaccataaataaaaagataaatcgtagtaattttaaaaagtcgaattatattttgaaaagttataattcatggagagtttttataagtttaaaaggtaaattattctaattttagtgatttattttgagtaataatcagaacgtaaagcaattaaaaagtatatatagttgtcagtttttaaa

SEQ ID NO: 368798 - DNA, 527 bp, Homo sapiens
ccatcttttcacaactgatatgaaaaactacctacatgaaaggatatgcacatattcatatacattttaaacttctatttctgagttttctgtcctattgatatttagcctttggctatgaccacactattttgatcatcatagttttatagtctattttaatatctgagagttgtcataatattttctttattttcagtattttcttgacttttccatcacttctctcatatttttaagaactctttgttgattttctgatcagtttatacatctttgaatgtgaagaagttagtttgatacktattaatacttgttttagtttaatttttcttttgtctcttcactgtttattagtatgctaaaaatgaagatctaaataatatagttctgtgtaaccagttcagtgagtcaacagttgggtagaaggtggatctgagaacacaggccctagtgtagtagagtactcctaggggaaaaaaaaaaaaaaaaaggaaagaaaaaaagaaaagaataacagcaacaaa

SEQ ID NO: 368799 - DNA, 501 bp, Homo sapiens
agggcactttatttatcaaaataatatgtggtctactagcaagtgtgagttttcccaaacattattatttgttttttgtttgtctgtttgtttggtttttgattttgtttttgaggcagggtcttgctttgtcacccatgctggattgcagtggcacgatctcggctcactgccatctcagcctgccaggtcaagcaattctcatacctcagcctcccgagtagctggaatcacaggtgtgtgccgccatgcctggctaatttttgtrtttataatataaatgggctttcaccacgttggccaggctggtcttgaacttttctgacctcaagtgatccgcccacctcggcctcccaaagtgctgggattacagatgtgagccacaatgcccggccccagactattttttaggggccaaaagtatgtataaattgatgtatagaaaggattaacaaactattgtccagccacaagagatgatggtcacctgatcttgaattg

SEQ ID NO: 368800 - DNA, 551 bp, Homo sapiens
tgttttcaatagggcggtgccctgaaatgctccagtttctgactttttttattcccatagaattatatcagttctccataggaggagatgcttacactttctatttgtgtaagcatactgggagagcaagcctggttgggtgctggtgaggcacactgagtgtatggagtgcccaatggccagttatgggaggtacgtaggtgaggtgkctcaagcagtctatgaacagggttcttgtaggccatggggttgttaacagggtacatggaccctcttccctattcccagcatctccaaaccagctaactgtgctaattacctaagtattatgggtgtggcaagaatgaagtggacttcttggggagcatcccacataactggggaagctgggtgcttacccactaatttctcactttcctttatgagagaaattgtaaatgtatggaatctgtcttagcactaagttgtaatgccttgagggaagggtgacacgtacaatgaaactgttctttaacattgattctcagattttttgctccaatagtgtgctg

SEQ ID NO: 368801 - DNA, 532 bp, Homo sapiens
agccacatattcagtcttttccgtggaatgttttgtttaacttaaaggtcttagtggattttacactcttagatgaactctaccactgggtatcttaatccattcaggtatttaaaaaatagccataaacatcatactcttggatttaacatttttatcaggcacttgtctattaaaggcttctcactttattttttacgagtttatggtgacaaacagctgcttcmtcctatactgcatgttcttgaatttgtgggccatatttaatcttcagcttttgctgagatcaactgatttttccttttatttttatttttataattctttatcaaacacagacaggtctttcaacctttgtatctagggctacatgatctttaggcgtatgacctgccttcagaataatcactgataatatttcaccaaaatctgtcattctgtaatgtagctaacattctttcaaagctccaaatatctgtttctctatagtttgtacccattcctaagccaaagccacatattttaagtgtag

SEQ ID NO: 368802 - DNA, 603 bp, Homo sapiens
gagaaaaaagaagcacaatccaacaattagctacctataagagacacactttatattcaaatacaacctatattgcttacaagaaagataaaatacatcatacaaattgtaactaagtaaaagcttgagtagctataccaatattagacaaaataagctttaagtaaaaagaatgttactagaataagacggatattttataataataaaagtatcagtgcctcagttaaaaacatatttgcctaacagtgagcctcaagataagaagcaaaaattgcagaattgaagagagtaacacacaattaaaaaacaatactggtccatttactatctcacaggtagaatgaatgaatgaaacaactaggcagaaaattaaaaagaaataggactcttgaacaatactataaactaactagatctaacagacaaatcaacaagcaaaaaaaagaaaaccattaaaaaatgagcaaagatcatgtacagacactgcttaaaagaagacatccaagtgcccaagaaatataagaaaaaatgctcacatgactaaccatcagagaaatgcaaatcaaaaccacartaagaaatcttgtaccagtaagaatg

SEQ ID NO: 368803 - DNA, 560 bp, Homo sapiens
ggaatgaatttaataacatcttcagaaagacaatatgacaatatacactaaatgtttaaatgtttgttttttagtttttccacaacttgatttagatattttaaaaattacttatgttttaaattgatacataataattttacatatttatgaaatatatagtgattttttcaattcaacacaatatatactgatcaattcaggataattaccctattcatcatgtctaacatttattatttcttgcattgggaacattacaaattatctcttccagctatttgaaaatatataataagttgttgttaactacagataccctacagtgctatagaacacgagagcttattcctcctatctgcctgcaatttttatcctttaaccatcatctttccctatccccctgccacttyccagcctctagtaaccactattctactatctacctctagaagtggatctctattctttttgcactctatctcatcatcagaccatcagaatttctctgacatgaaaaagagaataataaaagtacacaaggcatagctaacaggata

SEQ ID NO: 368804 - DNA, 178 bp, Homo sapiens
tgggcctgccactggggaggatgagaccacactagtgagaacagcataggtaggaagcggtggggtgtgtgactagctcacacctcggtctcacagcaaattatagcagcaatagcagtgggatttgttttgggggstacattattggggtcttgatttgcatttccttgatgactag

SEQ ID NO: 368805 - DNA, 553 bp, Homo sapiens
caacatgtgtaataagtataaggtaatattttaggagtatatagtatggggtcttatatgcttttctccaaaatgcacaagttatgcataaaaatgtctacactttagaagttttaaactttttaatcagaaaacatttttatatagagggattgcatttaaagtagcagaaaattgttttatgacccccaaatagatgtttttaacaaatactttgtgattaaataatccatcaaatagctcaattaaaataattacttgacttaatcaatgaattaactaagcaaagttcttagcaatagcatcatccagcgaaatgaatttatttaaatatttgattagtgtttaacacagttcattatgtgctttagcaatattggaataatktgcttaatagtcctaggatatagcctaggggcatagtatacaatattaaaatcttggcgctcttcttggagatgatcttgggatattgcaacttcattccaaattagaagcttaaggaaaattaatgagggtgttacagatacaaagagcagaataaataagtagt

SEQ ID NO: 368806 - DNA, 530 bp, Homo sapiens
tctgttatggcaactagagcagacaaatacagtatggttgctttgtgaattaaataaaataatatacctgaaacacaagatatatacataataaagaatcaatgcatgtcactgatgatggagagaatattttagctacatcataagctcattcctcatacatttttcttgatatgaataagacaccatcttgatctggttatttctttgcaggaatgtgtttcattatacattttgatatatttacttaaaatactaataaccagagttcctacttgtttctcttttgataacctgcatttttctaaaatattatcaatttcatttgaattgaaarttatagcctgaagtttatcaaaattatgtattttattttctttaaacattcataggattagcagtcataatttgtgtttccttttttgctcgatcagtgttgctgtgatttgccaaatttattagcttttaagaagaggtaacttgcttttatttattttattttatttaaggtatctttgatatctgttttc

SEQ ID NO: 368807 - DNA, 630 bp, Homo sapiens
atagatagtacgcctggaaattaattgtaaaaaggtgggagaagtcataatttatgcaatttttgtatgtgttacacttcagtaaaatgcaactaaatgaataaatgaaagaaagggaaaaaattaagcagctgggtgaaaggtaattaaaatgtgaattgcttattctgtgaatgatacgctgaatggcattgatgttaaagtgggagccacatacaagagatgatggtaatgagaccttaactgatcatagaagagatggcaagacactaacaggtgtaaaatttccacagagcttgtgctgaattctatgacagcccaaggagtcaagatgctcctttgttttagtcctgtctaatactgggtgtgcacagctaaaagaaaataatgctctttgcagagaaaaaagattggtactttttaaacctctttgtaggcatattgaaagtaacatagacacatttatgttaagagtccttgaaagctaaataaattgaaaatgcttatatatagattgccacctgagagttmatagattatttctataattcttttttgtttgggggaactcagtgccaaaagttaatctttgtaaagggaaagttaacctaatgacatagttttaaatac

SEQ ID NO: 368808 - DNA, 538 bp, Homo sapiens
tcctggatccctaaaatgtcaacactatttcctgaataattcaaagaatgggattttccaggatgtttcttctcctacttgatttgactttatctctagacaaaacacatggccaaacaaaaatcttccacagaaacaataacaaaaacattggcttcatctgggctaagattctcactccttaacttcattagtctggtcagttgtgactgacattgtgtaaatctggtgttctttaaaactagattaaaaatttcttattttgctatttaatgaaagcrcagaatgatgctgttatcttactgctgtttgactactggccatggttattccagagataacaaaccaaaaaaaaataaataactaaaataagatctatattttcttgcaaatcctgctactgtgtagttgcagttttttttagaggtcagtgaaggttaaaaataacaagtatgtagaagtcttaaatgcaaataccaactttaaaaagccctacagtgaactgtttccatgatatataagcaaacaataacctgaa

SEQ ID NO: 368809 - DNA, 482 bp, Homo sapiens
cacacttggggttttctctttgctccaataccccctccctctgtctctgcatgggagagctgttttcttcttccttccttctttcttgcctattaaacctttcactccttaaaaccacttcacgtgtgtctatgtcattttatccaaaccagcgcgaggaccaagaaccctggtgttcctccactcatcagagctgcagcagttacaatggggccaaaaccactatgcctttactgttaataagttgggtttacacttccatcttagaagcaacaaaaaytcctgttgtactttagtattgtttatatttgatctagattgtatagcctgagctcttcaaagttttttagcaatgcaggaaaaaatattaggaaataatgtgcaaatacataaagaaaatttaagaaaatatttggtttgattcattaagattcacattataagattatacattatagcgagagggaaaaagactggtttaa

SEQ ID NO: 368810 - DNA, 519 bp, Homo sapiens
aacagcccttcccaaacttactytctccatgcttggggacaaaaactacgtttgtaaaactaacaaattagggctgggtatggtggctcacgcctgtaatcccagcactttgggaggccgaggcgggaggaatcacgaggtcaggagatcgagaccatcctggctaacatggtgaaaccccgtctctactaaaaatacagaaaaaaaaaaaaattaaccaggcggggtggtgggcgcctgtagtcccggctactcgggaggctaaggcaggggaatggcgtgaacctgggaggcggagcttgcagtgagccgagatcgcaccactgcactctagcctgggtgacagagcgagactccatctcaaaaaaaaaaaaaaaaaacaagaacgtgcattctgatataccagctggtgccaactagactgttaaactggttcaacttgtcttgtaatcccatccagaaactgactcagtgcaagaggacaagtttcatcccctataatttcatcaccaacccagt

SEQ ID NO: 368811 - DNA, 519 bp, Homo sapiens
aacagcccttcccaaacttactctctccatgcttggggacaaaaactacgtttgtaaaactaacaaattagggctgggtatggtggctcacgcctgtaatcccagcactttgggaggccgaggcgggaggaatcacgaggtcaggagatcgagaccatcctggctaacatggtgaaaccccgtctctactaaaaatacagaaaaaaaaaaaaattaaccaggcggggtggtgggcgcctgtagtcccggctactcgggaggctaaggcaggggaatggcgtgaacctgggaggcggagcttgcagtgagccgagatcgcrccactgcactctagcctgggtgacagagcgagactccatctcaaaaaaaaaaaaaaaaaacaagaacgtgcattctgatataccagctggtgccaactagactgttaaactggttcaacttgtcttgtaatcccatccagaaactgactcagtgcaagaggacaagtttcatcccctataatttcatcaccaacccagt

SEQ ID NO: 368812 - DNA, 531 bp, Homo sapiens
tacaaattaagagtaaaaaataaatgttcttctttacagatgacattattatctatgtagaaaatcctaaagaatttccaaaaaaatgttgggaactaataaatgagtatagcaacatcccaagataaagtgttaatgtgatatccaaatgtcaaatgcattcctatataccagtaatgaacaactgaaattttaaatttaaaaaatagggtttacattagtactgaaaaaacttaartataagtctagcaaaatgtatttagaatctatatgcagaaaacaacaaaactctgatgaaataaatcaaacatgtaaataatgaatagattttagcattcacgaattggatgattcaagattttttacatgtcaattctttctcagttgatctatagattcaatgtaattccaattactatctcataagctcttatttagatattgacaaactgattgttttcttaataaagaaaagctctaatctttggaaagaaaggcaataaacactgtcatacttagtgcactactaag

SEQ ID NO: 368813 - DNA, 611 bp, Homo sapiens
ttccacacaatgtattctctacacaggcaaattagtctgctctcttgtgtgttgaattaaagcctaaaaataagatgactttaaaagaaatcatatcataggccaatagaacataattgttaattgtgttctagtaaattaactagtggaagtggggtgcttgtttgtagtatctgctgatatctctggsataaatacttctacaatggctgattttcaacaaccaatggtttaaccactgatttgcagaattcctgaatatttaatagtctgctctcattagtccatgtcagctgtctagcatcccactagatttaatcatctttcataaatatgcagaaatagtattccatttcgtagaactttaagaaatgtattacttattgggtaatgacaagtcaacataaaaggctggtgaaaatttaagtcatggggagatatttgtccattcatttataagatggcagaggcatgttaatctgtgtgttatacttttcacgcacactccagggtacatttcttagtgggctctgtgtattcacaacttgtatatattttatgttcttctatttcatgaacataaaaagctgacaggaaaaaacttcccacct

SEQ ID NO: 368814 - DNA, 602 bp, Homo sapiens
taaacaaaacatactaaccagaagtacaggtttacttaaaagtttttggacaaaatgtctgcacgaatatgtgcctgtatgtgttaaataatcccaatgtagcgtttaataatattaaaaaacattttactcatctaattggcacagttcaaatattgatagtatccagcattaggatgaaaagaaagaagtgggagttctcatgtacttctgattggattaagaactgctttctttttttgtggtsaaataggcaatatttattaatagacaaaaaaatttacttggcccaataattctatttcttcatatttttcactaggaaatattgaaataggtggtgaaaatgcatgtataagaatgtttcttgatgtattatttataacagtaatttaacatcaatttgtatttcaatcaaaaaactgtgtttttctatacattggaatgctatgtagcccttaaaagcaatagcgttgattggtacctattggcatctgaagatgctttgacatgtacaaaagaatttaccaaattatagatatacacagacacacacacattcataatatgatccaattaagataaaaaatctttaaaagctc

SEQ ID NO: 368815 - DNA, 630 bp, Homo sapiens
gctgagagagagtctcaaacccaaggaaatccacgctaataaattgtatagtattgacaagaaaagtaaagacaagaaaattttgaaatcagccagagagaaataatgcattaaatatgaggaaactccacttcaaatgatagtgactttctcatctatgacaatggaggtccagagggaagtgacatcttacctctctctctctctatatatatatataactcagctattgttacaggcacatactccaaagttaagtataaatatatatggttcaatataatttaatatagaatatatatatatacatattatgatatatatttaatatataagtttatgtatttatatataaattgatttatattataatatataaacaatatataattaagattggtgaaaaagtaattgcagtttttgcctttgaaagtaatggcaaaaaccacaattactttgcacgaacctatatatatatatatgaatatataaaaatgtaatatatataatatataatatgtacatgtaataaatatattatttatarataatttatacataatatataattacacatattttatatataattatatatttatggatagtatatggtcaaacttaatataa

SEQ ID NO: 368816 - DNA, 569 bp, Homo sapiens
tatattataatatataaacaatatataattaagattggtgaaaaagtaattgcagtttttgcctttgaaagtaatggcaaaaaccacaattactttgcacgaacctatatatatatatatgaatatataaaaatgtaatatatataatatataatatgtacatgtaataaatatattatttatagataatttatacataatatataattacacatattttatatataattatatatttatggatagtatatggtcaaacttaatataatataaattatatataacatacgcatatataaatatataatttatgtggattatataaaaatttatatatatataaagataatatataaaaataaagatgaaattctaaaacatattgaaggaacctgtamgaaaaaagaaacaggtaagtgacaaccagtaaaacaattgaaaaacaaagtaacagggttaaacactaacatatcaataattattttaaatataaattccataaattcccaaatcaaaaggtaaggttgaaatagtggataaaaaactcggccaactacatagtgctgaaa

SEQ ID NO: 368817 - DNA, 519 bp, Homo sapiens
tcattgtttaacagattatggcacctcactccatcctcttcctgctgctctagccatgtgatgtgccagtttcacttcctgccatgattgtaagtttccttaggcctcccaagaagtgcagcagaagccagtatgcttcctgtacagcctgcagaaccatagccaattaatcctcttttctgtgtaaattacccagtctcaggtattgctttatagcactgcaagatctgatatgtaagttgtttaaatataggagtaaagagtttatataatattcttataagaagttcaaaaatttacagtctgcagatcaacaacggaataataaatcatattkgtcaatataaatagtgatccatctgtaaaaaataatatttctttctctggatagaacgaaattgttaatatgaatctttattttctattattatgattctatttatctatattttttaaaatgtgggctaactccaactagttttagagtttagtctttagaatgcaccatttctatgtaca

SEQ ID NO: 368818 - DNA, 559 bp, Homo sapiens
gtctagggctgaaggctgttgttcagattattttgttccgtgaggtgttcccccttttcctatggatgtgatttcctgtgagccaaactgcagtgattgttgtctctcttctgggtctagctacccagcaagtccacccagctctgggctggtactggggattgtctgcacagtcctgtgatgtgaaccaactatggrtctttcagccatggataccagcgcctgttcccgtggaggtggcaggggttgcaaatggactccatgagggttcttagctttgatggtttaatgctgtattcctgtgcttgttggcctcctgccaggaagtggcacttcccagagagcatcagctgaagtagtgtggagaagggccggcagtggctggggccctggaactcccaagattatatgccctttgtcttctgctaccaggacaggtagggaaggaccatcaggtgggggctggactagatgtgcctgagctcagactgtcattgggtgggtcttgttgtggctgttgtcggggatgggggagagattcccaggtcactggagttgt

SEQ ID NO: 368819 - DNA, 571 bp, Homo sapiens
tggggcctcttgagattgtttgtttgttcttgcagttctggagttaaaattcaccatgtgagtcttcacacactgctctctctggagctgcaatctagtcgtgtctcctgtctgccatgattatcctagaggttcacgaatgttcctaagaattcattacttttggaatctagttgtactggagcagtgacattacacagttctctaagttactcatatgcccataagaagaagcaatctaaacaacataaaaatgacacctctaaatatttttatcctacaaaagcatgcattagatgacaagtgagttatgtgagtctgtaattaacataaactattttatttttgttctttttggtggggaatagagatgaagaaaactaggaaagtaagtgctttatgtaattcatagagaatagcacacagatttttaytggtgatgaggtaacagaatgagagtagtaagggagacaagggattaacttgctgtgtgtcagttcccaaatgagtgtgcatttacagttacagtatgggtcttgactatctcagttcccagaattcccaggtgtaa

SEQ ID NO: 368820 - DNA, 601 bp, Homo sapiens
ttatgcatatatatttatttaaactaggtagtgatattttggacctgaatgtgttttaacttcagttaagttttattttgctatagatttcctaatgcattttgcaaaaaagcccacactttttaagattgatttaagttgttgctgtatgtctagttcaatgcttttgcctgcttatagaattcctttgtaagtattcagtaaaattgtctcatctattatccctgtattaaacactgacctcatttttctaactttgcctgttttctaataaatgcatatgagctatgtaattttaagttttgctttaatgtgtcccaccaattttgatttattttatttatttttcagtgttggctattttcctttcaatttatatcagtagtcaacattttctgtaaagagacagataataaatatttttggctgtattggccacatagtctctgttacaattactccagkctttcattgtagcatgaaagcaatataaaaatacattaaaagtgagtgtggtgaaatttggcactttgtgagtactatggtctgaatatgcccccagattcatgtgctggaaacctaactcccaatgcaacagtgt

SEQ ID NO: 368821 - DNA, 713 bp, Homo sapiens
gcacgttaaaatacattatgaaacagacttattgtaacaatggcaaaaacatatttacctgaaatattctcttttcatcatttgatcatttgtgctccatattcaaatgtgatactaacatatattattcaaaacagtgaactaaaaatgttatgagaaacctatacccatttgcacaagtagtataaatataacccagtaggaagtcagaaattgtggatttgtttttaaaggctaggcactttgctgcctctgtcttttgaattcaatagctgtatgagactgttatgagcactggataagaaatctgattttatgaaaagtgattacttaattgccagagagctatggcagtgtacacaaataattgagtagttaacaaaactttgtacctctgtttttaaaattgagggctctgcataaaatgaatttaaaaactaaaacataatacaaacattaagtatatcacacaatcagatttttctaaatgaaacttattaaatgggtttttgtgtattcttactatttcagcatataaaatgtgttgtctattatgcactgcaataaaamatgtttgaagccacagatgtacagtgctcagaatgctgttattcacatctaattattgtatataactgactttggtatagattcctttgaaatctttataataataattaatatgtattgagcatctactgtattacaaggac

SEQ ID NO: 368822 - DNA, 713 bp, Homo sapiens
gcacgttaaaatacattatgaaacagacttattgtaacaatggcaaaaacatatttacctgaaatattctcttttcatcatttgatcatttgtgctccatattcaaatgtgatactaacatatattattcaaaacagtgaactaaaaatgttatgagaaacctatacccatttgcacaagtagtataaatataacccagtaggaagtcagaaattgtggatttgtttttaaaggctaggcactttgctgcctctgtcttttgaattcaatagctgtatgagactgttatgagcactggataagaaatctgattttatgaaaagtgattacttaattgccagagagctatggcagtgtacacaaataattgagtagttaacaaaactttgtacctctgtttttaaaattgagggctctgcataaaatgaatttaaaaactaaaacataatacaaacattaagtatatcacacaatcagatttttctaaatgaaacttattaaatgggtttttgtgtattcttactatttcagcatataaaatgtgttgtctattatgcactgcaataaaacatgtttgaagccacagatgtrcagtgctcagaatgctgttattcacatctaattattgtatataactgactttggtatagattcctttgaaatctttataataataattaatatgtattgagcatctactgtattacaaggac

SEQ ID NO: 368823 - DNA, 383 bp, Homo sapiens
ttattaattctgataaacaagggacacacagttggaaaggtttgactggatcctggggcaatgatcttttctaatttatctgactttttctgtatacgtctctttttagatagttcactaactttagcatggagcaatgaattcagtttttggaatttggcaatttatgatttccagtcctcagcagtcttggctcactggaatcagaaagaatggagttccttttactaaagtgttcttcactgaaatatgttgaataatactataagaagggtaaccagaatatttccatactgatttatttttaaacagtgttccgaagtctcagaaakagtttatatgtgactgaaattcaaagtactacagtaattacttagtcaact

SEQ ID NO: 368824 - DNA, 496 bp, Homo sapiens
ctagactagattttcatgtattatttcctcatgagcatgaagatgaaaattggaattgagccaatttyaacattaagtttacatgtactaagacagaaacaagcttattctgactatttaaatatgataataatactaaaatgtctgagttaaagctatccttccaaatcaatattgacagacagtgagagatttgagaaaggtcaatataaattgttgaacaattgcaagacttaactcttaggggaataactattacactgctgaggaggatgtatttcacaaatgcaaacttcataaaaaagaaataaataggtaaataagatgagaataaataatctaacatttaattcacaagtatttaaccatccatttaactacaaacaaactagtgaataaagtagtaatatgtgtactaattcgaatttgacagatgctttcacattttaaaaactccaagtaattttccttaagtattctggactgtaacagtgga

SEQ ID NO: 368825 - DNA, 606 bp, Homo sapiens
accaatgactgagtaataattgcaaagaattttcatatcttccttgtacatcagaccccagggccatgcaaaataataatgtttcattctggagtagaactggggattcaaggtaagtgtgaaatttaagatttaagattttaattgcaggtattgctcagtcactggtaagaatgtaaagcaacaggaaattttaagcatggctagtgaaaatgcaaaatggtaaagccactttgkaagacaatttggcagtttctacaaagctaaacataggttactatatgattcagcattcgtgatcttagatccttacatatgtgtgtgtgtctgtatgtatacacacaaacacattgagacatgcaaagagaagttttgaaatattttgagaaatattaagaattttgaatatagcctatatatatgtttgtatgtgtatacatctatctatgtataaatatatatatacatatttctaaaaacagatatctgtctatccatcagaaggggattattctgttctgctgtttttcatataaaaatgattattatttttcattatgacatatagctattttgtttaaaaaatacctgtgtctttaaaattgg

SEQ ID NO: 368826 - DNA, 606 bp, Homo sapiens
accaatgactgagtaataattgcaaagaattttcatatcttccttgtacatcagaccccagggccatgcaaaataataatgtttcattctggagtagaactggggattcaaggtaagtgtgaaatttaagatttaagattttaattgcaggtattgctcagtcactggtaagaatgtaaagcaacaggaaattttaagcatggctagtgaaaatgcaaaatggtaaagccactttgtaagacaatttggcagtttctacaaagctaaacataggttactatatgattcagcattcgtgatcttagatccttacatatgtgtgtgtgtctgtatgtatacacacaaacacattgagacatgcaaagagaagttttgaaatattttgagaaatattaagaattttgaatatagcctatatatatgtttgtatgtgtatacatctatctatgtataaatatatatatacatatttctaaaaacagatatctgtctatccatcagaaggggattattctgttctgytgtttttcatataaaaatgattattatttttcattatgacatatagctattttgtttaaaaaatacctgtgtctttaaaattgg

SEQ ID NO: 368827 - DNA, 529 bp, Homo sapiens
tcctgcaccgcctccccgcacccccgtgcccacacccctgacagcctctccgcttgtgttgcaggaagcccaccttcccctcgaagccccacccttctctgtctgcatacttccacccccaccttcccacatctctccgtctctctttccgtggaaggcagacgcgcgcgcgcgcgcgcrcacacacacacacacacacacacacacacacccgctttttcttcctcctcaaatagatgacccctatggcgcgtccctggtacatttagaatacctctagagtttagagaataaaattctttagaatgcattgcttgtctttagctaaacacatttaacaaccacgacacaaacggggaggagtgaagaagggggacttgaaccaaaagacctttaaaaaaaaaaaagtctgcgagtcaaaaggtcattctccaagtttgtaaataaaattgcaaagggagtccttaagaaaggagaggaaagaaggggaagaaggttaggaagactcacaagttacataaaacagtgc

SEQ ID NO: 368828 - DNA, 529 bp, Homo sapiens
tcctgcaccgcctccccgcacccccgtgcccacacccctgacagcctctccgcttgtgttgcaggaagcccaccttcccctcgaagccccacccttctctgtctgcatacttccacccccaccttcccacatctctccgtctctctttccgtggaaggcagacgcgcgcgcgcgcgcgcacacacacacacacacacacacacacacacacycgctttttcttcctcctcaaatagatgacccctatggcgcgtccctggtacatttagaatacctctagagtttagagaataaaattctttagaatgcattgcttgtctttagctaaacacatttaacaaccacgacacaaacggggaggagtgaagaagggggacttgaaccaaaagacctttaaaaaaaaaaaagtctgcgagtcaaaaggtcattctccaagtttgtaaataaaattgcaaagggagtccttaagaaaggagaggaaagaaggggaagaaggttaggaagactcacaagttacataaaacagtgc

SEQ ID NO: 368829 - DNA, 571 bp, Homo sapiens
ccattaaaaacacaccaccagagcaaattgtcaatgtaatcacacatcgactcactgcgtaatacagatctgattcccagccccagaaaacgaggccctgctttaagcaatagcaaagtgccttccatctgtctgcctatgcaatctgccagaagaaaaatgcaggcaaagacgttccccagatctgaaatgcttttatctgtccttagagagagayttcttccagtctttggatactagaacgatctacactagcacggaggaggtaaaaggccgcgggttgcttttccaggagcagtcggtagtgctagcggaagagatgttgattgagaaaatagggattgttgcaatgctgccgctactgctgctgtcgctgccgctgctcgggcagcaggcgtggggcagttggctgatcactgatgcatatcaataaccatgtacttgagatttctcatgacatcatcattaccttggtctcccgcggtctcgaacctttgaccttgccgggctggtccacaatttggcagtgaaagcccctccaatgatggcccttttctccttctttcagacc

SEQ ID NO: 368830 - DNA, 571 bp, Homo sapiens
ccattaaaaacacaccaccagagcaaattgtcaatgtaatcacacatcgactcactgcgtaatacagatctgattcccagccccagaaaacgaggccctgctttaagcaatagcaaagtgccttccatctgtctgcctatgcaatctgccagaagaaaaatgcaggcaaagacgttccccagatctgaaatgcttttatctgtccttagagagagatttcttccagtctttggatactagaacgatctacactagcacggaggaggtaaaaggccgcgggttgcttttccaggagcagtcggtagtgctagcggaagagatgttgattgagaaaatagggattgttgcaatgctgccgctactgctgctgtcgctgcygctgctcgggcagcaggcgtggggcagttggctgatcactgatgcatatcaataaccatgtacttgagatttctcatgacatcatcattaccttggtctcccgcggtctcgaacctttgaccttgccgggctggtccacaatttggcagtgaaagcccctccaatgatggcccttttctccttctttcagacc

SEQ ID NO: 368831 - DNA, 604 bp, Homo sapiens
gtcagcacagtgtaaagaaaaactgtaaagaaaagtctgcaaataacttaccaaatctcaattataatattttcccacactagaactaatatcattgcgaggggctacattgcagaaaatacaaaaagaaacgaaaagaaatagttcatttagaagttattttatccagacaaacattttaattttctgatgggaacttcaattcaggcttcaggctgggatgagaggtggaattcagtactggcgagttcaaattacaaaaattctgcttctgcaattaaaataccataaaacaaacacctagccccacctgaagttctctattcttaaatataaatggactctatgtgggttttactactttagtcctgcatagaattgttagtgtgaatctagcttaaattttgctttaaattatggcacactgctctttcaaagtttgccactgtgattgacattgcaaaagaacatcatttcccaaaatatttaagaatattctggcacctccctaggyggattctggcgtgcccaggaatacacttcctttttatgttatgcccctccccctactttctaactttttccccctcatgatgtgtgtaaa

SEQ ID NO: 368832 - DNA, 618 bp, Homo sapiens
atgctaacactgctttgattatataagatcataaaagctagagaaagasacgcttattaaggaaacaaataattctcctttatattattctctacattagctcatctatttattaataggagaaggaaagtaattctttgccagtaggtggtgcttttgtacaaaacatcactcaaagataaactcgtttctgactaattttatatcactatacatcttgagtttgtattgcatctcccaaaaagccagccccaagttacttcactttttttctgaaatatatactttttctctcagtggtcataatgacattgttagtgccaactaattctctccactggaaagcagcataattacatacattagtaagtaggcttgctttcctttgtttaaaatgggtgtgtctgtatggataattcttcacttggattcttcctcagtaaaagagagtaccatgctcttttgacaatatagtcaagtaatcctgactctagctctggaagtcagtgtaattagtgtaagaagagtaaaagcatcttaaaattgatgcgagcaatgccactatggtttatcctgatcaaagtcattgtgattgctaatctacacttaagggcttaa

SEQ ID NO: 368833 - DNA, 394 bp, Homo sapiens
ctcaaatgctaaatggctttcatttgccagatactgtgctaggtattaggaataaaatacctcaaggacccctccgcctggaagatgacaacagagagcggcaaacaccacagtggagctgatgcacacggaccgaccaagggccctctgtgcaggggccttacaggtcgagcctcctgagcagagcaayggggtggctttggcaatattgacataatctcagggatttagtagatgggtagaagcactgctgtgaagtttgagaatgacccatatgaagccatttctcttgcggcttcttatcaggggaggagcggctctgaggacaaagggtggaaacggaagtccctctacagtctcagcctctaaaagcctccctgcctgagcagcagga

SEQ ID NO: 368834 - DNA, 423 bp, Homo sapiens
agcatggcccttgcattgtgagggaggggagaggagaggagacaggtcagagaggtgggaggggccaggtcatgcccataggttggtgggggagttgcatgatttgatttatgtttaaaaagtgtactttcaatgttcgtgaactctgctggttctttttcaagttatctctttgtctattgtgctttcctctcctctgttgtgtgggtgttccccagggccctctgctttcccctctttttctcgcgagctcatctrttcttgttatttagaccaccactcctcctgaaagactcccacatgtgggccctctcgtcttgacctctgcccaggcctcgtcttccatttccagctggcctgtttgctattatcactcagttagccaggatttgactttaagttcagactgttatattttttaaa

SEQ ID NO: 368835 - DNA, 519 bp, Homo sapiens
attattcttgtcacagagaacatcaagaattttctacttttctgcataagagattagagggttttttttttttagcttaaaggcagagaagargaaaaaattaaagaatttcatctgatcattgcaaaaaaaaaatctagctcagtacatactgtcccaaagacatctaagatgttagttttcaactgtttaattaaagactcaacacagagcaagtaaaaaaccaaaagattctaaacagctacttaatttttaggataaactagagaataaatttttcattttcaaatctaaaattttaaaccattaaaaattcaaccttcaaaacagttccaacctgtgcaacatggcaaaaccttgtctctacaaaaatatacaaaaattagccaggcatggtggcacacacctgtagtcccaactactcgggggcctgaggtaggaggatcacctgagcccaggaaggctgaggctgcagcgagctgtgatcgtgctactgcactcaagcctgggcaacagatg

SEQ ID NO: 368836 - DNA, 537 bp, Homo sapiens
ttactgattctctcaaaacagagacctcacttgaaccactaatgcagcattaaaaagaaaataaaaaagatttttagtgattagctggttatttaacatgatagtccctaaccttaatttcacttaagaagattagtataaattattttatgaaagtaaaggacaataatgttcttacagtcaccatttaaataacagttaagaggtattgagtttatccaagggaaaaaataacgtccagtggaccaacattctattcatacctataagcctcaaacytaaagggcgtatctatacaaggcaattggccatattagttttaactgttcctaaatgaattcatataatagaggactacgcaaatatgagaaggtgtgttcaaacaaccacaaagattctaagttcctctgtacaaaaatatctcctctatcagtctgccatggtttatgatactcctatcattaaatgtacttcttaggtattatcagaagttatttaatatttaatgacacagaaaatatttgtgaaacaaaaaat

SEQ ID NO: 368837 - DNA, 570 bp, Homo sapiens
cacaaagaacatgtgaatcaaaaaactgaagaacccctgatctgatttgaagcatgtttaaaagcgtctgacttttatataatttgaaatatcaagatyattcaaatgtattgtcccattcacgtaaatacaaattggttaaatccagggggaaatatcagaatgccaattttttaaaagaaggttaactaaaataacttaaaagacttataacacattttttgagaaacagcctttatagtaggtgtccatctccagataggataaaatagaccacagcaggccaacagtccggctgaaaacaaccaggaataacaagggctggcaaataaaaagtcatggaaacaatgaggacataaatgtaacaaaataccagagaggagaaccactcagagaagtaatggaagccaaaagacaattgggtaatatctgtaaagggatgaaagaaaattccatatctaacaaaaatatcttttaaaatgaaactgaaattaaaatgtttaagactaatactgagagaattcagtgccaacagaccagcaccgaaagaaatactgaaggaagttactc

SEQ ID NO: 368838 - DNA, 614 bp, Homo sapiens
gatggataaataaaatgtagtatgtccatacagtagaatgttactcagcaataaaaaggaatgaagtattgggtgcagcacgaacgaactttggaaacattatgctaaatgagtcagtcacaaaagaccacatattgcataattctatttatgtgaactgttgcagaatagacaaatttatagagacagaaaataaattagtggttgcctagggatagggagaggggagaatggagagtgactgctaaagggtaaggggtttccttttagggtgatcaaaatattctaaaattaattgtggtggtggttggataactatgaatgtactaaaaataattaaaatgtacactttaaaagtgtgaattttatgctttgtgaattacatcttaataaagctrtttaaaaaacctagtgcctttgaagaaagagacaagaaaacctagttaacagcagcattcaataaaaagtatccgagtggttaagaggtgctctggcgcagaccactgggttttcctgctaggtccgccatctactagctgtgggatgtaggtatgttattaagcctctctgtgcctcagtttcctctttggaaaatgaagatactggcagaagct

SEQ ID NO: 368839 - DNA, 614 bp, Homo sapiens
gatggataaataaaatgtagtatgtccatacagtagaatgttactcagcaataaaaaggaatgaagtattgggtgcagcacgaacgaactttggaaacattatgctaaatgagtcagtcacaaaagaccacatattgcataattctatttatgtgaactgttgcagaatagacaaatttatagagacagaaaataaattagtggttgcctagggatagggagaggggagaatggagagtgactgctaaagggtaaggggtttccttttagggtgatcaaaatattctaaaattaattgtggtggtggttggataactatgaatgtactaaaaataattaaaatgtacactttaaaagtgtgaattttatgctttgtgaattacatcttaataaagctatttaaaaaacctagtgcctttgaagaaagmgacaagaaaacctagttaacagcagcattcaataaaaagtatccgagtggttaagaggtgctctggcgcagaccactgggttttcctgctaggtccgccatctactagctgtgggatgtaggtatgttattaagcctctctgtgcctcagtttcctctttggaaaatgaagatactggcagaagct

SEQ ID NO: 368840 - DNA, 436 bp, Homo sapiens
aactttactaatgatcttctagatatacagataacacaaagtgtggtctgggtcttacagtgctattctcaggcttttcttgttgmatcaggatgcagactgtttcgtggtaacatgaatttttccagcaatgtgtgtgtccacatattactcacacagaaaggaatcctttaaatcacgaaaagcccacttggtgagtaaaatagagcaatttcccttactttttaatgccttgcattgagagactaaatgtttcacaagaattcacacatttagtcctattcctatattacagatgaagaaatcgagggccagggtatttaagtaaattactcaaggccacttaactgggaagtggcaaagtcaggatttgtatcagtatcttggcctttaactgctaaactataatgccactttcaggctggcgaaggagatg

SEQ ID NO: 368841 - DNA, 436 bp, Homo sapiens
aactttactaatgatcttctagatatacagataacacaaagtgtggtctgggtcttacagtgctattctcaggcttttcttgttgcatcaggatgcagactgtttcgtggtaacatgaatttttccagcaatgtgtgtgtccacatattactcacacagaaaggaatcctttaaatcaygaaaagcccacttggtgagtaaaatagagcaatttcccttactttttaatgccttgcattgagagactaaatgtttcacaagaattcacacatttagtcctattcctatattacagatgaagaaatcgagggccagggtatttaagtaaattactcaaggccacttaactgggaagtggcaaagtcaggatttgtatcagtatcttggcctttaactgctaaactataatgccactttcaggctggcgaaggagatg

SEQ ID NO: 368842 - DNA, 587 bp, Homo sapiens
ggtccaatctcccttattttctctattaaatataagacaaaaaaattgaaatatagactcaattgccttcacttgttgataatgtgtcaaatacaatggtgttcaccaactcaacctatttggccccactatttgtctagtcatcttttatctaaagaatgcaatatgccatggtcccaacaaggagatgaaaataagtcactaagtagagttttggtgaataccttaaaggatggccagattccagggacctgtacattgttttttcatccattccccttctttatgcctggaaaagggcagagtgtcagaaattcagctgcattctatgactgggagactagaacccccaygctaaagagggcagagcaggaagacagaactatatgtactagccttgaacttcctctgaaatatttgttgccttattgatttgtcaatctgtcatttaaattgcttttgattttcattttgttttgtatgtgaatatatattctagctgacataaatggggtccctcaacttctgaatgatggtaggtgaatatggctctttttgctgattgagtttacataatagccatatac

SEQ ID NO: 368843 - DNA, 565 bp, Homo sapiens
ctgtaaagggactttgccgatggattatgtttgctatccttagatttcaaataggaagattatcttgcattgtctgaatggagctaatggaatcatataagcccttaaatattaaagaggaaaacagaatagtcagttggaaatgtaaggyctgaatgatttgaagcacaaggaacagggccaggagccaaaaaacgttagcagcctcaagaagctatgaacaatcccagatttcacagaaatagtctacaagaaaacagaggccttagccctacaactatgagcaagtgaatcctactaacattctgcataagcccagaagtggatggtctccaagatcttctagaaaggaatacaaccttgactttggccttgtgagagccaggcaaacagaaacatgagacaatgtttttgtcgtattaagcttataaatttgtgttgatttgttatggaacataacattaggcaactaacacacatggtaatataaaagagcctgtttaagggatttgcaaaaatattagccattcagaaattattttaatcaatgtataatgcagagatc

SEQ ID NO: 368844 - DNA, 574 bp, Homo sapiens
taccctagaactgaaagtataagtataataataataaaaaaaatctcaatcttccactcaaaaaaaaaagaaaatggaaagtattacatttccataatggttatgctaatttacwttcctgtcaacagcatgcaaaagttctcttttctcctcattcttttcaatgcttattatatttcatctttttgataacagccattgtaacaggtgtgaatactgtctcattgaggttttaatttgcatttccctgatgattagtgatgttgaacttcctttcatatatacctgttggccatttgtatgtcttctcttgagaaatgtcaactccaattatttgttttttaattgggttacttttgctgttgaattgtttgaatttcttataaattttggaaattaagcctttctcagatacatggttggcaaatatttcctcccattccataggttgtttctttattcttttgaatgtttattttgctgtgcagaagcttcttagtttgatgttggtgttttatgatgacttccttcacttagaggaatgtttttaaggttcatccatgttgttgtatat

SEQ ID NO: 368845 - DNA, 574 bp, Homo sapiens
taccctagaactgaaagtataagtataataataataaaaaaaatctcaatcttccactcaaaaaaaaaagaaaatggaaagtattacatttccataatggttatgctaatttactttcctgtcaacagcatgcaaaagttctcttttctcctcattcttttcaatgcttattatatttcatctttttgataacagccattgtaacaggtgtgaatactgtctcattgaggttttaatttgcatttccctgatgattagtgatgttgaacttcctttcatatatacctgttggccatttgtatgtcttctcttgagaaatgtcaactccaattatttgttttttaatygggttacttttgctgttgaattgtttgaatttcttataaattttggaaattaagcctttctcagatacatggttggcaaatatttcctcccattccataggttgtttctttattcttttgaatgtttattttgctgtgcagaagcttcttagtttgatgttggtgttttatgatgacttccttcacttagaggaatgtttttaaggttcatccatgttgttgtatat

SEQ ID NO: 368846 - DNA, 529 bp, Homo sapiens
tttttgtgaccagaaatatgcaataggaacttaattattttttagagacagagtcttgcactgttgcccaggctgtaatgctgtggcctgactacagcttactgcagcctcaaactccagggctcaagcaatccccctacctcaaccccctgagtaactgggaccacaggtgcaaaccaccatgcctggctctttttttttttttttttttaagagagccagggcctcactgtgctgcccwgcctggttcaaactcctggtctcaagcaatcctcccacctcaccctcccaaagtgctggaattacaggcatgagccatagcgcccagtgtaacttgtttatagaaattagcctatggtaaaattgattttgttatacattattttgcttaaattcatagttcccaagtaggtgaggacttactgtactccattcttcaaggccaagtccaggttctaccacctttttaatgttttccttgattgctgcagtgataacccaattattcccctttactcccaaacttttt

SEQ ID NO: 368847 - DNA, 529 bp, Homo sapiens
tttttgtgaccagaaatatgcaataggaacttaattattttttagagacagagtcttgcactgttgcccaggctgtaatgctgtggcctgactacagcttactgcagcctcaaactccagggctcaagcaatccccctacctcaaccccctgagtaactgggaccacaggtgcaaaccaccatgcctggctctttttttttttttttttttaagagagccagggcctcactgtgctgcccagcctggttcaaactcctggtctcaagcaatcctcccacctcacyctcccaaagtgctggaattacaggcatgagccatagcgcccagtgtaacttgtttatagaaattagcctatggtaaaattgattttgttatacattattttgcttaaattcatagttcccaagtaggtgaggacttactgtactccattcttcaaggccaagtccaggttctaccacctttttaatgttttccttgattgctgcagtgataacccaattattcccctttactcccaaacttttt

SEQ ID NO: 368848 - DNA, 529 bp, Homo sapiens
tttttgtgaccagaaatatgcaataggaacttaattattttttagagacagagtcttgcactgttgcccaggctgtaatgctgtggcctgactacagcttactgcagcctcaaactccagggctcaagcaatccccctacctcaaccccctgagtaactgggaccacaggtgcaaaccaccatgcctggctctttttttttttttttttttaagagagccagggcctcactgtgctgcccagcctggttcaaactcctggtctcaagcaatcctcccacctcaccctcccaaagtgctggaattacaggcatgagccatagcgcccagtgtaacttgtttatagaaattagcctatggtaaaattgattttgttatacattattttgcttaaattcatagttyccaagtaggtgaggacttactgtactccattcttcaaggccaagtccaggttctaccacctttttaatgttttccttgattgctgcagtgataacccaattattcccctttactcccaaacttttt

SEQ ID NO: 368849 - DNA, 568 bp, Homo sapiens
cgggattatgtcatttgcattagaagtggaagacttcaatacagacaaaatatcacttgatttttttccttccaaacactgattaacatcaaccaccagagtaacccctgggtaattgaaaaaaaagtttcttgttaatggttatcttccacttacttcaaggcatgcaaatatataattcaacgttttaggaatscattagtatcaaacatttttaccctttgagaatatttaccacatatgcccaagacaatcacaaattcacagaccagtttagtccataagaagaattagataccatgggagtatggtttattaaaaacaatagtctttcctggttactcatatgtggtatgaaggcactaggttttgcttgctgtagtaatctatgaaatggggtgaatacacacgaacatagatatgtagctgtaacctagggcattagcatgtatttgagaactagttttacaaagacatttgtttactttaggataagcaaaatcctttttaagttacagaaatcctggtattctcttgtatagtgctaatatatttagcaagattgtca

SEQ ID NO: 368850 - DNA, 556 bp, Homo sapiens
atgcattccatttccccagaagcagaggcaagcccaaataatttttaagtccttaaagcttactatattattaaggctatgtgaatctattccttgacaaaattaaagatttaaaaaaaaatcagaagtgtcaatggtagttatgactcaagaggatcaactaaaaatttattagaactaagagttcatcctggtgactagttataaaatgaatataaaattgataasttttctacatgtcaagaataaacaacacaatagaataaagatgttattcacaatagcagaaaaatatacatgagtaaacttaaatataaaggaataaaattataatggtacagtttggaacagattaataaatggaaaaagattaatgcctgaactgtaaagtttattattataaagatgccaattgccctcaaaaaaaaaccttaaacttcaatgcaatcatttaaaaacacaggaatgagtctagaattctatcaaatgcttttgcagtaactattgaaaagagcacatgggtttttctcccttaagctcttatggtgataaagaa

SEQ ID NO: 368851 - DNA, 556 bp, Homo sapiens
atgcattccatttccccagaagcagaggcaagcccaaataatttttaagtccttaaagcttactatattattaaggctatgtgaatctattccttgacaaaattaaagatttaaaaaaaaatcagaagtgtcaatggtagttatgactcaagaggatcaactaaaaatttattagaactaagagttcatcctggtgactagttataaaatgaatataaaattgataagttttctacatgtcaagaataaacaacacaatagaataaagatgttattcacaatagcagaaaaatatacatgagtaaacttaaatataaaggaataaaattataatggtacagtttkgaacagattaataaatggaaaaagattaatgcctgaactgtaaagtttattattataaagatgccaattgccctcaaaaaaaaaccttaaacttcaatgcaatcatttaaaaacacaggaatgagtctagaattctatcaaatgcttttgcagtaactattgaaaagagcacatgggtttttctcccttaagctcttatggtgataaagaa

SEQ ID NO: 368852 - DNA, 568 bp, Homo sapiens
cgggattatgtcatttgcattagaagtggaagacttcaatacagacaaaatatcacttgatttttttccttccaaacactgattaacatcaaccaccagagtaacccctgggtaattgaaaaaaaagtttcttgttaatggttatcttccacttacttcaaggcatgcaaatatataattcaacgttttaggaatgcattagtatcaaacatttttaccctttgagaatatttaccacatatgcccaagacaatcacaaattcacagaccagtttagtccayaagaagaattagataccatgggagtatggtttattaaaaacaatagtctttcctggttactcatatgtggtatgaaggcactaggttttgcttgctgtagtaatctatgaaatggggtgaatacacacgaacatagatatgtagctgtaacctagggcattagcatgtatttgagaactagttttacaaagacatttgtttactttaggataagcaaaatcctttttaagttacagaaatcctggtattctcttgtatagtgctaatatatttagcaagattgtca

SEQ ID NO: 368853 - DNA, 633 bp, Homo sapiens
  misc_feature (1)...(633): n = A,T,C or G
ggacaaaatgaaagtgtccagggatcagtgtaacagtggtacatccatggtaccgtatatagggtagcacacctggatcctgttttatagtaggggcttaaagtgagaatatgtttaaaaaacaagaaccaaaactggccttgacttttggcccagcactcacaggaaacagcaaagaaaaagaagaaaactttgcaaatgcaattaattaacaaagtcatatgttttatttcaagagtgatcttagtattcctaagttaaatacagcattagaagaccagacctaagaccttacccaaacacactaaaataaaacataataaactgtgagagaagtatctgcccactctatccgcgagcttggagcaaatgagttagaaaagtcaaagctggaaggtggaggagagatcaatgattttagcaacactcacccactgttgctgacaagtcaaaagctcataagccacagaagatggntgttgctttgttttcatggtggaaaacacagctcgaagcttgaatttggtaatgcatactacagaaaagcagtgaatgtatggactgcagaagctacatagytcctcattcttcactctattttcataagcaagatgcaaatgataaagcagcaag

SEQ ID NO: 368854 - DNA, 543 bp, Homo sapiens
ataaccaaaataaaagcaatgaaaaaaagacaagctgtagtctaaaatgtggactaatatttattttgtggagagaggatacagatggtctttttctgggcttctctgaatttctaaaaacatttctcaaaaaatttttctaaacttcaattttagccggctaaatgattgttttattaaagtcttgtggaagattataatgagctggaactctggagtgaaacttcatgaacacaaatttactttaataaatgtaaacatttttatttataacattattcaaggcaaaaacttttgctcagtgacctttttgaccagactagaaaaacagactcaaaataaatttgacaagtaatcttgtctactgttaaccttgaagattattcaaacattctatctgtattyaatatacatatttaaagaatatattttgcctaaagaagtgaagggtactatgaatcatgcaataaatgggaaatcattccttttccaactatatgcaacatattccctacagctgtaagagaaataactgttcagaat

SEQ ID NO: 368855 - DNA, 568 bp, Homo sapiens
cgggattatgtcatttgcattagaagtggaagacttcaatacagacaaaatatcacttgatttttttccttccaaacactgattaacatcaaccaccagagtaacccctgggtaattgaaaaaaaagtttcttgttaatggttatcttccacttacttcaaggcatgcaaatatataattcaacgttttaggaatgcattagtatcaaacatttttaccctttgagaatatttaccacatatgcccaagacaatcacaaattcacagaccagtttagtccataagaagaattagataccatgggagtatggtttattaaaaacaatagtctttcctggttactcatatgtggtatgaaggcactaggttttgcttgctgtagtaatctatgaaatggggtgaatacacacgaacatagatatgtagctgtaacctagggcattagcatgtatttgagaactagttttacaaagacatttgtttactttaggataagcaaaatcctttttaagttacrgaaatcctggtattctcttgtatagtgctaatatatttagcaagattgtca

SEQ ID NO: 368856 - DNA, 625 bp, Homo sapiens
aacaatagaaaaataatgtaatgactattatgactaatagtaagagatactaactctgtagtatctcttccattttaaataactctgaagtaaggagaaactgggagaggctgacttgaaaataagtgtctaaagactgtcccctgacagtgwaacttttagataagcccatcatggagctgataatagctaagcagccacctcaagagcagagggctcccaggccagcaggacgtgacgttaacctggttgcaactattaacacctctaaaaaaaaagaatgtgttactcagaagggggattattcaaatacaaaagtgcaaaatagagaggactgcagcattaaatattatataagtgcctttaacctctttccaagagagcaggtgctcagatactgaccatggacttattttttttatttagtcggaatgttaaagctatacctaatgtaaagataaatgctttatgtgacagaattggttgcctgcttacccaatgtgccctggttgatgtctgtgatgtgaattggtgggaccccatcccctgccattttattggggcgtgctgctaatgcatgagctgctataacatgaattttgtttttatttggtttgaccaaggc

SEQ ID NO: 368857 - DNA, 625 bp, Homo sapiens
aacaatagaaaaataatgtaatgactattatgactaatagtaagagatactaactctgtagtatctcttccattttaaataactctgaagtaaggagaaactgggagaggctgacttgaaaataagtgtctaaagactgtcccctgacagtgtaacttttagataagcccatcatggagctgataatagctaagcagccacctcaagagcagagggctcccaggccagcaggacgtgacgttaacctggttgcaactattaacacctctaaaaaaaaagaatgtgttactcagaagggggattatycaaatacaaaagtgcaaaatagagaggactgcagcattaaatattatataagtgcctttaacctctttccaagagagcaggtgctcagatactgaccatggacttattttttttatttagtcggaatgttaaagctatacctaatgtaaagataaatgctttatgtgacagaattggttgcctgcttacccaatgtgccctggttgatgtctgtgatgtgaattggtgggaccccatcccctgccattttattggggcgtgctgctaatgcatgagctgctataacatgaattttgtttttatttggtttgaccaaggc

SEQ ID NO: 368858 - DNA, 625 bp, Homo sapiens
aacaatagaaaaataatgtaatgactattatgactaatagtaagagatactaactctgtagtatctcttccattttaaataactctgaagtaaggagaaactgggagaggctgacttgaaaataagtgtctaaagactgtcccctgacagtgtaacttttagataagcccatcatggagctgataatagctaagcagccacctcaagagcagagggctcccaggccagcaggacgtgacgttaacctggttgcaactattaacacctctaaaaaaaaagaatgtgttactcagaagggggattattcaaatacaaaagtgcaaaatagagaggactgcagcattaaatattayataagtgcctttaacctctttccaagagagcaggtgctcagatactgaccatggacttattttttttatttagtcggaatgttaaagctatacctaatgtaaagataaatgctttatgtgacagaattggttgcctgcttacccaatgtgccctggttgatgtctgtgatgtgaattggtgggaccccatcccctgccattttattggggcgtgctgctaatgcatgagctgctataacatgaattttgtttttatttggtttgaccaaggc

SEQ ID NO: 368859 - DNA, 625 bp, Homo sapiens
aacaatagaaaaataatgtaatgactattatgactaatagtaagagatactaactctgtagtatctcttccattttaaataactctgaagtaaggagaaactgggagaggctgacttgaaaataagtgtctaaagactgtcccctgacagtgtaacttttagataagcccatcatggagctgataatagctaagcagccacctcaagagcagagggctcccaggccagcaggacgtgacgttaacctggttgcaactattaacacctctaaaaaaaaagaatgtgttactcagaagggggattattcaaatacaaaagtgcaaaatagagaggactgcagcattaaatattatataagtgcctttaacctctttccaagagagcaggtgctcagatactgaccatggacttattttttttatttagtcggaatgttaaagctatacctaatgtaaagataaatgctttatgtgacagaattggttgcctgcttacccaatgtgccctggttgatgtctgtgatgtgaattggtgggacccyatcccctgccattttattggggcgtgctgctaatgcatgagctgctataacatgaattttgtttttatttggtttgaccaaggc

SEQ ID NO: 368860 - DNA, 436 bp, Homo sapiens
atttcttttgtaactagaaacgcttttaactagaagggacctaaaaataatatgctttaaagtttcaaatgccataaaatttatgcggacaagactaatggaatgttatctagtaggagttccctgaggaaaaataagtttagattgacacttttctttctgacaaagatgaaggtagggctggatgtagtgcctcatgcctgtaatcccagcactgtgggaggctgagacaggaggatcacttgagcccaggagatcgagaccagcctgggcaatgtagggagaccccatctctaaaaaaaaaattttttttwaattaataagccaggcacagtggcatgtgcttgtggtcccgggtactcagagggctgggacttgcttgagcccagaaggttgaggctgcagtgagccatgatcatgccactgcactccagct

SEQ ID NO: 368861 - DNA, 564 bp, Homo sapiens
ttaatgtcattgccctgcgagtctgaaataaaacatgaaacagaggtgtgatcttcactgcagaaactcagccagctaagggagccagaacacacagacatgttatgtatttgtcagtcagccatcacacaaagtgtcacttttcctggacatggaactaggtttccatggagtagactcacaggaggtattctgttaagcacgagtggctgcttggcagtttcaggcccagaatgaggctttggacacaagggcaaagggaatgagaatggtgctagcttcaggccaaggtrtaggagacattgagcatcctatgtctgaatgacagaactgttgcacaaggacaaagctcacagacataagccagctcttagatgattataattcttgggtctcttaactgtgagagcatagtaggcaaatccaagatgtctgtcatgatcttggtcccctgatgtcatccctgtgattatgtgctgttacatggcaaagggattttgcagatatattaataattaaggttattaatcgctcactttgagttaattgaaagggagattacct

SEQ ID NO: 368862 - DNA, 596 bp, Homo sapiens
gaaactttaaactattgatacaactgttttgaaatacaaaaaatgataatagcttttagcatcttgtcatataagagaagaaagaaaccttgggaatattaattgattagcttccctgaagacactgagaccataaacatcagacacaatttggtaattggtctttcttgtcatatttttatttattctgaatcacgacattgagtactggctagtttataagacagtctactgagattttctattttaactgtaacagcatattttttatacttcttaaccttatataatcatgcttttttcttctttgctgtggaaaattatattcgcccattttaattttgttgtgtaagttgattttttaaaattcatcagtcttgcagtatctagcccactgaccataactatactcattttctgataatcagtgttaaacactatagacatctccctggattgaaggaaaayaactgtttttctgcaagttcaatatggtacctgtaaaaataaatgattataaccaaaatgaagtgcagaattactactttttcctcaaccacagaaagaagcagctaacaatagcccaagaaacaaca

SEQ ID NO: 368863 - DNA, 601 bp, Homo sapiens
aggctgcaaattcctgggcatagagactggacatttgtcagttttatggtccccaaatatctagtacagtgctttgcacatactcagtaccccaagctgtttgttaaatgaataatgattataatgtattgatatatttatgtgaagtttgaaaaagtgtctttgtatgctttatcttagttgaacatcctaataatcctagaaaatagactggccaagccaacaaaagaagttgacctcacaggaaggtgagattcactgagcttgtctgaaagttgttggagtccagatttgtgttccctgtttgtgcttaaggcactctagtgttctgccagggtcaaaataacaaggcctaaacccaacagcttattatgtggttgcaaacactctaagtaactttacctgaattagcccctgcaacctgcacgaaacccttgtaggtagatrgaattattttatcatttaacacaaatgtaaatgcccaaagtcatgcaatccagaggtggtacagccaggatttaagcactgtgctcttaatctttaggttaccctacagcaagtagctatttgtgattcactgaatgaataacacaagtcagca

SEQ ID NO: 368864 - DNA, 569 bp, Homo sapiens
ggttcttagaattctggaatcaggcctatctcacatgtcgtcacaggcaaaaactctaataaagtgatattaggacctgaaaaccatgggctttttttagtgctcatagaagtctgaaacaatgactcaggcaatgattctcaatatggtgggtggagatttcggggtccgggggagaagtagctgtcagaatctaactaygtcaacattttcaaaccacagagcaaccatccgtagtgcccagtaagcctcttaattcctagcaggggtttgtctgagaattgactcaacaaatgtagtaaataaatgatagtagtgggcatgtattaaccttccaacctgttaagggatggggtgagggaaggttgagaatgattgtttcaagactcaaaccgatccattttgaacacccatgctctcttgattgattctgataaatgtttaaatttttacctttacaaattattgttaatcaacatacctgtagatcttgatggaataaattaaaagtgtagactaaattttttttcaacatacctgacaaagccaaatagttgatatcgtggcca

SEQ ID NO: 368865 - DNA, 590 bp, Homo sapiens
gtcctatagtcaacaacacatggttcttagaattctggaatcaggcctatctcacatgtcgtcacaggcaaaaactctaataaagtgatattaggacctgaaaaccatgggctttttttagtgctcatagaagtctgaaacaatgactcaggcaatgattctcaatatggtgggtggagatttcggggtccgggggagaagtagctgtcagaatctaactatgtcaacattttcaaaccacagagcaaccatccgtagtrcccagtaagcctcttaattcctagcaggggtttgtctgagaattgactcaacaaatgtagtaaataaatgatagtagtgggcatgtattaaccttccaacctgttaagggatggggtgagggaaggttgagaatgattgtttcaagactcaaaccgatccattttgaacacccatgctctcttgattgattctgataaatgtttaaatttttacctttacaaattattgttaatcaacatacctgtagatcttgatggaataaattaaaagtgtagactaaattttttttcaacatacctgacaaagccaaatagttgatatcgtggcca

SEQ ID NO: 368866 - DNA, 528 bp, Homo sapiens
atatcctaaaaaccctgatttgatcattacacattgtatgcatgtatcaaaatatcacatgtactccataaatatgtacraatattatgtattaataataaatcaataaaaatttatatgttgaatccctagccgtcaatacctcagaatgtgactgtatttagagatagagccaaaatgaagtcatatgggtgggccctcatccaatatgactaatattcaatcctagtatctgtagaagaggagattaggaccaaaaaaacacagacctaagggaaccatgtgaggacacagtgagatcaagtgaggacacttgctgtcttcaagccaaggagagaggcttcagaagaaatcaaacctgccaacatcttgatcttttatcctccagaactgtgataaattaaacttctattgtttaagccaaccagtctgcggtatttcattgcggcagccttagtaaacgaataacccctctgcccaaattacagatgaagtctctaacgaggttctcaggtcacctaatagact

SEQ ID NO: 368867 - DNA, 588 bp, Homo sapiens
aacataagtcatcaaactcttactgatttccatgttacattttaaactaatggcctttcaagacartaacccagaaatagctttaatagaagatagttctatttctttctcaaagggcaatcaagtaagatgaaagttgtaagggtgccatgtcaattcacctgattctaagtcaaattaaacaaagaagtatgatgatgctttgtctagtgccaggaatgcatattcaatgttctgggaacaaaggaaatggcctaaaagtttatcatgcctattcatatgcctagagattggcccacagaggaaaagtaaaggcagataaaaattaaaagcctcaaggaaaatagtttatatgtgtttagtttttcacattttacaaaatttcctattagacacatacacacacataattttcaatgcctcaagaagataaagctgaaatcaaaatgacaggaaaatatactagtttttcttacaaaatgatgactactattaaaaataggttgcaaaaacatgttagaaagaggagactaaaacaccagatggtgaataaatgaaatgcctggagttggaaataccgaagtgagt

SEQ ID NO: 368868 - DNA, 432 bp, Homo sapiens
aatatgtcatgatgactgacagagttctcttccaaaggcagaaaaaaaatcatcctccaatgaattaatcttaaggtagcagtggtgggggagggaaatgctttttaattacaggtccrttaactatggttgtttgttgtaccagtcaattgctcctaagatacagagttgatcccacagccaccacaatgtccagggcaggttttcacctggagctacaaagtataattccacatactgtgggcaggagtagcgtgattaatgaaaggaatgataaagggtttgaggtatggctgcttgtttgttcgtgtcttttagttttccattgcagaagattcttgcaggttatattcaccctggaaagtcttttgatctcaccacatgccagcattttacataaacaccatccacagtagtagaaagaagcccatc

SEQ ID NO: 368869 - DNA, 478 bp, Homo sapiens
gtccccagcctgacctttcccttcagcccatcttcctcaaagcactgcactcccgatcaataatgtgagctctatcatcagggcctcctggctaggtaagtggctaggtgttccctctaaaaatataattcagtgtaaatgttaactttattctcctttcctgaaatatttacattttaagttaatgtcttagatatataacactttagcttccaaaaagccatctactatataggctaattgaagaagatatgttttcttaagcagtgcaacttgctaggagcagattttaaatcagatcacacaggcatgtgctgaagtttrtcagggtctctgctgggtgttttttagcaaggtatatggagtgtgtgatgtgttgtttacctgtctgcacagggttcatattgactatgtgataccaaacgtagcattccataatcctagaaaagcattttaatgagggtaataatttcagagc

SEQ ID NO: 368870 - DNA, 574 bp, Homo sapiens
ctacaagtgccctggtagaggcaattctttttttttttttaactcaatgattctaacagcataagccctcaggtgaataaataacctactactttcttgccagtagcaccaggtcatataatctgtggcctggaagctccatcaccacacaggtgccaccatgcctggagctttgtgggacttttagcaccaggttcccttccatgggaaacagagtgacatctacttgctcctactgcaggtaagttaaaaggcatccattcatggtaamagtctgagtggagtcaagggacataaaagggcaacaaggcacagaaacctaactggagaggctaggagacttgggctgacttggcagatgacaagctttgttgcagattttaaaaataatgttgctttaagaacagaaagcaagccaagccaagaaacatcgacagtaagttttccttctttttcccccctaagatatgctgaagccaggtttaattttatgtcaggaaagaattccctcctgagactttcctggctacggttcagttgagaataatgttttccagccatgtttccagagtcc

SEQ ID NO: 368871 - DNA, 574 bp, Homo sapiens
ctacaagtgccctggtagaggcaattctttttttttttttaactcaatgattctaacagcataagccctcaggtgaataaataacctactactttcttgccagtagcaccaggtcatataatctgtggcctggaagctccatcaccacacaggtgccaccatgcctggagctttgtgggacttttagcaccaggttcccttccatgggaaacagagtgacatctacttgctcctactgcaggtaagttaaaaggcatccattcatggtaacagtctgagtggagtcaagggacataaaagggcaacaaggcacagaaacmtaactggagaggctaggagacttgggctgacttggcagatgacaagctttgttgcagattttaaaaataatgttgctttaagaacagaaagcaagccaagccaagaaacatcgacagtaagttttccttctttttcccccctaagatatgctgaagccaggtttaattttatgtcaggaaagaattccctcctgagactttcctggctacggttcagttgagaataatgttttccagccatgtttccagagtcc

SEQ ID NO: 368872 - DNA, 565 bp, Homo sapiens
tcttttccaattattttataccaacacttcattctcctctggcatctaaggtagctccatagtttccagttgctttctgatattaaggcttagtccaatttaaaacatcaaacattagtttattctccccttctttcctcttccactttacccagtgcaagtaggaacgggcaccctctctaattaggagtctgcctcaggtacaccatcaccttgcattccccttgttgtattcctcttcakggtatcgagctgagaggtagaacagggaaaggaaagagtgtaatgctagcaggctgctatcataacctttccctcttggttcctgctgtttttctggccagcacagcctagctgttgatatcatctgcaaggcaggccttcaaattctagctctggggaataaaggtatgagtttttggagcttcagtgattttaagccaactttttcaagcccctgagctctcactgctggccatatagtgcatggcctcgtgttgccgggaatctgtcttggaaaggaggttgaacaagcccagctacattcaaagtagcatccacttga

SEQ ID NO: 368873 - DNA, 565 bp, Homo sapiens
cttgaacctcaggcatcacctgtcttggctctgaaactgggtgaatccacactacccctacatctcttctctctccaagactgttctcccctgctcctatgatgaagaggtaaatccacaagtccttttcctcagcagatgtccaattaggtaactaaattatatgacagcctttgtaaatgagtctcttagagcctctcaggaggttttaggaagaaagaccaggtactctaatttcccttccctcccttggggaaggcagggaatttcctcttatctcaaacgcaccgcattctaatgacccttggatctgctcctctctgtcttgttcccagtcttattatatagaagacggaggctggcagcagtttgctgcatccatcayctcttaagaagctttggctctgactctggtgactgtcagttcagatattaaatactttcctgtcctcagccttggtcctaattaccaacctcagaagtcccactaagagcttcttacatgtggaaggtaaacaaagttccttggaagaaaaaaaaaaaaatacagataacatacggatat

SEQ ID NO: 368874 - DNA, 579 bp, Homo sapiens
tatcaatatgaaatagatgagcaactagggagttgggagacgacatgatctggagagctggtgagtgcatgaactcagtatataacaatgaggaaggaagagaaggaacagagatgagaaatctttaatagtagaattaaattgagaatgactmagggattttaagctttggtgtctggacgtgtaagatatgcagatattcttgctgagataggaaacacaggaagaactggctgagaagaagagaatgagttcatttggagatgcaatactttaaggtgatgaagaacatctaggaggagcttcccaggagtcatttgggcctggagttcaaagcagactggctaaatgagggaacaatcagtgaatagaggaggcttgaagctaggtgagtgcacgagagaatgtccagttagagtatgtaaagggagcagggagcttgggacagagcacttaaagaactgaaaaaggatggagaggaggtagtgaagaagctggagataaagatatcaagagaaaaaaatcaggatggaccagtgtctcaaaagccaaggaaagaggaaatgtccagcccgactg

SEQ ID NO: 368875 - DNA, 579 bp, Homo sapiens
tatcaatatgaaatagatgagcaactagggagttgggagacgacatgatctggagagctggtgagtgcatgaactcagtatataacaatgaggaaggaagagaaggaacagagatgagaaatctttaatagtagaattaaattgagaatgactaagggattttaagctttggtgtctggrcgtgtaagatatgcagatattcttgctgagataggaaacacaggaagaactggctgagaagaagagaatgagttcatttggagatgcaatactttaaggtgatgaagaacatctaggaggagcttcccaggagtcatttgggcctggagttcaaagcagactggctaaatgagggaacaatcagtgaatagaggaggcttgaagctaggtgagtgcacgagagaatgtccagttagagtatgtaaagggagcagggagcttgggacagagcacttaaagaactgaaaaaggatggagaggaggtagtgaagaagctggagataaagatatcaagagaaaaaaatcaggatggaccagtgtctcaaaagccaaggaaagaggaaatgtccagcccgactg

SEQ ID NO: 368876 - DNA, 473 bp, Homo sapiens
aagattaataaagtgcttgctgtacttcaggcatatgctgagaatcgtggtgatattaatgacatagtctatgagtcatgcccagtgaccaagggctcatgtgtcctctcaacatttgaagcagtcttcgaagctacccaaagccccactggatgttgatctcatcagaatatggttatcaatgatctttgacccgttgtcawcctgaatcaaggataatttcgatcttagaataaatggaggtaaaaagaagtaaaagacttttatcttgagcccctcactatagactggtttctctctctttcaagggcctatctctcccctcttttgttgaaagcaggcctgctcaactatactcaaagcataggaagctacttaggtcatttgcatatttttagtattttatattcctttgcaacctttgtaacttttactttctacccaacgtgagaatccctcctacacagtaaggc

SEQ ID NO: 368877 - DNA, 568 bp, Homo sapiens
tgtcttcttttgagaagtgtctgttcacgtcctttgcccattttttaatggggttgtttgatttttgcttgttgaattgtttgtttcttatagattctggaaattagacctttgtcagatgcatagtttgtgaatattttctcccattctgtaggttgtctgtttactctgctgatagtytcttcaatatcactactggatatatacttaatggaaaataattattctacagacaagacacatgcacttatatgttcattgcagcactattcacaatagcaaacacatggaatgaacctaggtgcccatcaacagtgtaccagataaagaaaatatggtacatatacaccatggaatactatacagatataaaaaagagcaagaccatgtcctttgcaacaacatggatgcagctgcaggccattatcctaagcaaattaatgcaggaacaaaacaccaaatgtcacatgttctcacttataaggaggagctgaatattgggtaaacatggacataaaaatgacaacggtagatattagggactaatatgggatgttggagggaggaa

SEQ ID NO: 368878 - DNA, 568 bp, Homo sapiens
tgtcttcttttgagaagtgtctgttcacgtcctttgcccattttttaatggggttgtttgatttttgcttgttgaattgtttgtttcttatagattctggaaattagacctttgtcagatgcatagtttgtgaatattttctcccattctgtaggttgtctgtttactctgctgatagtttcttcaatatcactactggatatatacttaatggaaaataattattctacagacaagacacatgcacttatatgttcattgcagcactattcacaatagcaaacacatggaatgaacctaggtgcccatcaacagtgtaccagataaagaaaatrtggtacatatacaccatggaatactatacagatataaaaaagagcaagaccatgtcctttgcaacaacatggatgcagctgcaggccattatcctaagcaaattaatgcaggaacaaaacaccaaatgtcacatgttctcacttataaggaggagctgaatattgggtaaacatggacataaaaatgacaacggtagatattagggactaatatgggatgttggagggaggaa

SEQ ID NO: 368879 - DNA, 568 bp, Homo sapiens
tgtcttcttttgagaagtgtctgttcacgtcctttgcccattttttaatggggttgtttgatttttgcttgttgaattgtttgtttcttatagattctggaaattagacctttgtcagatgcatagtttgtgaatattttctcccattctgtaggttgtctgtttactctgctgatagtttcttcaatatcactactggatatatacttaatggaaaataattattctacagacaagacacatgcacttatatgttcattgcagcactattcacaatagcaaacacatggaatgaacctaggtgcccatcaacagtgtaccagataaagaaaatatggtacatatacaccatggaatactatacagatataaaaaagagcaagaccatgtcctttgcaacaacatggatgcagctgcaggccattatcctaagcaaattaatgcaggaacaaaacaccaaatgtcacatgttctcacttayaaggaggagctgaatattgggtaaacatggacataaaaatgacaacggtagatattagggactaatatgggatgttggagggaggaa

SEQ ID NO: 368880 - DNA, 554 bp, Homo sapiens
ttgcatgctccttcttgctacatgatatttttgagttctattaaatttgcttataccatatttacttttatgctcttacttttactaagtcctactgatattgagcacaatttctggatcactcagatgtgcagtaatgttaatgtagggatgaaatgtccttaagacaagagcatacagtagctgtgtttgtgatgcrgcatgtcaacatattaagacaattcaactaaaataaagatttgattgactgtaatgaagtgaagaaattctgatgatatgtatatatttatattatggcaaacctatagaatttaatattatgcagatattgaaaatcagattttcaaagagtactacatggcataaaaatatatgtaatgttcaggaagaaaatgaaggatattaaattgtatatgtagcaattctcaatttataaatgtaaataaatacatatgaataaaatacagtgataggaagatagatacatcgaaattggaaggaaacatacaaaaacaggggtgatatttggatagcagaattacaggtggttttga

SEQ ID NO: 368881 - DNA, 566 bp, Homo sapiens
gcatttactttttggggagaggaaatataactttatacctaattgttatctcaacatttaaaaaatccataagaacataaaaaaataattatctgagcatcctatccatatgctgtcaaatttctagatattgaaaacttccacagttgtctgaattatcctgttcatttttaatgtatcatttgcattaaattataagactgcctactgtcaaaatattcaaagttttgrttagggaatagttgctatcacaataaattgtgccttagcaacaatgtgagatctttatggactaaacacaaataattcaaaactgaaacatgtaaaatatgttcatcaccatcattaaatggcatcagacaggattttccaatttgtgatgattgttcataaaatttaaacaaaagcaaaataatagcattgaacaattttctgtgaggtatgttctataatacctttacctgaatttaaataaacacagtaataattagttgaaaaaaatcaataacattgatttatttccctgctcctagcttgtttcacatactcttaagagcagtaatgtg

SEQ ID NO: 368882 - DNA, 566 bp, Homo sapiens
gcatttactttttggggagaggaaatataactttatacctaattgttatctcaacatttaaaaaatccataagaacataaaaaaataattatctgagcatcctatccatatgctgtcaaatttctagatattgaaaacttccacagttgtctgaattatcctgttcatttttaatgtatcatttgcattaaattataagactgcctactgtcaaaatattcaaagttttgattagggaatagttgctatcacaataaattgtgccttagcaacaatgtgagatctttatggactaaacacaaataattcaaaactgaaacatgtaaaatatgttcatcaccatcattaaatggcatcagacaggattttccaatttgtgatgattgttcataaaatttaaacaaaagcaaaataatagcattgaacaattttctgtgaggtatgttctataatacctttayctgaatttaaataaacacagtaataattagttgaaaaaaatcaataacattgatttatttccctgctcctagcttgtttcacatactcttaagagcagtaatgtg

SEQ ID NO: 368883 - DNA, 564 bp, Homo sapiens
cacactcaagtgaaggagattattcagcacatgaacgtcagtgggcagatagtgggggccttcgcagcattctgcctaccacaagcctttaataaaaaacacctttcttacttttgtccaccttgttgtctctgttagattcttctcacttttcacctggctaattcctaaacatcyttaggaactcactttacatattacttcttcatattctcctttgctgactattctattgaaaggacatgtccatctggtactttctcctataccatattttaacagcttcactgagatataattcatataccatacagttcacccatgtaaagtgtaaaattaagtggattttaggatattcacagagttgtgcaaccaacatcatgatctaattttagaacatttccatttgcccaaaaagaaggtccatacccattagcagtcattgtccttgcctctctcccaccagccctaggtaactactaatctactttctgcccctatagatttacctgccctggacctttcacacaagcagaagcatacaatttatggttttatgtgact

SEQ ID NO: 368884 - DNA, 668 bp, Homo sapiens
acaatgattaccagaggcttggggatgggctggtggagagagagggaatggggagttcttgatcaaagggtacaaggttttggatagacaagtgcaatagattttaatgtctagtgcacatcagtgtggctattatcaataataatgtgttatatatttcaaaataattgagaaactaaatttcaaatgtttsaccataaaaaatgacaggtagttgaggtgatagataggatttaatcatgccacattgggtacctatatcaaaacatcacattctaccctgtaaatgtataaattatgatttgtcacttaaaaatattaataattattataaatgaataaataaataaataaataaaaccatttcctaacccaaagtcacagaggtttcatcccatgctttcttctaacagttttatagagttagctttttaacatttaggtctgtgatccatttttacttaatttttgtatatgacatgaaccagatgtccaatttcactcttttgcatgtgactattccactgtcccagcaccatttgttaaaaagaccattatttctctcttcatattatcttagcagctttgttggaaatcaattggctattaatgtaagagtctatttctggcctctcaattcaatttcattgatctctatgtctgtcttt

SEQ ID NO: 368885 - DNA, 604 bp, Homo sapiens
tttcgcaatatcttaacctttctgagtcccagtttcttaagttataaaatgaaaatagtaatgccaaaatcttggtatttttgaggattaagtgagatcatgtaaatgtgttccatttaagtgtttttttgttttttgtttttgagacagagttttgctcttgttgcccagtctggcaatggagcaatctcggctcgctacatyctctgcctcctgggttcaagcaattcttctgcctcagcctcccgagtagctgggattaccggcatgcgccaccacacctggctaattttgtatttttagtagagacaaggtttctccatgttggtcaggctggtctcgacctcccaacctcaggtgatcctcctgcctcggcctcccaaagtgctgggattacaggtgtgagccatttaagttttttaagaataaacaacaaaaacaactaacacaaaaaaagaactggaaggatattaagtgatacattatttgacatctgttttgactgtaaaggaaaacctaaaataaatttttctcaagcaagttagtaactcattactctctcacattcaagggtttggagacatcctgtcaagactatcatggc

SEQ ID NO: 368886 - DNA, 549 bp, Homo sapiens
atcaacagggtgcaaggatttttagggcagtgaagctcttctgtgtggtactacaatggtggatgcctgttattatatgtttgtcaaaacccatagcatgtgcaatagcaagagggaactctcatgtraacactaggctttgagtgataatgatgtgagagtgtacagtcacagagtaagacaaatctaccactctggtgcagggtgttgatattccgcgaggctgcgtatggggtggggtgaaggacagagtgtatatgagaactctctgtacttcctgctcagttttcctgtgaatctaaaacagctgtaaaaataaagcccacttataaagacagacgtggagaatttattcaaattaatttacaagcacattaagaaatagttccacagtttagactagcagttacaaagaaatctttaaatggaaactcctttatttagggtgtggccataggaacaaatgcattatttttttaaaataaaaaagtatactttatgtaaccagttaattggcaacccactctctagaaatgggcctgacaagct

SEQ ID NO: 368887 - DNA, 413 bp, Homo sapiens
aaataattttctgatgtaaatattctggcagagaataaattagtatatgggaattcggtagtcatttttctacaacaaccaacttatagtcttccattttattacctcttttatccaaatttaaataaattttgctgaacaaaacatttagaattagattcaataaatcaaatcattataatattttgtmattgttgactttagaagagtccagggcatggagaaaaagcaaggaactttgtgtgataaaagtaacaaacttgaaacttcttaaatattaaataatttatatttatatttttaataatttgggcaattatttgggaaaattaagtcagattttttacctcatgctattaaaaaaggtgacgtaagtatttgtatgtgtgactggatgaataatatctctaaat

SEQ ID NO: 368888 - DNA, 620 bp, Homo sapiens
tgagactctgtctcaaaagaaaaagaaaaagaaaaaaaaaaacagttaatgtagaattttataattttcttccataaatatttggtagaattcatgagtgaagctatctggaagtttcctatgtaagaaagatagattataaattcaatttctctaaataagttatctgtttcttcttcagtgtgctttggtagttgctgttctttaaaaaaaatgattcattttaycgaagttgttgaattaattggcataaagtcttttaagacatttttcttatccttttaatgtcagtagaacatgtggtaatgtttattttttcattactaatattgattattcctctcctcttttaattgaccaatttagctggaagtttctacattttattgacttttcaaagaatcattcttagtttattacctttctctattatttgcttattttctgtttcactggctttccctttgttactgaaggatattttcactgaacataaaattctggtgtgacaggtattttcttttagcacctttaaaatgtgctaattacttctggcttctataggttctgatgaaaaatccacaattatttgaatcattgtttctctatgggtaatgtgc

SEQ ID NO: 368889 - DNA, 558 bp, Homo sapiens
attttttaaaaaagaaaatgtgtgccttcctccagacagacatagccgtgttccagagagagggctcagccaggagacttgggatggacttcagcctttcattgcgcccttgttcagccacctttggagaggcactacctacataaacatagccagctgctctggctaagagaacatacaacacatcatccggtacttgctttatgaattagtgagtttaaatacaaaccaattttcattgccaaacccttgattattagaactaggtgagcatacattgttataaatatatgtaagtttctggcaaatttttactttccacaacagatgggagtaaacttgcagaatatattttcttgatatggtacatgctaacatattaaatagtttgaaaagaattaagattaataaactcaagcagctacaggggtatgtatctagtttgacataaaatgggttattatgtttttgcatatgaacataacttcataaactcaccaaaagttgagtgggagtccaatgtaactcacctrtgatgacagatgacatcacagtgat

SEQ ID NO: 368890 - DNA, 577 bp, Homo sapiens
ctgcattcttttaccttctagttatctgcccttattctttgttgtaaatgggagatagtaagagtacctaccttyatatggatgctgtgggaaataatttaataaagttgataaagcatgaagcacagtagctagcactcagtaaatacctaataaacagtagctgttaatattattgtacagtaaatctagggtccttggaaggagttctctaacttcatttaacgaatattcaaccagcaaatattgaaaaccttgctagagctgaacaactaaattatgttagcatttcagaaacctgctgacaatatcctgaacatcataaaaagacacattaatgacttcataaaatgtcttcaaaagtatttttctcaactggatgacaacagtgaagcagaaagaaaacttgttctaatcagtcgtggggccctactgaggaacttgacagcttcagaagaacccattctagaagtcatgtcagacaggtttttttttaatccaaaacttttacaaatgtatgcaaattagaaattgattttcagcacacaattctattaaagacaactgcgatagtagt

SEQ ID NO: 368891 - DNA, 577 bp, Homo sapiens
ctgcattcttttaccttctagttatctgcccttattctttgttgtaaatgggagatagtaagagtacctacctttatatggatgctgtgggaaataatttaataaagttgataaagcatgaagcacagtagctagcactcagtaaatacctaataaacagtagctgttaatattattgtacagtaaatctagggtccttggaaggagttctctaacttcatttaacgaatattcaaccagcaaatattgaaaaccttgctagagctgaacaactaaatyatgttagcatttcagaaacctgctgacaatatcctgaacatcataaaaagacacattaatgacttcataaaatgtcttcaaaagtatttttctcaactggatgacaacagtgaagcagaaagaaaacttgttctaatcagtcgtggggccctactgaggaacttgacagcttcagaagaacccattctagaagtcatgtcagacaggtttttttttaatccaaaacttttacaaatgtatgcaaattagaaattgattttcagcacacaattctattaaagacaactgcgatagtagt

SEQ ID NO: 368892 - DNA, 628 bp, Homo sapiens
caggtttttttttaatccaaaacttttacaaatgtatgcaaattagaaattgattttcagcacacaattctattaaagacaactgcgatagtagtcaggtaagctgatctatgctgctgtaagaaataaccagaaaatatcagtacataaaacaataaagacttatttcttgcaacatgtccattgcaagttgccaccatctctgtattcaggaacacgggctgataaagcaatcaccatttccagtgttgcagttagtgcaagttaatatcagcatgtgaaatcagaatcttctccagtcttcatcttcagctaaggaagactgagycaaaaatctctttcttaatgagtgataatgcacagtttcagtctactgatgaagatatatgattttataaatagatgagttgaattattgtttatatttcattgtctattatgtatttatgtgtttttaaaagtcttagccaataaaaagttcgacattttgacttttgcccttgacttcttatcagaacaagtcatgctggttttccacttaagatggtgatgttaggatttctttaccaaacaccagtttatttaaattaagaaagtatgtgttgatttaaagaaaactattaattaa

SEQ ID NO: 368893 - DNA, 547 bp, Homo sapiens
atattactttcacccaccatggcattccctatattacaataatctaatattaaacttacttgatggagctacattttaggtgattctacaaatatgagtatattaactttggggaaagaaacggagacaatatctggcaaataggtagcaatctagctgaaaaattktattaaaatgtgtaacatcattaattacctgctgaaacagagcaccatttttagatcagcagtttaagactatacataggactctgaaggctccaaggttgaacagaagatcctagaaataaacatttcacactggagagtcttccagcgttcagctgatcttctgctctatcaagttccaatcttcctgaaaaaaaacattagagttttgggtagattgtcttggatttcaagaatgttaaaaactacaaaacaaatagctaaactgcagaagctggatgagaagtagttctggaaattaaatataggatagacagtgctcctcttcatatttgacatcttagaggaacatttgtcttatctgttttctacctaaaatc

SEQ ID NO: 368894 - DNA, 547 bp, Homo sapiens
atattactttcacccaccatggcattccctatattacaataatctaatattaaacttacttgatggagctacattttaggtgattctacaaatatgagtatattaactttggggaaagaaacggagacaatatctggcaaataggtagcaatctagctgaaaaattttattaaaatgtgtaacatcattaattacctgctgaaacagagcaccatttttagatcagcagtttaagactatacataggactctgaaggctccaaggttgaacagaagatcctagaaataaacatttcacactggagagtcttccagcgttcagytgatcttctgctctatcaagttccaatcttcctgaaaaaaaacattagagttttgggtagattgtcttggatttcaagaatgttaaaaactacaaaacaaatagctaaactgcagaagctggatgagaagtagttctggaaattaaatataggatagacagtgctcctcttcatatttgacatcttagaggaacatttgtcttatctgttttctacctaaaatc

SEQ ID NO: 368895 - DNA, 547 bp, Homo sapiens
atattactttcacccaccatggcattccctatattacaataatctaatattaaacttacttgatggagctacattttaggtgattctacaaatatgagtatattaactttggggaaagaaacggagacaatatctggcaaataggtagcaatctagctgaaaaattttattaaaatgtgtaacatcattaattacctgctgaaacagagcaccatttttagatcagcagtttaagactatacataggactctgaaggctccaaggttgaacagaagatcctagaaataaacatttcacactggagagtcttccagcgttcagctgatcttctgctctatcaagttccaatcttcctgaaaaaaaacattagagytttgggtagattgtcttggatttcaagaatgttaaaaactacaaaacaaatagctaaactgcagaagctggatgagaagtagttctggaaattaaatataggatagacagtgctcctcttcatatttgacatcttagaggaacatttgtcttatctgttttctacctaaaatc

SEQ ID NO: 368896 - DNA, 531 bp, Homo sapiens
agacctatttcttggctaccaaaggctaaaagtaacacactgagcaaggcttactgctctttttaaaatttattgaaatagagaatgtcctatcctgtctatataattagtttatgtgtgtgagtctcaaggtcatagactatacaaattcattcagtgcytttcatgggtaggcactgaacaactccttctataaaacatgaatagggcaggacataaatatgatcaaaagcctgatagcattgttcacttaacaggtaaaggtttactagccactacatgggaaactcttgctaggtgatataagtagcattcatattttactttccgtagaagttatgatcctagtctttaactctgaagtcttcatttctttttgatcaagaaaaaggagtaaaattggacatttctataaaactttccatggacaattgttttacatgatattttcagaatagcatcatattggatggtgtcggtgttaaattgtgtccaaaaaatatgttgaagtcttcacttctggtatctgta

SEQ ID NO: 368897 - DNA, 559 bp, Homo sapiens
gtctttgtttaagcaactcaacttgtggtaacttgttacagcaaccctagggaatataaatagcaatatggtgcaatggaatgaaaattaaaaatctcgacaaaagatcttagtttaactccttctatccctttgccagccatgaagaagaacaattattatgatgagagtttcatttgtcttatctgtaaaatgggaataataacatttttcctaccaattcagaggatgatataaaaattaaatcaagctataataggtattccaaagtgtgttcaatggaacttgagggtttataagttctgtaatgaagtaggtttcaaaaaatcctatatgtatgacttctctgcaggagacacacaacacaggctattatacaaaaggcacaaaaatgacatacagtttggaatctatttagccttacytcacccagtcttcaaatttatttgaccatggaatatttcctttgtgggacttcaattaatattttgtggatgcaggtattcctttggagaacagtttggaaaatacgacattatgtcatcataagaactctggt

SEQ ID NO: 368898 - DNA, 601 bp, Homo sapiens
agcattcctgttcttacatatcgcccacatggcttctgctgaatagaattggaaaagctgtgtaaatgtagtaacagcttttatcaaatgcctactctgttcccaagtccaggaacaacaagagttcctctgcctccagaagggtggcaggaagaaaactaacaackgttagtgttctgagacccaggacagacaatttcacaaacgttacatcatttcatagaaatattcgtggtcttaatctttgtatattaaaacttatatgtgacaaagatatttctatatgaaaatatattttctttagtgacaaaaacaacttaaaactacatttttattaatattttattggcaaaaaaacaaaataagtatttaacaaccaagttcagaatccctgattattcatattttatgttagacaaaccagaaagtctcagtggactctcaactgttaactgtcctaagaattctgagagatgagttaattcgccattgttctagctgtgagaagatagcaccaaatataacaaatatagtttctgatcttccatagcttgtatattagagaaaggagaataaatacaaagaaatgagtataaatatt

SEQ ID NO: 368899 - DNA, 567 bp, Homo sapiens
acaatagaactgacaacagcttcctgagcgtccatgcacattgcgtgctaatttgcctctgtggtcaacctggtcaatatgggtttgacagaagctgaccaaggtgtagccatcagactcttgaatgcatgtgacatttgtcaagcgataatcaacaaaccaagattttctgaggacctgcctgtgcccagcactaagccaggaagtgctatatagagtattaaaaataaaacccataatctcattctctgagaatatgtagttggagagttaaaacagaactgtaaaacaatcatttgctgtgtaagagaatacatactgatatgccaagctgtatgtgtaaataaaaatatcaaagagagaaaagagccagagtggtcaggrgtgttcacggaagaggcaggctaacaccctggttgatacagctttgattccgccccttctgatttcaagatattaattactagatgttaattattagatttcaacccttcagtctaggattctcttgaaatacattttaagtaaaaatggctaatttcaaaaagtagtaattattttgaacaa

SEQ ID NO: 368900 - DNA, 493 bp, Homo sapiens
aacaaactctaagaaaagcactccagatcctcaagcaagacttcttgcctcacctgccccccacctcagatagggatttattaatagtaccttcagggataaagttcaggcaatgcaaaataatcagcctgaaatctttgagggtccaggacgttcagaccttaatcatgcctggtgtgtcaawatcttgctaggatactttacttgctgtgcagtcctaagagttccacagagcacatacattctctaatggggtcaccaatcggaagaagataagggcagagaaagagagaccgttttctttttctgctgttacttacgaatcttttcccctctgttcttcataattcttacgctcacccaaaaagtagaggcatcctgccaattcctcacgaagtagccaccatttgatttactccacatgcctggccaagaaatctgaatatgtatgagaacgctgaaatattaatactcactcggctggcaatggagc

SEQ ID NO: 368901 - DNA, 507 bp, Homo sapiens
ccttacattgctcaagagcagaagctgcagggaatgcaagccctgggtgcaaacaccgccacgtcgtgtgtggctcccagtgcctcttccagtggggaaactgatccagaccaggctgggcaacgccagggccygtttggtctctgaccaccccatctcccgctcccgtgggcgctcggggttagcaccacattccttaggcttcctgtctcctcttcaaagggtgaaatgtggccacacactgatccatgtgacttcttaattctcctctggggcatccttttcttcaacagatgttttcaaaataattaagtgatggggatcatgcattattgaaaatgctggatgcctccctaatgttcttcacatttgtatatttgtcagcacaaaattgagtgcttggaaatgttgtgcttatttatttttcaaattactgaacactcaccctagccagctgaggagaggagaggggagcggtggctccacaagctctctggttcctgcaga

SEQ ID NO: 368902 - DNA, 507 bp, Homo sapiens
ccttacattgctcaagagcagaagctgcagggaatgcaagccctgggtgcaaacaccgccacgtcgtgtgtggctcccagtgcctcttccagtggggaaactgatccagaccaggctgggcaacgccagggcctgtttggtctctgaccaccccatctcccgctcccgtgggcgctcggggttagcaccacattccttaggcttcctgtctcctcttcaaagggtgaaatgtggccacacactgatccatgtgacttcttaattctcctctggggcatccttttcttcaacagatgttttcaaaataattaagtgatggggatcatgcattattgaaaatgctggatgcctccctaatgttcttcacatttgtatatttgtcagcacaaaattgagtgcttggaaatgttgtgcttatttatttttcaaattactgaacactcaccctagccagctgaggagaggagaggggagcggtggctccrcaagctctctggttcctgcaga

SEQ ID NO: 368903 - DNA, 503 bp, Homo sapiens
cttgcaggaagaacaacccctcccttgtgatggcaaaggaggttattgggaacttggacattcagccccacatccttccactgttgaagtgtgtcagaaaatatcagctaaattaaacagtataaagaagaccctgagtctcaaaatagaatataaaaatattatgatttccattaaaaatcactcacgataccataaactagaggtgtcataaatgttaaaattgtctgacaaaaattcaaagcagccatgaacaaaaggggcttcagggaaacatacgaacacacttgaagcaaaagtagaaaatgggaaaatcccagcaaacaaacagaagatgtaaaaaaaaaaaaataccaagtggaaatttaaaactaaaaatacaagaatttwaaaaaagagtttacttgacactagcacagaagaaacagaaattgtaaacttgtaaatagaataatagaaaccacccaatttgaacagctgagagcaaatagaaaaaaaaatgt

SEQ ID NO: 368904 - DNA, 509 bp, Homo sapiens
tgatatttctattctcagctcactgtccctccagggagctttggggacacttttaaaaatcacatgcartccacaggggtcacagatcttacagggatcttttggttttcatcattttatttgtttgtgtttaaatatgagcattaccatgtggacactgtcaaggaatcgaagacaaggacctttgtattgattgctttgcacataaggagttcagtaagaatggaaattcagagatgcctgtatacgagtcccaccacacaggtgtgggctctacctagacagaaaaaaagcatttggtcatggtgcaaaaatgacttttctggacttctgtgttgcataccagctgctctgctgtatccgtagggttctgtttctccacataccaccaggacatcattataatgccacacacttctcacctggcctggcttctcctgaggacaccattataatgagtctccctgcatgactttgcaaggattattttttaagaagcttagagttca

SEQ ID NO: 368905 - DNA, 575 bp, Homo sapiens
gatacttttgtatcttttttctcattagtttcaaacaacgtaatttcttccctaatttcattattatccttaatttsactattcaaaagtcattcaggaacaggttgtttaatttccatgtaattgcatggttttgagcaattttttcagtcttgatttctttttttaatgtgctgtggtccaagagtgtgtttagtatgattttggctcttttacatttgctgagtattgttttatatctgattgtgtgggtgattttagagtatgtgccacgtggagtgtgaagaatgcatattctgttgtttttggatagagagttctgtagaagtctattagatctatttggtccagtgctgaattcaaatactaaatatgtatgttaatttcttgcctcagtgatctgtcctgtcagtggagtgctgaagtttcccactattattgtgtgggagtctaagtctttttgcaggtttctaaggatttgctgtatgaatcttggtgctcctgtgttgggtgcatgtatatttagaatatttaactcttcttattgaattgaacactttaccattacataatgc

SEQ ID NO: 368906 - DNA, 575 bp, Homo sapiens
gatacttttgtatcttttttctcattagtttcaaacaacgtaatttcttccctaatttcattattatccttaatttcactattcaaaagtcattcaggaacaggttgtttaatttccatgtaattgcatggttttgagcaattttttcagtcttgatttctttttttaatgtgctgtggtccaagagtgtgtttagtatgattttggctcttttacatttgctgagtattgttttatatctgattgtgtgggtgattttagagtatgtgccacgtggagtgtgaagaatgcatattctgttgtttttggatagagagttctgtagaagtctattagatctatttggtccagtgctgaattcaaatactaaatatgtatgttaatttcttgcctcagtgatctgtcctgtcagtggagtgctgaagtttcccactattattgtgtgggagtctaagtctttttgcaggtttctaaggatttgctgtrtgaatcttggtgctcctgtgttgggtgcatgtatatttagaatatttaactcttcttattgaattgaacactttaccattacataatgc

SEQ ID NO: 368907 - DNA, 509 bp, Homo sapiens
ttggggaagttttcatggacgatatcctgaaatatgttttayaggttgtttgcttcctcctcattcttttcagggatgccagtgattcatagatttggcctctttacatagtctaatatttctcagaggttttgttcattccattttattcttttttctttatttttgtctgttttattttagagagctagtcttcaagttctgagattctttcttcagcttggtctaatctgctgtttaatacttgtgactgcattatgaaatcctggtagcgggtttttcagtgctatcagataaattaggttattttttctactgggtatttcatctgttagctcctgtatcattttgtggtgatttttagtttccttggattgggtcttgccattctcccaaatctggatgatctttcttcctatgctttattctatttctgtcatttcagttaactcagcctggttaagaacccttattgcaaaactagtgtgatcatgtggagactgtaagac

SEQ ID NO: 368908 - DNA, 576 bp, Homo sapiens
gagaagtatggacctgttactgacctaaacacactgacaggggtggttgtagacctcagtcgggtgactccacacaatgaaaagaaatgagatccaagacctgggtgaaaaagcagtctggccacttctttgtggagctgctgtgctgtgccgggggactgctccagtcctcagtcacctcagactccttagaccctgaaggcaacaacagctaaggctatgaaacagcaaagatggtgacccatcacttcccctgaaagctctgtcccagaaaggctcagaaccactgccagctggaaaacactggcaagggtagctggtgatcctgattgggaggtcctgtccagtgaggaaaaatggggtcagggctcacataaaaccagcagtctggctgcttttttgtagggtggctgcaatgaaatggctaattgctttgaaacagcgtaggtrgtgccccagcccttcctctgggaactccatctcagggaggtgtaacactgctactggtggctggttggatttccaagccagtaggtcttattctgcaaggtgccatgaaagtggggtctgcagacc

SEQ ID NO: 368909 - DNA, 546 bp, Homo sapiens
tgagagctgtaagagatgaaactctaatattatactgtgtggaaaagatagggctgtttctcccagcctgactgcagaagcctcagagagcatgttaggctctgtctgtaagtggctctcatcagattcgtccttgttcaaatcatcccattgcgttcaytttccctgcaaggacaccaattccccagtatatccattgggagaccaggttgcaacacaacactgaactgctgtgattaaaactataacacattgtctccaccatggaattttttcacctcctgaaagtgttagacccattcagcttctcacatacagggtggggtcactgaacagaggccagtcattggcaggacacaggtgtggtcttccctgatttctacacttatgcagtaacacagagattcatggcttgccaggttgtgtgaggacatctctccctttgtgggggacctacctggctccaaggctccacctgccacgcctcacagggctccgggttacagctcatgctcaatgggggaggaatgccggccaggaactggc

SEQ ID NO: 368910 - DNA, 545 bp, Homo sapiens
taacattctgaaaccggcatgtgtcctacaactgatatacgtattaattgtgtagtgtttcatttctttctgaaaagctgtaatyaaaatgacataatcccccaggtgacggtttcttagaattgagactattcaatattagttttgtgatcaagtatatattggtgatttaaatactctaagccctagtttccttagtggaaattataaagtcctgtattatggtaaaaataaaattgtttatccaaagcttccatgcaatgtcagacacgtggcagtactaccacccacagtaggtcaagtcctccagagttcaggaacactttgagcaccctgactgtgtagtactggggagtgaacaccttctcaggccagtttctccattggcagggcttacttcactaacctgtccacaggcctcttgccctaagtccaggaaacaagagattagtcaatgtccaatagccagccctaactttacctagagctcgacgtttgtccagggccttgtttagtcttttatcatgaacagagttcattgcaca

SEQ ID NO: 368911 - DNA, 478 bp, Homo sapiens
ttgcttccctttaaaacttatcctggcaggccaggggcagtggctcatgcctttaatcccaacactatgggaggctgaggcaggaggatcctttgagcccaggagtttgagatcacctgggcaacatagggagaacccatctctaaagaaatttaaaaattagccaggtgtggtggtgtatacttgcattcccagctacttaggaggctgagttgctaggactgcttgaacctgggaatttgaagctgaagtgagctatgattgcaccactgcactccagcctaggtgccagggtgagatcctgtctcaaaagaaaacaacattaattatcttggcatgattgcccagggggctgcaggcaagctgccacatttccyaccaatgctgttcagagtggatgtcaggtccaggtgtctgccccttgcctctcctccctaacactgaatgatactatctcacctatttctctccatgacaa

SEQ ID NO: 368912 - DNA, 579 bp, Homo sapiens
cattcttgctcttggacccctgcctctgctatgaaactaaacctgggctggcctgctggaggatgagggctcattacacctagtgaccctgtggcgactgactaaccaagtcaaaggtcagcatccaggtgttcagaaccagaactgatgctggggttcacatcagcaccatatgaacactgctctgaaatgctgtggaaaattatgctgtcacttctattttacacgaccacacagtttacagttaactgactggcccaagggatctgactgaatgatgaggcaagtcaatgagaggtgagtctctatcaaaataaaagccatacccatgcacactgcatagcactgaagttctctgttttgtaaatatggatcagagcaaacacttactgagtacttcctatgtgcccgacactcttctgagtaccttacatatagttattccttttatctcctaagtcayataagttgggcattatcatcatcctcatttcatagatgagggaaatgaggtagagtgaggacatacagctggtaatttactgagtcaggactaaaccccagaaagtctggcttcaa

SEQ ID NO: 368913 - DNA, 535 bp, Homo sapiens
tgtaagaattgaataagataattcatgcaaacacttagcgtagtgcctggtaaaaagtaagtgttcactaaattattatcagacaagaagacaaaagtctgttttccatgctactctgattttgcaaaccttgttcaatcagtcgtacccaaatgtgctgaaggaactgatttgtggccccttaagttttcacctatcctctccttgagctcagggagctcrttcattttatgcatgaaacactataagcgcagtgcttggggcctacagatttttcaagggcctgcacaacatttgagacctgaaaaaaaaaacctcatgcattgcatctataaaaacaaaaggaccctgcaaaatcagaaatcaatatttaattacatattaataggaaatacataccaagcattttgtatgtattattactatgtattatgtatgtatctattaagtacttttatgggtattagcacatttaatcttcaccatgacttatttagccccattttattaatacaagtgaagaaactgaggcata

SEQ ID NO: 368914 - DNA, 535 bp, Homo sapiens
tgtaagaattgaataagataattcatgcaaacacttagcgtagtgcctggtaaaaagtaagtgttcactaaattattatcagacaagaagacaaaagtctgttttccatgctactctgattttgcaaaccttgttcaatcagtcgtacccaaatgtgctgaaggaactgatttgtggccccttaagttttcacctatcctctccttgagctcagggagctcattcattttatgcatgaaacactataagcrcagtgcttggggcctacagatttttcaagggcctgcacaacatttgagacctgaaaaaaaaaacctcatgcattgcatctataaaaacaaaaggaccctgcaaaatcagaaatcaatatttaattacatattaataggaaatacataccaagcattttgtatgtattattactatgtattatgtatgtatctattaagtacttttatgggtattagcacatttaatcttcaccatgacttatttagccccattttattaatacaagtgaagaaactgaggcata

SEQ ID NO: 368915 - DNA, 622 bp, Homo sapiens
tgtggctttgttaggcaaagactatatatccacacaaaagactctttgtggtagcatgatcaaacactgaaatagatggcctgaacatcctgatatttttttggagtgactgatcaaagggaagataatggctttcactgagcccaacttggcaggaactgttggcctctggccttctcattcctgtactctagccacgttgtctccttttataaactgagtcccagcatcatgcatgatcagtcctgccccatgctgggagtggaagaggagctccgaagacagtgtgcccagggtcaagctctatgcttggtgctggtgtccagtttcttgtttcctgttggcctgggccttcagctctgtctttcaactgtcctggaattctggtgccagggtctgacctcactgatgtggacttgctgccttgacccacaaaacctccattccatgctgactstcaaccctgttccacactctctgaactaactggctttcttggacgtgacctgtgtcctgcctcattttttttgtttgttttctttttccacatatatatatattatttttctgtaaaatctcccagttcttccataacttataaacatgatttataccgaggggt

SEQ ID NO: 368916 - DNA, 582 bp, Homo sapiens
gtagtactattcagtcataaaaaagaatgaaatcctgcaatttgcaaaatgaaggaaatcctgccatttgcaaaaagaatgaaatcctgccatttgcagcaacacagatgtaactggaggtcattattttaagaaaaataagccaaacacagaaaaacaaatatcacatgttcttactcatacrtggaaactaaaagagtggatcttatgatgatacagagtagattggtggttaccagagtctgggaaagggattagggagagggaatggagggaaaaaaaatgatataaatttatttattttcactgagctatacacttaaaagtcgtaaaaatgggctgggcatggtggctcatgcttgtaatcccagcactttgggaggccaaggcaggtagattatgaggtcaggagatcgagaccatcctggccaacatggtgaagcccaactctactaaaaatacaaaaatcagcatggcatggtggtgagattgcaccactgcacttctgccaggtgacagagtgagactccatctcaaaaaaaaaaaatggtaaagatggtaaattatatacgtatattgtat

SEQ ID NO: 368917 - DNA, 582 bp, Homo sapiens
gtagtactattcagtcataaaaaagaatgaaatcctgcaatttgcaaaatgaaggaaatcctgccatttgcaaaaagaatgaaatcctgccatttgcagcaacacagatgtaactggaggtcattattttaagaaaaataagccaaacacagaaaaacaaatatcacatgttcttactcatacatggaaactaaaagagtggatcttatgatgatacagagtagattggtggttaccagagtctgggaaagggattagggagagggaatggagggraaaaaaatgatataaatttatttattttcactgagctatacacttaaaagtcgtaaaaatgggctgggcatggtggctcatgcttgtaatcccagcactttgggaggccaaggcaggtagattatgaggtcaggagatcgagaccatcctggccaacatggtgaagcccaactctactaaaaatacaaaaatcagcatggcatggtggtgagattgcaccactgcacttctgccaggtgacagagtgagactccatctcaaaaaaaaaaaatggtaaagatggtaaattatatacgtatattgtat

SEQ ID NO: 368918 - DNA, 582 bp, Homo sapiens
gtagtactattcagtcataaaaaagaatgaaatcctgcaatttgcaaaatgaaggaaatcctgccatttgcaaaaagaatgaaatcctgccatttgcagcaacacagatgtaactggaggtcattattttaagaaaaataagccaaacacagaaaaacaaatatcacatgttcttactcatacatggaaactaaaagagtggatcttatgatgatacagagtagattggtggttaccagagtctgggaaagggattagggagagggaatggagggaaaaaaaatgatataaatttatttattttcactgagctatacacttaaaagtcgtaaaaatgggctgggcatggtggctcatgcttgtaatcccagcactttgggaggccaaggcaggtrgattatgaggtcaggagatcgagaccatcctggccaacatggtgaagcccaactctactaaaaatacaaaaatcagcatggcatggtggtgagattgcaccactgcacttctgccaggtgacagagtgagactccatctcaaaaaaaaaaaatggtaaagatggtaaattatatacgtatattgtat

SEQ ID NO: 368919 - DNA, 592 bp, Homo sapiens
aaacagggctctccaagtttctactggtttatttcaagcatggggagggtaagctatgcactctgcctaagccactttttgacttgtgaaagtgacctctggaggggaaataaatgtaaactactttaaagatcaattatatatgaaaattctttggcatgggcaggcttgattcaataaacgtaacctatcaacgactactaacagattttactggcctcacctccagccatccctggtataagaaggcataaatggaaagaggtataactttcctaaattctagagatgtggtctattctatagttgattttgagatagcttttcatatattgctctaaaataatayagtccagagtaatttgggggcaaaaccacaaaagagttggtttgtgtgtgagagtaagagaatcacggtgagggttaatttatgggggaagtcactcgctcattcacctcactttccagcagctcccccatgtttactgtaacatgactagtgatttatgttcttgactaaagcccttcttctcgttaagtttcaaataactctacggaggggtattgtagagaatttgcaatgtggagcaac

SEQ ID NO: 368920 - DNA, 592 bp, Homo sapiens
aaacagggctctccaagtttctactggtttatttcaagcatggggagggtaagctatgcactctgcctaagccactttttgacttgtgaaagtgacctctggaggggaaataaatgtaaactactttaaagatcaattatatatgaaaattctttggcatgggcaggcttgattcaataaacgtaacctatcaacgactactaacagattttactggcctcacctccagccatccctggtataagaaggcataaatggaaagaggtataactttcctaaattctagagatgtggtctattctatagttgattttgagatagcttttcatatattgctctaaaataatacagtccagagtaatttgggggcaaaaccacaaaagagttggtttgtgtgtgagagtaagagaatcacggtgagggttaatttatgggggaagtcactcgctcattcacctcactttccagcagctcccccatgtttaytgtaacatgactagtgatttatgttcttgactaaagcccttcttctcgttaagtttcaaataactctacggaggggtattgtagagaatttgcaatgtggagcaac

SEQ ID NO: 368921 - DNA, 561 bp, Homo sapiens
atatctctctaccataatctttttttcttttgtaggtaggcatttttatctacatttaataatattgataatcattgtgcttaatttaactttattgcactttagctaatcaccatatctatacacamttacgattaaaccccaatgaaatattgggcttatttcacaaaaagcattactgtgagctttgttctggcacagacccacaataacctctgcaagtaattaaaacattatttacctgggtttctgtatctagtttgtctactagtgctttggttatccccaaaagacctggtgattcattgacaactttttgagatctacagagctttcatcagcagctcttttttttttcctgtgttccactactgctttctcctccatttcttatatttaaaaatgcagtggtttccggtgttaacttatacatacatttctaatgacctccacaaaaaaatgcaattatttttcacagacagcacggaggtatttagtgtgcattgaggtagaaataaccatgccaagaaaacaagcaaatgcataaaacctccagataga

SEQ ID NO: 368922 - DNA, 620 bp, Homo sapiens
ttatttccaggaagagaacacagccagaataagggctgctgaccttagagccagcagccattattcttgctatataatcttcctggaaagctgtttcctcccaccttgacagagcttgttcttcattactcaagtttcacctcaactgcatcttccttacgcaagcccttcatctttcctcagtattttcaggaaaagccatggatagcagtgttgagggctgaattttagacttttcttatgcatttctatacaaggatataaactgatgcaaagacatagatttctttttaataaaataactgtaattgtataaaatcaatggcaatttccttatctcctaacttggagatcatcttattttacatcataccrttgtatctcattttttaaagcttctaaatagcatctttcagttttactttttaattttttaactaaaacttttagaggatttgctgataaactggacatcaaaggtaagagaaatcaatgaattcaagatagttcctagattatacccttgcaaaatagcttattgacccattctgacctcagaagccattctcttataaactcttcctacacatgtgcaactttgccctgtggtcgatgtcaaa

SEQ ID NO: 368923 - DNA, 618 bp, Homo sapiens
cagtgggctgcagcacttttcatcttttcgtatgaatctgcctttccacaaacaagtcagttctttcaatgtagctcctgtattttttgtttatataccacggaaaccagcattccattgggagacccatctaacactcactttatgtttccctaaatagtcccatcctttgtgattttgatcaggtcctaaaataaagattattgattgtcragtacatcaaggctgctctttcattcattagttttctttatttgatttctgcaaggcctatctattgctttaaggctttgggagacatccacatgaagatccatcatttaaagtaaatgtggcaaatacaattctctctgaatataaagctcagaagggctcaccagggaatctcagtcattaaggccaagaacgtataaatctctctgaggagggataaaatttcaaagaagacacttcttcaaagtgaatataagaagaacagtttttctaaatataacccaatgtgaaatagagttgagacataattccattaaaacttcctctgcatgggtggaaagctgttcctgaagccaaagcatagagaacactccccagaaatcccagtttgggctggattgtgaa

SEQ ID NO: 368924 - DNA, 429 bp, Homo sapiens
tgtatgtgtggaatttaaagttgttgggtgtctaaaactgacaagcagagtgtgaagcaagcagaaaatatggacaggaagaaagaatgagctatgccaataaactccaagtggaggattttaagaaggggtctaggaaaagsctgcacagagaccgagagaaagacgtcccaaggcgtggagaccacgccggtgttcctcacaggccccccagggtaggggccatggtggatgcagagccagccgctgggctctgaagtccatttgctggtggccccgcggccatatgtccatggtctgctccttacccttggctgtgcttggcaggaatggcgagacaggcctgctcttgccagcttccctaccctcgctctttcactgcgcgcggactccctggttctgacatctctctcagctctctctgactct

SEQ ID NO: 368925 - DNA, 429 bp, Homo sapiens
tgtatgtgtggaatttaaagttgttgggtgtctaaaactgacaagcagagtgtgaagcaagcagaaaatatggacaggaagaaagaatgagctatgccaataaactccaagtggaggattttaagaaggggtctaggaaaagcctgcacagagaccgagagaaagacgtcccaaggcgtggagaccacgccggtgttcctcacaggccccccagggtaggggccatggtggatgcagagccagccgctgggctctgaagtccatttgctggtggccccgcggccatatgtccatggtctgctccttacccttggctgtgcttggyaggaatggcgagacaggcctgctcttgccagcttccctaccctcgctctttcactgcgcgcggactccctggttctgacatctctctcagctctctctgactct

SEQ ID NO: 368926 - DNA, 587 bp, Homo sapiens
tatccctgtaattcattctatcatttctttttttccaaattcatagcaacatcctcattaagtgcactaattctactgtgacatgcagttggcagaactgtgattttagtagaacggtagactgattcttagataaaaatggttcaaaatttctgtaattctggggctttaagagttgttgagaatcatcttatccacggttgtcattcagcaggtgagaacccgaggtctggagaagtggccatttcagaccccccagtagggaattgtggggcccaggagggcctagaactcacgagtattcagagtcacaggtgtgttacctaggggacataaaagwaatatgacaagtctcaggtactgtagtgtgtgtgtgtgtccacaaagaggaggcaagcaggggccacgtggagggagcttcccatggagtggcaattgctcccccaagagctcctgcagaaaatgcgggacagtcagcattctgggttgaaatgccggtattctgggttgaattgtcagagttctgggttgaattgtcagtgatctggattgaatttttaatgttctgcattgagctgtgttctccc

SEQ ID NO: 368927 - DNA, 587 bp, Homo sapiens
tatccctgtaattcattctatcatttctttttttccaaattcatagcaacatcctcattaagtgcactaattctactgtgacatgcagttggcagaactgtgattttagtagaacggtagactgattcttagataaaaatggttcaaaatttctgtaattctggggctttaagagttgttgagaatcatcttatccacggttgtcattcagcaggtgagaacccgaggtctggagaagtggccatttcagaccccccagtagggaattgtggggcccaggagggcctagaactcacgagtattcagagtcacaggtgtgttacctaggggacataaaagtaatatgacaagyctcaggtactgtagtgtgtgtgtgtgtccacaaagaggaggcaagcaggggccacgtggagggagcttcccatggagtggcaattgctcccccaagagctcctgcagaaaatgcgggacagtcagcattctgggttgaaatgccggtattctgggttgaattgtcagagttctgggttgaattgtcagtgatctggattgaatttttaatgttctgcattgagctgtgttctccc

SEQ ID NO: 368928 - DNA, 582 bp, Homo sapiens
gtgcttgaacatgcattaaaattatctatatctacatatctctatctatctatctaatatacatatatctatctaatatacatgtaatatatgtatattatatattgtatattaatatgtgtatataatacatgtataatatctatatattatacatgtaatatgcatacacatatgtgatgtgtgtgtgtgtgtgtttgtgtgtgtatctatatactctccttcagcaatatagagctgactttaaaaggtgtgcactcaagacaggcagtccttcaaaattaaagcaatatttcaggcaaattattatagaagsaggaggaacaggtgagattctggaagaagaagctcaacaggggatacctgggtgtctggagtgagcaactcagcagggagactagacattggaatagacataaagagaagatacaaatagagtagaaagagggagctggaggaagcagatagagcccaggtgtgcaagccttgggtttcagatgctaagctatggtgcttccaggcctggagttcacgagaaacatccaagatgaagacaacagagatgttgatgggagttaatac

SEQ ID NO: 368929 - DNA, 644 bp, Homo sapiens
tgcaattacttttgcaccaacctaatattatgccagtttcttcctctgcaaagaacataatgcaaatattctttgcagaagaaraaactggtatagataaaaaatctcaatgctgtatataagaacatcagagaaaaaaataaatgaagaaaacaaaatcttttttgtttttcttattcttaataaatgtaaaaatgaaagtttaagtaataatggtaagaaggtattaggtgattatagtatgtggataactaaactaataaatgatagtctttttaacaaccagtgctgaaacaattgtatgtctatatgcaaaaaaaaaaaaacctaaataccaatcatgtacctttcacaaaaattaattcaaaagaaatcatagatttaaacataaaccataaaactataattttatagataaactagatgaccttggccttgatgatgaggtttaatttcattttttatgggcatacagtaggaatatatatttataaggtacatgggatattttgacacaggcttaaaatacataataatcacattagggcaagtggggtatccatcacctcaaatatttatcctttctttttgttacaaacaatccaatgatactattttagttactttaaaatgtgtaataattt

SEQ ID NO: 368930 - DNA, 644 bp, Homo sapiens
tgcaattacttttgcaccaacctaatattatgccagtttcttcctctgcaaagaacataatgcaaatattctttgcagaagaagaaactggtatagataaaaaatctcaatkctgtatataagaacatcagagaaaaaaataaatgaagaaaacaaaatcttttttgtttttcttattcttaataaatgtaaaaatgaaagtttaagtaataatggtaagaaggtattaggtgattatagtatgtggataactaaactaataaatgatagtctttttaacaaccagtgctgaaacaattgtatgtctatatgcaaaaaaaaaaaaacctaaataccaatcatgtacctttcacaaaaattaattcaaaagaaatcatagatttaaacataaaccataaaactataattttatagataaactagatgaccttggccttgatgatgaggtttaatttcattttttatgggcatacagtaggaatatatatttataaggtacatgggatattttgacacaggcttaaaatacataataatcacattagggcaagtggggtatccatcacctcaaatatttatcctttctttttgttacaaacaatccaatgatactattttagttactttaaaatgtgtaataattt

SEQ ID NO: 368931 - DNA, 630 bp, Homo sapiens
tatccattcatctgttgataaacacttaggtttcttcttaatcttggctgttgtaaacagtgctgcaataaaaatgacactgcagatatctcttggatataatgggttcctttcttttgggtatataactagcactgggattgctggatcatatggtagttttatttttagttttttgaggagcctccaaactgttctccataatggttgtactaatttacattcccagaaactaagaattttcccacatcttctccacatcctgttctcytcatcctctccagcatttgttgttgcatgtctttaggataaaagtcatactaactgggatgggattatatctcagtgtagttttgattttcatttctctgatgatcaatgatgttgagcactttttcatatacctgtttgccatttgtatgtcttcttttgagaaatatctattcatatattttgcccacttttaacatggttattagatttcttcctatgagttgcttcagctcctattaatcccttgtcagttgaatagtttacacatattttctcgcattctgtggtttgtctcttcactttgttgattgtttcctttgctgtgcagaaactttttaacttgacatgattccattt

SEQ ID NO: 368932 - DNA, 630 bp, Homo sapiens
tatccattcatctgttgataaacacttaggtttcttcttaatcttggctgttgtaaacagtgctgcaataaaaatgacactgcagatatctcttggatataatgggttcctttcttttgggtatataactagcactgggattgctggatcatatggtagttttatttttagttttttgaggagcctccaaactgttctccataatggttgtactaatttacattcccagaaactaagaattttcccacatcttctccacatcctgttctcttcatcctctccagcatttgttgttgcatgtctttaggataaaagtcatactaactgggatgggattatatctcagygtagttttgattttcatttctctgatgatcaatgatgttgagcactttttcatatacctgtttgccatttgtatgtcttcttttgagaaatatctattcatatattttgcccacttttaacatggttattagatttcttcctatgagttgcttcagctcctattaatcccttgtcagttgaatagtttacacatattttctcgcattctgtggtttgtctcttcactttgttgattgtttcctttgctgtgcagaaactttttaacttgacatgattccattt

SEQ ID NO: 368933 - DNA, 630 bp, Homo sapiens
tatccattcatctgttgataaacacttaggtttcttcttaatcttggctgttgtaaacagtgctgcaataaaaatgacactgcagatatctcttggatataatgggttcctttcttttgggtatataactagcactgggattgctggatcatatggtagttttatttttagttttttgaggagcctccaaactgttctccataatggttgtactaatttacattcccagaaactaagaattttcccacatcttctccacatcctgttctcttcatcctctccagcatttgttgttgcatgtctttaggataaaagtcatactaactgggatgggattatatctcagtgtagttttgattttcatttctctgatgatcaatgatgttgagcactttttcatatacctgtttgccatttgtatgtcttcttttgagaaatatctattcatatattttgcccacttttaacatgrttattagatttcttcctatgagttgcttcagctcctattaatcccttgtcagttgaatagtttacacatattttctcgcattctgtggtttgtctcttcactttgttgattgtttcctttgctgtgcagaaactttttaacttgacatgattccattt

SEQ ID NO: 368934 - DNA, 507 bp, Homo sapiens
tgacattttacagctaatgaaccaaccgatctttaattttattttccctagtcaggaggaacatgtgtcttcaaggggctgtggtcacacaacgtgaggagattctgaaggtgctggcactaaggttggcaattcaggcacgatgggacatttaatcccatcagccccttatggagtgtgcatgagacccattttacrgatggagatattgagtcttggggagaggttaggttagttgtctggcagagcagcctgcatggtgctgagtgcttaactaccttcatttacatctgggctcctgaccctgtcatgctgtcatccagggtggttacccctcatgcaattccccagcatcactggccgctccctacctcatttgatgcctgtgcagcctaaattccaggcagcaggtgggaggaccgcatatctgcagtggagagggacacaacgtgtaggcacgatgggagcagctcagatctttggatatcccaggttcagttggagctt

SEQ ID NO: 368935 - DNA, 507 bp, Homo sapiens
tgacattttacagctaatgaaccaaccgatctttaattttattttccctagtcaggaggaacatgtgtcttcaaggggctgtggtcacacaacgtgaggagattctgaaggtgctggcactaaggttggcaattcaggcacgatgggacatttaatcccatcagccccttatggagtgtgcatgagacccattttacagatggagatattgagtcttggggagaggttaggttagttgtctggcagagcagcctgcatggtgctgagtgcttaactaccttcatttacatctgggctcctgaccctgtcatgctgtcatccagggtggttacccctcatgcaattccccagcatcactggccgctccctacctcatttgatgcctgtrcagcctaaattccaggcagcaggtgggaggaccgcatatctgcagtggagagggacacaacgtgtaggcacgatgggagcagctcagatctttggatatcccaggttcagttggagctt

SEQ ID NO: 368936 - DNA, 507 bp, Homo sapiens
tgacattttacagctaatgaaccaaccgatctttaattttattttccctagtcaggaggaacatgtgtcttcaaggggctgtggtcacacaacgtgaggagattctgaaggtgctggcactaaggttggcaattcaggcacgatgggacatttaatcccatcagccccttatggagtgtgcatgagacccattttacagatggagatattgagtcttggggagaggttaggttagttgtctggcagagcagcctgcatggtgctgagtgcttaactaccttcatttacatctgggctcctgaccctgtcatgctgtcatccagggtggttacccctcatgcaattccccagcatcactggccgctccctacctcatttgatgcctgtgcagcctaaattccaggcagcaggtgggaggaccgcatatctgcagtggagagggacacawcgtgtaggcacgatgggagcagctcagatctttggatatcccaggttcagttggagctt

SEQ ID NO: 368937 - DNA, 557 bp, Homo sapiens
agcacacgtccttcttcctctgccctcaaatctgtctccatsaatttcctttatttatataaatgtatttgtacacattttacacatatggagaaggaacttgtattgtttaacacaatgaatggcagactggggaacacagccattactattagtgtttagaggtctacctagcagagaggggctacctgtgctccccaggtgagcagaatgaggattaacacatgaaatcttcatgtaatacaccttacaggtgtgtaagtttgacccagtccaatcctaatggctttcttctccatctcaggatttctctgagttcagaagtgactttcctgccataggcaccatagatcactgcgacccaacgaaccacaaaatctgttccagtgcttggctatcatggttgatggactgtgaatgcagagaagcagaaaataagctctgcaccctggcacttaatcaagcaaaggcttaacagtttaataagtctataactttctccccttcagtaatagtggagcagtgccacaatattggctcagccaaaggttgatatg

SEQ ID NO: 368938 - DNA, 557 bp, Homo sapiens
agcacacgtccttcttcctctgccctcaaatctgtctccatcaatttcctttatttatataaatgtatttgtacacattttacacatatggagaaggaacttgtattgtttaacacaatgaatggcagactggggaacacagccattactattagtgtttagaggtctacstagcagagaggggctacctgtgctccccaggtgagcagaatgaggattaacacatgaaatcttcatgtaatacaccttacaggtgtgtaagtttgacccagtccaatcctaatggctttcttctccatctcaggatttctctgagttcagaagtgactttcctgccataggcaccatagatcactgcgacccaacgaaccacaaaatctgttccagtgcttggctatcatggttgatggactgtgaatgcagagaagcagaaaataagctctgcaccctggcacttaatcaagcaaaggcttaacagtttaataagtctataactttctccccttcagtaatagtggagcagtgccacaatattggctcagccaaaggttgatatg

SEQ ID NO: 368939 - DNA, 548 bp, Homo sapiens
acatgactcccttgacccatctcagacagctctccttcattgcctttctagagtagaagtagattccagtatttacaaaaattcaaacttccttggtggtcgcaagttggtcccactaaggtgagctgaacaaagaagtccacgcaaactctgtcttctgcacccaacaaccttttgggtatctgaagattctgagtttttcttcacctttaagattttgycttggacccagaaaattctgtgctgcttgcctcatgtttatttttatggacctacttaagttgtgtgctcgaagaaccaaatgaacgtgtgtgtgctttttttttttttcaaataaaacaaattgaagttaaaaccaaccacatgtctcagttcagccaggctgccttgtgattcttgaaaaataaaaataactgaataagtgcttttcaaagtgatattttaacctcctgccaacactgtagtagtaaaatatgatttttttttattatcattcaaatgtgagtttggggacatgattgaggttttcctataatcagtaaaaatga

SEQ ID NO: 368940 - DNA, 501 bp, Homo sapiens
aagcctttattttgtctttgttacctttagttcaagctggcagtgtttcgaccagtgcaatccactgctatttctggctaggcagagctggctgatcaaatccattagttgctcttacagactcttcatcagacagttgttcaccctcagtgctctcttcagaacaggtttctcatgttttgcaatacgaatagaccaataatttttcaagtcctcaagttctggttcttttttgcttggcaattttttccccatatgtatttttcttctcatatttgactgtaaactgtagggtgaaaccaagatgctccttcaatgttttgcttagaaatctcagccaagcttccaataatatcacttatatgttacaccttctgcaatacagtagaacacaattcatccaagttctttgtcactttaggacaagaatcaccttccctacagtttctcmtaatctgttcctcatttccctgagacatcaccagaatggcctgtaatgtc

SEQ ID NO: 368941 - DNA, 543 bp, Homo sapiens
gtcttacatccgtgcttatgaaaaattaaagagatgagcagatcatagtttatkttagatagatttcctcatgccatttgctcttgatttatttttctttcttttgaagtctgaattttcttttttaaaatatgaagctctcttactggcttcgattttagaagataagcaacatatattgtctgccaacttttcaaggaaaggaatttttctatctgaaatcgcatattttatcgttttaacatcattttttaaaaacgttcaaccttctcagggaaattactttgcatatagtaatttgatattacataactatttattggcattatgcttctagaatcagaccaatttaaggaatgtcttttttaaatttttaaataaagaggtggtagaaaagagaggcacagtggaacatgtctagcccagatctttaggcagaatgcttgtcaactctggaagggtgacggctgttcctaatgccatctggggaaagggctatgttttataattgtgttaatctcttcccaaccagtcactactaca

SEQ ID NO: 368942 - DNA, 543 bp, Homo sapiens
gtcttacatccgtgcttatgaaaaattaaagagatgagcagatcatagtttattttagatagatttcctcatgccatttgctcttgatttatttttctttcttttgaagtctgaattttcttttttaaaatatgaagctctcttactggcttcgattttagaagataagcaacatatattgtctgccaacttttcaaggaaaggaatttttctatctgaaatcgcatatttkatcgttttaacatcattttttaaaaacgttcaaccttctcagggaaattactttgcatatagtaatttgatattacataactatttattggcattatgcttctagaatcagaccaatttaaggaatgtcttttttaaatttttaaataaagaggtggtagaaaagagaggcacagtggaacatgtctagcccagatctttaggcagaatgcttgtcaactctggaagggtgacggctgttcctaatgccatctggggaaagggctatgttttataattgtgttaatctcttcccaaccagtcactactaca

SEQ ID NO: 368943 - DNA, 486 bp, Homo sapiens
ctgcaaagtctcttttgccacataaggtaacatattcacgagttacgagaattttgacatggacatcgttgggcggaggccattattctgcctatcacgtgccttgtttcagtataatgacttttgtatcccaagacatactaaataartgagatatgcgaaatcatattctgaaactatatgttcaggcaaagccacattcaccaatttactcagtccaatggtttctagttagagaatatcaactggaaaaaatctgaattgcgcacatttaaatgtttagctttctgtatatatacacagagaaaaagaaatgaaaaagtggcctcttccactatcttcagtctattgcactcttgcactatttccacatcttccaaagggctgtcatgtttagctctattttgccctgaagatatttgtgcttaaacttaatttcaaatgcagtttgaatacaacataaacacaagtcccaaagtggttgaa

SEQ ID NO: 368944 - DNA, 595 bp, Homo sapiens
ctcataggactcaggaaagcctgattttaaagtgctaactaagaatgcccacagaccttttacagtcattctaatacaagagaacagtgagacttggtacctagtttttgagtttgttgatcttgttttctctggtaaggacactaaaatataactcataaatgtgttattgatttataagagtgagaaaaattgagtgttttttgaatgcctttcatctcccataattaaatttctgagtgtgctgatgctcacaggaaaggaaggaaggaagggaatggaagttttctgaacaattagcaagatctgatcatgtgtcctgggcttcacacactttatcacatttaattcatacaccgctctaggagatrtttgacattattacttcaattttatttacaaatttagctctctaaagtcacaacattagtaagttttgtctaaactttctgagaagaccatacttctcccatgatctttttccttcaaccaactcaaaactattatctaaaaataaagtggtaatttttcttcttgaaccaccttaaacatgaaaacaccattcgttttactcttgtagattacattatattac

SEQ ID NO: 368945 - DNA, 566 bp, Homo sapiens
aaaacaataaatattggggtaatacacttcaagccacatctgaatgctttcacatcctttatggattctttctaatgtctgtatcttatctaaaagatcagaaaatgtatttaatttctgaaacatctgagatcacttgaaaggtacgctataatgccaagtacacaacacaatcgccaaaaaaacaaagctccaggtacttgggattttaatgacatggtgcagatttcaaatgcagtaaaactaataacttcatggaaaagggaaattaaaagtagccaacaaagataatggaatgaacatagtaatcttaaaaaraaccatgtaaaacaaccccatgatcttgataaaatgagcaaactcatcttgtactttcatttgggggatttatgagaagggagcatagcaatttcctttgtgttcgtacgctccatgggatgaatgtgcacgagtggcttcttgaaggtagtactattacagtaatcatgcctttgctatggaaagtttagcatcctcattttatttattgaaccttaattatcactctgatgaggaaatgctatgag

SEQ ID NO: 368946 - DNA, 566 bp, Homo sapiens
aaaacaataaatattggggtaatacacttcaagccacatctgaatgctttcacatcctttatggattctttctaatgtctgtatcttatctaaaagatcagaaaatgtatttaatttctgaaacatctgagatcacttgaaaggtacgctataatgccaagtacacaacacaatcgccaaaaaaacaaagctccaggtacttgggattttaatgacatggtgcagatttcaaatgcagtaaaactaataacttcatggaaaagggaaattaaaagtagccaacaaagataatggaatgaacatagtaatcttaaaaaaaaccatgtaaaacaaccccatgatcttgataaaatgagcaaactcatcttgtactttcatttgggggatttatgagaagggagcatagcaatttcctttgtgttcgtacgctccatgggatgaatgtgcacgagtggcttcttgaaggtagtactattacagtaatcatgcctktgctatggaaagtttagcatcctcattttatttattgaaccttaattatcactctgatgaggaaatgctatgag

SEQ ID NO: 368947 - DNA, 482 bp, Homo sapiens
gaaaaatagttatattagatattactgcattttatttatttayatatctacatacacatttatgcatatttgtatatatattatgcatgcacatatatagctaatgcatccacattattcaaaaataagaattgtaaaagtatacaatgaaaagtttttttccccacccagtttcctagctcatagaaaatgattacttgtttttttgtgtttccttctagagatatttaatgcacatacaaccaattattaggaaatactttggtaatctgaaaggagtttaaggaataaattattcaaaatggtgtggacagagcagaaggaaatgacatggaatggtaaggcatctgtaattttattacaaagctatagtagtcaaaacagtatggtactgccataaaaacagacacagagaccagtgggacagaatagagagcccagaggccaagttatgaatttagtccattcattttcaacaaagg

SEQ ID NO: 368948 - DNA, 482 bp, Homo sapiens
gaaaaatagttatattagatattactgcattttatttatttacatatctacatacacatttatgyatatttgtatatatattatgcatgcacatatatagctaatgcatccacattattcaaaaataagaattgtaaaagtatacaatgaaaagtttttttccccacccagtttcctagctcatagaaaatgattacttgtttttttgtgtttccttctagagatatttaatgcacatacaaccaattattaggaaatactttggtaatctgaaaggagtttaaggaataaattattcaaaatggtgtggacagagcagaaggaaatgacatggaatggtaaggcatctgtaattttattacaaagctatagtagtcaaaacagtatggtactgccataaaaacagacacagagaccagtgggacagaatagagagcccagaggccaagttatgaatttagtccattcattttcaacaaagg

SEQ ID NO: 368949 - DNA, 635 bp, Homo sapiens
aataaattattcaaaatggtgtggacagagcagaaggaaatgacatggaatggtaaggcatctgtaattttattacaaagctatagtagtcaaaacagtatggtactgccataaaaacagacacagagaccagtgggacagaatagagagcccagaggccaagttatgaatktagtccattcattttcaacaaaggtgccaagaacacacattggggaaaggatggtctcttcagtaaacggtgttgtgaaaactggatatttacttgccataggatgaaaatggactcttatttcacaccatatacaaaaatcaactcaaagtggattgaagacttaaatacaagtcctgatactataaaaatcctggaagaaaagagagaagaaaagtttttgacactgggcttgccaataatttttgggggtatgacaccaaaagcacaggcaacaaagtcaaacacaaataagtagcactacatcaaactaaaaaattcctgcacagcaaaccatatatctgataggggcttaatatccaaaatgcataaggaactcatgcaactcataacgtgattaaaaatagagcaaaggacctgaaaagacatttttccaaagaagacatacagattgccaacaggt

SEQ ID NO: 368950 - DNA, 635 bp, Homo sapiens
aataaattattcaaaatggtgtggacagagcagaaggaaatgacatggaatggtaaggcatctgtaattttattacaaagctatagtagtcaaaacagtatggtactgccataaaaacagacacagagaccagtgggacagaatagagagcccagaggccaagttatgaatttagtccattyattttcaacaaaggtgccaagaacacacattggggaaaggatggtctcttcagtaaacggtgttgtgaaaactggatatttacttgccataggatgaaaatggactcttatttcacaccatatacaaaaatcaactcaaagtggattgaagacttaaatacaagtcctgatactataaaaatcctggaagaaaagagagaagaaaagtttttgacactgggcttgccaataatttttgggggtatgacaccaaaagcacaggcaacaaagtcaaacacaaataagtagcactacatcaaactaaaaaattcctgcacagcaaaccatatatctgataggggcttaatatccaaaatgcataaggaactcatgcaactcataacgtgattaaaaatagagcaaaggacctgaaaagacatttttccaaagaagacatacagattgccaacaggt

SEQ ID NO: 368951 - DNA, 585 bp, Homo sapiens
ttttcaacatgatagattaaaaatacatattgagcacatttttgtattttaattagccatccatatttagtctgttcatatcctgttaatattctttgccttggatggacattaaaaatgatagtttttaatccacaaagtctcactgtacacatgaaatatggtttctgtctagccctttcctaccggaatatcaaaccgccttggcctagtcctcattcccttccaaacaaaatgtggtcgctttctggtgaagtcagtgttcccgtggtgtgtgatagttcagtgtgtccacagttttatgattgaggctgtagattgttagttctgtctgctttctaagaccttctgaaggggcagagctggtttgcttagttgctttcttcagcaaaatrtatactgttcaataagtgttgcaactgacagatatgtttcagccttggcttctccttcccagggaataaatctaatatgtgattctgaccacagcgaatgtgtaaaacagggaatgtggctaacatctatgccaccaggaaaaataagcactaaagagctgccctctgctgataaaaaagcttactagca

SEQ ID NO: 368952 - DNA, 597 bp, Homo sapiens
ccaaagaacctagtgcaataccttgtatatagcattttataaatatttattgattataaattgaatataacattcaaaaaataacaagtgatgcttcttttctagcaaggcattctttgatttcaaaaatcattatttttaagaagtaaaaataccaatgataaaaagccaatctgcacagacagctctgaaaagcacaagcttctcttrctcctcatccttcatctttataaagaccttctccacaagaataacttgttaccaatttcttgtaatcctatccagaacattcttatgtatctactccataaatattaagaaattaaatagatgaaatggatatactatatatacatttctgacttctgctttttcactgagttgtgcatgatggacatatttccataggtgcacacatatataatcttccttcttttgaaagaatgaatcatagttttcagtcttctattagcagatttttagattgtagttctttgttactacaatattcttctaatgagcattcgtgtgtttgtgtgtgtgtatataattttgcaagtatggatgtttgtaagcctaaatatccagtcaagcaga

SEQ ID NO: 368953 - DNA, 513 bp, Homo sapiens
tgctatcattttctctcttagcttggttgcttcgtattaaatttgaataaacatgtttccctagcctgttctccatatatttcccgtgggagtatgaaaactatctgaccattattccaaagtgactaagcatcataggccacagtataattggacaaaaggagctacatttaagtagctgataagattgagtataaaagtgagtgcttttaggaagtttttgttttagtgtacatggaggtaagttaagcacaaataagrtaacaaacataaaggtatagcttactgtaactcactcaaatgaattttgtgtttagcatttgaacaaagttcagaggaaatccaagaatgcatttaactattctctttttttgattaaaattctttcctttgtattatagtggtattaatatttatttaagccttcattctaaagtgatgttcagccataatagattaaccgtacctgatttcagaaggtttttactcaatttccagatttaggtctatgca

SEQ ID NO: 368954 - DNA, 544 bp, Homo sapiens
tagttctctgctgtaaattgcctccttgtgacttacatcttggtcccagttcccgtttgtcccagcaggtgtggctaagccttttgtatcaaaggtggctttgagagaaaaaggctggtcttgggtgtttcttccgcarggacccgagccgcattggggagaacacataaacactggttctttccccctctacccttttctttaacctgaacagaccaggaacacatgcagaggtgttcctggatctctcatgtttttgtaacccttttgtcctgaggacaaaaccgaatcaggagaactgttacggttttcaaaggggaatcagtggtactgtatttaacaagaagaaggtgtgtattttccttgtgggaaaggactggggcattcattggctgcagtagaagagaatcttagtgagtgtggtcttgctcacttacaggaactgtgagccttggccctcctttcgctgggggagaaaatccttcttgattgcttaaaaaatgtgtaaaatggggggaaaaaaacccaaaccaaaacaaataga

SEQ ID NO: 368955 - DNA, 526 bp, Homo sapiens
agtgtcagaaactgggagaaggtactcataacatagagaattaagccccagaatrtacaaagaactctataaacctgtaagaaaaaaatgaacaatccaactgatgaatgagcagaaatgttacatgtgtgtttcacagaagagaaagaaatggcaacaaatacatggaaaatgctcaatcttactagaaattggggagaaattagaacagcagtgatcagatgccattttatatttaccacacacacaagaagtaagaatcctgacaatacccgatgtgactgagaatgtgcagcagtagttacaccactttggaaaataagttggcatcatttagtaaatacaaaaagtagctgaactctctgacccagaaatttcacccctaggtatattccctagaggaattcttgcactgtttactaggaggcatggaaaagaatgtttataccagcactgtttgtaattggagaaaaaaaaaaactgaaaacagaccaaatgttgattaacaatggaataaattgtggtg

SEQ ID NO: 368956 - DNA, 632 bp, Homo sapiens
taaatcaactgttacctctcaaggcagtctcctggtgggtgagagttcctctctggagcttctaagcatatcattattaacagatgaacttgccttgtagggagtgtctggtgaaggggagataaaaggttataattgcatttccaaagggctaagtaggaagtggggaacagagggaattggggaaaagagaaaataataaaacaatagtaactcattctccttttcttagaaaaatggggtactcggttacacagggtctccaggaaatcccaggcatctaactctaagctttcagcccagctcattctctagtgaagttcccttttctgatccagcactatttactatgtgccttctacatacaagccactctattctcagagcaagctctgctgctcwtgctttcagcttcttttgtttagatcagacatgcatttccctgtttttctatcaaccaatcttcactgctgcttccagctttctctgtcaagcatgccttctttggtaattaatcctgtctttgccctgacctgtactatttggatttcttgtctcaatttctgctgcatttaaccaagtacttactaaactcccactcaaactatttggcttaccacttaatcacccag

SEQ ID NO: 368957 - DNA, 602 bp, Homo sapiens
gcgtcagagtttgcacttacaatggactgtccacaaccttccttatcatcaggaattgaaaatggtatttcagatccagatcagtaggattgaaacatccaatgtcatctgggtggtaagtaatttttttggctcaatatttaaaaaatcatctttaaaaaaagacaccttggttttcttttataacatctgaaaaattctcgttttggaaayatattagcagctcaaaacagtttgtctaaacaattacatttctgcattttctgttaatgatccaggacaaagtaacatgacaactttggtttggtaggtaggatgggatgcactaagaaaatagattttctcagttttgctctgtcttctaagaagactgttgagtctgtcctcgtgaatactgaattccagagagccacgaagattaaccaattcattcctcctacctctttcttctccgtcctccagagattttcctaaataagatgtaataatttggcaacatttttctttccaatgtagcttcctgagagtttcttggcctatacccagctgaagtgcagggaagagtaagtgctagcacttaatgttccatccaacaaggagcc

SEQ ID NO: 368958 - DNA, 598 bp, Homo sapiens
ttgagggaataatagaataaaacctctgtaatcttgctagagaggtagacacccagatacaagaaatccagagaacacctgctggattctacacaaaaygaacatcactagggcatataggcaccagattgtttaaggccagcactaaagaaaaaatcttaaatgcaactagagaaaaaggtcagatcacatacaaagggacccccatcaggctaacagtggacttctcagcagaaaccttacaagccagaagagattgagggtctattttcagcattctcaaaggaaagacattccaaccaagaatttcatatcctgccaagttgagcttcatatgtgaaggtaaaataaaatattttttcagataagcaattgctaagggaatttgttaccattagaccaaccttacaagaaatctttaaggaagttctaaatgtggaaacaaaagaacaatacctgttaccacaacatcacacttaagtacctagcccatagaccctataaaggaaccgcagaatagaaactacaaccagctaacaacttcacaataggatcaaaacctcctatatcaatataaatctggaatgtaaacagtctt

SEQ ID NO: 368959 - DNA, 533 bp, Homo sapiens
ggttcttggtatcagggtaatactggcctagtagaatgactttgacatattccctcctcctctgtttttcagagtagtttgagtagaattgatattagttctttaaatgtttggtagagtttagcagtgaagccactgggtcccaggcttttctttgctgagaaactttttattacaagttcaaatttgttacttgtttttggtctgttcaggttttggatttcttcatggttcaatattcttagatttatgtgtctaggaatttttctatttcttstagattttccaatttattgccatataattgctcatagtagccactaatgatcctttgaatttctgcagtatcagttgtaatatctccctttttatctttgattttatttatttgggtcttctctctttttttcttggtctggctaatggtttgtcaattttgtttatcttttcaaagaaccagttggtcttttgtattgctttcttcatttcaatttcatttatttcatctccaatctttattatttattctacta

SEQ ID NO: 368960 - DNA, 589 bp, Homo sapiens
ctgaagccagcacgtctcagagtctcacccaaggcccatggtatactacttgggtattgctcctggttattcagggcccaagtactctttagtcagcaggttatgggtcctgctcggactgggtccttcccttcaaggcaacaggttctcttctggcccagggtgtgtctttagaaatgtcatctgagagatagggcctggaatgggggcctcatgactctgactggtgccctgtcctactttggataagctggtatccaagatgcaagacaaagtcatctttactcttccccctcttctcctcacgcagaaggaaaggktttcttttggagccatgagctgtgctgcctggggttggagcaggggtggcacaaacactcccttagccttcccagctagtgtcttagtaggtcatctttccccaaagtctgcttgctctaagcccggctcagcaccatgattcacctaggagttgcagtccttgttgcctagactggctttctagtttatttagggccttagagcacttcagcctacagtggtgagcctcgacagaatcactgggttccgactgctgggatgggtgatt

SEQ ID NO: 368961 - DNA, 583 bp, Homo sapiens
  misc_feature (1)...(583): n = A,T,C or G
nnnnnnnnnnnnnnnnnttgttccggtgatgccacactgtgtgccctctccagcatgctctgtggcagggtttcctcagtattgactgcaaacttttcctgctaaataactatgtctgagaactcaaatgggcctcaggagatttgatggcccaatcctgcttccatctccctccaactcaatgtcataaaggataactgttgcccattttacagatgaggcaacttgcacccataactgaagagatttgccctgattgcagttactgaatggtacagacatcgtaataatcttaggagtgcagtggctcacacctgtaatcctagcactttgggaggccgaggmaggtggatcacgtggtcaggagttcgagaccagcctgaccaacatggtgaaaccccatctctactaaaaatataaaaattagccaggcgtggtggcacacgcctgtaatcccagctactcgggaggctgaggcaggagaccgcttgaacctgggaggtggaggttgcagtgagctgagatcgtgccactgcactccagcctgggcaacagagtgagactccatctcaaaaaaaaaaaa

SEQ ID NO: 368962 - DNA, 583 bp, Homo sapiens
  misc_feature (1)...(583): n = A,T,C or G
nnnnnnnnnnnnnnnnnttgttccggtgatgccacactgtgtgccctctccagcatgctctgtggcagggtttcctcagtattgactgcaaacttttcctgctaaataactatgtctgagaactcaaatgggcctcaggagatttgatggcccaatcctgcttccatctccctccaactcaatgtcataaaggataactgttgcccattttacagatgaggcaacttgcacccataactgaagagatttgccctgattgcagttactgaatggtacagacatcgtaataatcttaggagtgcagtggctcacacctgtaatcctagcactttgggaggccgaggaaggtggatcacgtggtcaggagttcgagaccagcctgaccaacatggtgaaaccccatctctactaaaaatayaaaaattagccaggcgtggtggcacacgcctgtaatcccagctactcgggaggctgaggcaggagaccgcttgaacctgggaggtggaggttgcagtgagctgagatcgtgccactgcactccagcctgggcaacagagtgagactccatctcaaaaaaaaaaaa

SEQ ID NO: 368963 - DNA, 579 bp, Homo sapiens
cactagggaattgcttggtctattctgggtagattttaagccaagatttggtgaaattctttctctgaacacttatcaaagcagcaggatgcatgaaaaatcactgagtttatttttaaatgacagaggaaggcttccctatcttttatcttatttgagtttgtctttgtctccaaaatggacttcagtgtcacattctcatagaaaactacagagcagtaaactctagccagaaggtatcagaagtataagcaccacatggaaatctaactgaagaagctgaagacaaaatcatggggtatatgtaacaataaggtgaagctggcaaaaataacagcaaaagagaaaatccagcattctttaatatgtgcttattttatgctgtctttctggagggcagctaattaaaaactgactcttacccaactatatgagacaggtggtttgcctttgktaacttacccagtcacaaagcaagatggtggtgatgatgggcaagacagttttaagtcccatagcaagattccatcctctaaactatcattaatattgctttaaacagtgatacataacagtttg

SEQ ID NO: 368964 - DNA, 656 bp, Homo sapiens
attatctcccatcccaatgccattctatgatgccaccttgccatctcccctccatccccccagcaagaagtgtagtctaatcccacttctttcatctgggtgggctggtgactatgttgacaatacacacagtattgaggaagtgatgccatgtgacttctgaggctgtcataaaaggtgatacggtttcaccttgttttctggaatactggcacttgggttgctgagccatattgtaagaagtctgaccaacctgcarctagcatgctgggagtaggctgggttacttggagaggctcatgtaagcactccagttagtaggccttagtctttggaaactacccctgccaccccgaccatgccatgtgccagacaccttcctatagtctgaatatttgtgtctgtccccaatccatgttgaaacctaaccctcaaagtgatggtattaaggggctggccctttgggaggtgactaggtcatggagtggggagccctcatgaatgggactgtgctcctataaaggaagccagagggagcttctttgccccttctaccttcttattgcctcagtttctaactccacaaaatggggataatagcaatacctacttataggatagttgggagttaacttacgtaaacttatgactggcac

SEQ ID NO: 368965 - DNA, 656 bp, Homo sapiens
attatctcccatcccaatgccattctatgatgccaccttgccatctcccctccatccccccagcaagaagtgtagtctaatcccacttctttcatctgggtgggctggtgactatgttgacaatacacacagtattgaggaagtgatgccatgtgacttctgaggctgtcataaaaggtgatacggtttcaccttgttttctggaatactggcacttgggttgctgagccatattgtaagaagtctgaccaacctgcagctagcatgctgggagtaggctgggttacttggagaggctcatgtaagcactccagttagtaggccttagtctttggaaactacccctgccaccccgaccatgccatgtgccagacaccttcctatagtctgaatatttgtgtctgtccccaatccatgttgaaacctaaccctcaaagygatggtattaaggggctggccctttgggaggtgactaggtcatggagtggggagccctcatgaatgggactgtgctcctataaaggaagccagagggagcttctttgccccttctaccttcttattgcctcagtttctaactccacaaaatggggataatagcaatacctacttataggatagttgggagttaacttacgtaaacttatgactggcac

SEQ ID NO: 368966 - DNA, 607 bp, Homo sapiens
ttttgctccactggtgacaatggccccccaccaccttgaaaaatgtatgctctagtgagatccatatgagatccacacataacaattggttgatgtgctctcttagacctcttttcaggtttcccctctatctctctcaagttttaaaagcaatacaaaaaaatgtgcacatctgtcttttggaatatcccctgaattttagctgaatgttgctgactgcatccccctggtgttggttaccacgttcctctgtcctctgcattttctgtacattgctagctggatccagatgcattaatcaatatggggattgatttttttcttcctctttcttttgcaagactgtatcttttactgatgggaacagacattgatgatctggtctagcttccttaatttattagggctttctctccctttaaagtaaatggcttctaagagttaattcctcaaraggctgaaaacttttgcatttcttaagggtttattcattgcactccctgcaaagaatgttttaaagctccttcatctaaaacacaatggctataattaaaagtttagctctggtggctcttggagggcagcaaagtcatacatgtgaaattca

SEQ ID NO: 368967 - DNA, 484 bp, Homo sapiens
tctactcccaatcagttgactcattttagcactaaactgaaaattagaagacctgaattctaattgtatcaataatctaaactaagtttgtggtttgggtttgtataaaactaagtgctcagatgatgtaatgctgaagttccatttccatttcaactttaagattctgtgaatgamatggaaatgagaaggtaaagataacttcagcattctccagtaaatacaaaaataaacatattgatatggttaggctgtgtccttacccaaatctcaccttgaattgtaataattcccatgtgtcaagggcaggaccaaatgaaggtgattggatcatgggggcagtttcccgagtgctgttctcctgataataagtgagttcgcatgagatctgatggttttataaggagttttctccttcactcggcgctcactctctatcctgcagccctgtgatgaggtgccttccaccatgattacaagtttc

SEQ ID NO: 368968 - DNA, 484 bp, Homo sapiens
tctactcccaatcagttgactcattttagcactaaactgaaaattagaagacctgaattctaattgtatcaataatctaaactaagtttgtggtttgggtttgtataaaactaagtgctcagatgatgtaatgctgaagttccatttccatttcaactttaagattctgtgaatgaaatggaaatgagaaggtaaagataacttcagcattctccagtaaatacaaaaataaacatattgatatggttaggctgtgtccttacccaaatmtcaccttgaattgtaataattcccatgtgtcaagggcaggaccaaatgaaggtgattggatcatgggggcagtttcccgagtgctgttctcctgataataagtgagttcgcatgagatctgatggttttataaggagttttctccttcactcggcgctcactctctatcctgcagccctgtgatgaggtgccttccaccatgattacaagtttc

SEQ ID NO: 368969 - DNA, 640 bp, Homo sapiens
tatttaagtagatattagtaaatatacttatttatgtatcaaattgaaagatgtgtataatttccttatgaataatatatttataatgcacatcatcttttgcctttaatctgcaaagatatcctaataaattcatatattgtacatcctttgctcaaagaagaacactttggaaaatggccattgctgtgattattgtggatttatgtagcttccagccacatactgcatgtttgtttctggctaaaatctattttttctaaygagcacactattaaaatacttaaaatattattcacagattgtctcaatggggaaaaaaagacatgcagactctggagataaacacctccagttaaatctgggctctggggttatacctgtgtgctgttgggcaggtccttttacttgctttatttgcatgatgggggtgatagcatacaggcacctgttgtataagattattataagcattaaataagttactatatgtgaagcatttgaaacagcatctggcacacaatgctattcgtgtctcctcttagttttgatgttgctgttacatatccctgaatactattgtccagttccttccatttgattccactctgccctgaaaggtaactactgtactaaattc

SEQ ID NO: 368970 - DNA, 579 bp, Homo sapiens
tgtatttggtattattgatttttgaataatttttaataatgccagatttttcctttggtactatttagtatagtttatctttttttcacctgtctactgtcatcctttacgtaattttacatatataatcgaatggaataagctgagggtccattttggcttgacatatttggaaaacacaccccawaaaatgtgtgacttacagtaattcaagtatttcaattctagtagattcagtacaatgacaattatatgtttaataggcaaagtcttccctttaataaaataaagcatgtagaactgttaataacacctatgatgtggttatttatatttaacacttgtaaatgaagctattatcagggtagaactggccactgaagaatttttattgcacacttgacattgtgccagaaatttttatgggcagatattgttaagtgatatatttcttttaatatatttgaacacatttaaactaacattaagaaaaacaaaccaacataaattttatttatttttttaaccatatgatcctatgttttcttaaaaattttaagttcaagggtacatgtgcag

SEQ ID NO: 368971 - DNA, 590 bp, Homo sapiens
tggccattgaccctagagggcaccccttcaccatcagctctggtcagtgacactcatgggagtggctgcaatgagacytccctctctcttctgggctccttgatcacccacaggtgatggttaattttatgtatcaacttggacattgtttttggatgagattagcatttaaatcagtgatctttcagtaaagactaccctctataatttgataattttatgggcttcattcagtcagttgaaggtctgaatagaaggaaaagttgtgcctacgggagcaagaagaaagcatccatcaggctggctttggacctcagctgtactgtgcactccgaggcgtggagcctgcctgtccacactgcagatttggactttccagtcttcttaattgcatgagccaatgtttcataataaatctctttctctatatacattctattagttctacttctctggaggatcctgactgaagcacctatgagaagctgaagggccttccatcagtccctcatgagaggcagagaaggaaaatgtctgtagcctaagggtaatgttctcagacgatagcacaacctcactcccctgcccct

SEQ ID NO: 368972 - DNA, 590 bp, Homo sapiens
tggccattgaccctagagggcaccccttcaccatcagctctggtcagtgacactcatgggagtggctgcaatgagacttccctctctcttctgggctccttgatcacccacaggtgatggttaattttatgtatcaacttggayattgtttttggatgagattagcatttaaatcagtgatctttcagtaaagactaccctctataatttgataattttatgggcttcattcagtcagttgaaggtctgaatagaaggaaaagttgtgcctacgggagcaagaagaaagcatccatcaggctggctttggacctcagctgtactgtgcactccgaggcgtggagcctgcctgtccacactgcagatttggactttccagtcttcttaattgcatgagccaatgtttcataataaatctctttctctatatacattctattagttctacttctctggaggatcctgactgaagcacctatgagaagctgaagggccttccatcagtccctcatgagaggcagagaaggaaaatgtctgtagcctaagggtaatgttctcagacgatagcacaacctcactcccctgcccct

SEQ ID NO: 368973 - DNA, 590 bp, Homo sapiens
tggccattgaccctagagggcaccccttcaccatcagctctggtcagtgacactcatgggagtggctgcaatgagacttccctctctcttctgggctccttgatcacccacaggtgatggttaattttatgtatcaacttggacattgttttyggatgagattagcatttaaatcagtgatctttcagtaaagactaccctctataatttgataattttatgggcttcattcagtcagttgaaggtctgaatagaaggaaaagttgtgcctacgggagcaagaagaaagcatccatcaggctggctttggacctcagctgtactgtgcactccgaggcgtggagcctgcctgtccacactgcagatttggactttccagtcttcttaattgcatgagccaatgtttcataataaatctctttctctatatacattctattagttctacttctctggaggatcctgactgaagcacctatgagaagctgaagggccttccatcagtccctcatgagaggcagagaaggaaaatgtctgtagcctaagggtaatgttctcagacgatagcacaacctcactcccctgcccct

SEQ ID NO: 368974 - DNA, 583 bp, Homo sapiens
aagagaaaatttatgactttatctctgtttcctatgtgagagtttcaacagaggtttccctttgaaatgagacgtatccaatttaacaaaaataatacccgctaattatgagggactagacaaagcatcataaaaaaacagaataaaaaaggcagaaatcactttctgtttttaggaggaacatagtcattagatcctctcaaattggcatgtaaaatgaaactgtgaggaaaaataaaacaaagaagctaaaaaataaataattataaaaataaagaatcctatattctaraaaatgtagaaataactggttacttcaagtttcatgattttgttgtgtttatgtcaactccttgtaaatatacaaatatttgaatattttgatttctaataaatttttttaagtaaagaagttttaaataggatttgcattttcaggtattaattaagaaggtaaaagcatatatcttgataagattttttttacctacctttaaaaaggctggcattctttaaaactcccaactgctcctgggttccagcttgtctatatttcccaaaagagccaagctgttaggtaaca

SEQ ID NO: 368975 - DNA, 592 bp, Homo sapiens
accttgaacgttttgaaaagcaatggtcagacatttataaaatgtccttcagttgcaatttggctgatgtatttctcaygattagactggggttatggttttttgggaggaggaccataaagtatcatttttgtcacttcatatcaagggtatgtgtgtcatcagtatgacttattactgttgacacagatcttgatcagctgactggagtacttattactgttgagacagatcttggtcagccgactggagtccttattgctgttgatgcagatcttgatcagctgactggggtacttatttctgtttacacagattttgatcagctgactggggtactgtttgccaccgtttcgtactataaagttccttttgttcctcctttccatactgtactgtttgaaagcaagtcaataaaagcagcccacagtcaagggatacagagttaagctccatttgctggaggggaaaatgacacaaattatttgaaattttctgagagaaatttacctattctccccatttgtttgtttccttgtttgtgtattcatttattcattcagtaatttatatgtatcagtgtaatctcatg

SEQ ID NO: 368976 - DNA, 592 bp, Homo sapiens
accttgaacgttttgaaaagcaatggtcagacatttataaaatgtccttcagttgcaatttggctgatgtatttctcatgattagactggggttatggttttttgggaggaggaccataaagtatcatttttgtcacttcatatcaagggtatgygtgtcatcagtatgacttattactgttgacacagatcttgatcagctgactggagtacttattactgttgagacagatcttggtcagccgactggagtccttattgctgttgatgcagatcttgatcagctgactggggtacttatttctgtttacacagattttgatcagctgactggggtactgtttgccaccgtttcgtactataaagttccttttgttcctcctttccatactgtactgtttgaaagcaagtcaataaaagcagcccacagtcaagggatacagagttaagctccatttgctggaggggaaaatgacacaaattatttgaaattttctgagagaaatttacctattctccccatttgtttgtttccttgtttgtgtattcatttattcattcagtaatttatatgtatcagtgtaatctcatg

SEQ ID NO: 368977 - DNA, 592 bp, Homo sapiens
accttgaacgttttgaaaagcaatggtcagacatttataaaatgtccttcagttgcaatttggctgatgtatttctcatgattagactggggttatggttttttgggaggaggaccataaagtatcatttttgtcacttcatatcaagggtatgtgtgtcatcagtatgacttattactgttgacacagatcttgatcagctgactggagtacttattactgttgagacagatcttggtcagcygactggagtccttattgctgttgatgcagatcttgatcagctgactggggtacttatttctgtttacacagattttgatcagctgactggggtactgtttgccaccgtttcgtactataaagttccttttgttcctcctttccatactgtactgtttgaaagcaagtcaataaaagcagcccacagtcaagggatacagagttaagctccatttgctggaggggaaaatgacacaaattatttgaaattttctgagagaaatttacctattctccccatttgtttgtttccttgtttgtgtattcatttattcattcagtaatttatatgtatcagtgtaatctcatg

SEQ ID NO: 368978 - DNA, 540 bp, Homo sapiens
tattgtgatcttctttcacaaaataagcaaatatttaatataaaactgattatacagttgaaattgctaatcactgcattacagagatttttctttcctcattaaatactctttagtaatttttaagaaatccaacataaacaaaggtaaagcttaatttctaaaattcattccaactagtaagaattcaaaagatctaatatacttatttatgtgacaagaatgcaaattaaattactgttgtcttattctaaaaacaatatttgcaggttgttttcaatagcaattaaaccctgttttaattttagtatggcatctccatttgctccgagtattacaccccagtcagggcctatttgcaggtctgttctattgcacaggctgtatgtttcctcctattttctttctctgtttcaactaagtctcccttttgtctcatacatttctcttgacactaaagctatgtattttatgctattggcggcttgtcctgaagatagttgtaaaatctgtmtttttccaattatgagaggtgttcca

SEQ ID NO: 368979 - DNA, 553 bp, Homo sapiens
tatcataatctcacatccatccatccacccacctacccatccatccatccaatatttaccaaatgctatgatatgccaagcagtgggcaactaacaaaataacaactatcctctccctcatgrtaattttggtctagtctcactaaataggttatagaataggttatagaagtttttctatgttaatacatacaaccctccatctgagatttttaataacaatatagtgtttcattgattgcatgtgacatactttaagcaatatcctcctgatgaacatttatttccattttgtcaatattataataataactgagatgaacatcattgtacatacatgtatgcccttgcctgcagatttcctttagatgaaaatcttagcatggtattttgaggtcacattttacttagtgatatatactgacaagtggccttctacgaatgtcctatcaattgacatattcaccaacagtgagaagcgagcccatttctctcaccaacatttaatactggtgttttcatctatgcccattgtataggtgactaataatat

SEQ ID NO: 368980 - DNA, 589 bp, Homo sapiens
ttttcttttttaagaaaatagtactttttaattgtggtagtagtgctgaggacaagcagagaagatgaggggtatwatctgccaggtttttaaatctatggcattggcaatcataaaccacacggtattgggttaaaaacattatcaacaaataattcaatctttctttagaaatgctatgccaaacttaagaattcaaggtaccataagtctaattaacaataatgaaaagaaccactcaaaaagtattattattggcattctttggcttcagctcctgaaaaacagagcaccaagagggttttcaggacccagtatacaaaccactatctataggcctcccctcactctccacacacccttaactaagtgcacagtcctggaaacaggtagggctgaaagtctcccctctccaccagggaaaaactctgggttgtctaaggtatatatgtacatcattctatacaaggcagaagaagatgattaagtgagtgagtgtgggtctggagcctcacaccctctttttttcttttgctatttatcttggagacgcttgtttaaaaagacaagcggccgggcgcggtggctc

SEQ ID NO: 368981 - DNA, 589 bp, Homo sapiens
ttttcttttttaagaaaatagtactttttaattgtggtagtagtgctgaggacaagcagagaagatgaggggtattatctgccaggtttttaaatctatggcattggcaatyataaaccacacggtattgggttaaaaacattatcaacaaataattcaatctttctttagaaatgctatgccaaacttaagaattcaaggtaccataagtctaattaacaataatgaaaagaaccactcaaaaagtattattattggcattctttggcttcagctcctgaaaaacagagcaccaagagggttttcaggacccagtatacaaaccactatctataggcctcccctcactctccacacacccttaactaagtgcacagtcctggaaacaggtagggctgaaagtctcccctctccaccagggaaaaactctgggttgtctaaggtatatatgtacatcattctatacaaggcagaagaagatgattaagtgagtgagtgtgggtctggagcctcacaccctctttttttcttttgctatttatcttggagacgcttgtttaaaaagacaagcggccgggcgcggtggctc

SEQ ID NO: 368982 - DNA, 501 bp, Homo sapiens
aaactttgtgcttggtacaggatgtgctggcaagctcacaaatacagttttgtgaaatgagctcagagaacagctagtatatccctgttcctgctgcagtgggcatatataaactttttctgggaacttattacctatatatgtgtcaatagccttcaggcacccccagctttctgtcattcacacctttagagacaatggtgggaatttttctacttcagcctgaagtgaggcacacgtagtcacatygccctcagtgattgtagaatggatccaatagccgtgggagacccatgcattgcaaggggctaaatcttatgtacttgctttctcctcttgctataaataaacgttgtatcacttgagtctggtgtgcatgttgtctcttcatagtgacctagaaacttgcactgtttccctgatggtacttacctgccttttgaccttggccacactgatgttacactttatcctgcagcacaagcttatcacctaataaaa

SEQ ID NO: 368983 - DNA, 508 bp, Homo sapiens
agactactgcatatggctcattaatttaatagcttgagggatttcttctagatcttttttcccacatagttttataatcttgatgtcatattttatgtaatttttcacatgagttttccatgaagctgtaacatgatgatctttttattttattagattctcttaatttaaaggatccaacgcaatgaccaatctccaattgtcaaatattgagtgtgagtgtccactctttactattgtaaataattcttctataagcaattttaatgcttaaaattccacttaattgttttatttctaattctttcgttcttttttctttaattatgttttgyagagacaggatctccctatgttgcccaggctggtctctaactcttgggctcaagcagtccttccaccttacctcccaagtagctgggactacaggtgtgagccaccgcacttggcctaattgtttcttgagaaccataaaagaaaaaggtgtacagcttcgaatgacctgagt

SEQ ID NO: 368984 - DNA, 618 bp, Homo sapiens
taactctaaaatccattggcaggaacaattatttggtactcctaagaaagggagcaaattctagagattatgctgtgaagytacagctgggttgttatttgtctgcaatttaaaaatctggctgttaaaattagttacattcaaggagagtttatcagaataaaagtctcagatgtgatatttttagtctctggaattaaagtggcacccatgagccaatagatcacagtaaaaacagccagccttgccgtttagagttctttaaacagacttattctgattgtaacaaaaacacccataaatctatgcacatatatattgatcttggcttcctcttaaaaatgactctgtcctagtaagttggcatatttcataaacaaaccaacaaattattgatctatcatatactctaaaagtcctgtgaagaatctaggttgcttttaagttcatactgcacctaagggaatgagaaactctgaaatgaaaaatagatatttaaaaagaagcacagaagatatatagctgtctctttctacttcttttgagcctcctattgtgattccatctgtgtatacctcatcccacattgtgtctactgatgtgacatttagtgtgtta

SEQ ID NO: 368985 - DNA, 577 bp, Homo sapiens
tctttctacttttggacaaaggcagactaattgagtataatgttgagttagaggtagaaatattaagcctgaaacaatctcagaggtccctcaaggctgacctaagtgtgtaatttttgttttccctgcagaatatagccttaaaactactcattttttaaatgatgaatatcgccagtctttgcttctttctagccttccaactcatctgcactttcagccagcttccaacacacayatattatctacattctgttctttttatcaccactatttatgcttgttttcaacataggctcatcaggagctgtttttttatatgtctcagaaataggtgcttcttgacaagcagagtttaaaggaaaatgattgtttatgcctttgtccttaacatgcattttaaactgaaaaaactcccaaatatgaaaatgcctatgtgggcagaagcccattatgaagcactttcatctattccccctgcctgtgttgagcctgtgggtggataatgatcgtctgtctattgttctgctgcaaatgcaaaggaaacgctcagcttgtgcaaaggattgaagacgtg

SEQ ID NO: 368986 - DNA, 621 bp, Homo sapiens
cttttaatctgtacattagggaaagataaaaatttcatatataaatggaagtgtgatttggtacaattactttggaaaatggtttgacaatattcactaaactttagatatgtatgttctatggcccagtggtccagcagcaatttaactcctacatgtttatccaagagaaaaaaacacatgtgtactccaaagacgtgtgcaatttttattttatttatttatttttgagacygagtctcactctgttgcccaggctggagtgcagtggcgcaatctcagctcactgcaacctccgcctcctgggttcaagcaattctcctgcctcagcctctccggcagttgggattataggtgcccaccaccacagccggttaatttttgtatttttattagggacagggtttcagcattttgggcaggctcgtctcgaactcctgacctcaggtgatccgcccacctggcctcccaaagtgctgggattacagacgtgaaccaccacacccggacagcatgtgcagtattttttattacagcatcaattgtaatagctgttagtctactataatatttgatatttgtaccaataaaccactttaattatcatatggttttagtaag

SEQ ID NO: 368987 - DNA, 663 bp, Homo sapiens
aatagacatttagtttgattccatgtcttggttattgtgaataatgctgcaatgaacatgggagtgcagatgtctctttggcacactgatgttatttcctttggatatataaccagtggtgggattgctggatcatatggtagttctatttattaattttgttatcttttaaaatataacttgagatttttactttgacccatatattatttagatgtgtaatgttttttctccaaaagttgtactgtctgccctaaactttgcaatacatctttccattaacctaagtatactatcaaataatgctttactatcttttttatgaaattcatcatatcctcatttattaaacttacatatattaaatgtcgttactcaccactgttytctcttctttcaccttgtctctcttatgttttttttttttggtcccctttttttttttaattatactttaagttttagggtacatgtgcacaacgtgcaggttagttacatatgtatacatgtgccgtgttggtgtgctgcacacattaactcatcatttacattaggtatatctcctgatgctatccctcccccatccccctacctcacaacaggccccggtatgtgatattccccttcctctgtccaggtgttctcatgttcaattcccaccta

SEQ ID NO: 368988 - DNA, 548 bp, Homo sapiens
ttccatgaggctggctgctcctggatggtgcagtgtgtaaaacaattattgtattctgtggtccaagaccctcttccatacctccatttctatgatgtgggtttcctggtcaggttctatgctgtgtggggttccatgcatgtagattagccaagctctaacctcttggatagtggtgttaaatgaggctgtgctgggtgaaaagacaaacccatcctcagattaggcaattatttctttaaggaaaaacctctgaccgttccagaatttaaaaggtccaytgtagtctgtttgccacaacacatagtggctggttggtctcctcaagtaacagtaacacactgaggctcagcactcatctttgtgccttgcctatttgacagtcagcagctagatcagctttggtaagtgccatcccagcagggttaattgttacccttcatctctgtaagcatgcagtctgttcatgtgctattgtgcaaattctgtgctggacagcgatgatggctgattagtgtcaaacagctgggttattttgcctatttagt

SEQ ID NO: 368989 - DNA, 543 bp, Homo sapiens
gacgatatttctgaagcatctgtatctctgagcttttgatgtatgagttgatctttccccaatagctagcgagaaaagcactcttgttagtatttaaaaataataaaaaatgaatccttttttttttggctctatccttttcacttcaaaatatcctctttccaaattacctattgcaatattagccttcaggagttgggctaatggaagtagacaccagtcaatgcccctcctgctaaaaaaacaacaatgtattgtgcactgatgtcaattgtacaaccagaacattctctgaggcaaaagaatggttcctcttctcatagacactacgtatgtgttagaaaatgtgatccaggatgtagcatggtgggctacagtagcaagagtgtagccagagtaacagaacagctgttgttactcttgaacagatagacggtgggatctcaggggaggaggaatcagagagtgacattctttcytttacaaaaggcaatgccatcatgaccatttcctccctggaaaaaaaagatacaggctttttcc

SEQ ID NO: 368990 - DNA, 560 bp, Homo sapiens
ggggcagctgatgtgccaagtcccctctcactagagaacaaggaagtggaaaaatatgtaaccataagatcagcagaaaggacagatgtggtagtttggctagtgagaaaacaactgaaaagatccatctgagtaagctcctaaaattccaaagtcatttcttaaatatgctatttttaagatgatactgcctgcacattttcyatggagatgcttatttttggaccatctgttgatggtaaatatgtatcatgtgccctctaaagcctctatgtgttgtctactcactattttacagcttctgacttgtgtcagatactgaaatgtcactgttatccagtttgttggcttatgtgacagagatcacctaagtgctcactggcctcctagacaccggggctgctttccttccctgactcactttcagccagattgggtgtctgggacagcttctgtcactgtgttgcaggtagaggtggtttctgctattttggagcctggcctctaacagcccatgagactctcggctcactctctgtctctgcttacaagctagaaga

SEQ ID NO: 368991 - DNA, 560 bp, Homo sapiens
ggggcagctgatgtgccaagtcccctctcactagagaacaaggaagtggaaaaatatgtaaccataagatcagcagaaaggacagatgtggtagtttggctagtgagaaaacaactgaaaagatccatctgagtaagctcctaaaattccaaagtcatttcttaaatatgctatttttaagatgatactgcctgcacattttccatggagatgcttatttttggaccatctgttgatggtaaatatgtatcatgtgccctytaaagcctctatgtgttgtctactcactattttacagcttctgacttgtgtcagatactgaaatgtcactgttatccagtttgttggcttatgtgacagagatcacctaagtgctcactggcctcctagacaccggggctgctttccttccctgactcactttcagccagattgggtgtctgggacagcttctgtcactgtgttgcaggtagaggtggtttctgctattttggagcctggcctctaacagcccatgagactctcggctcactctctgtctctgcttacaagctagaaga

SEQ ID NO: 368992 - DNA, 560 bp, Homo sapiens
ggggcagctgatgtgccaagtcccctctcactagagaacaaggaagtggaaaaatatgtaaccataagatcagcagaaaggacagatgtggtagtttggctagtgagaaaacaactgaaaagatccatctgagtaagctcctaaaattccaaagtcatttcttaaatatgctatttttaagatgatactgcctgcacattttccatggagatgcttatttttggaccatctgttgatggtaaatatgtatcatgtgccctctaaagcctctatgtgttgtctactcastattttacagcttctgacttgtgtcagatactgaaatgtcactgttatccagtttgttggcttatgtgacagagatcacctaagtgctcactggcctcctagacaccggggctgctttccttccctgactcactttcagccagattgggtgtctgggacagcttctgtcactgtgttgcaggtagaggtggtttctgctattttggagcctggcctctaacagcccatgagactctcggctcactctctgtctctgcttacaagctagaaga

SEQ ID NO: 368993 - DNA, 619 bp, Homo sapiens
agaacaaggttttctttagtattggttttttcttaataggaaattatgagaggtttttctttattttttagataattggccaaaggaaaaaagatttatgttttaccaatataatttcctgtgcttcatcttgtctttagtagattaatgataatttaagagaactgagacatctctgttaaaaaagttaaaatttttctacaactgtgtaacttttcttgtttgaagtcattaaattaccacttgggtaatatgtgtttcaaaatttatatgaaattcttagaaatccaatcatactactagtcttgggtaagaattttcagaactctaacagaaaaatgtggtttcatraaactgctaacccaacaccaagcaagacaagaattaattgatcaccgaggaaatgttttgacagattttcatgctaactcagccaatactgaaatcattaagatgtgcaattgaatgaacttcataagatgatccaagtaaatcacctatgataatatatttaataaacaccgctaggcacctgaatggagaaacaaagctagtgtttaaagggattttaattcaatgtaaagtgtgggttcatggaaagcctggatggtagcctggt

SEQ ID NO: 368994 - DNA, 554 bp, Homo sapiens
caaaaaaaaaaaaatgcttctctgtcttggcataaatgtaacacttctattattaaatgctctgcgttccaactccttttggagtggataaaataatatgaataataaaaatatgtttttgtgactatctaaaattgtgaaagttgtttataatcaatctttgrtttgtcaagtccataattctagtaaggcaacaaaatcctcaagtgacacgtttccatcatctgctggactatttgaacaaacacaagtggattcattcagttgccttcttctgtgtatgtttttggtagtatagaaacttccctatgcagaaaaaacacttttaaagtggtacctaaaagattgttggaaaaaaaaaatgtgtttcctttatgggatattcctggagaaatctccatcgttagagataattgtttcagtggagaaggtataaaatagtcaaataaggtattacaaacactatgtcatcctgcaaagctagcataattgcattaccttggtcagagttattcctgattgatggtaatccgattcattcccactggaaagca

SEQ ID NO: 368995 - DNA, 554 bp, Homo sapiens
caaaaaaaaaaaaatgcttctctgtcttggcataaatgtaacacttctattattaaatgctctgcgttccaactccttttggagtggataaaataatatgaataataaaaatatgtttttgtgactatctaaaattgtgaaagttgtttataatcaatctttggtttgtcaagtccataattctagtaaggcaacaaaatcytcaagtgacacgtttccatcatctgctggactatttgaacaaacacaagtggattcattcagttgccttcttctgtgtatgtttttggtagtatagaaacttccctatgcagaaaaaacacttttaaagtggtacctaaaagattgttggaaaaaaaaaatgtgtttcctttatgggatattcctggagaaatctccatcgttagagataattgtttcagtggagaaggtataaaatagtcaaataaggtattacaaacactatgtcatcctgcaaagctagcataattgcattaccttggtcagagttattcctgattgatggtaatccgattcattcccactggaaagca

SEQ ID NO: 368996 - DNA, 611 bp, Homo sapiens
agcaaatgttcgagtcccagccaatcatggcagctgggttttggtgaatgacaggatgcccacttatgagatcatgttcatgtaaggcaaatgcctcatcactccatgctcaaataaggcagatgttgagctgtattcaatcaagctgttgtgtctgccacttccttttttttctctctgtaaatactgcctgcccacgttgctgggtggagctctctgtacctctcctggttctgagtgctcttcaactcatgaatcattctttgctaaaataaactctgctaaatttaacttctctagagggtttgatttgtttatttgtttattttttcaaacaaacagaagagaacttccagaaagataattttggtgatctgcaaatgatacactcagtgatcagctggttacttactagtgcgtgtgtgtgaagagactacatgggaatggggaaaaaactataaaagagttataggtaactgctgcacactcaaaaatagtgccttagtgctgttttctgcagacagcctgtaaaatctcattatgcaaatatatgagatagaataatcagaraaatgttgtcattgtagtgaaacaaaaaccactcctgactc

SEQ ID NO: 368997 - DNA, 571 bp, Homo sapiens
cacctttctgatgtgtttcaaaattatctatttttaattaaggaggtgatctcattcagggcagaaatactgttcctactggaatatagctatgctaaaattccctttctttactggaaataaagtctacgtaaggcactgttttaaccattgtataattgaaggaatatccacaccgttttacaatgtataattgagagcatattctaagtaatctttcacctctccagaagaagcagagacttttctacttctgacacctgacagcttattttgctagtacaatttcacaagaaaagaagaaatgaaactgaatgtcattgagatagaaatatgaaagaattacactagtggtaacaacaaaatataaattgtcatcttccatctatttctgacagtgcaaacataatatttttactacttctaaaaagaatgcacgtgaacctctagcagatgtttcaaatattaagcactagtgaccctcaattgtcaaaatagcatagctctgttttgaaccccttttctggaattggacttgtttgcattaygttttggcctctcatcccattct

SEQ ID NO: 368998 - DNA, 393 bp, Homo sapiens
tctcttctccaacattttgcacttgcaaaatattsgcaacttttgaggttcaacataccagctcagtagatactagaatccagacttacttaaataaaggatttaacagcatctgttgaatttctcctgcacagagcaataaaatctcattgcaattttatgtcttttcatccctttatccagcaaatatcaagtgcccattatgactaggtactaaagccacattgtcattttttaaagtttagataattgacataaataatttattttattttttgcttcattgtacacagatgttaagtcatttcattcttagggaaagaatatttatttgaataacttcgaataagatatttttaaggaggtgccatcacaactaatttgttggtaagt

SEQ ID NO: 368999 - DNA, 472 bp, Homo sapiens
atgcaattctcttgacaaagaaaagagtaagcaagttagcaaaaacacaatgactataaaagcttctggttgagaactgctaccgtgtcatttctccttacattctattggtcaatgcaagtcacgtggccaagcwtgatacccggttgggaaaatacactcctcttacaggttcagggatcattaggaataatacaattcacgataaatgcccagacgctgcatgatataattgaacttcaaaaataaagaaaaaggttctttggtgtcaagctttttaaaaagaaagtaggaggatgggagaaaactaatcaggccctatagtaacacttagtgccagtggtcattggagaatatttatatgggaaagaacacattactcaattttataaacagtcaaggtatattcagattatctattgataagcaggtaccattttgttccttttatgttctcctctgtattgcaaaa

SEQ ID NO: 369000 - DNA, 571 bp, Homo sapiens
gatggcctgaaggcaagtcataatgaggccaaaatagtaaaagaccctgaaagtgaaagctgaggcatggaaaacagaaatgaagatctaggggccatagattagggtgctaaccaatgtcatgggacaccctgagaatatgcagaggaggaaagcttggattggagctataaayagtgggctgggcattgggcataatccacagcttactttcacgtccacaaaagtgtaagaagaatagctgacactgatggccgtgtggcctgtgtgacaagttagaacattcctcaccaggtgtgctctgcactagatcacaaagcctctgctctcaactaaaagatcagggactctgtttttctcacattaatactcaagcccatatctagtgcagaagctaacacacttaagagagtcaataattgttctttaagtgaagaaatatgcccttggtagagataaaataagagatgttagataccaaggggagggctagtcttgttaaaaagatgctcaaatacattcaaggcctattcgtgacattacatagcacttactccccaataccctaatt

SEQ ID NO: 369001 - DNA, 571 bp, Homo sapiens
gatggcctgaaggcaagtcataatgaggccaaaatagtaaaagaccctgaaagtgaaagctgaggcatggaaaacagaaatgaagatctaggggccatagattagggtgctaaccaatgtcatgggacaccctgagaatatgcagaggaggaaagcttggattggagctataaatagtgggctgggcattgggcataatccacagcttactttcaygtccacaaaagtgtaagaagaatagctgacactgatggccgtgtggcctgtgtgacaagttagaacattcctcaccaggtgtgctctgcactagatcacaaagcctctgctctcaactaaaagatcagggactctgtttttctcacattaatactcaagcccatatctagtgcagaagctaacacacttaagagagtcaataattgttctttaagtgaagaaatatgcccttggtagagataaaataagagatgttagataccaaggggagggctagtcttgttaaaaagatgctcaaatacattcaaggcctattcgtgacattacatagcacttactccccaataccctaatt

SEQ ID NO: 369002 - DNA, 571 bp, Homo sapiens
gatggcctgaaggcaagtcataatgaggccaaaatagtaaaagaccctgaaagtgaaagctgaggcatggaaaacagaaatgaagatctaggggccatagattagggtgctaaccaatgtcatgggacaccctgagaatatgcagaggaggaaagcttggattggagctataaatagtgggctgggcattgggcataatccacagcttactttcacgtccacaaaagtgtaagaagaatagctgacactgatggccgtgtggcctgtgtgacaarttagaacattcctcaccaggtgtgctctgcactagatcacaaagcctctgctctcaactaaaagatcagggactctgtttttctcacattaatactcaagcccatatctagtgcagaagctaacacacttaagagagtcaataattgttctttaagtgaagaaatatgcccttggtagagataaaataagagatgttagataccaaggggagggctagtcttgttaaaaagatgctcaaatacattcaaggcctattcgtgacattacatagcacttactccccaataccctaatt

SEQ ID NO: 369003 - DNA, 600 bp, Homo sapiens
ttgctctgtcagtatccagaaaacaaatttcactctggcagtccaattccaattttttttttaaaaaaagagttcctccacaaattcctgattatccccagatggagttgttgcctttcataatggtcataggcaaaaaatatgctcattcacaaattgataaccacttagaattctgaaatcccctttctttcctctccctcagaactcttcctggatactaggagaaaatacaacttgaaagtcagcttgcttagcattagtgtgaaaggcacatagcacagaagaaaaccatacagatttattatccaaattaaaggcccatgtcatggacataaaaaagaaaaaccagagttgacaatgaatgaacatagatgtgcaatttgaccacatcatcaagttctctgactcaacataaaattgtctcctgaggaacatgctgggacattctaatcttaaatgaagtggagagatgataatgcaaccttggaaactcttgcctgtgagacctatcatgctgatctggctttaatatcagagacctgtcccatctctaagaagkgaataaccacatgttagacatgtattttccctaatcct

SEQ ID NO: 369004 - DNA, 614 bp, Homo sapiens
atttttagtctataacaaatatttaattttatattgtactgtaagaaaaaaactagattatatggtcatccttttcaatttgcctgtggattcatytccttctccggcaaaaaactaccagaattttaatagtgagcctgttctatttcttgagagggtaggagtagaaaacttaccttgcagctccacaaatggcatatttccctacatttactcatttgaactttgtacaggtcttcctgaaaacttcaagtccctttcatctccatttatccttggttagatttttattttctgtttcctcataagctcttcatttccagccccatcatttttccccacagcctgcaattctttgttcttttatgcacttgtgacaaccagagacactgctttctcctggctgacagccacaggatttgcaatactttttagcaaaggctcttgcaatttctactcttgtcattttcttcacatctgtggctgatgtggaaagaacaaagctcaggcaatttacttctgcgattggcttatggcaatgtcttccaaattttaacttagcctatccacctccccaaatgctgctaagttgcttccatagcctggacagtact

SEQ ID NO: 369005 - DNA, 585 bp, Homo sapiens
caaaaacatagcttaagaaaatatttatgggtggggagcaagatggctgattagaaacagctgtggttggtggccctcaccgagaagaacaaaagcggtgagtgaattctgcaccttcaactgaggtatccaggttctcccattgggactgactaggtagttggcacaacccatgaagagcaaggaaaaacagggtggggcaacagcacacccagggttaggggagccccaacccccagccaagagaggtggtgagtgattgtgctacccagcctgggaaactatgcttttcccacatatctttgccacctcmggatcaggagatccccttgtgagctcacatcaccagggccttgggtcccaagcacaaagctgtgtagactttggcggcaggtgcttgggttggtggccattcaggcaggtactgagatggaggagttgttttgcatactccagccctgggaattctggtgaggcaggaaatctgtccactcccactagaagggggctaaagccagggagccaagaggtgacattcagcaggccccacagcaggccatggagtctcaccagctaagacctatt

SEQ ID NO: 369006 - DNA, 585 bp, Homo sapiens
caaaaacatagcttaagaaaatatttatgggtggggagcaagatggctgattagaaacagctgtggttggtggccctcaccgagaagaacaaaagcggtgagtgaattctgcaccttcaactgaggtatccaggttctcccattgggactgactaggtagttggcacaacccatgaagagcaaggaaaaacagggtggggcaacagcacacccagggttaggggagccccaacccccagccaagagaggtggtgagtgattgtgctacccagcctgggaaactatgcttttcccacatatctttgccacctcaggatcaggagatccccttgtgagctcacatcaccagggccttgggtcccaagcacaaagctgtgtagactttggcggcagstgcttgggttggtggccattcaggcaggtactgagatggaggagttgttttgcatactccagccctgggaattctggtgaggcaggaaatctgtccactcccactagaagggggctaaagccagggagccaagaggtgacattcagcaggccccacagcaggccatggagtctcaccagctaagacctatt

SEQ ID NO: 369007 - DNA, 472 bp, Homo sapiens
atgacctgaaactagaacttatatttaaaagagaagcacagcatcaaagtttggaaaatttgcagctggtcatacagtagaaaataaaaacacactttataaggaggaaattcaaggccacagaaatttgcataagtaaagaggagccaaatgttaayagccaagacaatggggaaaatgcctccagagcatgtcagagacactcttggcagccccttccatcaccaacctgaatgcctaggagggaaaaatggttttgtgacccagacccagggccctgctcctctgtgcagcctcaggacatggtgtcctgcatcccaggagctccagctctagttgtggccaaaaggggccaagatacagcttgagcttgagccattgcttcagaggatgcaagccccaagccttggcagcttccatgtggtgttgggcctgcgggtgcccagaagtcaagaattgaggtttcagagct

SEQ ID NO: 369008 - DNA, 622 bp, Homo sapiens
cagaaatttgcataagtaaagaggagccaaatgttaacagccaagacaatggggaaaatgcctccagagcatgtcagagacactcttggcagccccttccatcaccaacctgaatgcctaggagggaaaaatggttttgtgacccagacccagggccctgctcctctgtgcagcctcaggacatggtgtcctgcatcccaggagctccagctctagttgtggccaaaaggggccaagayacagcttgagcttgagccattgcttcagaggatgcaagccccaagccttggcagcttccatgtggtgttgggcctgcgggtgcccagaagtcaagaattgaggtttcagagctccgcctagattttaaacaatgtatggaaatgcctgggtgttcaggcagaagtctgctgtagcagcagggccctcatggagaacttctcacagggcagtgtggaggagaaatgtggggttggagcctccacacagaatctccactggggtactgcttactgaagctgtgagaagagggtcactgtcctccagaccccaaaattgtagatccaccgaaagcttgtaccatgtgcctggataagccacaggcattcaatgtcagctcatgaaa

SEQ ID NO: 369009 - DNA, 622 bp, Homo sapiens
cagaaatttgcataagtaaagaggagccaaatgttaacagccaagacaatggggaaaatgcctccagagcatgtcagagacactcttggcagccccttccatcaccaacctgaatgcctaggagggaaaaatggttttgtgacccagacccagggccctgctcctctgtgcagcctcaggacatggtgtcctgcatcccaggagctccagctctagttgtggccaaaaggggccaagatacagcttgagcttgagccattgcttcagaggatgcaagccccaagccttggcagcttccatgtggtgttgggcctgygggtgcccagaagtcaagaattgaggtttcagagctccgcctagattttaaacaatgtatggaaatgcctgggtgttcaggcagaagtctgctgtagcagcagggccctcatggagaacttctcacagggcagtgtggaggagaaatgtggggttggagcctccacacagaatctccactggggtactgcttactgaagctgtgagaagagggtcactgtcctccagaccccaaaattgtagatccaccgaaagcttgtaccatgtgcctggataagccacaggcattcaatgtcagctcatgaaa

SEQ ID NO: 369010 - DNA, 474 bp, Homo sapiens
gctcagtaacatcccatatcaattaaatcagaatccctgagtgtgagatcacagtatcccaacacatttactgcatcagtatttatcagttcctcagatgattccaacatagaataaaattgagaatcactggtttacttgaagggagaaagataatttggaggcttgatatgaagggaaagaaggaaacaagaaggctttaaagtccttattattagtgataggcttctatttggttcttatatattcaaactactatatattcattgtgaattgagatttttagcattataaaagtctttgtcacatttaccaccttttggtctgaattctaccttgtagaattcaggattgccatccctgattccttattatttgtaatctcatgttayatagtttcccatccatttctttttatcttttctgaatcacttactttcagatgtgtctcttgcattcagcatataatagggt

SEQ ID NO: 369011 - DNA, 474 bp, Homo sapiens
gctcagtaacatcccatatcaattaaatcagaatccctgagtgtgagatcacagtatcccaacacatttactgcatcagtatttatcagttcctcagatgattccaacatagaataaaattgagaatcactggtttacttgaagggagaaagataatttggaggcttgatatgaagggaaagaaggaaacaagaaggctttaaagtccttattattagtgataggcttctatttggttcttatatattcaaactactatatattcattgtgaattgagatttttagcattataaaagtctttgtcacatttaccaccttttggtctgaattctaccttgtagaattcaggattgccatccctgattccttattatttgtaatctcatgttacatagtttcccatccatttctttktatcttttctgaatcacttactttcagatgtgtctcttgcattcagcatataatagggt

SEQ ID NO: 369012 - DNA, 503 bp, Homo sapiens
tgcaagtgtcatcaaaatgcaaataggtgatctaaatcatacaacttagatactaggtttgctaaagattccaaggttgtatactgtcttctttaaaggtaggtaaggcctgggacatgtggagctagacactggagcgggtcagaccttacttgtacttctgtctgggtcctaagcttcatacctgctacgtatttaaaatcatttactaaccaggtttttcaccaaaagtaaaagtgctaagagttacagtgcaacatgtatttgagatcactaaacagtgttatatgcaaggcatataaaaaccagtaaaatgtgtcttatagtaaaagaatataagaaagcatggaaatgtaaattttgcccagggatgaaggattatcttaaatttgatatgatgaagctaaaaagttgtggraagattgtaaaaattaatcttgcccaaaatgtgtaaaccttaaattccaaagggtattatatggtctttccctaaactgagcctt

SEQ ID NO: 369013 - DNA, 568 bp, Homo sapiens
tattttagcaagtctttgactgcaagggtgtgtttccctttgaggaatcaagcttgacactcagagccaataaaagtcccctggggagaactggcctcatacctcggctacacagtccctgcatgggattagaatcccaagggtccccagtcacagaacaagcctacacccacccaataacactcctgaaagcctaaagacggccatgggagaggtgcgttgaagcctattggtggaacaggagagttgaggggaaattcctccacattactataagaattcgctgctatgggctgaaggcagaaagtagagctagaaaactaagagaactcctccctgaccaggcaccccacacattcacagaacacccagcaatggcccgctgaaggttgagggcaggcagaagaaggagtraagtctctcaaaggcatgctgcaccttcactgatgctgaagcatcagtgctgaatgctgggtcagaggagccaggttgacagagtctttcaggacccaaaaagctaggaaggactgcacaggaaaacaacaaaaacaaaaacaagacaactccc

SEQ ID NO: 369014 - DNA, 596 bp, Homo sapiens
tcaaggtaaaaaactgaattatttctcttttagatcaggaataaaacaagaactttcttagcatatctattccattttgtcatgatagtcctacaaatgtaataggaaagaaaaataaatacaaagcattcatattagaaagaagtaattaaatcactatttatacatagacaacatgaacatttgtgtagaaagttccaaataaccaaataacctataatttttttccaaagtcagcaagtaaaattagcaaacttgcaagattcaaagttaatgtacaaatatttttgtgtttctmtataccatgaacaaaaaacttaggaattgatatcaaaaagtagatcgatataatttaatattgtatcaaaatatgaagcacttagaaataagtctagcaaaatatgtgcaagatttgcatactaagacatgtaaaatatcactgaataatcttaaagaagacctaaataaatggaaaaacacaccatattcatggatttaagactaaaactttttaagatgttatttctccacaaattgggctatagctttaatgcaatccaaatttaaaaaaatacactaatagctttaatgcacgt

SEQ ID NO: 369015 - DNA, 575 bp, Homo sapiens
atgcccttttcttcctggatgcccatctagaccacatgtcccagcctctccttgtggcagcctttcacacccacgtgatggagatctagccaayggaggtgaggcagcgggcatgtgtgttgccaggtatagctgcggcccttacggcgtgccagagccacagatggaaggaggagtctgggtcccgagtgcccacatggagaagagctgacccatctacttgaacacctgtccaggatgactacaggagcaagaaaataaactttcgtgtagttggatcattagatgtttaggtctgcgtgttacagtggggagccctccctaagtcacacaggcaatgagactcgttggatgctccagttaggagccctttccgtggaggcatgaggactgactgctaggggttgatgagcacaacagaatgtaagaaaggcaccatgaatgaactccaaccttcctagaaacctcattgtgaaggctggaccatgggagagcagaaagtgagaaggcagaagatggagaaggatggggagaggacatttctcaaacatcgtaagatagaagcacgaagagca

SEQ ID NO: 369016 - DNA, 575 bp, Homo sapiens
atgcccttttcttcctggatgcccatctagaccacatgtcccagcctctccttgtggcagcctttcacacccacgtgatggagatctagccaacggaggtgaggcagygggcatgtgtgttgccaggtatagctgcggcccttacggcgtgccagagccacagatggaaggaggagtctgggtcccgagtgcccacatggagaagagctgacccatctacttgaacacctgtccaggatgactacaggagcaagaaaataaactttcgtgtagttggatcattagatgtttaggtctgcgtgttacagtggggagccctccctaagtcacacaggcaatgagactcgttggatgctccagttaggagccctttccgtggaggcatgaggactgactgctaggggttgatgagcacaacagaatgtaagaaaggcaccatgaatgaactccaaccttcctagaaacctcattgtgaaggctggaccatgggagagcagaaagtgagaaggcagaagatggagaaggatggggagaggacatttctcaaacatcgtaagatagaagcacgaagagca

SEQ ID NO: 369017 - DNA, 594 bp, Homo sapiens
ttcttttcctcccctacacattttagacctagaaaagaaatgaccttgtagataaagatggctagcttcaaatccaggaaggctattgcagagaagacagattagacttttccagtacagcttttagaggacagaagttgcaaataatgagatttttgcttaatataagtaagaagttttggatgattacagttaccccaaaatgggataacatgcctcattaggttgtgattacagctgacattaaagccatttgggaagaaaatgactgctggaacggtactgcctttcttctcctgccacaaaccttttgcaggggttatgcagccccctgtccccatcctccctggcagggggctgtggcgatgggactgagctctcaccccggggtgtgagcccgagactggcaacttctgtgccacttgccctcccctctcccctctctcaccctatgggctggratgagaagtgggcagagccagggtgctttgcttacacaggcaggaatgatgtttcttttgcaaggcagagcaatgtgacaggcatcaaggtcacctgctggccttgggccacctgcctgagcacgtacagctc

SEQ ID NO: 369018 - DNA, 602 bp, Homo sapiens
tcttcctttcatttcacaactgcataatttggtaattattaagaacagctctttctcgatatttttaaatcatgggtccactgaaaacatcaccattcatttgtccagtccatccttcttgaatctcttcaaatgaaacatattttaagcatcttcaactcttgagttttagctccattaaattcctgtcaacacattctttttttcatggaaatagacagacaattatgctttttgaactctactaacaacaatgaaaaacattaagatggaagactcatatgactattcaagaaagagcctggagagtgtctaaaagctgcttcccttcaatgcacagaagtatcagaaggtttatttcagcaaacaggaaacgttcaggatctaaaggaaagagggttttatttcaggcagtaatatttcattgagcttctggagccactgattcagaatggccagttcctttctaatttataccatgttcctcatttctggctgcctatttagctgaaggactctttcctgggmgagacttcatttgcctcctggaggaattcaagaaggaattaactaaggaggctgggataggaatttcaaacaaa

SEQ ID NO: 369019 - DNA, 410 bp, Homo sapiens
acttaaagacagaattttagatcctttcatgaatccagatgaagctgcatttcattctcatataatcratgctgaacaaagattaaatgtgatgttttgttgtattttatcatttagctaaatatttgttcatgacaatagccaagcaactctagaaaaacatatattaatattcaggtcgtgatagtgtagttgaaatacaattagtgtgcaaaaatgcttctgagtagaaacaaaagtgtagtttttgtttctatcttttgcatagttacaaaaccaaaagagactgtgaatgtgtaacgaacagcaggttttaacctctcaattaaaatgccaatacatcacagtgttatactaacatgtgaaggttaaagaaactttgctttctttttagactttaattttgatgc

SEQ ID NO: 369020 - DNA, 567 bp, Homo sapiens
ctgttttataaaagattaggtttgtttcctcaatttttaataatacgaatttttaagatttccaattctaggtttattaaacagataagctaatmttattatttaaacatttaaaaaggttaacgagtgttcagctagattgaattgtaataactgctgtttcatgaaggagtcgctcttcttcaccttagggaattccacaacaatctgttactgagttactccaccaaattcctctgagtaaaattcttagtgtcctctttttgaaaaaacactgtccactaaacacataggcacacacatatatgcgcttcaaatatctgcaaatgtacaaatgtcctggacttgttcatgttgctaattcatgaaatacaaaaacaatatatcagactgttggaggaaggacattgtgaggagtcacaggcagctttctggaatctcagctgatctcaagtgcacacaggcaactgtctcctagccttctctatgtctgtgaggaaacaactcagttacatggtttcaaagttataactcatgaaaagtagatgctgcatgtgttagttttct

SEQ ID NO: 369021 - DNA, 540 bp, Homo sapiens
cctctgtctccagtgcttgatctaacaggttatgcttataaagactagaattaaacattccttaaatggtatcttctaattaatccttcaaaactcatttttaaaatcctttaaaaattttaaaacagatgatgataataaattatcaggaaaagctaataaytataatagtcctgcaaatatcatgacatatattgattggtctgaaactatactaacaactgaaagcaatagttacattattatttaactattattattactaatctgggtgtttttctttagccataggccttcatatttacctagaatctgtcctccttcctaccagaatgtaattgagtaaatcaaatctgtgataatgaccatgccagagatgttacatttaaagggaaatataatgtaattagacatgacaagctcatttaaaatgagtgcatttcatatgtggggttaatgcctacaccatcctcccaggacactggcttggttcatgttgtgtagcttagggcaggggtccccaagccctgggccatggaa

SEQ ID NO: 369022 - DNA, 507 bp, Homo sapiens
tcagatcagtggtgtcattagattcttacaggagtgtgagccctattgtgaacaatgcatgtgaaggagctaggttgcacacgccttatgagaatctaattaatgccagatgatctgaggtggacactttcatcctgaaaccatcttccccaccgacctcagtccatggaaaaatggtcttccatgaaactggtccctgctgccacaaaggttggggaacgttggcttagggaatcccaaccctacaggcagtatggccaggagcactgaaaacttggagctcagagagatggaataatctttgagacctaggtagtggatgtgaaacctggaagaggtgaactttgaatctraaagttctggattactgatttcagcaatccagaatcaaatatttctgccacagatataaaagtgaccacaaaacaaaagttaaccctcaagatttaacatcatatagctctcatttttataaccatgctaaggggtctttgtgaatgaatcaac

SEQ ID NO: 369023 - DNA, 627 bp, Homo sapiens
caatggcttaatgattaattatacaatcacattccctcattcttgcttttccaaattgatttacacctctgccaaaataaaaatcagacccaattaaggatatggagagagggaatcatctgttggttttcttcatatgctgttactcatagatgacattatgtagtgttctaacttttttaagaacattcatattcattatttccatttgtgtcttacattaccctagggatataaaaatggcaggtataatttccaatttatctagaagacaaatagaagttaaatggtatgggaaaggtcacagagctgtctcctgagctttggtgaccataagtctcttaggcagaagctcttttctccagcctaaccytcctgactccttcctctgagctcttttcacagggatagactgcctttaccacctgtgtgacaccttccctgtcatgcatttattcagccagtcattccaaaaacattcattgaagttgcatctagtttgctgatgtatataatttatccttctatcatataaactgaggataggatgatagctaacaaacctatgtctactgataataaacaaattgcatgaggcttttgaccacacaaggtaagaaggtacaa

SEQ ID NO: 369024 - DNA, 438 bp, Homo sapiens
aatctattcctgaaaacttgtttttaatgtggtttagaggatacaattgtgcatgtatattttagcctatggaattttaactggatgctctttcttcttccctttctaccaatttctgktagatttctttctactttcaagccatgttctttttccacccaggtctattggtccctaggccttgagacccagagtcaataacaccttccctacaagaaacacacccagaagtgtccaccacctcaggtcccagtgaaaagaggtccaaggagatactaagctacgttcaatgtttccctttggttaactgcctgcttcttacatttccacaatgatttcctttacaatttgtatctactgctacaaatggcttatagatgtagtaccagaaggagaaaaactaataatagataattttctcaaaattacctggctata

SEQ ID NO: 369025 - DNA, 526 bp, Homo sapiens
actctttactgagagtttagagaggtaaagaaagacaagcactgcgtgggtaggtgctgataataatgatgaagacgatggtaacagtaacagcctcggctgaccttcatccaagatgcgcttggctgcttatggctggtgttcattctgaccagtcagtgcctatgctaatctggttgtaaaatatgtttaatatcaccgctgaaaataataccttccatttattttaactgagcacaatgatctcttttaagactcacaattctagatggaagctatggttatcacctccatcacctcaagsaaaccgaggctcagagatcaatgtgctcaaagcaagcagctaggaggtaatggggctgggatttgagcctgggctggctggccatatgctattgcttgctgcagtggcatctgtgttggtgtaggcagaaaagactccacagtgcaaggtgacttagagaaagtattgacaatctaataggacaccaggaggagaggagagcatcctaggcatggtctgggc

SEQ ID NO: 369026 - DNA, 607 bp, Homo sapiens
taagtgctcttgtccaatttaaggatgatcactttgaaaaccatacaaaggtttggtgctgggagaatttcttcccacagcgattacttgaagatgtgagtttctattggaaggtgaaagaccactgttgataaaagtttaaaaaaatcatttacatttaaatttaaattgagagatgcttgtcccattagcaataatttttatagagcaagtaaatcttcatttatctatcatccccaaagtttattctaagcacaattgtaaagcatttcctggatgggcacagtggcttacgcctgtaatcctagcactttggaaggtggaggcaggcagatcaacttgagggcaagagttcaagaccagcctggctaacatggtggaacaccatctctactaaaaatacaaaaaaattagctgggtgtggtggtgcaagcctgtaatcccagctacttgggaaactgaggcatgagaattgcttgagcctggaaagcagaggttgtagcgagccaagattgtgccactgcactccagcctgggtgacagagtgckactctgtctcaaagaaaaaaagcattttcccacctccctttcctgttcttctggcctc

SEQ ID NO: 369027 - DNA, 571 bp, Homo sapiens
tagtggacatttatcacattttctggaggtggggcattgttaggacatatttgctttagtctaagtccagtcttcccaaggcagagaccagaacatttggatcctgagtggtcactaagtcagcgatgcaggcatgtgacctgggctccaaccatcagcttctgccctgaggcctttcagttgagtgacttgaggaatgtggctctgggcagaatccattctctcaggacaggtggtggcacagctgtctcgcaagaccctctgtcttaatccatttgtattgctataaagaaatacctgaggctgagtaattcataaagaagaggttcatttggctcacagttcttcaggctgtacaagaagcrtagtgccagcatctgcttctggtgaagttttaggttgcttccactcatggtggaaggcgaaggggagccagtgtgtgcagagatcatatggcgagataggaagcgagagaggcaggcgagggaactaatagaccaagaactcactcactctcctcaccccaaggaggacattaatgtattcctgaggaatctgccctactacccac

SEQ ID NO: 369028 - DNA, 571 bp, Homo sapiens
tagtggacatttatcacattttctggaggtggggcattgttaggacatatttgctttagtctaagtccagtcttcccaaggcagagaccagaacatttggatcctgagtggtcactaagtcagcgatgcaggcatgtgacctgggctccaaccatcagcttctgccctgaggcctttcagttgagtgacttgaggaatgtggctctgggcagaatccattctctcaggacaggtggtggcacagctgtctcgcaagaccctctgtcttaatccatttgtattgctataaagaaatacctgaggctgagtaattcataaagaagaggttcatttggctcacagttcttcaggctgtacaagaagcatagtgccagcatctgcttctggtgaagttttaggttgcttccactcatggtggaaggcgaaggggagccagtgtgtgcagagatcatatggcgagataggaagcgagagaggcaggcgagggaactaatagascaagaactcactcactctcctcaccccaaggaggacattaatgtattcctgaggaatctgccctactacccac

SEQ ID NO: 369029 - DNA, 586 bp, Homo sapiens
ttacatttctgccatcacctgcttgctagttaaattaaccgtcaaaacctgcgacaaattgtggcaaggctgaagtgaactaacatggaagctccatgaccatcactgaacaaggttgttgaagccacagctctgacactttctgatgtcagcttgtctgaatgacccctggagattcttctgacaacctccaaggaggccaygggtctattgatggacacgaatctgaattttagtggccaagctgctggaggaagagttttaagggcctagtggtttccatagatacgagtcattcaatgctgatgttcttcccagaggtgcctctttcttctgttagtgttgtatagtccccttgcaaaagcagcaaggacccttaccccaaatttagttcaggtatggaggttgatgactctccatgcacaaaagtgtttgagagaaggtttattgctcacacaagggactctctggtagaactgagcaggtgccagcaggcccggggttggctcaggcagagtggaagaatgggcttgggccttcaaataagtggctaagagcccagcacatgctcactggatttagggcc

SEQ ID NO: 369030 - DNA, 586 bp, Homo sapiens
ttacatttctgccatcacctgcttgctagttaaattaaccgtcaaaacctgcgacaaattgtggcaaggctgaagtgaactaacatggaagctccatgaccatcactgaacaaggttgttgaagccacagctctgacactttctgatgtcagcttgtctgaatgacccctggagattcttctgacaacctccaaggaggccatgggtctattgatggacacgaatctgaattttagtggccaagctgctggaggaagagttttaagrgcctagtggtttccatagatacgagtcattcaatgctgatgttcttcccagaggtgcctctttcttctgttagtgttgtatagtccccttgcaaaagcagcaaggacccttaccccaaatttagttcaggtatggaggttgatgactctccatgcacaaaagtgtttgagagaaggtttattgctcacacaagggactctctggtagaactgagcaggtgccagcaggcccggggttggctcaggcagagtggaagaatgggcttgggccttcaaataagtggctaagagcccagcacatgctcactggatttagggcc

SEQ ID NO: 369031 - DNA, 597 bp, Homo sapiens
tctgcttccccaaatgggactggaaagaaccttcacaggctcatgggattcccaggaaagtttgaccctggaagaggaytgagacctaaagaatggatttgctcaaagcagagctgagacggggaagcggtggaacagggatgccacctcttcagccctcacctgagggcaacactggctgggggtggagaaccttagtgtcccatactggcctgttttcccagcagagacacagctgagtcagcaacagtgagtgtgacatttggaagcatcatggcctcaggatgagtgtggtcaccagtgctgttaaatatagttctcatggctggtgccccattaagacagatttgatgcttggtgacacattcaatttgaaaatttcccacagttaggctggattcagtggcatccccctttgattcctgtggggctgccataacaaagtaccacaggctgggtgcttaaacaacagatatgtattttctcacagttctggaggctggaagtccaagatcaaggcgctgtcaatgttgatttcactctgaggcctctctttctggcttgcagatagctgtcttctcactgtgtcctcacatg

SEQ ID NO: 369032 - DNA, 429 bp, Homo sapiens
ggctgggggaaggggaaatggggagttgccagtcaaagggcgtaaagtttcagttaagcaagatgaacaagttctagagatccgctgtgcaatgttgtccctatagttaacaatactgtattrtacacttaaaaatttgttagagggtggatctcatgttaagtgttcttaccatcaccaccaccacaacaaaacacaaccaaaaccaaaaaaggttgcacactcgtacagtagttaaaaatgttatgggcaatggtatgctagagctggcctgtaatggctcacaagagctgattgttaaattttcaggaagatcctcgttaaatatagccattattaagtgttaaatggtataaatttacaattaaacaaattaaattgaaagtaaaggtaataaatattcagaatacatcacaaacgtaattattt

SEQ ID NO: 369033 - DNA, 619 bp, Homo sapiens
cttcaggccctgtgctgactgccaggctagcaggaactttcagaaacagccacagtaggaatgctggagagagggagccttgctcctcaatctgccatgctttgtccttgggagaagtgkagaagacgagcacaggaagggagggtgctcagttttcacccacttgtttatccattcattcctcaggtccaggatggcacccagttgtcgcaagcccttgcgggtgacctgtgttcccagccgtcgtctccatgatgggtccatcctgaccactgtttcctttgttattcaggatgctaattcttgcaaatatcaccctttcaatcaaattttattgagcacctactattctataggtgcagagaaagggctggaatatgaaaatgactgtcccggtgcttgtcctcaaggaatatacaaactattgggggagatagctgcttatataaacaaatttttaaaaagactctcatttgatctaggtagaagctgcaccaaggtccaatgtttgaagaatccagggaggcttcctagagcagaacatagtgaatgggactttgagggaaggcaggaggcacagcaccacaaacagcatggtccactggggaaacagtagttg

SEQ ID NO: 369034 - DNA, 531 bp, Homo sapiens
tgcctgctcgcgagaaaaggctgcttctctcttccagcccttgccgatccatcatgtcgtttcattctcataacactgattggctcactgtaattcttaataatcactgctttccaaaagacaccatccatatgctttccacactccatgcgctttatctttttaagcctgctggaattacagaaataagaggcctaagaggccacctccatgcttctgagatgggtggacgtttccacaggtacagggggttcctgatcgtcacccagggttggactaaatgtgataagcaatgacagtacactagaaggatcagctttcacagagctgggagcgggccatttatttcagtcagatattggccattcatttctcatsatgttgacagtaaagtctggcgtggagttctgcaaccatcattctcgcgggtagggagaccactttgctgggcaatgctctctaccaggtcctcccaggtgtcatttcagagaataggatttcctcagcagggagagggcagagaagagtagg

SEQ ID NO: 369035 - DNA, 583 bp, Homo sapiens
attaaataaactccttgtgtaaatacttttttcaagaaattgtttgtttttttcccaaattatcaaagtatctgcatgcacttttcttagagcttaatcttctttcaagtgtcaattaaaatattacaaattactgaatccaaaacaagggtgaaggattcatgtaagtaatttaatattttatctttatgatgttttagagtagcactaatacatatttttacataataatatttatttttaaaccagccagtttaagttcaggagaaagtattagaacagcaaaaagcaaaaacaaacaacagatacacacacacacacacacacacacacacacacacacaaacacacacacacacacacacasagagaagaaacagcctcttaaatgaaactggctgtgttcaaatatcagtgctacctatagtcatgttatttcaattttgttacttattttttttttactggatccatttttctaattggtaacatgaaagttgtaagataatttgtgtaattagtatatggaaatcaattttgtggcatgcaagtcatggagtgagtttttaataaatgtgaattg

SEQ ID NO: 369036 - DNA, 588 bp, Homo sapiens
aagcagggaggtgccacatacttttaaacaaccagatctctcaaggactcactatcacgaggacgtcacccaggggatggtgctagcccattcatgagaaaccacccccatgatccaatcacctcccgcyagaccccacctccgacactggggattacatttcagcatgagatttgaacagagacacgtatgtaaactatgtcagttgatgataatacagaacaatatttataagcatggaactcttaatattattaagaatgacattggaaagttatattttctaaatatctttgtaactaaaaaactgtttttctagattgttaactccatgtaaatccattactattcccaaatatttattactgatattgtacatacctacacattagtatggattctgatagagaccaagtctctatttcatttagatatggtccattctaagaatacacagtatgtcctggagcatttaaacatatcatatggttttcatgggaaaaaaatatttggagctgatcttcatatttccatgttagaactaagtgtattgaaacacacaatctaaggaactacttaggtgagttt

SEQ ID NO: 369037 - DNA, 572 bp, Homo sapiens
tgataaattatgtttcaacaagtgttccattcatgtaggctttaaaaataactgacayaaagttgcacatatatattgttgctattctattaattctattattagttgcaggatctataataaaacccccttttaattcataagattattttttctttgttaacgttcagcaaaattctaaaaactaaaaaggggaatgatggcatagagctactaagtcaggccagaaatcctgccaatgaactttatttcatggtagggcccagagaacattctgtttaccaaaaggtgtgtgatgagctggtgagaagggtagcaccatctttaattctctaatcccagggttgtggcaggaaatcatgtcagtattaaagatttaaaaatccaatagtggttcatgaccccacttaatttactagtcaaatttctaaaaaacagcaggattaacagtagactattacaaaattactaataagtagccccactgttgttatgatgcagatattgtatttttgctagaccaggttaatatgactttgtataatctttcttcacaaagtcctcacgtttca

SEQ ID NO: 369038 - DNA, 584 bp, Homo sapiens
tgatgtcatccaggatttgttgttttatttatagagcacaggcaaagtacatttagcataattcttaagggccctaggattcttggaatgggaaacgagcattggcttcaacttaaaatcaccaaccagctgcattagtctttaacaatagagtcagactgcctttgaagctttgaagccaggcatgacttttcctctctaggtatgtgatatggtctggctctgtgtccccacccaaacctcatcttaaattttaatctgaattgtaatccccacgtgttgagggaaggacctcgtgggaggtgattagatcatgggtgtgattccccatgctgttcttatgatagtgagtgagttctcagaagagttkatggttttataaggggctttttcccccctcactctgcacttcttcttcctgccaccttgtgaaaaaggtgccttgcttcccctttgtcttctgtcatgattgtaagtttcctgaggcttcccgagctatgcacaactgtgagtcaattaaaactctttccttcataaattacccagacttgggtatttctttatagcagcatgagaatggacta

SEQ ID NO: 369039 - DNA, 505 bp, Homo sapiens
ttggaagttccagagggcagaactagcccratttatttattcagtggggtctttgattacctaataggcagctgactctgcttagaagtgaggctgcaaaggtgaatataacaagtccctgaactaaggtatcttcaattaaatggtcaagacaagtattcataaagaatgattatggtgtaacacattaatttatgaaaaggtaaagataaaaataaataataggttgtggaagagagtttgaagagtgttagctgggataggaagagagggtgaatcttttggatcaaggatgtgacaaatgtaaaaacactgaaaagggaaaaagcatagccaaaatgagtcacaataattgtcttggaatgtctaaaacacatagacgggattgactaaccaaaagggataagagggaaattataaaacacctatgtgcaaacaagggatataaaatgtattctcactcctttttgatatcccttttggttaatttagatatgtagctaat

SEQ ID NO: 369040 - DNA, 666 bp, Homo sapiens
atgtcattttgaatacatattcctaatttcagtgtattttcctacataaaactattatatttagtaaattaattagcctatcctctttgcaaaataaaacatttaccaattgtgaagggaagaaaggacagtggttaatggagagacaaggaaggttgaaatacatgccgaataaaagaaaggtttaactatatggcactggaaacaaacaatttgagtgtgaaggacgtattttctctcaaggattatacaatatgagaaattaatcagaaatcaaagcaatgaattcaaccagttaggaaaattggtagaatggtatgaagtataaatgaagaaamtgcattttaaaatatagaaaatttgggaccatggtgttatgtcccacttaacaaccaaaataataaaaatttgattgtgcaaaaggtgattattaaatttactagtagagtttaatgagggcagatattgaatgctaggagatgggtaatagaaagtttcaataaatcattttctaataatttcataaacttcctttcaatagctacctgctacctccaggttattggtggatctcctgttattggacttcattaaaataaaaacaaatctgtggcatttatgtcaagtcaaaagaatctatgcattcagagttgtggcaggagcaca

SEQ ID NO: 369041 - DNA, 512 bp, Homo sapiens
tttggagtacaattgtattaagctgcctgaacatttacaatagagacgtatttaataaaacgctatttagccgggggtggtggcaggcacctgtagtcccagctactcaggaggctgagacaggagaatggcgtgaacctgggaggctgagcttgcagtgagccaagattgtgccactgcactccagcctgggcaacagagcgagactccgtctcaaaaaaaaaaaaaaaaaaaacctatgacaccataaatcagtaatggttctggtaaactgttatattacttgcatatcataatgctactggttttaaatacatggacacatgtaccattataacaggtaaggtcctctcatccgcttatattagtttgccaacaattatattttgttcattgtattagtcttggctgtcawtttatattcccttttgtctgtgagctctagtttttttaatttaaaatctttatgtatctatttttctagtgatccactagcaaaatgtgagctgtaa

SEQ ID NO: 369042 - DNA, 635 bp, Homo sapiens
taaataagtgttgttttaagttgctaaatttgtggtaaatttgttacagcattacagaatagcaatatagtgggtgtggagagacaaaacttcctgtaatgcctttgaaagttgtatagagaagtgacaaagtgaaaaatacatacctggayttcactagggctggcaatccaagcctttcagcagcaggaggagcagctgcacgtaaaaccaactttctttttctttcatgaggtagcaatcatgagtcatttatgggtaaggctgaagatgaatgttccgagtcctataaaaacaaattctttgcgtttaccaagttaatatgttgcaccgctccccactcactttttcctttgaaaaattattaaactaatttcagtcttcatttgtaaattaaagttacttatctaccttgattgtttaaagaatgactgttaaaatttgtgttcagtccactggtcatagactgaaactaaataaggtaaaacataatgacatgcataatgagtgaaacacaagataatcgtcttaatgtgagatggggaaggttgtttattttctaatctgatattttaaaatattatcttaattagattttaaattgctaatgtgtatcttatgttttgatgtggata

SEQ ID NO: 369043 - DNA, 572 bp, Homo sapiens
ttggcattgtaaaatggcaatgtatatatgggactcacattctcaattgaaatctgttaaattcaaaatgggaactggaaagctaaaacacagtgtgtagaatctggaacaggtacaattgaatcagaaaatgacattacatatggctaaaatagaaataattacaggagaggaaatcctaggatgaaatgtatttgtcattaatattgggtatgccagtttcamaagataataaatgttaagtcattataaacttttacaacactctgcccacactttttatttacaaatttataacagattttttatttaaaaatttttaatttacgtggtcttaattttcttaaaaacaaatcagagttatgaaaaagaaaaaagttatctttaaatttggcacactagccataaattgcagatccagagaaaggagatatttactatattaaataatatattaagtctttctcttaacaatcatgatatatttctcaactaagtcttgtttttgtgtcttagaataataaagtacagtactaatccataataatgttttatatactttactagatgta

SEQ ID NO: 369044 - DNA, 497 bp, Homo sapiens
gaacaaaatgttggttttttaaaaaagataaagtcaacaaacctttagccagactaagaacaaaagagagaagacccaaataaataaaatcagaaatggaaaaagaracattacaactgatactacagaaaatcaaaggatcattagaaactattatgagaaactatatgccaataaatttgaacatctagaagaaatgaataaatttctagacacatacaaactaccaagattgaaacgaaaagaaattcaaaacccaaatgggccaattaaaaataatgagctccaagtcataataaaaagtcccctatcaaaagaaagctatggacctgctggcttcactgctgagtttcaaacatttaaagaagaattaaaaccaatcctactcaaactattctgaaaaatagaggataaggcaatatttccaaactcattcatccaggccagtattacccagatatcaaaaccagacaaagaaacactgaaatcagaaagct

SEQ ID NO: 369045 - DNA, 497 bp, Homo sapiens
gaacaaaatgttggttttttaaaaaagataaagtcaacaaacctttagccagactaagaacaaaagagagaagacccaaataaataaaatcagaaatggaaaaagaaacattacaactgatactacagaaaatcaaaggatcattagaaactattatgagaaactatatgccaataaatttgaacatctagaagaaatgaataaatttctagacacatacaaactaccaagattgaaacgaaaagaaattcaaaacscaaatgggccaattaaaaataatgagctccaagtcataataaaaagtcccctatcaaaagaaagctatggacctgctggcttcactgctgagtttcaaacatttaaagaagaattaaaaccaatcctactcaaactattctgaaaaatagaggataaggcaatatttccaaactcattcatccaggccagtattacccagatatcaaaaccagacaaagaaacactgaaatcagaaagct

SEQ ID NO: 369046 - DNA, 593 bp, Homo sapiens
taataatctgatttaaaatgagtgaaacatctgaatagatagttctcaaaagcagacatacaaatggcaaacgggtatatgaaaacatactgaacaccagtgctcatcagagaaatgcaaatcaatattacaatgagataccctcttactccagttaaaattattttttatctaaaagacaggcaaaaatgaatgctggcaagcatgtagataaaggggaaccctcgtacaatgttggtaggaatgtaaactattatagccactatggagaatagtacagacagtcctcaaaacactataaatggaacwaacatatgatccaacattcccactgttaggtgtatacccaaaagaaacaaaattatatgaaagagatatctgcgctctcatgtctgtcacagcactattcacaatagccaagatttggaagcaacatatgcccatcaacagatacatggataaataaaatgtggtacatatacacaatggaatgttactgagccataaaaaagaacaaaatcctataattcacaaccatattgatggaactggaggacatttagttaagtgaaataaggtagacatacaaaaac

SEQ ID NO: 369047 - DNA, 480 bp, Homo sapiens
taagtgaatgagcagtataagtaaatattatgaagtgataggagtttatcactgggctgggttttctggagaaagaaatttcagataagagctctgctatttagtacttagtgcacrcttgaagttcatggctttaacattttcagtttttattcttttcagaagactcctaaaggcccacattaagtggctttatactttcgctgatgaaagattctgtattgtgtagcacatgacgttgttgcggggagtatgacaagctgcaatgctcttagcatccatttttgtttcaacttagctttctgatttcctatgatgacactggtcaatttgggattcaagaagaccttggatgaattggtcttcttgaacataaagtcttttttctgtgtctctgactgcattttacaattttttaagggacagggtcttgcactgttgcccagactggagtgtagtggcacgatcgtagctcactgc

SEQ ID NO: 369048 - DNA, 480 bp, Homo sapiens
taagtgaatgagcagtataagtaaatattatgaagtgataggagtttatcactgggctgggttttctggagaaagaaatttcagataagagctctgctatttagtacttagtgcacacttgaagttcrtggctttaacattttcagtttttattcttttcagaagactcctaaaggcccacattaagtggctttatactttcgctgatgaaagattctgtattgtgtagcacatgacgttgttgcggggagtatgacaagctgcaatgctcttagcatccatttttgtttcaacttagctttctgatttcctatgatgacactggtcaatttgggattcaagaagaccttggatgaattggtcttcttgaacataaagtcttttttctgtgtctctgactgcattttacaattttttaagggacagggtcttgcactgttgcccagactggagtgtagtggcacgatcgtagctcactgc

SEQ ID NO: 369049 - DNA, 480 bp, Homo sapiens
taagtgaatgagcagtataagtaaatattatgaagtgataggagtttatcactgggctgggttttctggagaaagaaatttcagataagagctctgctatttagtacttagtgcacacttgaagttcatggctttaacattttcagtttttattcttttcagaagactcctaaaggcccacattaagtggctttatacwttcgctgatgaaagattctgtattgtgtagcacatgacgttgttgcggggagtatgacaagctgcaatgctcttagcatccatttttgtttcaacttagctttctgatttcctatgatgacactggtcaatttgggattcaagaagaccttggatgaattggtcttcttgaacataaagtcttttttctgtgtctctgactgcattttacaattttttaagggacagggtcttgcactgttgcccagactggagtgtagtggcacgatcgtagctcactgc

SEQ ID NO: 369050 - DNA, 402 bp, Homo sapiens
tatatctagcttatatgtttttgaacataaaattatatgtgcaacatttcttcaatgttaaggactgtgagtgtttcaaccaaattattaggtacttactatttgtgatattaagctgcattttatacattaattaataaacctgtaggatggattctaaatattataaccataatttaaatatgcaatggaatttgaaacttctcaagttgtctgtgtgacctcagggtatgacatgaagtatcatctgttccaaagatgacagggacctcactgagaaaggaacttaaaagttctatcaaattggttatagtayaggttttgggggaggaggagggagagggggatagcagacgtagatttagagtatgggaattggacaattaaaatggaaagaaggtt

SEQ ID NO: 369051 - DNA, 584 bp, Homo sapiens
ttttttctctctctccctcccctttccagaggtctaaggctctcaaattgagagaagctcaaaatatcacattgttgggaaagagctgamtctggctttcttcagggaatttagaggcccagtgacttagagcaaatcacatggctggtgattggctttgtctctgtttttataagtgattaaaaagaaaaccacttcaataatcctcagacctctgctctcgcctgggatctcttccaaccaggcctgctcagcagaacccctgggaggaggaaagcacacgagctctcagccaaaaaattagaaaaagcaacaaagacattggaaccggaaacttcagtgtgggccagaattcaagggcaatacctttttccctcctggtttgagactcacattcagtactcccatttcatctttagttcctcctctctcagctttcagggccttcacgaaaccttggagcgtgatttgataaacatttgctttgaacacagagacagtgtggctctgagttgccagtggacaatggagtgacaataataacaatgagatgatttaaatcgcgtatgattctaaagacaagt

SEQ ID NO: 369052 - DNA, 528 bp, Homo sapiens
agacggctacctgactgcctgagattcatagaatctctatgtcatagatttgttgagtccctaaatcacctctggtggagagacaccactgaacaagggaagtgtttagaattttcaggagcaaaaattaaacctttgttaagccactgagatttgcattaagctactgagatttcagggtttatctattagaaaggcttttgtaactttactaatataattctttgcartaaaaataattgagcttagatagattatggaattttataggacagaatgacttccttagctgacagctcataactgcacagtccctgaccatcctgggtaatgatttcttgaacaaagaaaaacaccaactgactctttttttcttcctaaatctgtttccaacctcttatgttttcaggctcaaaactcttttttatttaacatacagtttatatgcttttcttcctatgagaaattttaccaaaaatggggaaagttcataatgagcaaatgtgtattttactaattcatccaggg

SEQ ID NO: 369053 - DNA, 582 bp, Homo sapiens
catccctcacccagcccccagcagcacggaaagagaatctgtgtgtttcggggagggacagcaaagtgattgtgggtctttgtgtggaaattcagtgctgccctgtcacagtggaacacaacacaggacagaatttggctggtgcccatggagagagcatttaaatcagcctcaatcaccccagcaataggaacctgagttttggctagcttcagtggactaaagtgcggtggggtcctgaacaaatttgmgaggtagtcaggccacaagaacagcagtacttgggcaagtgttggtgctatgctggactcagagccagtggacttggggtccacatgacccagggagacaccagctgagacagccaagggagtacgtatggcacccctcttctaactccaggcagtgaagcttaacaagagactcttttcacttgtggaaagaagaaggaagagtaaagaggactttctcctccaacttggatactagctcagccacagtaaaataaagcatcaggcagaatcctgaagcttctgattccaggccctaggtcccagatgatattcctagacccaccctggg

SEQ ID NO: 369054 - DNA, 611 bp, Homo sapiens
atctgatactatcagatacatttaacaaagggattgaaattaacaaagtatctgatactatcagatacatttaacaaaaggattgaaattttaaaaaatcaagcggaatttatggagctgaaagattcaattgacaaactgaagaatgcattggaatctctcaacagcagagttgaccaaacagcagaaagtattagtgagcttgaagagaggctatatgaaaatacacagtcagagagaaaaatatagaagaatgaagcacgactatactatctagaaatagcctcacaaaggtaaatctaagagatactggctttaaagaggaggcagagaaggagatcagtgtagaaatttaattcaaataaataataacagagaattttcaaaacttggagaaagatatcaatatacaagaagttcatagaacaccaaccaggcttaacccaaataagactacctcaagacatctaataatcaaactcccaaaaataaagatatgattttaaaagcaacaagayaaaagaaacgaacaatgtataaaggagatcccatatgtctggcagcagacttctcagtgaaaaccttaccatccaggagagagtggaatgaca

SEQ ID NO: 369055 - DNA, 564 bp, Homo sapiens
ttccctgtaaagtggatacacacacttgatgggcatataactggattacctggaccgtatttttataatccagtattattcatggggctgcataaaaatgctacacctggacaagagtgtgcagtcacagcacatcagtgcctccattcatgaaagctctcctactccatctttcgatataggatagatttgcagtgagaatgtcttaatgctcattttagctatgtttttcctttccgaaacactacaaggcttgaaagtcatttataatgacttacgcgccttctttgcagggaagtatcttcttttaggtatacttgatgaactcaaaatrtagtatatgcgttgagtcccaaagtcctttaatagcagctcattagatgtttgttagcaaaaatcactggaagaaaacaaacatctttgtttcatagaaacatcttgaactactttactatgcttttgggtcatcaagactccaaacgtattgtgtcaaacactctttcttcaactttgaaacccatgtggatagccagggaaaagcaatctgtatgtttctaattaatt

SEQ ID NO: 369056 - DNA, 563 bp, Homo sapiens
tcttggctgcagcacttgattaagcctttgtccattgcaatactcattgtctcagtaattggctttctgtgtagtgagcagtaggacctagaacaacccctggcatttcagttacaaacagaacagcaaacctacaaaaggaaaggtgatagaatctatatcataagtctggagaggacctaggagaatcttctgctgatgattcctgtccttactgccattgaaaccccagctgatgtcagtgtcatatcttctaggaatactggccatgggctgtgctgaagtttccatctgccactggggccacttctctgaggggctcttcactccagtacctttaactaaccatatctaggcaaccttagtggagccatgtctgcctgaggttatcgatcctagggctctcagcctcttggagatgtatcttatgttaacctggctacgaatgctctgtgtaacacagattctcccctgcacttgtagatgttgccatcccaygcaaccacaagggagctcacttagtgggtctcatggtggatgctggcctaggaagttctacacat

SEQ ID NO: 369057 - DNA, 554 bp, Homo sapiens
tgccaccattcctggctaattttttaattttgtgtagagaataggcctccttatgttgcccagggtggtcttgaattcctgagctcaaacaatcgtcctgtcttggactcccaaaatgctgagattacaataggtgacaataacttcttataattgctgagctcagaacatgatacccaaaagtatggcaccttgacatgctgagtatttgtggaacaggaggaaggaagcagggagggtctcaaaagcaagaaggtgtctctgaccttctcctgtcctcttatatttgaccctcttttttcttggaagtgggtcatggaaactaaaattcctctctcttgaattaagtygtaaaacctagaaaggtcactctctgaccttctcccttctccattaaaaaatcctcagtcacagatgtcctgctccacacctgcagggaaggaatgtcatacacagagacagaaaagaatctgaagaaaccttgctgagctcacctagtttaaaaccattggatcatacctctttctgtccaatcatgtttctccacttctgtc

SEQ ID NO: 369058 - DNA, 612 bp, Homo sapiens
ttttacagtaggcgttacttaataatgtggattaagtcttcctgttaggttatatggtcaatattttctaaaaatcaaatgagctacatcaatagctctaagattttgtgaaactatgtttaaagcatgtaagcaaattataattgtgtcagaaattttatcttttgcaaataaacttataagtgtataattgataaaatatatatatcaatctctaaattataattatgataatcccatggttcaggagaaacttaagaaaaaatattttgttgtcaacagtgttcaagtatatggtctttcaagggtatatgcaagcaagagtgtaaaacctttgttcttggaaggtcacttttgtggctggcaactgagaaacctctgaggaatcaagaaccacataagaataactttgccaaartttggcaagttgaaggatttacctactaactctcatccctcataggttgagggttgctactgagggtgttaaatgttcaacaatattgggttgccccgtgcttggactgaacaatctccaatgtcactagagaaaggcttcaggcagaccaaagagtcagaggtggaatctactagcatgtagggaactgtcca

SEQ ID NO: 369059 - DNA, 573 bp, Homo sapiens
ttatttactatgagtctagagcagtgatttccaaaccttagcgtggatccaaatcacttggagggcttgttaaaaaacaaatcactgggcctcacaaggatttgcatttctaactagtcccaatgtaatggggatggctattcccaggactcacttggaaaactggtctggacaagaaaaagaataatgtgagtgaagcaaagcaatgataataggtttaggtaacttaattctgaattcatatccctgtgtagggcattcacgagttttctttctccccaggtgccattttctggtaagccataattttatgcaatctttaaggaaacttaagaagctcctgtgaattatttgcaagaaaaatagcttgagattattasggtttgaagactatttttttaaaaaagaaataactttttgttttttagatggagtcttgctttgtcacccaggctgtagtgcagtggcgcgatctcggtttgctgcaacttccatctctcgggttcaagcgattctcctgcctcagcctccccacaaggatttgcatttctaactagtcccaatgtaatgctg

SEQ ID NO: 369060 - DNA, 538 bp, Homo sapiens
tggtgatatttatctaagtttcataaactgacataaacattattctcactcttggtttgcttctttatttttcaaagagtagaggttatatatacataatgtccaattcaatccactataaattcactctggcyacatgatgccaaacatttggctatagcaataactaaaatttaacattaagaactttttcattgcttgtatggttgtattgataaagatgaacccaaataagaataagttaggaaatgttccaaaagaaagagaatggggagcaaagccagaaaaacaaaaccaaatattcatgaacagcagtccacgccaatgaaattggaaagaattagcaagaatcagaatcttttttacggtgttgtgaaagagattatgatattaactgtcatgccttataacagtgctaaataatgagtaacaggtgaccagcttttctggaattgaagttcaggtcaatatcatagaaaatctctacatttatattttcaattaagaaaatatgttttctttttgggagggaggagtc

SEQ ID NO: 369061 - DNA, 652 bp, Homo sapiens
ataatcatgttctacacatttaaagccatcaaaccttgctttcatattttcagccggttttaccattagtgcaaaacatccaatgccttttacttaaaaatggaaaaaaaaagtatagccaatttggcattaaatttgyggtcaggaaattatggcactgagtaaagaactaaaacatttatataaagcattttatttaacatgaaaaagaaaactgttttcatggttataaatatttcaaaaataaaggatggttaaaggctatggagccatttcctctctaggcttatggacctcagatgtctcactggcaacattaatttcctcctgtaattcatttctgtcaagcatcacgaagttctcagctttcgcatagagcaaaaagacaaactttaaattgtacttcatgtatcatcagtaacatgttcaagatttcacaagaataaaacaacaggcacatgcaccctaaaatgttaaggtgttaccttaaaaaaataaaggcaattgagagttttcagcccagttatgtgtatgtgaggcatattctcaaacacattcagttgttaactcctagacatttacattaaccctctggggctttccttaattactgtttgagccccttaggatatttctctccagcaatttagga

SEQ ID NO: 369062 - DNA, 652 bp, Homo sapiens
ataatcatgttctacacatttaaagccatcaaaccttgctttcatattttcagccggttttaccattagtgcaaaacatccaatgccttttacttaaaaatggaaaaaaaaagtatagccaatttggcattaaatttgcggtcaggaaattatggcactgagtaaagaactaaaacatttatataaagcattttatttaacatgaaaaagaaaactgttttcatggttataaatatttcaaaaataaaggatggttaaaggctatggagccatttcctctctaggcttatggacctcagatgtctcactggcaacattaatttcctcctgtaattcatttctgtcaagcatcacgaarttctcagctttcgcatagagcaaaaagacaaactttaaattgtacttcatgtatcatcagtaacatgttcaagatttcacaagaataaaacaacaggcacatgcaccctaaaatgttaaggtgttaccttaaaaaaataaaggcaattgagagttttcagcccagttatgtgtatgtgaggcatattctcaaacacattcagttgttaactcctagacatttacattaaccctctggggctttccttaattactgtttgagccccttaggatatttctctccagcaatttagga

SEQ ID NO: 369063 - DNA, 557 bp, Homo sapiens
tctttaaatgctagtaatcattgctcggtcatcaccatcatgatcatcagttctcatcattttcattaggatattttcaaggtgagtgagtgcaatatgcctccagggatacatttgtgaacaaagcttatctccctacctgttcgctgatactagtcatttttctaacaaacatccccacttacaaatgaaattaaaatctaaatgtatttaaactgtaaagctatatgtccaaagtgagcactgtgttatacaacttagaaggtttttattttaaaaataaagagatgaaggaaggaaggacgaatggacggaaggaagggagggaaggaaaaaaggagggaaggagagaaagaaaatcctcttgtaaaagttctcttcacatataagattttatactttattttaaaggagattcttttygttaattaaggtatcagtacaacaataaaaccaacagaaaaagatatctaaaaatcttttcattttgtacagcaaatatccgggtatatttaccttatgtaaaatcattcatttggtctaacatgccagtagaa

SEQ ID NO: 369064 - DNA, 512 bp, Homo sapiens
atgtattctgagacttaaattgcaacattaaaaaaaattccataggattggagggcagggatgcaccatcatttctgtctttgagaggtctcttctggtatccttgattaagaccatttggtctaaacttaactgacttcctcagccaggtctcggcgtttagttcaagttgcagcaacacagtttgatgtttgtggtttccagttgctcccctgctgagaygctccaggtgctccaccagcgcctggggactctgattaacactttccattccatagttttacccggacagggtcaatcctgctcagatgatggagaggacaaggtcggccttgcagagttgagacacaggcattcatgaaggggtgctacttgggggccacaggcttttgtggaggggctggaacttcagacactgataataactttgtatctgcttcggaaagccactagtactgcactcaaacaggggagaacagaaagggggttgcggtaataccccacgtggtgtc

SEQ ID NO: 369065 - DNA, 549 bp, Homo sapiens
gcagtcgacaagctagagactcataagagctgatggtgtgcttccagttcaagtatgaatgcctgagaaccaggaaagctgaaggcataagtcttagtctgaaggccttcaggcttgagagctaagaaaagcccatttttcagttcaagtcccaaagcaggaaaggattaatgccccacctcagcaggcaggcaggtggagttccctcttattcacaggagggtgagcctttttgtttggttcaggccttcgactgattgaatgagagctactcatattaggaaaaacaatctgctttactgagtttacggagtcgaataycaacctcatccaaaaataccctcacagacacacctagaataatatttgaccaaatatctgggcacctgatggctcagtcaagttgacatataaaattaaccatcacaccaacatagtacttaaataaagagggtggatggcaactttaatgggaaattaaaagcaagttaagccagagataactcttatgtgtttataatctgcagcagataacagagataattgtca

SEQ ID NO: 369066 - DNA, 549 bp, Homo sapiens
gcagtcgacaagctagagactcataagagctgatggtgtgcttccagttcaagtatgaatgcctgagaaccaggaaagctgaaggcataagtcttagtctgaaggccttcaggcttgagagctaagaaaagcccatttttcagttcaagtcccaaagcaggaaaggattaatgccccacctcagcaggcaggcaggtggagttccctcttattcacaggagggtgagcctttttgtttggttcaggccttcgactgattgaatgagagctactcatattaggaaaaacaatctgctttactgagtttacggagtcgaatatcaacctcatccaaaaataccctcacagacacacctagaataatatttgaccaaatatctgggcacctgatggctcagtcaagttgacatataaaattaaccatcacaccaacatagtacttaaataaagaggrtggatggcaactttaatgggaaattaaaagcaagttaagccagagataactcttatgtgtttataatctgcagcagataacagagataattgtca

SEQ ID NO: 369067 - DNA, 627 bp, Homo sapiens
ttttttttgttttgtcaacatcatagaatttataaacttttttataaagagtatgacttagttttttttttcctgcaatcatattttccagttgaaaaagcttttggccattacattcagctataaattagtaacwgtgtgcatatgatttctgattatttttcctcttgagccagaactagaaactggtcctgtaatatctgtggatcttgttctaattatatatccctttttatttgaaatacttagtattttcattgcctatatggtgaattctgagttttttaacctaacacacaatattgaaatctctgccctgaaaaattcctaaacatccttgaagtctagttctgttactactttctctctgaaatcttttttgattacctagctggaaacgatctaatctcccattctttaacagtacattcccttgtattaaaacttcttctgtaaatgtcttagtcctcttctagattataaattctcttactcattattgtatcatctacattcatacattgaacaaaaagcaccaagcactgttatagatgcgagggaaagagcagtgcaggagaatcttggttcttgtcttcatgggatttatattccaccttttggaacaac

SEQ ID NO: 369068 - DNA, 592 bp, Homo sapiens
ggaggatcgcttgagtgtgggaggtcaaggctgcagtgagatgtgatagggccactgcatgccagcctgggtgacagagcgagactgtctcaaaaaaatagttcagtaaaccatgctgtaaacagatgtactgtcatccaggctttgttgttccatttagagaacacaggcagagttgatttagcatcattctagggtctctaggattttctgcatggtaaatgtccattggctttaacttaaaatcaccaactgcattgttccctaacaagataatcagcctgtccttggcagctttgaagccaggcattgacttcttctctcaaagagacaaggattttgggtgctacrtcctagatggcatctttttccaatagaaggctgttttgtctacattgaaaaacctgttgtttagtgtagccactaaatggggcagctctgaagccagacattgacttctctcaaagggacaaggattttgggtgctacatcctagatggtatctttttccaatagaagactgttttgtctacattgaaaaatctgttgtttagtgtagccactaaatgatactagctaatcattgatcatc

SEQ ID NO: 369069 - DNA, 570 bp, Homo sapiens
gaatcaagaaagtggacatgaactggttttcccattgggcatgtttcatgcagggtacaaagtatagcagtgatcagaaatgcttgatttctgtggaaaaggcagccactaaggtcagagccttggggaaaggcggtagatggtggaggtagtatgaccagaatagctggcggctgctgccagaaagggcaacagttaattctggactttcattgcaagcaaagagggaygtaagtctgcacctgagggcctggctccccagggcaagaggaatgactctgaggctcaccgtgcagtgtttagtatgaggaaggaggctacttgccctctgggccttcactatcctctcctgttgctaggtacttcattagagcaggaggttaaacaattcacctacaaaacaagaccccaccctttgtttctctgctcaagtgtcctatggagttttgccacatagtttgtggcattctctgatgcaccaggatttgtgtcaaacccttagactctgtcctactttaatttgtgaaatggaggttggaagctgggacaatacacagatgatagttctgt

SEQ ID NO: 369070 - DNA, 491 bp, Homo sapiens
ttgcagagctctgcgagaattcccagactctatgggcaaagacggcaaccaccagaacaataggaaatagacatgatggacaagagataggagaaggacaaacaacatgcaaagcttagataggcagggcttttcaaaaatagttattgggattgtatcaaaagttgtgccatggcaattggagccttgggatgatacatttggaatttggattgtcttctgtgaaatgtagtgggagtagttctcaaggcttacacacacacacacacacacacacgcacacacacacacacaccaccctaggtttagcttgagctgtagcccatcaatcactatctttttctcactcaaccctaggcttttggaagcacagttagaggacycgaaagtcatggtctgtgacaaacccatgtcctctcagaggcaggagactgacagagtataggaagttatgagtgaaacctgaagtcatgtgacccatgcttaaacaa

SEQ ID NO: 369071 - DNA, 474 bp, Homo sapiens
tttcaaccactttgggacttgtgtttatgttgtattcaaactgcatttgaaattaagtttaagcacaaatatcttcagggcaaaatagagctaaacatgacagcmctttggaagatgtggaaatagtgcaagagtgcaatagactgaagatagtggaagaggccactttttcatttctttttctctgtgtatatatacagaaagctaaacatttaaatgtgcgcaattcagattttttccagttgatattctctaactagaaaccattggactgagtaaattggtgaatgtggctttgcctgaacatatagtttcagaatatgatttcgcatatctcatttatttagtatgtcttgggatacaaaagtcattatactgaaacaaggcacgtgataggcagaataatggcctccgcccaacgatgtccatgtcaaaattctcgtaactcgtgaatatgttaccttatgtggcaaa

SEQ ID NO: 369072 - DNA, 587 bp, Homo sapiens
atgggcttacacaaaattagaaatttattaacttaactgacaagtacaaaattaggcctggctscaagtgctgttttatccagaggttcaaaatatcacaatttctctatgactgttttagctcatgtcccctcctttatgtgcccgatttatctctgggctggcccccctcatgctaccaacatgactcgtgcaattctagaccttacaccctcactacaacatctgagaaagtaaggatgtgtcttcttggagttctttcggaagataatggaggctcttattctcaaagtcccagccgatatctcttaggtctcctggttcttaatcaagtcttatcttcttccctaaacaaattctcaagactctgaaacagaagagaggaggagataggaagcagtatgttttgcttgaaaacaatgggaaagcaaattccacccaaaccacgtgcctgagaataggaaagggacaattgtccaaagaaaattttggagctgctggacagaagaggcgaatcaatatatgtctatggtagtagaataaaataaatggggtaagaaaagcacaaagtactctgatgctatggt

SEQ ID NO: 369073 - DNA, 587 bp, Homo sapiens
atgggcttacacaaaattagaaatttattaacttaactgacaagtacaaaattaggcctggctccaagtgctgttttatccagaggttcaaaatatcacaatttctctatgactgttttagctcatgtcccctcctttatgtgcccgatttatctctgggctggcccccctcatgctaccaacatgactygtgcaattctagaccttacaccctcactacaacatctgagaaagtaaggatgtgtcttcttggagttctttcggaagataatggaggctcttattctcaaagtcccagccgatatctcttaggtctcctggttcttaatcaagtcttatcttcttccctaaacaaattctcaagactctgaaacagaagagaggaggagataggaagcagtatgttttgcttgaaaacaatgggaaagcaaattccacccaaaccacgtgcctgagaataggaaagggacaattgtccaaagaaaattttggagctgctggacagaagaggcgaatcaatatatgtctatggtagtagaataaaataaatggggtaagaaaagcacaaagtactctgatgctatggt

SEQ ID NO: 369074 - DNA, 587 bp, Homo sapiens
atgggcttacacaaaattagaaatttattaacttaactgacaagtacaaaattaggcctggctccaagtgctgttttatccagaggttcaaaatatcacaatttctctatgactgttttagctcatgtcccctcctttatgtgcccgatttatctctgggctggcccccctcatgctaccaacatgactcgtgcaattctagaccttacaccctcactacaacatctgagaaagtraggatgtgtcttcttggagttctttcggaagataatggaggctcttattctcaaagtcccagccgatatctcttaggtctcctggttcttaatcaagtcttatcttcttccctaaacaaattctcaagactctgaaacagaagagaggaggagataggaagcagtatgttttgcttgaaaacaatgggaaagcaaattccacccaaaccacgtgcctgagaataggaaagggacaattgtccaaagaaaattttggagctgctggacagaagaggcgaatcaatatatgtctatggtagtagaataaaataaatggggtaagaaaagcacaaagtactctgatgctatggt

SEQ ID NO: 369075 - DNA, 587 bp, Homo sapiens
atgggcttacacaaaattagaaatttattaacttaactgacaagtacaaaattaggcctggctccaagtgctgttttatccagaggttcaaaatatcacaatttctctatgactgttttagctcatgtcccctcctttatgtgcccgatttatctctgggctggcccccctcatgctaccaacatgactcgtgcaattctagaccttacaccctcactacaacatctgagaaagtaaggatgtgtcttcttggagttctttcggaagataatggaggctcttattctcaaagtcccagccgatatctcttaggtctcctggttcttaatcaagtcttatcttcttccctaaacaaattctcaagactctgaaacagaagagaggaggagataggaagcagtatgttttgcttgaaaacaatgggaaagcaaattccacccaaaccacgtgcctgagaataggaaagggacaattrtccaaagaaaattttggagctgctggacagaagaggcgaatcaatatatgtctatggtagtagaataaaataaatggggtaagaaaagcacaaagtactctgatgctatggt

SEQ ID NO: 369076 - DNA, 488 bp, Homo sapiens
cagagatttctgtattgtcctcatggctgaaacagtatctggaaaagtgtttgtacttacaaggcactaaatatttgctgaataggtaaaattgttgttgaataggtcatcctactgctcaaaaataacataagcgagggagctccccatgtaacaaatcaaatatgtcgactccctttttgataatgagtaattttggggaataatattctgtttataatttgtcacrcatattaactgttacactattatcttattgaacctcttattactgtaaaattttcaaatgtagagatcaaaataaaaatgtacagatcagtgatgtattacaaaatggacatccacataaccaccttcctggtgaagcaatggaacgttgccagcaccttggaagcctccttgtgctctctttccattatacttcttccctccctttccaaagtaattgttttgatcatcatttccttgcttttccctattgtttacac

SEQ ID NO: 369077 - DNA, 519 bp, Homo sapiens
tttttgttaaatacattgagtaactataaagtatttgatcaaataaatgctaccatggatagattattctcacattttggttggaacatacactagatattgatcttggtgatgttttattcatattagaaattatgtcaatataagctctttggacagatggagagtyttatacttaactacagaatttaactacctgtccttgtttccttaatttttccaattcatttacagcgccattttttttttttttttgagatggagtctctctgtagcccaggctggagtgcagtggtgcgatctaggctcactgcaagctccctgctctgggttcaagtgattttcctgcctcagcctcccaagtagctgggattacaggcaactgcctccatgctgggataattttttttttttttttttgtatttttagtggagatgggggtttcaccatgttagccaggatggtctcctgacctcgtgctctgcccacctcagcctcccaaagtgctgggatgacag

SEQ ID NO: 369078 - DNA, 504 bp, Homo sapiens
tgtttttacatattttaaaaacatactcccacctaaaaaattcacaaaagaaatttggtaaagaaatattaaccaaatatataaaaatcaaagtgatacattttttcatgtagattggcaaagaataaaaacatgataaaacacactgctggtaaaaacatgggtaaatcaacattaaattactatctctgtaaatatgtgtcaaaatatataatgtatatgtatatccttagattcattaattccaatactagggattcatttcaagaaaacagagagttgtctaaaaatacctaaataaggatgttcatttttatgtgtcttgtaaaaaattacaaacaacttaaatgttatgktgacagaataaattctagcatattattcaatgacgttcttgggccaccataaaaaattatattgccctttattcatgggaatgatggtaagcttctaaaagagaaaaggcaaaaagaagatgcttaaaatataaatgtgtcatcccac

SEQ ID NO: 369079 - DNA, 512 bp, Homo sapiens
tttgggacaaaaaccaaatggtccacaaagactgaaataagaagttcattctttgtacacatagggaaactgaggccaaaattacttgtccaacgttacacagatttttaacattttattgaaaatatattctcataagtaagacctgatattcatcacaaaaggcaatgtagaagcttgggcttctgaaatgaaaaagacctggatataagtttaaggaccaccaataagcagttataaggccttaagcaaattacctagtccctcctcaaaggacagatttttacccagagtccattcatcttattcttcctgaaatctcaacaatgttcagttatctcctctgtaaacaatggragggaagagaaaagctgattccatctccaacttcaggaatgagctctgatttgtataaagttatagtaattcccttccctcttgctagggattggctcagaaattggcacaagaccagaaatgactgatgcgatttgcaatttgactaaagggtt

SEQ ID NO: 369080 - DNA, 577 bp, Homo sapiens
cactttacatgtccgggtaatattttaaaracatagttacaatgatatcttccctcaaataagactttccaatggcctctttttataatacttagaatataatccaaactcttcacataagcccacaaggtctggcccctgcccatatctttagcttcaccttgtactactatattccccttactttttgcactccaattatgttagccttttttctgctccactaacaggccaaccttacatgcttatttactcaaggctgctgatagcttataaaattttctttattcaaataaaaaaaaaatacacacacacacaaacacacacaccctctggtggacacagtgctccccatggtatatgcttggtaaaagggacagcctttgtggaaaaaaaggtccccctaattctctgagaggatgcagccctgtacctgatagcacaaatttgtaagaggagcatgagatttcaacccctacatctccctttggttgggttcctttgtgcagtgcacatactgcacaaccttccatggcagccttggaatccctctccctggaaagttcttttgacaaaa

SEQ ID NO: 369081 - DNA, 577 bp, Homo sapiens
cactttacatgtccgggtaatattttaaagacatagttacaatgatatcttccctcaaataagactttccaatggcctctttttataatacttagaatataatccaaactcttcacataagcccacaaggtctggcccctgcccatatctttagcttcaccttgtactactatattccccttactttttgcactccaattatgttagccttttttctgctccactaacaggccaaccttacatgcttatttactcaaggctgctgatagcttataaaattttctttattcaaataaaaaaaaaatacacacacacacaaacacacacaccctctggtggacacagtgctccccatggtatatgcttggtaaaagggacagcctttgtggaaaaaaaggtccccctaattctctgagaggatgcagycctgtacctgatagcacaaatttgtaagaggagcatgagatttcaacccctacatctccctttggttgggttcctttgtgcagtgcacatactgcacaaccttccatggcagccttggaatccctctccctggaaagttcttttgacaaaa

SEQ ID NO: 369082 - DNA, 548 bp, Homo sapiens
aaacaggataattgtagtaaatgtagttaaatatgggggctataaacggtgtaatatttataaagtactgagcaaaccaccaggcacatattaatacctaacatttgttgatcatcttctattgtatcattttaatatcactcgtccaagaaactgtggtcttcaccactatcatattaaagcaataaccctaggttcatagaatttgtgccacaaaaacaacaaaaaatagaattaaaatttttgttctcatctaaaacaaatatagaactccttatggaagaaatrgaaaacaccatggtgaaatttttaaaggaggaactattagttctaatgaaatagacttatctaaatcatcataacgtggcagaatagctaactctattagttctccaagtaggatatctttatacagtttttgaaataataaattatctgccaaattcaacactccaaatgttttcacctagcactgccatccttgttcacatacccaagaggctgtttattaaaatgccaaatggacagtatctctgggcagagggttt

SEQ ID NO: 369083 - DNA, 608 bp, Homo sapiens
cgattctatcactggggctacaaactagatgcagaaatcctttgctcaaatattattaattagacatttttaacacyttattccaaaaagaaaaggtgtatttcacaaaagcctgttaattatgtagtcatttatttattttgagcagtaaatatttttatacttgtaattattgaaaatcagctgaggcatagtaatatgaaaaaaacttaatgaatgtatcaaaaaggaaacaaaaggggaaagacgtgtaagaaagaatgcttctatgcctttgctcaggtttataacaggagagaatggaatagagtgagtgtgtatatgtgtgcgtgtgtaggggtgtatgtcacgcaaacatgcacacctgtacatccgattgtgtaatcaatataaacgatatgacacataattcaagccttaaatttaactttggagctcacgtctctgttgaagggtgtaaatgagttgagctggaaggcacaatggagttgatcctctcacgttttctggtggaagcttatttcttacaaatgcttgacaaccacacacttggacagccaggcctctgatcatttctgcctctcatgtctcgatgtggagcacaaagc

SEQ ID NO: 369084 - DNA, 608 bp, Homo sapiens
cgattctatcactggggctacaaactagatgcagaaatcctttgctcaaatattattaattagacatttttaacaccttattccaaaaagaaaaggtgtatttcacaaaagcctgttaattatgtagtcatttatttattttgagcagtaaatatttttatacttgtaattattgaaaatcagctgaggcayagtaatatgaaaaaaacttaatgaatgtatcaaaaaggaaacaaaaggggaaagacgtgtaagaaagaatgcttctatgcctttgctcaggtttataacaggagagaatggaatagagtgagtgtgtatatgtgtgcgtgtgtaggggtgtatgtcacgcaaacatgcacacctgtacatccgattgtgtaatcaatataaacgatatgacacataattcaagccttaaatttaactttggagctcacgtctctgttgaagggtgtaaatgagttgagctggaaggcacaatggagttgatcctctcacgttttctggtggaagcttatttcttacaaatgcttgacaaccacacacttggacagccaggcctctgatcatttctgcctctcatgtctcgatgtggagcacaaagc

SEQ ID NO: 369085 - DNA, 520 bp, Homo sapiens
ggcctttcttctgtctctctctagtgatgaagcacagataagttacccaacattagtgtgtgtaaatcatttcaaaaggggcacttgttccctgatgtagtagttctctgaaaagcaaaaacaaggcaatcctacaagaaacatcatcacacaaccaccacacaactggttttcacaattaaagacttactatgataacagtcaccagcctgaaaaccctactctattaagacaaacaggcaaaggttctcttcaaaaagaatctcaggataggaggtttttgaaatctcaaaagaaaacataaactagcctctctcttgacacctaataaaaccaagaagctgactcaaatagttacaagatttatctcctaatacctgcctttaattgatttacatataaaagtcttcttttccatagttccaagaccaatttggaactttctttstaattctcacattataaattaagaaagcaaaataaaccatctctaggacataccagaggttatcaatttgga

SEQ ID NO: 369086 - DNA, 532 bp, Homo sapiens
gcaggaccgatgctaaaagctttgttgtgggaatccctaaagcatattcctataaataggactgtctgcattcactcaagttgtgcacactgacccaaataggaacgatatacatgactcacaaatgtgtacgtcgatacgctgcaaacctaacgcacaggcacggttcccaaaccgtggatgtttccttagaaacatcctcagcatttctagctgcctctcctcctagatggtatctgagaaaaagtccaaacaaatgacaaatggaagaaaatcgtttcaacatgtatgcaggcaacccacatgatagaaaaacggccaaatgaaaaataaactgctaattcacaaaggtaatgcaaatgacacaactgagcacaaacacacaaaactgatcaaatgtaaggagactcaagtgtcctgcattttggtaaatggaagttgtaataaaaactggtttgaytcatcagattaagaaaaaattgaaagactggtaatctcagtgctgctaagagtgtaggaaaacaggcagaca

SEQ ID NO: 369087 - DNA, 521 bp, Homo sapiens
ccaacaagcaacaaatactgattgtcaatcacaaacacacaccatagattaaactaaaccgacattttcgtcacaataaattaaattgatgctacaagacagaagctggtcatttgagccatgaagtgrtttcaactaaaacttcaaatattaatgaggaaatataaactgacctattcactgacaattaagcaactctgatttgagcagcagaaatcatttgcataatgaaaatgcccttcccccaattattcaaattacagtttaaaaggaaaagcacactcaggaagaggtttttatttgtagggacgttttaatgagatgataggtatcttaataagtgttcttgggtgaagacacctggattattaaacagcaattctgctgtatcctatgttaattcatagcaagattttatcatgtctgtttaatttattacagacttgaagtacttggtatcacttgcatggtttaaagtaaaccaatttaaacaaaagatgaaataaatggtaagttttgaa

SEQ ID NO: 369088 - DNA, 598 bp, Homo sapiens
tatataatatatgtaaagtgcttagaatatttaatcaataaatatcagttcttcttggtaactattctgtaactgatgtaacacctcayattgaagcggtttattttgtgactgcttcttaatactggtaggtcttcgctggcatggtgggcagatgtttttgttctttcatttttctaatcccagccctgggtgtggcttctgatatatcatagtattacacacatgtttcttgagtgtctataagtgaatctggtttcccttttccagaaatacaccataggtaagggggaatcaatagtgtgtgaataaagactagtaatatatgccctaataattcactgatataaaacaaatcagtgaggaataactgctgtgtgtatatttggagaggggaaaggggcagttagtccaacttgccttcatggatcagagaaaagaaagaatggaaagttaaattcaaatctaagaccccattctttgaatatatctccttcccacctcagagggaaaaattcagtctattcctctgtaaaaccaatagctacataaggaatagcatctcttcatctaggtacaaaatctttccttggttcac

SEQ ID NO: 369089 - DNA, 598 bp, Homo sapiens
tatataatatatgtaaagtgcttagaatatttaatcaataaatatcagttcttcttggtaactattctgtaactgatgtaacacctcatattgaagyggtttattttgtgactgcttcttaatactggtaggtcttcgctggcatggtgggcagatgtttttgttctttcatttttctaatcccagccctgggtgtggcttctgatatatcatagtattacacacatgtttcttgagtgtctataagtgaatctggtttcccttttccagaaatacaccataggtaagggggaatcaatagtgtgtgaataaagactagtaatatatgccctaataattcactgatataaaacaaatcagtgaggaataactgctgtgtgtatatttggagaggggaaaggggcagttagtccaacttgccttcatggatcagagaaaagaaagaatggaaagttaaattcaaatctaagaccccattctttgaatatatctccttcccacctcagagggaaaaattcagtctattcctctgtaaaaccaatagctacataaggaatagcatctcttcatctaggtacaaaatctttccttggttcac

SEQ ID NO: 369090 - DNA, 598 bp, Homo sapiens
tatataatatatgtaaagtgcttagaatatttaatcaataaatatcagttcttcttggtaactattctgtaactgatgtaacacctcatattgaagcggtttattttgtgactgcttcttaatactggtaggtcttcgctggcatggtgggcagatgtttttgttctttcatttttctaatcccagccctgggtgtggcttctgatatatcatagtattacacacatgtttcttgagtgtcyataagtgaatctggtttcccttttccagaaatacaccataggtaagggggaatcaatagtgtgtgaataaagactagtaatatatgccctaataattcactgatataaaacaaatcagtgaggaataactgctgtgtgtatatttggagaggggaaaggggcagttagtccaacttgccttcatggatcagagaaaagaaagaatggaaagttaaattcaaatctaagaccccattctttgaatatatctccttcccacctcagagggaaaaattcagtctattcctctgtaaaaccaatagctacataaggaatagcatctcttcatctaggtacaaaatctttccttggttcac

SEQ ID NO: 369091 - DNA, 620 bp, Homo sapiens
cagggaaactgtgccaaactttcctcttgtttattttcaaaggaaatgagaaatctttaaaaaagaaaaaaacagaggaagctaagatgatcgcccacaatattagcccctttctgggaatttgaaggaaactcggaatctggcaattggcatgcgtgacaaaaagtgaattttgctatctttcacaaagcagatattctgcttttacctaatcaactgcacgtagctacagargagatctggaagcgagtgataaatgtagatgaaagttgatatatcagggtgcagaggtaacctggctgaatgtaacacagctgtgtaggtatgatatgtgtatatatctcatatatatgcacatatgtacacacagacataatgggagagaagtagaggaagaaaaaagaaaagtgaaaaaaagatcatctttcacatacaaatacaaacaaacatacgcaaatatagggagaacaggaaacaaacctatcatctctcacacacaaaaaataataattcatgtcctttcaattcttcaaaagcatgcttcctttgagccggattattagataattcctacattactatttcccacagatatcctcccgaaattgtgtcggttattt

SEQ ID NO: 369092 - DNA, 575 bp, Homo sapiens
ttaaagaggcatgcagtagaattttttgagacagggtcttgccccgtggcccaggctggagtgcagtggcacgatcttcactcactgcaacctccgcctcccaggttcaagtgattctcgtgcctcagcctctggagtagctgggattacaggcatgcaccatcacgcccggcggatttttgtatttttagtagagatggggtttcaccatgttggccatgctgattttgaactcctggcctcagtgatccaccygcctcggcctcccaaattgctggaattacaggcattagccacctcgccaaggatattcttaatctactatgggcacccaccatgtgctaggcaacttgctcagatttttttttctcattttaaccttaacaattcttttggctaagcatggttatttccaattacagacaatgaaacagactccccaacaaacctgactataaactccaggggtacagtgatatgtctactttaatttcccattttatctcatagtatctgccagctaaagtcactctctgttcctctctcaacccctctcttacacacacacacacaca

SEQ ID NO: 369093 - DNA, 632 bp, Homo sapiens
tgttaacacagatagagaatgcaatacaagttgatttgatagcctagctggaggagaaaagctgagaaagtgagagacgactggaagattcttgttgggaatatttccttatcaaggatcccctttatgagccatgtttctccttaagacaaaaattgtatccatgtgtttctttctttaaatcgttttatcttacagatttcatcatgtcatggctccctcttgcctgtaagattagcttcaaagggcatgtcttcatgtcttgacctttgtcatgtattttaaacctaccatcaagtatcgtctaaccccacttttcaattatgaaccctacgttttgatcacacagattcacgattgttttgtaaatgcatcattatctgtgtacagcatggtttgtttctttcttttgcaatgatcttcctttcttctccacgtttggtaaactatttcttttttcaaagctaatgttaatagaataacattattctgaaatcttcccagattcctcctggaagaaatcagaattctgtcttctgtgattcatcttatattatagawgcttcatcttaatgatatttgaaatttttgatatgatacttattgtgctaatatattgctaaaatactgaa

SEQ ID NO: 369094 - DNA, 297 bp, Homo sapiens
ctggctaatttttgtatttttagtagagaccaggtttcgccatgttggccaggctagtcttgaactcctgacctaatgtgatccgcccacctcagcctcccaaagtgttaggattacagacgtgagccacagggcccttctgaaaaaaagatttcttaaacaggacactgaaatcacagtataaattattaatcctctaaggcaaaagtttccattraatcattaggtaagttgccacaggctacttactatcactgagaaaagcaaaactaatgaagtgagccccatgacagccat

SEQ ID NO: 369095 - DNA, 550 bp, Homo sapiens
attacaaacaacgctagcctctgatcaattcagtccaattaagacgaacaaggatttctgatcacatgctttagtgggtaaagtgtaatttagttcaattttaacatcccttccacgctgtaatattttttcaattttcatcactttaactttttaacttcttaatctattgtctagcatgcattttcctgtacgtagatttatctatatctaaagttgctactaagattttagaatttcatatgtattattatttatacacaccataaacaaaaaagagttgaaaattaacatctacgccaaggttatttaggaaattagattatatgttccattttataattaaataaaaattttgagggaaattagaaaaataaaactatttgtgattaaattttcttgttataaaatgttcttaatatttagataaatgcaaatttggaatgtagatttccatttatttatacacatatatattagmtaggtatagatataaacacatatatatatatacacacacacaaaaccatataatggcttctacatgtac

SEQ ID NO: 369096 - DNA, 653 bp, Homo sapiens
aaacttatttaatgtgtatacatgggagcttttcagaatatagattctatcaaccccttaataacgtacataattttatataccatcttgagattacagaaagaatgcaggcccaaagtatggccaaatacaggtattagtggcaacatgggctatgagagggagaaacgaagaggcttggctagcaagccttgttgcgtagatgaagcctcacaagtagttgccttcagagggaatagatggtaaaagtttcttttcagactttgaaagatttcagactttcagttaatctctccgatatccgggaaagagctagaaaaggaagacttgactgaattaatggaaattctcaaaagttgcaaatttcctctgcctcagtattctggccttgcagcagccatttcaaaatatgataaagaaatacatatgggggtaaaatrttttgatttccttctattgaaagcaggtttttgaagaagtatttgtacacttattatattcatagatgcattattcacagtaggtaaaatgtgaaagcaactcatgtccaccagcagataaatgagtaagtaaaatttgatatatacatccaatagaaatgtattcagtgttaaaaatgaatgaaattctgacatatgctacaatatgcataa

SEQ ID NO: 369097 - DNA, 551 bp, Homo sapiens
aataggttattatttgaaagtgaggaggaagagaaaaaaatgagtggataattcaaagattastgaaatagtatgtatgtataataagtagaaaaatgtgttgttctcagatattaacaggagagaattcagtattgatatctgatatccaatgttataaaagcaattattatcctaactatgtaatgacaagctattatttttcctagattagcacttacatacatgaatcacaaaatacaactttggaaaagctcctatagccttctataccaatttttttccaaacatatcatacctaaattagatatattctggcaagctgcatattttcaaatatgtcttaatctgtaatgcttttgaattactttttctttttaataataactgcaaagaatttagtattagcttattctggatccaagtatttctaccttggccctattatggattagataatattttgtcgctgttgcagagtctgttctgttcatttttggatgttcaggattatactcagcctaacttgctagatataatagcactcctta

SEQ ID NO: 369098 - DNA, 529 bp, Homo sapiens
aagggagcagctttaataagtcactaatggaggacaacaagaacaattagatggatatttttctttgacagaaaaaaaaaatcccttaaaatgaaacgaatgcaaaaacatactcagtaaagtttggaacattattcctggaaactgatgcagctttttaattctttctcacaagggctgatggtttaggttaatagattaacctgtgaattaggttaataggttattatttgaaagtgaggaggaagagaaaaaaatgagtggataattcaaagattagtgaaatagtatgtatgtataataagtagaaaaatgtgttgttctcagatattaacaggagagaattcagtattgrtatctgatatccaatgttataaaagcaattattatcctaactatgtaatgacaagctattatttttcctagattagcacttacatacatgaatcacaaaatacaactttggaaaagctcctatagccttctataccaatttttttccaaacatatcatacctaaattagatata

SEQ ID NO: 369099 - DNA, 552 bp, Homo sapiens
actctcttcctgatgtgataatttttttttctattaaggtgatagatttaagagtgttctagacaactcttaaatgagctgaccactttagtagttaggtggttgttctgatatacctcacttaaagcagatgttatttatgaaatttggatttaaaaaatatagagagattatatactctacaaaaatctctactttattcctttattaaacattartctcctcttatgtgtcaaaaatattattcagactttcagaataaatttacaggttaaaacttgattgatcagaaaccgacaattagaactttaaactgtttatgatttttttctctatagtctagttttataacaaagaagaaattgcaggaaaaaaaacactgatttcaggagtttacttatacattgatttacatttacatattccattacatatttacaaagcagattggtttatgcctaatctttctcctttccctattttccttcctcccttccttgctttctttccactttagtcttccgaattcataaatatttactgaatctcaac

SEQ ID NO: 369100 - DNA, 579 bp, Homo sapiens
actgatacttcccacatcttccaacacatgtatacaaggaattgccaacattcttcttatggggcttcttccatatgtaaatgtaaatatgaagatgtaaatgtaacctgtagagatttcagattatgactcccaccaccatgatctgtgccctaggaccttccgtagtgtattgtagggagggctactttggagaactttccagatgcctgcctaggtgaacacagggtcctggccccattagtgactgggctcaagccacacaaaaagcatgttgacagagttcttcactgagttttttcctgagtgtcacagaggtatggagagttttaaaaagactcaaactctttggatccaagtttcttttaaaactgcygctttccctgtgcatggtaacagcagtcacattcagttatcaggtttcatcctggaaagagaaggtaagatgatctctgcttccaagttcatgtaaattgaccattcttttttctatagaattcctttctcatggtctgctaacttttagggcaaagtgccagacttttaattttaaactcaacgtcaatttattctagcaaa

SEQ ID NO: 369101 - DNA, 584 bp, Homo sapiens
gggctttgaaggagagggtggctgcttagtcctaacaaatagctcctctattcattccctttaacagcaagaactggtcagtggctgctcaaggcatattacattaatggcattaggattattaattgacagcacaatatttctactcagcatattcctcctgtgttgtacaaatacctgctggcaacacagagtttgcaaaggttgctggcagcagctgccacgtgtgattgaaagaacaatcccaagttgctattcagggacaatgatttgaaatgggacccagtaaaaaagctaaagcagtttgaaggtggcagacaatagcagtttcatgtgtatataattgtatagccagtaatcccagcactcaacttgtatggaaggcaacagggaatgtcttagttcatagccttcrcctgatttttcagctgggtaagaaaattgtccagctacctagtttaaagtcgcaacaggtggtagaaaaaggcttacctgtaccttgcaaaatcagcgtcactaacagtgatgatttattcagcctataaataacctttttttttattgtttctcactgtgagtttcac

SEQ ID NO: 369102 - DNA, 546 bp, Homo sapiens
atcataactgctatgaatttatttagagagtactgataattttatgatattgagtccttctatcaaggtcatggtgcttatatcttttcatttgtctactgtcttttacaaaattttatattttttatcaggccttgagtatttttgttagaattattcctaagtataccatgttactgttattgggattaatacctaatacttaaagttacctttttaaaatgattattgctggaatataaacatgccaatagttttggtacgttgcttttgtattaagmaaactaactaaactctcttatttactctaataagttatccttagatttttgaattttgtacgtagacaattttacaatctgcaaataatgatagctttgtttttatatctctaatccttcttcttgttttactgtctagactttttagaacctccatataattagtgatatatagaatctttacattgttgccagtcttaaaggaaatgcttttaacatttaatcgttaataattatgtttgctgtgtcttgttttgttttttac

SEQ ID NO: 369103 - DNA, 574 bp, Homo sapiens
aggcaatgattttctagttatgaaaccaaaagcaataataaacagataaaattacactttatcaaagtatttttgcatttcaaaggaaaacatgaagaaagtgaaaaaacccacagaatgggagcattatttgcaaattgtatatctgataggagatttgtatccagaatatttaaagaattcttgtaactcaacaacaaaaagacaaataacccaatttaaaaatagacaaagaatttcaatagctatttctgcaatatacaagtggtcaataagcacatgaaaagatacttaacatcattaatcattagggaaatgcaaattaaaacaacaatgagatacaaatttgcacatactaagatggttataatcaaaaggacagacagtgacaagmattagtgaggataattgaaaccttcatacaatgctggtggaaattttaaattatgcagccacttttgaaaacaatgtgtcagctccttaaaaaaagttaaacacaaagttaccatttgatcaagcagtttcactcctaagtatataatcaagagaattaaaagcacatgtctacacaaaa

SEQ ID NO: 369104 - DNA, 626 bp, Homo sapiens
atcatggttgtacaatgaaactttttgttactctttcaattgcacataaaaattactctttttctctttgkctatctacctcaaaattctttgtctcaagtatacaaatgagtcattagtgaaagcaaaatgggtactttttatctaaggaaggttaaaacttaacttactttaaaattcagcattttctgggttaaattagaacactacttcaatatctgcaattcaaataagtcctctgagaaattggcctccataaccagtgacgtgctgctgaactgaacagatctccaaaatatcctaacagatttctttctttcattgtagaattgtttccatctggtgcttagatattaaacctggaatatgtaaaggctctcctctctcaccctgtttgacttccaaatgctggcaaataatttgcattgtcaatgaattgaggattaaaattttgaacttaactgagtagctgcaagatgcaaaatttaaagtgatagatcttcaaagtagtgaatttttctcttttaattttgagaaatggagacttgaaatgttacttgtttgtagaacattctaatttgaactttatttgcttaaaaagaataaaaattttctcaatttttatc

SEQ ID NO: 369105 - DNA, 626 bp, Homo sapiens
atcatggttgtacaatgaaactttttgttactctttcaattgcacataaaaattactctttttctctttggctatctacctcaaaattctttgtytcaagtatacaaatgagtcattagtgaaagcaaaatgggtactttttatctaaggaaggttaaaacttaacttactttaaaattcagcattttctgggttaaattagaacactacttcaatatctgcaattcaaataagtcctctgagaaattggcctccataaccagtgacgtgctgctgaactgaacagatctccaaaatatcctaacagatttctttctttcattgtagaattgtttccatctggtgcttagatattaaacctggaatatgtaaaggctctcctctctcaccctgtttgacttccaaatgctggcaaataatttgcattgtcaatgaattgaggattaaaattttgaacttaactgagtagctgcaagatgcaaaatttaaagtgatagatcttcaaagtagtgaatttttctcttttaattttgagaaatggagacttgaaatgttacttgtttgtagaacattctaatttgaactttatttgcttaaaaagaataaaaattttctcaatttttatc

SEQ ID NO: 369106 - DNA, 398 bp, Homo sapiens
tttgagaaatggagacttgaaatgttacttgtttgtagaacattctaatttgaactttatttgcttaaaaagaataaaaattttctcaatttttatcccaagttcaggatatcraaacatgaatttatgaacagtattataggccaaatttttgagtacttaaatcagaatattagcatctaaaaatacttgcatgcatatatttcaagagataagcagatagctatttagacgtatacatgttgaagtttccaagaccctcggtcactgacagtgatttcttcatgaaaattttaaggaggcttcacagtaatagaaaataatgtctgacttttacgattggcaacatttttcatggcattttaactggaaagcacagagttacttctgagaaacat

SEQ ID NO: 369107 - DNA, 600 bp, Homo sapiens
gggtaaaaaaatgccaccatcatttcaatgaaaataaccaaactgctcccagaaaacaaagtagcaaatccatttaggctcactggtgcatgtctggaactttccaaatgaaaccttgcatcaaagaaaagtttaaacacttttcttcaagatcagtcaaaactaaactaarattgcaggcttaaagagttacaaatttccactcttaaaagcaatcttattttgtttgattgcagttgggtccaaagcaagaaatgaaatatttaaaatggaggatttgtaatatattactggtatcctttcttaagtggctatccctccaaagaatgccaaaactttgtagacttgattggattggtactggaaatggtaaacaacactgcaaaataatgaagagaacattttatccaagttagcacaaatgaataagctttatttttaaatgaaaaattccaaagatactgattcacaaaaagagggagcatttcaagttcacattagaaaagtcattggtaggaaccaacaatacagtatttagtgtagctgttctggaacaaaatggagctaaattgattaagcagggatatgagctacaaaatg

SEQ ID NO: 369108 - DNA, 655 bp, Homo sapiens
tgtcaagattcttagttagatctgcaaagacccttatttcttataaggtaatattttcaggttccagggattaggacttgatgtgttttggtggccattaaaaatagtgcccttgctctaatacaaagaatatgtaatttgcgaatgccaggcaccgttgagggcataggtaccataaatgactatatgaaaagaaacacaccaacttcttcctcacttagcttccataatgccaaaaaaagtggactcttaccttcccttaaatagatctaaaagctctactgtaaggaacttgattagtccaaaaagaaagttctaaagttrgtgcccccaaaatgcccccaccaccagattattctgcagtgaagctcaaagtcaacaaatcagatccacatgatcacagtctccattcagtcttttattcttccactcttaatcacaggcatacagggattgccagatatctgagagaagcttcaaacatggaagatagactctaaaataaacaaacaaaaagcaaatacctctttgggggtagcaggctattcaaggaaagaagcttactttttatagtagtgatagcctctgaacaataaaaacagatggaaacatttagagacctgaaagaacaataaaaaaatttaagaattgaaag

SEQ ID NO: 369109 - DNA, 655 bp, Homo sapiens
tgtcaagattcttagttagatctgcaaagacccttatttcttataaggtaatattttcaggttccagggattaggacttgatgtgttttggtggccattaaaaatagtgcccttgctctaatacaaagaatatgtaatttgcgaatgccaggcaccgttgagggcataggtaccataaatgactatatgaaaagaaacacaccaacttcttcctcacttagcttccataatgccaaaaaaagtggactcttaccttcccttaaatagatctaaaagctctactgtaaggaacttgattagtccaaaaagaaagttctaaagttggtgcccccaaaatgcccccaccaccagattattctgcagtgaagctcaaagtcaacaaatcagatccacatgatcacagtctccattcagtcttttattcttccactcttaatcacaggcatacagrgattgccagatatctgagagaagcttcaaacatggaagatagactctaaaataaacaaacaaaaagcaaatacctctttgggggtagcaggctattcaaggaaagaagcttactttttatagtagtgatagcctctgaacaataaaaacagatggaaacatttagagacctgaaagaacaataaaaaaatttaagaattgaaag

SEQ ID NO: 369110 - DNA, 550 bp, Homo sapiens
gagaaaataagccattttcagatttgcaaaataccaaattttgattttcacgtaaccttcctcaaaaagttattgaggatgtttactctgaaccaaaatggagtaatagaaactagatttaatctcttccttratacaaacaaaaaaagacaaaaataatgagaaagccatttgaaagacacaacatcaggcaacaaaggtaaatcctaatattaccccagtttaccaccttgagagtttacagatccaaaatgagtgatgaaaaactcagatggagcccagaggctccctgagttgaggacacagagatgagactccagagagatgaagaacgaagttagagtttctaggaaagagtaccagagaggagagagctcacaggacgaaacccagagaactgcagaatgtgccccacaagtagcgatcagtgctataagtgagaagactacccaaagtaggggggaaaacacccaaaagggcagtgttaacagcatctgcttctcacacagggatggtaagaggacctcatctcacccagcaatctgggaaa

SEQ ID NO: 369111 - DNA, 565 bp, Homo sapiens
cagagagaataccactgatgacagagacagaaattagaatgataaaccaccaagctaaggaataccaaggattgttaccaccaccagaaactaagaaaggacaaggaaagattctgcccagtgactgcaggagaacattttggtgacatttcgactctggacttctagcctccagaactgtgagagaataaattactgttgtgttaagtgatgcagcatgtggtactttgttacagaaaccctagaaactaatataacatatcaaatgtatgggatgcccttaaaatagtacttaacatttaatttaacctacttaatatttatacttgaaaataaaagtgatcttgtcaatgacattagcttccaagcaggaagaggagaaggaaaaaaataagtatctgtgcagaaatcaattatctagaaatcacgaaacaagtcaatgaaacccaaamccaaactcaaacagcatggtactggtaccaaacagatatatagaccaatggaacagaacagaggccccagaaataacaccacacatctacaaccatctgatgtttgacaacct

SEQ ID NO: 369112 - DNA, 625 bp, Homo sapiens
tggaaaaatttaatttccatatggaataaacaaactttgatccatatctcacactgtataaaaaattaattcaaaatagattatgcatttaaatgtaaaatctataagaagtataaaaacttctagaatacagcataggagaaaatttaggtgactgagttaaacaaggttttattacttactatacaaaaagaacaatttataaaagaacatgtgttagtccattttcatgctgctgataaagacatacccaagactggccatttacaaagaaagaggtttaattggactcacagttccacatggctggggaggcttcaaaatcatggtggaaggcaaggaggagcaattatgtcttatgtggatggcggcaggcatagagagcgagcttgttcaggggaactcccatttttaaaaaacatcagatctcagagactcactcaccatcacaggaacagcacaggaaagagccgcccccatgattcaaccacctcccrccagtttcctcccatggcatgtgagaattgtggaagttacaattcaagatgagatctgggtggggacacagccaaactatatcataacacatttataatttttacttcatcaaaacttaaaacttctg

SEQ ID NO: 369113 - DNA, 579 bp, Homo sapiens
tcagaatatataaataactctaaatctcaataattaaaaaacataatccactaaaaatatgggcaaaatattttagtaaacatttaactaaagaaaatatacatgacaagagaatttttaaaaatcctcaataacattagtcactaagataatgcaatttaaaatcacaatgagattacaaatacaaayctattaaaatggccaaaatttgaacccctgaacataccaagtgttggaaaggatgtgaaggaattgaaactcttgtttgcagctggtgagactgcaaaatggtgggatgactctgtagagcattttggcagtttcttaaatagttaaaaatacacccaccatatgatccagctattctacgtctagatagttacccaagagaaattttaaaatattttcatacaaagatacatatgaatgtttacagcagctttacttgtaatagccaaaattgagaagcaaccaaaatatctactatcagttaagtggataaacaaactctgggatatctaactttaaaaatacaaaacaataaaaaggaatgttctattgatacatattacatgaacg

SEQ ID NO: 369114 - DNA, 585 bp, Homo sapiens
tgaatacaaaggaaaaacaacagacactggggcctacttgagggggagagggaaaggaaagagaggagcaaaaaagataactattaggtacttggcttaatacttgggtaatgaaataatatgtacagcaaacctctgtgacatgtgtttacctatataaaaaaccttcacgtgtacccccaaacctaaaaaaaaaggtaaataaatatacaaataaataaawttacttttatcaaaatacaggcaacgacaaatgctggcaaggatgtgaaggaaagggaaccctcataccctgttgatgggaatgtaaattaataatacaaccactataaaggatggtttaaagtttcctcaaaaaactaaaaatacaactactatctgatccaacaatcccatttctaggtatctacccaaaagaaagaaaattagtatattgaaaagatatctccactcccatgtttattgtagcactattcacaatagccaaggtttgaagcaacctaagtgtccatcaacagatgaatagataaagaaaatgtgatacatatacatgatgaagtactattcagccataaaaaataatga

SEQ ID NO: 369115 - DNA, 585 bp, Homo sapiens
tgaatacaaaggaaaaacaacagacactggggcctacttgagggggagagggaaaggaaagagaggagcaaaaaagataactattaggtacttggcttaatacttgggtaatgaaataatatgtacagcaaacctctgtgacatgtgtttacctatataaaaaaccttcacgtgtacccccaaacctaaaaaaaaaggtaaataaatatacaaataaataaaattacttttatcaaaatacaggcaacgacaaatgctggcaaggatgtgaaggaaagggaaccctcatacmctgttgatgggaatgtaaattaataatacaaccactataaaggatggtttaaagtttcctcaaaaaactaaaaatacaactactatctgatccaacaatcccatttctaggtatctacccaaaagaaagaaaattagtatattgaaaagatatctccactcccatgtttattgtagcactattcacaatagccaaggtttgaagcaacctaagtgtccatcaacagatgaatagataaagaaaatgtgatacatatacatgatgaagtactattcagccataaaaaataatga

SEQ ID NO: 369116 - DNA, 483 bp, Homo sapiens
tatcaatgtttttgtcaataatttaaatcaggaagagaatcaggtctgtagaaaatgtttaaattgatttttgccagagaagtgttttaagttaaattgtaataccttcagttgaagcatgcattcctctttctacagtcctgacatcactctattttcttctatctggcagtttcaaactctactcttacctagactctcacagcaactgagttttctacttctggtctagatattacatgagaaaaaatatccattacgtttacaggtataaaatgggttgtacatagagaaaagatatattttaataaaaatgaaaatasatatgtacacttaagtgggaaaagaagtgagaaaaatagataagaaataatacagtgtgatcaatttgtaaagtaagttctataacatgatagtgacatggtagccattagagcatatactcactccacatctttaatgagcatttaggcaacaagcaga

SEQ ID NO: 369117 - DNA, 431 bp, Homo sapiens
cttacactgcctgtggcttcttagtgccttaaaaaacaatccctccattaaactctactgaaattgtccaattggattgtgccatctctggttctgyaaagacccttactgatacatggaaactggcatatcctggaatcaagtctcctggagggattgggagtgacaagtatatctcaatacatcagaactgattatttcctactctatggtgacctactctaaggagattcgaggcaattttaaaaatccaataaaaggggggttagaatatcaatcatagcatggaggttataaagtagcaattactgaggaagcttaccagacaggaggtcctgagggcagccatgcgagaggagtataattctgctgggcaggtgtaggaaggatggactgtagaaaagaccaggaattctgcaggtccagtcaca

SEQ ID NO: 369118 - DNA, 588 bp, Homo sapiens
tagtgtcctgcacacagctggttaacttacatttgcttttatagatgcattgtattttttgtctttgaaagtgcttgatcatcttttcctttttcaaatgctattttcttttttctagaatatgaaaatagatgcaatttaagttgggaaaagtcaaaggtgacattaaaaaatatttcacaactaggtaagtaactggggcatgggaaagaaggcagttagaaaggtgggaaggctcttggggaggctcaaaagatggccatttaataacagagagagttcagtcgtcttttaacaaatagtatgttcttatgggttcctactctttggattaccaccctgagcaaactttttctttatatgattcccttaaatctaaactctgatttgtgaaaacccaagagaagcyttccacatgatttcactgcttgccaggttaaacctgcaaaagatggtgtatccatatttcatgacttggctctggccagttagaaaaaagacaagcatatggtattactttccatgactgatgactttgctctgctgacacctttccttcccacactgtttaccctactaatgtagcca

SEQ ID NO: 369119 - DNA, 588 bp, Homo sapiens
tagtgtcctgcacacagctggttaacttacatttgcttttatagatgcattgtattttttgtctttgaaagtgcttgatcatcttttcctttttcaaatgctattttcttttttctagaatatgaaaatagatgcaatttaagttgggaaaagtcaaaggtgacattaaaaaatatttcacaactaggtaagtaactggggcatgggaaagaaggcagttagaaaggtgggaaggctcttggggaggctcaaaagatggccatttaataacagagagagttcagtcgtcttttaacaaatagtatgttcttatgggttcctactctttggattaccaccctgagcaaactttttctttatatgattcccttaaatctaaactctgatttgtgaaaacccaagagaagccttccacatgatttcactgcttgccaggttaaacctgcaaaagatggtgtatccatatttcrtgacttggctctggccagttagaaaaaagacaagcatatggtattactttccatgactgatgactttgctctgctgacacctttccttcccacactgtttaccctactaatgtagcca

SEQ ID NO: 369120 - DNA, 444 bp, Homo sapiens
gcaggtaaacatagagaagaatgtaatttatgtgttgtatgggcaccagaaagtgagaataggaggaatgtaaaatcaaatttttaagtaattttttattttaaattttaatktaatttttttgaggcagagtctcgctctatcacccagactggaatacagcagtggcacaatctcggctcactgcaacctctgcctcccaggttcaagtgattcttatgcctcagcctcccaagtagctgggattacaggtgcacaccaccatgcctggctaatttttttttttttttgtatttttagtagagacagggtttagcctgttggccaggatggtctcaaactcctggcctcaagtgatctgcccaccttggcctcccaaagttcctccaattacaggcatgggccaccgcacctggccaaatttttaggcaattttttttaaag

SEQ ID NO: 369121 - DNA, 576 bp, Homo sapiens
caatcaaatggagaacaagattgtcacagggtagacgtgtcggtggattcactatggtgaatccatagaagaaattagaagaattagaagaaaattgctcttgaaatctcaggaggacaatatataaaatatatttatatgtataatacagatagaaaaacaacagggaattaatcataggtttaagttttatactcatttgtaaggcaatgaacttcagaggtgttttggctaaactccctgaatatgactaccttaagttggataattttgcaatctacccttctaaatatttcaaactgtcttttaaaaaaattgcagttatttttgccttaattatctagaaaactgcttcaatctccacttcactttgtataattaatttttagatgtgggttaattattccatacaaaccaacaatattccaaccattcaatttgkgttgaacttgggagtatagggtttttgagaattggtgatttttgtgcctgtgtgatgccaataaagggggtagaagattcagtttctagcctctcctaaggaaaaaaaggcttaattttatctggggtagatag

SEQ ID NO: 369122 - DNA, 369 bp, Homo sapiens
tgataaatggcagctctcctgataatcatgactttggacacaaaagcaaaccaattctatcgtggctacaygctgccccagaacctgtcctctgaaagccctgttgctctaggatgagagaaagttgctagtcactctcagaatacaaaaactctgagggcagactcaatctacctggtttgttgactgacaagtgctttgtccagcagtcagtgggagggctttcaattatatattcttcgtgaagggcactctaattttacttaatgtgaaactgcaacgaaatagagatactttcatggatatactccccaagaacaaggcttttcttaaccaagctgtcctggcagctgaggaaggagtatggga

SEQ ID NO: 369123 - DNA, 576 bp, Homo sapiens
cattaccagtttagacgtttcattaaactcaaaaccagtgtggtgttggcccaagaattgatatagcaataaaactaattagattattctggaatagacggtatgctatgaataagaacttaatatacactgaagcattgcttgtccagtgaaaagggatgagttattcaacacatcctctgcccaacatcattgtctttctctcggactgccgcagcctccccagtggcctcctgctcacacttgaccaccaccctgccctgctccttcacacacccacgcgcgcrcacacacacacacacacacacacacactccatgttctggggaaagaggacctttaacatttaggacactgaacaacactttcacacatactgtttcctctctctaaattcatgttgccattttccttcattctcagctagaaggttgtttccttccagaagccttcccttatcccccaggtccagatcaggtacttcttcccacctgtatttcctcttgcatagcttgtagtatactattttataatgacctggttttgtttgtctatcccctcattaaattgtaatct

SEQ ID NO: 369124 - DNA, 621 bp, Homo sapiens
acaaacagaattgtgctgtcagactaattatgcatgataactctaagatggattaaaatgatttaatttataagacagttaattgccatgcagtattgaattaaaccatctacattttctggaaatacagctgcgtgcttaatagtgggtcataaagttaaggcctacaaggggaaagatatatgataaatattggaaagatattgaaagayatatgataaatatttgactgacagtagtgcatgaaaaccataaaatgggaccataggaggtaagaataggaaaaaaaaatcttatttcacatgccttagaggagacaggacaaagtcggagctgaaagagacattttctccccacaataatcaatgacaaagcatctgaaattttagttttctagagtgaattatatggtgttttggcggggagcagctgcattccctccaggaacaagctactgatagttgctaatagtaggcatataaaacatctttgttggatggatgaaggaatgaataaaatgatttgataaagggcaaaaatcagaattgaggggaattatagggtttcaccacgaggcaatatctctgaggctatggtaaacaatattgctatttaccaata

SEQ ID NO: 369125 - DNA, 621 bp, Homo sapiens
acaaacagaattgtgctgtcagactaattatgcatgataactctaagatggattaaaatgatttaatttataagacagttaattgccatgcagtattgaattaaaccatctacattttctggaaatacagctgcgtgcttaatagtgggtcataaagttaaggcctacaaggggaaagatatatgataaatattggaaagatattgaaagacatatgataaatatttgactgacagtagtgcatgaaaaccataaaatgggaccataggaggtaagaataggaaaaaaaaatcttatttcacatgccttagaggagacaggacaaagtcggagctgaaagagacattttctccccacaataatcaatgacaaagcatctgaaattttagttttctagagtgaattatatggtgttttggcggggagcagctgcattccctccaggaacaagctactgatwgttgctaatagtaggcatataaaacatctttgttggatggatgaaggaatgaataaaatgatttgataaagggcaaaaatcagaattgaggggaattatagggtttcaccacgaggcaatatctctgaggctatggtaaacaatattgctatttaccaata

SEQ ID NO: 369126 - DNA, 592 bp, Homo sapiens
tccaacccatgcaatccttttctgttgagaaacttctgaggcctgtgatgacctgagacaaatgcagagaggaacttatacctccagcctcctgmaagtgggtgtacatgccaacactgggggcctaagtgaaccccaacattcccaagttcctgcagaagactgaacccatgcaggcttagatcctaggactcttaaacctgatacttaactctgtctagattatttgtaaactcactgctgaaagtacatgcccaccaatacccagatgtgtgcatcttgtgtgatttcatctgttcttttatacttttctctgaaaatactgctgttcatccctaaatagccacattaaatatacacttgagtttagaaaggaagctccagggccactaaagagtcactgctactactactgggggatcagcaatagtctgtaggctccggcttcacacagtcatagcatcttgcgtgtgagataactttaaaagggtatttagcccatattaatatatatggtatatttttgtaaaggctggaggacaggagagggggacatttttatgaatgctcttttatatctttgaattttaaa

SEQ ID NO: 369127 - DNA, 615 bp, Homo sapiens
aagtcatagtcctgccctcaggtagcttacagcatagtggtcttgaccaagaagtctatgtttgacacaaggtgataaatgaaggtggtagggtaatgtcatgagtgtagtaagtacattctagaattcccctttaggtgacaggttttgccttccctcatcctcttcccaagtcttagcaagcctctagctccactgactgatgtttaactccacgtatccttctggacatccaacccatgcaatccttttctgttgagaaacttctgaggcctgtgatgacctgagacaaatgcagagaggaacttatacctccagcctcctgaaagtgggtgtacatgccaacactgggggcctaagtgaaccccaacattcccaagttcctgcagaagactgaacccrtgcaggcttagatcctaggactcttaaacctgatacttaactctgtctagattatttgtaaactcactgctgaaagtacatgcccaccaatacccagatgtgtgcatcttgtgtgatttcatctgttcttttatacttttctctgaaaatactgctgttcatccctaaatagccacattaaatatacacttgagtttagaaaggaagctccag

SEQ ID NO: 369128 - DNA, 592 bp, Homo sapiens
tccaacccatgcaatccttttctgttgagaaacttctgaggcctgtgatgacctgagacaaatgcagagaggaacttatacctccagcctcctgaaagtgggtgtacatgccaacactgggggcctaagtgaaccccaacattcccaagttcctgcagaagactgaacccatgcaggcttagatcctaggactcttaaacctgatacttaactctgtctagattatttgtaaactcactgctgaaagtacatgcccaccaatacccagatgtgtgcatcttgtgtgatttcatctgttcttytatacttttctctgaaaatactgctgttcatccctaaatagccacattaaatatacacttgagtttagaaaggaagctccagggccactaaagagtcactgctactactactgggggatcagcaatagtctgtaggctccggcttcacacagtcatagcatcttgcgtgtgagataactttaaaagggtatttagcccatattaatatatatggtatatttttgtaaaggctggaggacaggagagggggacatttttatgaatgctcttttatatctttgaattttaaa

SEQ ID NO: 369129 - DNA, 595 bp, Homo sapiens
tatctccagctcctataatgggtccttggaacaaagcagaacctccataaacattagttgagtgaataaagaaattctgatgcccatgatagttgactaacaggaggcctctgtccatcgttctcccctgcgatcttttttcttattttctcctaatcccacaatctcagcaccccagaaaacaaaatgctacatcaccttctgtcccccagcctcttccatcaaatctaatacaaaaacctggtttctttttgttattratacaaccttctgaggatcggtgtatcagacttggctggacctggataactgattccagaatcattctcaaaatcacagattcttccacatttaggatgacttggaattggctttttccaaatccaaatttatgagtaccccagcctactctgatactaagtagcttctgcaaccaaaatgatttccagggtctgagagggtgttacacagcctagttatttcttggctaatttaccttggtaaagcctacccaatgacagtccctggagactactgctgtaattatatttttaataagggtgtgaacaggaacagagttaattggctttaaaat

SEQ ID NO: 369130 - DNA, 595 bp, Homo sapiens
tatctccagctcctataatgggtccttggaacaaagcagaacctccataaacattagttgagtgaataaagaaattctgatgcccatgatagttgactaacaggaggcctctgtccatcgttctcccctgcgatcttttttcttattttctcctaatcccacaatctcagcaccccagaaaacaaaatgctacatcaccttctgtcccccagcctcttccatcaaatctaatacaaaaacctggtttctttttgttattaatacaaccttctgaggatcggtgtatcagayttggctggacctggataactgattccagaatcattctcaaaatcacagattcttccacatttaggatgacttggaattggctttttccaaatccaaatttatgagtaccccagcctactctgatactaagtagcttctgcaaccaaaatgatttccagggtctgagagggtgttacacagcctagttatttcttggctaatttaccttggtaaagcctacccaatgacagtccctggagactactgctgtaattatatttttaataagggtgtgaacaggaacagagttaattggctttaaaat

SEQ ID NO: 369131 - DNA, 595 bp, Homo sapiens
tatctccagctcctataatgggtccttggaacaaagcagaacctccataaacattagttgagtgaataaagaaattctgatgcccatgatagttgactaacaggaggcctctgtccatcgttctcccctgcgatcttttttcttattttctcctaatcccacaatctcagcaccccagaaaacaaaatgctacatcaccttctgtcccccagcctcttccatcaaatctaatacaaaaacctggtttctttttgttattaatacaaccttctgaggatcggtgtatcagacttggctggacctggataactgattccagaatcattctcraaatcacagattcttccacatttaggatgacttggaattggctttttccaaatccaaatttatgagtaccccagcctactctgatactaagtagcttctgcaaccaaaatgatttccagggtctgagagggtgttacacagcctagttatttcttggctaatttaccttggtaaagcctacccaatgacagtccctggagactactgctgtaattatatttttaataagggtgtgaacaggaacagagttaattggctttaaaat

SEQ ID NO: 369132 - DNA, 595 bp, Homo sapiens
tatctccagctcctataatgggtccttggaacaaagcagaacctccataaacattagttgagtgaataaagaaattctgatgcccatgatagttgactaacaggaggcctctgtccatcgttctcccctgcgatcttttttcttattttctcctaatcccacaatctcagcaccccagaaaacaaaatgctacatcaccttctgtcccccagcctcttccatcaaatctaatacaaaaacctggtttctttttgttattaatacaaccttctgaggatcggtgtatcagacttggctggacctggataactgattccagaatcattctcaaaatcacagattcttccacatttaggatgacttggaattggctttttccaaatccaaatttatgagtaccccagcctactctgatactaagtagcttctgcaaccaaaatgatttccagggtctgagagggtgttacacagcctagttatttcttggctaatttaccttggtaargcctacccaatgacagtccctggagactactgctgtaattatatttttaataagggtgtgaacaggaacagagttaattggctttaaaat

SEQ ID NO: 369133 - DNA, 458 bp, Homo sapiens
ctttaaaagattacttctttcattttatgtcccatgattatgatataaaaatcttggtttttgctcagtgattctcaactctgacttcacattagaatattctgggaaattgagacagaaacaaaaacaaaacaaaatcaatcagaaacaccactgagaccagtccccagtcttaaactaattaaatggaagctctggagtggggctgaggcatttgtaatttttaaaagcttctcaggtgattctgatgtaaagctcagatctggagccactggattaagccaactgttcttttccacatcacscacccccgaacccatgtacatttccactgccacaccactgtgcattttttcttatgtgaggtggctctctccttctctccttgtgtctttaggcttccagccctcaatgcccattttctactttgtctttcttaatataccttagaggttatg

SEQ ID NO: 369134 - DNA, 604 bp, Homo sapiens
tttaaatgataactcatactctgcaatcttgctatgagaattaattgaggcaatgtgtgaaagtgcttagcacatcttaaaggctcagtaaatagtaggcatgaatattgctatctttgcatgcaggaatacctcaccaaagtatactgatagatctttggctactctgtggatatccaatttccttttaagtttccgatgtttccttctttcattgctacatcatctgaccacttgcaatggaggcaccaggaccccatggagagagagtacatgctgagttggctacatctgtgccaaactgtgaaagatgacaatggagatatttctctctacagtttctgaagatggacccagccacaacacttctttccatgcctggctgtttttagctgcaggcacagcactagctgttttgtactcaagattatgggtcaaaagagaactgagagacaggtcaagtatccacgccggtctggacatactttayttgccggcaatacatagtgctctccttgacactgcacaattcgaacagccagtctgactctgtattctgaggccaccactcctttttgtgcataactagaccagaactaatttt

SEQ ID NO: 369135 - DNA, 507 bp, Homo sapiens
gacaacatggtggacaactgtaattccagctacttgggaggctgaggtaggagaatcacttgaacctgggaggcagaggtcgcagtgagccaagatggcaccactgcattccagcctgagcaacagagcaagacgttgtcccaggaaaaaaaaaaaaaaaaaaggaaagacaaaaaaggcagaagaattcacagggtttagtgattaaatatggtttcaagtctgattgactcagagaattgaaagaatttaagaaaaatttaaaggaggaagaaaattagaagtcmaaaaggaagagatggttttggagaggggacatttttactttggggaaagcatccaacatataatggaggtctctttgggaagagacaggcttcacctatgtctcttggagggggacatgggtggagctgctagcatggaggtatctaactaaaatcatggacttcagtgaatcttctagagactgaacataatgaaccataaaaccacaagaaatgcccc

SEQ ID NO: 369136 - DNA, 595 bp, Homo sapiens
ggccttaaaaaaagaagaaaattctgtcatttgtgacaacatggattaacccagataacattatgttaagtgaaataaaacaagcagaaataaaacattcagtatttttctttctagaaaaatacttatatttggaatctaaaaatgttgaagtctaataagtaaagagtaaaatggttaccaagggccatgggggcagggtggggattgttgaagagatgttggtcaaaggttacaaaacttcagttacatagaaggaataagttcagagatctatcatacmaaatggtgacttacttaatacccatatattatattctttttcttttttttttttttgagatggagtctcgctctgtcactcaggctggagtgcattggcacagtcttggctcactgcaacctctgcctcccagattcaagtgattctcttgcctcagcctcccaagtagctgggattacaggtgagcgccaacatgcctggctaatttttgaatttttagtagagactgggtttcactatgttggccaggctgctctagaacaatgtattatattcttaaaaactcctaagagagtagattttaagtattct

SEQ ID NO: 369137 - DNA, 602 bp, Homo sapiens
aagccatcacacctggccaaaaatttttttagtaataaagaaataattaaaacagaggcataaggcattgtgtactccatccaagtgccaaggaggtttctttcaccactacaacttgaaaagtactactctaaagcacacaaagtttgcaagatagcagacctagaataggtcaataatgtcacagtcaaaaagatgaaaaaagaagcaggaaaatgttatggtttctcaatctagttgtcaaatgtttactgagcacctaatgtgagcaaggctctcgtctaagcctcaggaatatagcagtgaacagaacagacaaatctcctgctctcttggggcttacactgtttattcrtgtgaaaacatgaaaatgcccttcaggattttcagtgaaagggctgagcagaaaagatgcttgttgacatcactagaaaaagacctacccttattctctttcaacataagaagaagaagagggccaggcatggtggctcacatctgtaatcccagcaatttgggaggccaagataggtggatcacctgaggtcaggagttcgagatcagcctgggcaacatggtgaaaccccgtctgctaaaaatac

SEQ ID NO: 369138 - DNA, 518 bp, Homo sapiens
ccccctggcagttgcatagaacacagtaccctctgcagttagcatggaacacatgattgctgctgtcgagagatttagaagttaaatggctatttttaccagggactgctttgtcccttagcactagggtgagttgaaggagcttgctctgtgtgcttcaggttttcctgaaacaagtgttacaaaaggctgggtaactgggagtagtcctgctgagtggatacgatcattctcattcgttttggccacctacttgctgtgtgaccttgggcaagttactggccacatctctaaaattagcatgataatagcaggtaaactgatactaagattatctgtttattgttactgtcagaattaaatgagattaagcacccaaagtgattactaagcattcattaaagtttgtattacttttcagatacaccwttcttactcatttattttttggattaagcatagagccagttgcttgagatggagaatatcttggtgggtaaacccagtagcctggcact

SEQ ID NO: 369139 - DNA, 634 bp, Homo sapiens
atagcaaatattttaacaataatacaacccataggactgatcactgtaatggagatgagaacaatagaaactttaaaaatgttcttcctgtattcttatcaactcgttaatgtttcctaaaataatatatactttattggatatgagtctttattcattctgatcatttctcttctttatagtcccttcccagttcttttttcaaagatctaccaatttctcagagttttaatcacattcccatgctgccttagacacttccttgatgtactcaacttaagtttgatccatctgttctttgaacaagtgaatattgattttgtagcactaaattttgcaccacaaaaattttgcaagtgtgtcttcctgtattttctcctaagttaaacatacgataacgtacttgacaaaagtggagccttgatgtatttttctttactatatagaagaaactttttcagagtttcatggttacartactgctgctgccactacagctgggctctccaaaggcattttctgttcaggtgataatgtgaacaaacacatcatttgttaaagtgggaattgcttttgattttgtattcacctctcctagtgtgtacttggtggatatagaaatccataccagccc

SEQ ID NO: 369140 - DNA, 560 bp, Homo sapiens
tgcagtactaaggtagcgtttattgacaggagaagacatgtacaactgtgattgcattttgagagtactggatcaaagtgatggaatgtaagatcagaaaaacaagaattcattgacatggggttcactctccgactttggtcttaacatcttggcaaagaacctaaaaaatgaggaaaactctctgtaagtgttattcttagaaacctggagaaagtgatggctaatactaagcaaaatggaaattcttgagtcgctctggaagaaaacagtgaaaggaataaagaggctgaagcacttgggaacgtggaatggatttattatgtgaggcctgaagacctaccatatggttatgctccacaggaagaactagagatcaaggccatcaggatgtgccaataagacggagacaggatcactaataagcttgggggtgcctctcctctgtaggtcagggttgatggtagacaaggttttctcagatttgagctttgtaatacctatgagataatgacrccccaaaatattagaggccaggtataaaagttgagcaccagaaa

SEQ ID NO: 369141 - DNA, 566 bp, Homo sapiens
ttgtccatccccaccaaaactggggggacagaaaggtagatatagagaatcacattttattagagcaaaagtccagaaagagaaaccacagtcagagccagaccargataggagaaaaagaaagaaaaaagaaaaagaaaagaactgtaattaatgaattgctggaagttccgtatatgctgtaaaccaaaaataaattttcaagtgctcctctcagccaaggcattccaaagttaacctgaaaaactagttcaggccatgatgggaagggatagctggacatgcctcattatactctcctcccttttggaattactgatagaacaggctctttaagtctgataagaaacatttacagtctattctctgtgaagcctgctaagtggaggcttcatctgcatgataaaaccttgcttggtctctacaatcccttattgtaatccagacatttctttctattggtaataactcttccaagcaattgctaatcataaaatatttaaatctacctgtgacatgaaagcccctgcttccagtcagcctgcctttctggaccaaaccagaaa

SEQ ID NO: 369142 - DNA, 593 bp, Homo sapiens
ttttttttcacaatgtggggctctaacagaagccgtaattcttacagaatagatggcttccaagaggtagggagcagaaacaggcacagcaccwcttctgcttattctattgtcagagcagtcacatggccttcccggattcaagatagtggagaaatattctccagctctttatggggtggagggagagcgacaaggtcacattacagaattgtggctatctttggaaaacacaatctgctacacaacataaagacattttgaaagaatggacttactagaacaaagaaatactgtagttggatagtaaaactcaccatgaaaataaataatatacaaataactaaatgtctgatacagatcaaggtgctccttaacaaagacccagatttattctgaaagttccttagactgaagaataaaacaaatgcttgagggcacaaggatagagtttagtccttgcagcacttgatctggcttagataggtttgggggagtctgggcacaggggagttcagcctacaacatcatttaggtagggctccttagatctaaaagcttgattttacttttagataaacgtgaggcttgaa

SEQ ID NO: 369143 - DNA, 565 bp, Homo sapiens
ccagaccagaagagatgaggtacatagaagaacaagtaaatcactgtagatgactgaataaaggaacaaagaaatggaggaaattcaaggtcgttgtgaagatttcaaatctgggttgatgttacaagtaaaagaaagagggaaatcagacaagatkaaatggagaaaagctgtctgttttagagaagttgagttgagaagtaaaggtaatcaatagaatgctttagatatggttcttaaagcacagcaatatgtcagtttgaaaataagtgttggagaccaatggataattttattttatttttctcaagctatgtttatttcagaatgtttaaaaatctttcctggcttatttaactatttacagaagtgtatattacaaattattcattcatcagttgtttctactttggggtcatttctactttttaggctaacgtgaataacactgctattgaaatttatgttgagggttttttgaattttaatttttttagttaaaaaagtattttgggggaccaggtgtggtggctcatgcctgtaatcccagcactttgggaggcca

SEQ ID NO: 369144 - DNA, 566 bp, Homo sapiens
gggactttggggaaagggtgggagggggtgaaggataaaaggctatacattgggtagcgtgtacactgyttgggtgatgggagcaccaaaatctcagaaatcaccactaaataaattattcatgtaaccaaacatcacctgttccccaaaaacctattgaaataaaatgttttttaaattaaaaaaaatgttgttgtcactgtataaggacttcactaatgtacttagcattcttgatatgataaaatcctatcatctatgcttatttaaaaaaagagaaaaatatatactttttatgataaatatgattaacaaatatgtaatattttagtcccatttctacatttagtttcccaaggtttataagcataaataaaatacattaggaataactaaagaagtatatacatgtttatattagattttaattttatatatattttatatacatgtagagagcatatatgcatatatttgtgtgtgtgtgtgtgtgtgtgagatatgcactcacaattttaggaaaattcttctacatttttcattcacgtatgtcttttacatgtgtc

SEQ ID NO: 369145 - DNA, 561 bp, Homo sapiens
cctagctttccacaaaagtgtccttattagctacttttttccttacctgacttcttacacagaagtcgtcctcatatgtggaaaccccatcagaaaagaaaattcatttggcattataatttttgcctaggaagttgaaaaacttttacatattatacagactcatttccctaatttggcccaaactttccttttcagaaaggaaagtaagatcgtacctttgtgtaaccacagtgtctaataaagtgtgttccctaaacaagagaattctcaagagaatactgcttttgttgaagcagtgttttgcttccttacrctagaatctgtcagtaaagattctttcaaatttttaaaagattaaatcacaatattaccataaattgaacgttaaaaggcctttgtaattaaaacaaataaaaatagtattgtaaattctcaccagaatatctaccttaaataaaggtaattagaaatatatagttgacttctcattttccttcagaaaaatgtttaccaaatggacatattgacctaaaatgcattttctctgtctgcttcaag

SEQ ID NO: 369146 - DNA, 634 bp, Homo sapiens
atagcaaatattttaacaataatacaacccataggactgatcactgtaatggagatgagaacaatagaaactttaaaaatgttcttcctgtattcttatcaactcgttaatgtttcctaaaataatatatactttattggatatgagtctttattcattctgatcatttctcttctttatagtcccttcccagttcttttttcaaagatctaccmatttctcagagttttaatcacattcccatgctgccttagacacttccttgatgtactcaacttaagtttgatccatctgttctttgaacaagtgaatattgattttgtagcactaaattttgcaccacaaaaattttgcaagtgtgtcttcctgtattttctcctaagttaaacatacgataacgtacttgacaaaagtggagccttgatgtatttttctttactatatagaagaaactttttcagagtttcatggttacaatactgctgctgccactacagctgggctctccaaaggcattttctgttcaggtgataatgtgaacaaacacatcatttgttaaagtgggaattgcttttgattttgtattcacctctcctagtgtgtacttggtggatatagaaatccataccagccc

SEQ ID NO: 369147 - DNA, 523 bp, Homo sapiens
acatcctgaaaatgcaaccgagggtatgtaacaataagagttctaataagatgagaagtttagtgtgctgttcacatttgccccctttgctacttaaatccagaattcttcagaccagtgaatcagaacaaggaaacaaactgagaagtaaacagatgcctgtcagaactgtcatgttgttttcatgagtatgatcttgttagaaagtttgaatgaaatacacrgaaaaaaatgataaatctgacaaatcagtcaattcacaaattcaagaatgtacatgttgattatatagccacttttgcagttttaatatatctcaagattttagaaatcatgttttttaaacagaaaaaaaatccccaatgattacttaatgattacttataaacagtcttttagtaacatacatttaagcatcactattcctttgggccaatgcaaggctatagtaagaatctgagatttgaatgtcactgatacttgtttttattttttgtatcatatctaccatttagtaaccaaa

SEQ ID NO: 369148 - DNA, 523 bp, Homo sapiens
attttcatacctgtttttatttgctacatcatgtagatctcagttgaagcatatctttttctcaaaacaagccattcagaacacaaatcttttattttttttaatatgcatcctttcagagaatcattctgtttttctttaccacttgtctacattgatcccaggccattggtgtcaggtttgtgagaattgtataaatatatccataaatatcgggagtgcaagcactgttctacmgttgactggagaaacagagattgtatttctttagttcactgttgacaggctcaggaaagggctcattgagccatagaagttgacatttggcacaattcattccacctccagagtagcgaagcttcaggaaaccatcttccattctttctaatgtttctggtcagtcatcatatggcttgccacttgtcttggtcctgaaattaattaagaaataataacggaaaggggaaagtaggaaataggtaagatgaataatgattaaattcaatgcaattattatgaattg

SEQ ID NO: 369149 - DNA, 662 bp, Homo sapiens
ttattttcttttacatgtatgctctaacaatactcaaaaggaggacctcccacaagtaattattttccctttgccattcaaacctgccttgagaaatttcarggactcccttatgaagaaagcttttaagaaccatagaaatcacattgcttttgaaagtgcgagcgtgtgtggtgtgctgtgctggctgaagcagcaggcttcagactgctttatctcttatcagtggtttggctttgtgcatgagaaattcagaggcaactgtataattttaaattccgattaccacaaagaaagagaggcatctgacatcccaatgccgtggctttgactattttaatggaaatatgttggaactaggggaaccttccaccacggagatagtgatgaaagaccacaagaaagacattttatctttgagataaaaggcctgttttcgaaggttgtttcttatattataactttttcccaacctgctactagggcactatgcaaatgtatcattccaggagctgtttccttatccttttcatgcctaagatttcttgggacagggggaagagggagaactggtcttgtttaatgaaatttttgacctttcatagagccttgaaaaatcagtatcaggtgctggaatggatctatttacctttttggtccaa

SEQ ID NO: 369150 - DNA, 502 bp, Homo sapiens
gacccaacttttactgtccaaaagcctttcatgacattagtaatcccactgtaattgagataaacaatcagagtgagatgacaagacagtgatgtcttgaattaactgataataagtttatgctatctagaagaatgggtgatctacatgaattttttttaagtccttaaaaataataatccttatgggttggaatttgtacctgctattgatacayataatttgaaattatatatccagaaggtagataatatgctaaacttctctatccttcatagagatgagcaagaaaatagtaagggtttaaatttatctttcaagtgacttttaccttagaatttcttacaaaattgaatatgattataccaggtggttgattgaagtattttagtaaacatatttgaactcaccatgaatgaaaacacgaaactacaaaatagtagcgaaggacaagatgtaagtcacatcactactaaaggactggccaagacacaaagtcaaa

SEQ ID NO: 369151 - DNA, 486 bp, Homo sapiens
ttttctactgcagcaagtctttctcttkgtgactaggatgatggcaccttattttcagccatatgacccaaaggcaaaggcccttttcctgcagctccaagctgaaaaatcccatggaaagactctagttagccagccttggcataactgtctgcccctgtattaatcatggtggccaggagaatgggtactgacagtagcaaggctttgtacccatgcacaagtctatggctggcagcttttccagagccacagagactagggaagagatgattcccaagtcagtaatgctggatagaccaggaacagttgatgttcactttgtgattattatagtttcattttgcacatgaggaaacagactcaagatattgaccctccctatcacaaacaccctgattgaaactgacttaaaattcatttcttaacttccatatgatgtcttcattctcttattaattttaaatgaagtgtctttgcactgaa

SEQ ID NO: 369152 - DNA, 585 bp, Homo sapiens
atatctgttcctatccatattctgaattctatttctgtaattccagccagttcatcctggttaagaactcttgttggtgaactggtgcagttgtttggaggacaaggttgtcctcaatcttgtttcaatcacaaacagcatctagaattactaaactcatacaacactttggtcatttgagtaactggagtttttgcgttggttccttctcatctctgcatgtgggtgttcctttaactgcagtgtatgttaagtacagccaatagacttcttttctggatgttttcattgggccatggcttcatgcagggtctttatttgtagctgacttcttgtctctggtttcaggagggtatgttagtgaggtatttttggtgttgaagctttaggrtgtgatccagtaggtggaacttaggcttattggttagttggtaaactcttacttggttatgtgtctcccttatgtttcctcatggttacaactgtgttccttcttaatgctctgagggtgtgggtttctctccccattgagtgctggctgtagatcatggcttggcattcttgggctttccactacagctctgg

SEQ ID NO: 369153 - DNA, 538 bp, Homo sapiens
aaattcctcaaatctgaaacaactgaatttaataccaacttttggatggaacgctatcaaacttaaacttaaattaatttcttttatcaaatataagtatcttattgaaatatcagttttcaattttttcaaaaattcaaaatttcaaatataaatgtaaaatttatcaaatataaataatgttctttcaaaagacrtaataacattcatcatgggaatgttgaatataacaggaaatttattcatttcaatttaaataatactatttacagactcactcctacatttaaatcaatattttctgctgtagttcttacattttgtagagaataaatgctgcaaagccaacgtaaaattttcgaatcacagtatacattcatttattcatttattcattcatttaaaaaatggttgctgagtgtttaagagtctggacaatcagggaagatgttatgggttgaattgtgtcccctgaaacctaacctccagtatcttaacatgtgatcttatttggaatagggttgttgcagatttaatt

SEQ ID NO: 369154 - DNA, 492 bp, Homo sapiens
actgtaagaatgagtatggagaatgtgaaggaaagaactgagacagaactctgagaaatatcaacttttaagagaggtagagaacagaaggagggtagaccagcaaaagagactgagacagaacaatagtggggcaaggaagaaaaccaaggagcatatggattaggaactaggagaggaragttaaagtggagagagagaatcaaatgccgccaagaggtgaagtaaattaagaacctgtatgtataagtggaggagaatagaaagcagagtactatggttaagaaataagtaaacaatgagcaagtggagatatcaaatatagagaatttatttaagaagtttggctgggtaggataaactatggcatatacatataatggggtatgttacagaaatggaaaagaacagaatactgatacatacagcacagcatagatgaatttcccaaatatgtgagcaaagagagatgcaaaaaagttcacaatgtat

SEQ ID NO: 369155 - DNA, 425 bp, Homo sapiens
taagggtaatatatgactgtactctacatgggaaaagtggaaaacatagagtaaattagaatccgtttgttcttgccccaagctgcctatcttagagcattaaattacaatgaattaaagatctacttagttccaagcaccattcattcatttagcaaatatttactgaacgcctactatatggtgagctctgttcaaggggctggagatagaaaaatccaagcaaagtccctgcccttaaaaagtctagtgggaagaaacaggcaattaaaaaaaatacattagggggtgataagggttatgtaaacaggtagctgccaccaccacagagamtatcagttctggaaatacattattcaagattagtttggctacacataacagaaaagtccaatatagtacagacttatacaatgcagaattta

SEQ ID NO: 369156 - DNA, 573 bp, Homo sapiens
ttcttgaggccttctgcaggatcgtaagtcaaaaagccttctcgatttgttcttttcatttcttcgttttcttggtaactcgccgcaggcacrtaaaaaatgcgattctgttagctgctgtgaaggtttcctacaatgcataaactgcagcttctttaattgccttgaaattatttatgggtgtgttttcgaaaggaaccgggggtattgtgcacttctgcaggaagcacctccaggagattccagacctgagtagcaacgttgccaccagcttcacgtggggatgggattccagcaagacttctgaactgctgtcaggcatgggggtctccgccctggagaaagaggagcccgacagtgagaacatcccccaggaactgctctcaaacctgggccacccggagagccccccacggaaacggctgaagagcaaagggagtgacaaagactttgtgattgtccgcaggcctaagctaaatcgagagaactttccaggtaaggacatgagggtaaaaatgtcagttatgcaaagggtggatttagctatgttgttgggaaacctttgttcagaga

SEQ ID NO: 369157 - DNA, 573 bp, Homo sapiens
ttcttgaggccttctgcaggatcgtaagtcaaaaagccttctcgatttgttcttttcatttcttcgttttcttggtaactcgccgcaggcacataaaaaatgcgattctgttagctgctgtgaaggtttcctacaatgcataaactgcagcttctttaattgccttgaaattatttatgggtgtgttttcgaaaggaaccgggggtattgtgcacttctgcaggaagcacctccaggagattccagacytgagtagcaacgttgccaccagcttcacgtggggatgggattccagcaagacttctgaactgctgtcaggcatgggggtctccgccctggagaaagaggagcccgacagtgagaacatcccccaggaactgctctcaaacctgggccacccggagagccccccacggaaacggctgaagagcaaagggagtgacaaagactttgtgattgtccgcaggcctaagctaaatcgagagaactttccaggtaaggacatgagggtaaaaatgtcagttatgcaaagggtggatttagctatgttgttgggaaacctttgttcagaga

SEQ ID NO: 369158 - DNA, 573 bp, Homo sapiens
ttcttgaggccttctgcaggatcgtaagtcaaaaagccttctcgatttgttcttttcatttcttcgttttcttggtaactcgccgcaggcacataaaaaatgcgattctgttagctgctgtgaaggtttcctacaatgcataaactgcagcttctttaattgccttgaaattatttatgggtgtgttttcgaaaggaaccgggggtattgtgcacttctgcaggaagcacctccaggagattccagacctgagtagcaacgttgccaccagcttcacgtggggatgggattccagcaagacttctgaactgctgtcaggcatgggggtctccgccctggagaaagaggagcccgacagtgagaacatcccccaggaactgctctcaaacctgggccacccggagagccccccacggaaacggctgaagagcaaagggagtgacaaagactttgtgattgtccgcaggcytaagctaaatcgagagaactttccaggtaaggacatgagggtaaaaatgtcagttatgcaaagggtggatttagctatgttgttgggaaacctttgttcagaga

SEQ ID NO: 369159 - DNA, 573 bp, Homo sapiens
ttcttgaggccttctgcaggatcgtaagtcaaaaagccttctcgatttgttcttttcatttcttcgttttcttggtaactcgccgcaggcacataaaaaatgcgattctgttagctgctgtgaaggtttcctacaatgcataaactgcagcttctttaattgccttgaaattatttatgggtgtgttttcgaaaggaaccgggggtattgtgcacttctgcaggaagcacctccaggagattccagacctgagtagcaacgttgccaccagcttcacgtggggatgggattccagcaagacttctgaactgctgtcaggcatgggggtctccgccctggagaaagaggagcccgacagtgagaacatcccccaggaactgctctcaaacctgggccacccggagagccccccacggaaacggctgaagagcaaagggagtgacaaagactttgtgattgtccgcaggcctaagmtaaatcgagagaactttccaggtaaggacatgagggtaaaaatgtcagttatgcaaagggtggatttagctatgttgttgggaaacctttgttcagaga

SEQ ID NO: 369160 - DNA, 643 bp, Homo sapiens
cctcacttacacccaggtggagatgactacagtaagtcttaaatcaacttggtagaagtccaaggggttcttggactttaatagggcctttcctaaactacatctgaacagtcaatcaattttgtagaataataagctacaaagaagcrtagctattacccatgctttgtgtgcgtatgcgtgtatgtataagtatacataatacatacacatgcacgtacataatcctctacatgtggactgttaacaatgagatagaactatacttccccatcttctggctggctaatctactgactgagcctggacagagttttacttctgagaaacaaagcaagagttgtctctaacactgggatgagacaaaaccgttctttctccctcagtcttgttatttgagggataatgaacctaaggacatttgcctttgtacactttctcaccagacttaggaggtgtaactcaagtgatcacaccttgctcactggaagcaggagggagaaaggattaatgtcctaacaatcagcctaattagggaattgtctccctaccacagctgaaaggtcctgcaggtaactgactgactgtggcttctggccagcctgtttcattcttacagcgtaaagacttgtgagcaccaagc

SEQ ID NO: 369161 - DNA, 643 bp, Homo sapiens
cctcacttacacccaggtggagatgactacagtaagtcttaaatcaacttggtagaagtccaaggggttcttggactttaatagggcctttcctaaactacatctgaacagtcaatcaattttgtagaataataagctacaaagaagcgtagctattacccatgctttgtgtgygtatgcgtgtatgtataagtatacataatacatacacatgcacgtacataatcctctacatgtggactgttaacaatgagatagaactatacttccccatcttctggctggctaatctactgactgagcctggacagagttttacttctgagaaacaaagcaagagttgtctctaacactgggatgagacaaaaccgttctttctccctcagtcttgttatttgagggataatgaacctaaggacatttgcctttgtacactttctcaccagacttaggaggtgtaactcaagtgatcacaccttgctcactggaagcaggagggagaaaggattaatgtcctaacaatcagcctaattagggaattgtctccctaccacagctgaaaggtcctgcaggtaactgactgactgtggcttctggccagcctgtttcattcttacagcgtaaagacttgtgagcaccaagc

SEQ ID NO: 369162 - DNA, 641 bp, Homo sapiens
tataaattggtaaaaccacattaaaacgattttggtaatatctactaaagttgaagtactcatactcaggaattttactgtatatgtacatatatatatatatatatccacatgtgtatatgtgcacccagagatatgtaaaatattcttcatagtagcattattcataatagcccaatcacaaacaactcattcaacagaatgaattttcctaaaaggatggataaattcactgaataaatggaaatgaatttgttacagctatacaacaacatggataaaactcaccaacataatatggatcaaaagaggcaaaacaggaaaaaataatcgaatataattttatctacatacaattcaaaaggaggcaaaataaaattgtagagttaaaagaggaatgcctagtggtaaaaacatttaaaacatcaaggaagagattaccatacatgtcaggctattgcttacctttgagggggaccaagggattagtgattgcaatgatgcacagaagagccttctggattgctggctacgttctattttttgacttcggtggtggttttacaggggttcrctttgtagtgaattattaagtagtaccttcttttgtatgtgctttgctgtatgtacattttatttca

SEQ ID NO: 369163 - DNA, 539 bp, Homo sapiens
aataagacaagaaaagagaactgaaagacctaaggataaggaaaaaaagaaacaagcttttatttcttatgacatggttatgtatgtgaacaattttaaaactactaattattaaaattgataagagagtggtatctcttaatatggtgtttggraactttggttaagtcagtaaacctgaacctcaaactcattatttgtttaaaaaaagagaaaggggtgtcttatcatacaatactcctcacggttgctgtgaggatcataatcagataatgcccttgcaaatgccaaccataatgctgccccatagcagggactcatttgttaagaaacactgaacatctgcatggttagctcaccctcttccttcaggtctttattgggaagtcatttctcagaggggactttcctgctttatttttttctccttatcactgcctaatatactatatactaatgctcatctctctactcaaatacaagctccacaggggatggtttttgtttgtcttatttgaagaatcacccctgcctggctc

SEQ ID NO: 369164 - DNA, 552 bp, Homo sapiens
caaatccacttatgaaagtagttccaatgcygggagcctgcaaatgtgcctcctacattgcccactgtataaatacttttgtggaaaaacaaggaaaaataatatttatgacctcaagctgcaagttctgggacccagaaggaaggtctaaatcccattgaaatatttaggaagttaaaatcttaatttttaagagactgcttgaatacacatttaagtagtaattttttcaagatccttaatctaatctaacttgaaatattgaaatatgatatcataatagtatctgaaattgataaagatgcttttcctttaaacttgaggccaattttctctttatagaatcccaaggcaggcgaagccagctctgtttggtaagtcaagtttactgagaaaataaatcttttttatttgcatgaaagatgcaagatcacacaacctatttctggataattattctgctgattacaaggctcaaaggcagatgagaaaagacagaaaggtcatgtgcttcctggtaaatcctcctgccatgaagggcagaagattgga

SEQ ID NO: 369165 - DNA, 552 bp, Homo sapiens
caaatccacttatgaaagtagttccaatgctgggagcctrcaaatgtgcctcctacattgcccactgtataaatacttttgtggaaaaacaaggaaaaataatatttatgacctcaagctgcaagttctgggacccagaaggaaggtctaaatcccattgaaatatttaggaagttaaaatcttaatttttaagagactgcttgaatacacatttaagtagtaattttttcaagatccttaatctaatctaacttgaaatattgaaatatgatatcataatagtatctgaaattgataaagatgcttttcctttaaacttgaggccaattttctctttatagaatcccaaggcaggcgaagccagctctgtttggtaagtcaagtttactgagaaaataaatcttttttatttgcatgaaagatgcaagatcacacaacctatttctggataattattctgctgattacaaggctcaaaggcagatgagaaaagacagaaaggtcatgtgcttcctggtaaatcctcctgccatgaagggcagaagattgga

SEQ ID NO: 369166 - DNA, 498 bp, Homo sapiens
gttcctagaacgtgttttcctcctcacttattacctaacacttgtctcaactccagttagctctgtatttcctgtttcacctcaatctgacttccgactttggctaatttattcccagccttcgctaaatatcccacactcccacttcccacgggacacgttaccttcatgctccactgtcctctctggtttcatttcattcctgcagtaatttgttgttatgagcctaatgttcctccttttcatcctaaattaccctaaacttgaggtaggaaatgggtccatgaaacagatatcaaatataagtgttttagtctatgcaggctgctatagcaaaatgccttaaactgggtggcttcyaaacaacagaaactttttcctcaagttcggaaggcttagaagtccgaaatcaagaggctgccagattcagtgttcagtgagggctcatttcctggttcacacatggtgccttcttgcattgttctcacagagcagaag

SEQ ID NO: 369167 - DNA, 574 bp, Homo sapiens
ttaatattttattcatttacttatttatttatttattgttgagacagtgactcactctgtcactcaggctacagtgcagtgtcacaatctctgcccactgcaacctcccacctcctgggttcaagcaattctcccacctcaacctcctgagtagctgggattacaggtgcctgccaccacgcccagctaacttttgtatttttcttagagacggggtttcaccacgtagccaggctggtcttgaactcctgacctcaagtgatctgctcacctcggcctcccaaagtgctgggattacaggcatgaaccactgtgcccagacatagtctttcatttatagtatgatagagaatattttcactgctctaaaaaaatcctctgtgctccgcctattcatcctgccctcccccacccsctggcaaccacagatccttttgccgtctccatggttttgccttttccagagtgtcatgtagtttatctcttcacctattgaatgacacattggttgcttccaagtggtggtaattgtgaataaaagctattttaaatggtggatgggagagaaaggaaa

SEQ ID NO: 369168 - DNA, 550 bp, Homo sapiens
gactcacccaaatcaaaaactagaagcagattccgatgaatttcacaaaattaaacatgatactctatggcttttagattttttagaaataagagctttacagtaactcagtggttgggraaggtttgttttattttggcgtgtgtgtatgtaagcttaaatgccagtgttcttcactttaagaaatacaaattgataaaatcttaatcatttaggaggtacatggttaccagcttcgtggcctttacagaatacatcaccactttgagaaatggagttattatgttaaatatctctaatagttccaaaatgttactgctttgagagtgccatcagatactgaaaactaaagtacattttaatgtaatcaagtgtgtgaaccattgggtgaccacacaccatgaagatggcatattggccagcataggatagcatttgggttctgaattaaagctgaaggatgtcacatggcacccactactgtaaatttatccgtctttatttcagagatttaataatgtaaagaaaaagaatttatgtgtcatcagag

SEQ ID NO: 369169 - DNA, 571 bp, Homo sapiens
cttacataaaatatagaggaaaagaggaaggacaaaaattagtaaatacatgcaagttataacaagctagaaaggaaatatgcaaagctgctagagtccatgcttctgcaatggaaacatagttgataactgtacytccagtccacgtttcctctgttctcaggtagtactacagctactcctgggtgagttagggtggcccaaacttttattttttaagtaacccaaatctttatttttaaagtgatcttgtttttccgtttaggatgctatagtttcccacttatattttacacaggatgtgagcagtaatatgaacccctgaggatcccctaggttctaaacttagtcccttctgcccttactgtgtagcaacaccactaagtcctccagggaattagcatcttcccctgtaacactcattgctttattatgagctgtgatggtgagacagcgtgatggtgaatcaggtattccacataccacagaggattttgctgacagaagcattaaagatcagaaaagcaaatacatatccatattcatatgcaaaatatgtgtatttttcaga

SEQ ID NO: 369170 - DNA, 571 bp, Homo sapiens
cttacataaaatatagaggaaaagaggaaggacaaaaattagtaaatacatgcaagttataacaagctagaaaggaaatatgcaaagctgctagagtccatgcttctgcaatggaaacatagttgataactgtacctccagtccacgtttcctctgttctcaggtagtactacagctactcctgggtgagttagggtggcccaaacttttattttttaagtaacccaaatctttatttttaaagtgatcttgtttttccgtttaggatgctatagtttcccacttatattttacacaggatgtgagcagtaatatgaacccctgaggatcccctaggttctaaacttagtcccttctgcccttactgtgtagcaacaccactaagtcctccagggaattagcatcttcccctgtaacactcattgctttattatgagctgtgatggtgagacagcgtgatggtgaatcaggtattccamataccacagaggattttgctgacagaagcattaaagatcagaaaagcaaatacatatccatattcatatgcaaaatatgtgtatttttcaga

SEQ ID NO: 369171 - DNA, 514 bp, Homo sapiens
actgtaactttggaagggctcacaaaataagaggtcttttttaaaaaaataaattttctattttagaacagttttaggtttacagagaaattataagcatagtatagaaagttcccacatacttgatatccagtttcacctattattaatatcttacattagtataatatcattgttataacgaatggatcattatttatacattgttattaactaaagtttatacacttttcatgtttcctcagtttttatctaatgtcccctttctgtccctggatcccrtcaaagatatcttgttacatctagtagtcatgtctcgttggactcctaatggctgtgatagttttgtagacatcccttgttttggatgaccttgatgatttgatgagtatggggtcagataatctatggaatgtccctcaactggacttgtctgatgttctctcatgattaacctggggttatgaacttccagtaggaaggccatggaggtaatgtgacattttcatcacat

SEQ ID NO: 369172 - DNA, 514 bp, Homo sapiens
actgtaactttggaagggctcacaaaataagaggtcttttttaaaaaaataaattttctattttagaacagttttaggtttacagagaaattataagcatagtatagaaagttcccacatacttgatatccagtttcacctattattaatatcttacattagtataatatcattgttataacgaatggatcattatttatacattgttattaactaaagtttatacacttttcatgtttcctcagtttttatctaatgtcccctttctgtccctggatcccgtcaaagatatcttgytacatctagtagtcatgtctcgttggactcctaatggctgtgatagttttgtagacatcccttgttttggatgaccttgatgatttgatgagtatggggtcagataatctatggaatgtccctcaactggacttgtctgatgttctctcatgattaacctggggttatgaacttccagtaggaaggccatggaggtaatgtgacattttcatcacat

SEQ ID NO: 369173 - DNA, 545 bp, Homo sapiens
tatggttgtgcctggaattaccttttttgaacgggatgcttcaatttgtattatgaataattatgctatctgcatgaactaaatcttttaattgatatacttaatcctttaatggatttttctaggcagcggttaattttaatatttagttaagaaattatcagtcttytgtgggttaactgtttttttttctatctcctggaaacttttataagtttctttctacccctgatattcttcagtttcattatgacgtaactagatacagactttgaaagtttaccctgttgcacatacacccaggaaacacctgtgaagttatgtctctttttacttcagggatattctaagccactatctcttcaaatgttgcctgttcaccattccatctaactccaactccaggtgaatgtcggagcttctcaatttatccttactcttttacgatcatttttatgttttctttgttctaaatttctctgtaattcaggttgagtactctggtgctgtcttttgttacaggtatttagacaagcatgagcagg

SEQ ID NO: 369174 - DNA, 545 bp, Homo sapiens
tatggttgtgcctggaattaccttttttgaacgggatgcttcaatttgtattatgaataattatgctatctgcatgaactaaatcttttaattgatatacttaatcctttaatggatttttctaggcagcggttaattttaatatttagttaagaaattatcagtcttctgtgggttaactgtttttttttctatctcctggaaacttttataagtttctttctacccctgatattcttcagtttcattatgacgtaactagatacagactttgaaagtttaccctgttgcacatacacccaggaaacacctgtgaagttatgtctctttttacttcagggatattctaagccactatctcttcaaatgttgcctgttcaccattccatctaactccaactccaggtgaatgtcggagcttctcaatttatccttactcttttrcgatcatttttatgttttctttgttctaaatttctctgtaattcaggttgagtactctggtgctgtcttttgttacaggtatttagacaagcatgagcagg

SEQ ID NO: 369175 - DNA, 545 bp, Homo sapiens
tatggttgtgcctggaattaccttttttgaacgggatgcttcaatttgtattatgaataattatgctatctgcatgaactaaatcttttaattgatatacttaatcctttaatggatttttctaggcagcggttaattttaatatttagttaagaaattatcagtcttctgtgggttaactgtttttttttctatctcctggaaacttttataagtttctttctacccctgatattcttcagtttcattatgacgtaactagatacagactttgaaagtttaccctgttgcacatacacccaggaaacacctgtgaagttatgtctctttttacttcagggatattctaagccactatctcttcaaatgttgcctgttcaccattccatctaactccaactccaggtgaatgtcggagcttctcaatttatccttactcttttacgatcatttttatrttttctttgttctaaatttctctgtaattcaggttgagtactctggtgctgtcttttgttacaggtatttagacaagcatgagcagg

SEQ ID NO: 369176 - DNA, 545 bp, Homo sapiens
tatggttgtgcctggaattaccttttttgaacgggatgcttcaatttgtattatgaataattatgctatctgcatgaactaaatcttttaattgatatacttaatcctttaatggatttttctaggcagcggttaattttaatatttagttaagaaattatcagtcttctgtgggttaactgtttttttttctatctcctggaaacttttataagtttctttctacccctgatattcttcagtttcattatgacgtaactagatacagactttgaaagtttaccctgttgcacatacacccaggaaacacctgtgaagttatgtctctttttacttcagggatattctaagccactatctcttcaaatgttgcctgttcaccattccatctaactccaactccaggtgaatgtcggagcttctcaatttatccttactcttttacgatcatttttatgttttctttgttctaaatttctctgtaattcaggttgagtactctggtrctgtcttttgttacaggtatttagacaagcatgagcagg

SEQ ID NO: 369177 - DNA, 561 bp, Homo sapiens
tctttgtcttgtagaactaaggagtgtcactttgagtcaactcttttctctttttctccctttgaataagaaatttccaaggtggggagaaatgacacaaaaacaaaggaaaggtactgtatgtgtttaaaaacaaaaacaaaaacaaaactttagacaaattaaattttacaaagttaattgtgcaaagaaccgttggccaatgggcaaccagagagccactccatgtgggggcgggcagcatttatggataggaattggaagtgygtaggagccggcctgattggctacagctcagttcgccttatttgcacgtggtctgattagttggccgcctgtgattgactgaagctcagcttctgtgattggcggagactcagctaagttaggctttcagttagtttacatcccaagttaggttgcagtttaagatgtagggactcatcctacatcctcaggcaaaatttagcttaattttaatatgtttttgagacttgcattggttagatgattacttttgtaaagattgtatgaatgtatatgtatatatgtatatgtaca

SEQ ID NO: 369178 - DNA, 602 bp, Homo sapiens
catatggttgagataatgctgcaaagctacaataaaatatcatgtacaactttataagctaaagaacccagcaaatgttaatgataacagcatctacaggatctgccctattgcctctctgacttcatctgctactcttttcacttctactccagccacactggccgccttgctggtcttccacaccctgggctgcccatgcctcagagcttttgcactggctagtttcrctggctagtatacccacagatgtccacatggccaactcctccacttcttaggggtctctgctcaagtgttacctttccaatgactagcctatttaatgccacaacctgcccactggcattcccaatgcccccggagcctgtactggttatctttccctgcatcgtcaccccatataagctccacaaaggcagagatgtttgtctgttctattcattgatataatccaagttccaaaacaaaaaggaaaaccagcttatattaagctattcttgcattgctatttcaaaaaataccggagacagaataatttataaagaaatgaggtttaatcggctcacagttgtgcaggctgtacaggaagcatggtgctg

SEQ ID NO: 369179 - DNA, 551 bp, Homo sapiens
gatgggactcatggccccaacttacattgcctacagtcctgagcagcagcccatgtaacgtggaggagtatgaactgtctttccttcttcccccaggccacaggggcagagtgctgcacctggctttgagtccagaccagaccygggtgttttctgctgcagctgatgggacggcctctgtatggaattgctactagcacccagcccctctaggtttcagtttccttatttctgagtgaagatgatgatgttggctatgtcttctccatggggtttttatgagtatcaaacaagttgaaatactcttcttgatgtgaatgcctgttctcctgttcttcttttgcagattgctttacttgctctgcttcccagagatccgcttcttttcttctctgctttcttctttctgcccctcttcctccccctcctcttcttcctcccattcttacccctttctagagattcattttcactactttattcagaataacatctatagcaaagatttctacttctttcccgtatgacttttctccccagctccaaacctc

SEQ ID NO: 369180 - DNA, 630 bp, Homo sapiens
atagcttagcagaggggtgagatgctcagaatggtagagtgtttgctgctgactgatttcaaagagagatcatttkcacagcactcagcagtatctcttcatttgtctttttttgggcacatgtttccttctcaatcccaacctttcccacgggagaggtcccccaacctcccttcaccatgaccccaccggtcctcatgcccttttcctctccaggagcttcaaacaagctgatggcactgcctccttagaaccaggtatacttcttttttaaatcaaagagtaataaaatacctaattagtaacgtgcagcagcattatttttattcatctatacatttctaattaaaattatgccattcttaaaaattgcaacataatacactcaagcctttcatttcatatgcaaagtgtttgaaagtctgcagtccctgtgaggtggtaatttaaaaaaggaatggtcagccaacaaaagaaaaaaaaaagtgaagccataagtaattccttttaagtaaatgtataagataacaataatttgaaagaaaagcgattttgaaatataaaaggaaatctagaaaaatgaagcattcagcccttttattgcacggtgtcaccaataatattgtatac

SEQ ID NO: 369181 - DNA, 630 bp, Homo sapiens
atagcttagcagaggggtgagatgctcagaatggtagagtgtttgctgctgactgatttcaaagagagatcattttcacagcactcagcagtatctcttcatttgtctttttttgggcacatgtttccttctcaatcccaacctttcccacgggagaggtcccccaacctcccttcaccatgaccccaccggtcctcatgcccttttcctctccaggagcttcaaacaagctgatggcactgcctccttagaaccaggtatacttcttttttaaatcaaagagtrataaaatacctaattagtaacgtgcagcagcattatttttattcatctatacatttctaattaaaattatgccattcttaaaaattgcaacataatacactcaagcctttcatttcatatgcaaagtgtttgaaagtctgcagtccctgtgaggtggtaatttaaaaaaggaatggtcagccaacaaaagaaaaaaaaaagtgaagccataagtaattccttttaagtaaatgtataagataacaataatttgaaagaaaagcgattttgaaatataaaaggaaatctagaaaaatgaagcattcagcccttttattgcacggtgtcaccaataatattgtatac

SEQ ID NO: 369182 - DNA, 532 bp, Homo sapiens
tggagagcagatgtgttcagctggagcaggaggaggtcttggcctcttcaggcttggcccacctgccatctgacataccatggagacaaagtcacgtgtttgatccaggcaggctttgggtttgaaatatcttggcatagctacaaacaaacaagtatttttttttttttgtaccacacttccctgacccattcccttatatcctcaagtccttctgaaagtacctgctgggcatggagtcattcagcctctaatagtccctgaaagctccagcagaataactgatgaggaactgccaagcccagtcattctgataccatttggcatccagtctttggtcatccccagagcacccacatagctcacgtgctgccaaagtgccagrgggtacgaacctaggaagcagaagcgagagcaaagggaattgaggtgaggaaggaggtgaagtccacatgagagggcattttccagctggtcaacttggagcacaaccgatcgcttaatctcgcaagactgtcatctgagaaaccac

SEQ ID NO: 369183 - DNA, 642 bp, Homo sapiens
cccagtttcacaacataatacagagctacattaatcaatgcagtgtggtggtgacataaggacagacaataggtaagtgtaatagaattgaatgtcaagatataaatctttatatttactattcttggtcaatacatttttggcaatggtcccaaaacattcaatgaggaaagagtagtcttttcaagaaatggcactggggtaactaccatttgaggcatttgaacttgtcccatttctgtccccctgccccagttctgtagtagtctaggaaaacatcaacctcctaaccataataggtgtgaaaaccaacagtgtcacagccactcaaggagcaatgaggaaccacatgcagaaaaacgaagttggactcctacctcaaaccatatacaacacatagtcagaartattcagaaatgtaagagttaaaattataaaactgttagaagaaaatataacagtaaatcatcatgactctagattaggcaatgatttcttgattatgaaaccaaaagcacaagcagcagaggaaaaaaatagataaattgaacttcatcttacttaaaaattttaaacaacactatcaagaaactgaaaatacagcccacagaatgggaaaacaaagcatttgcaaatcatgta

SEQ ID NO: 369184 - DNA, 567 bp, Homo sapiens
aactggctatccacatgcaaaagaataaaactgtatgccaaccttatgccacatataaaaattgactcaaaataaacaaaagagctataactataaaactctttaaaaaaagaaagaaaaaagcataggggaaaatcttcatgaccttgcatttggcaatgatttattgggtataacaccaaggactcaggcaaaaatttaaaagccaaataattttgtctctatcaaaatttttacaattgtacatcaaagaactctatgaacagagtaaaagaaygatccatggagtgggaagaaaatattttcaaattacatattggataatggtaatatccagaatatatatatatattttattttattttattattattatactttaagttttagggtacatgtgcacaatgtgcaggttagttacatatgtatacatgcgccatgctggtgtgctgcacccattaactcgtcatttagcattaggtatatctcctaatgctatccctccctcctcccgccaccccacaacagtccccagaatgtgatgttccccttcctgtgtccatgtgt

SEQ ID NO: 369185 - DNA, 567 bp, Homo sapiens
aactggctatccacatgcaaaagaataaaactgtatgccaaccttatgccacatataaaaattgactcaaaataaacaaaagagctataactataaaactctttaaaaaaagaaagaaaaaagcataggggaaaatcttcatgaccttgcatttggcaatgatttattgggtataacaccaaggactcaggcaaaaatttaaaagccaaataattttgtctctatcaaaatttttacaattgtacatcaaagaactctatgaacagagtaaaagaatgatccatggagtgggaagaaaatattttcaaattacatattggataatggtaatatccagaatatatatatatattttattttattttattattattatactttaagttttagggtacatgtgcacaatgtgcaggttagttacatatgtatacatgcgccatgctrgtgtgctgcacccattaactcgtcatttagcattaggtatatctcctaatgctatccctccctcctcccgccaccccacaacagtccccagaatgtgatgttccccttcctgtgtccatgtgt

SEQ ID NO: 369186 - DNA, 479 bp, Homo sapiens
agcatttttccacttttttctccaaaataggtttatgtacgttatactatatattaaaagcaccctaaaataaacccaaaagttatgtgcaaatttagtagataacctctagtttttttctctgatttctggtcttaataattccttgaactttccttaccagttatccaagtaattttcttcatgacratatgcacagcactagagtagatactggggaaatgttaacacatatccataaaactgttcctacctcctgtaatttgttggatatataaaacatataattctttacatatcataaggcaagaactaactatcaaaaagaatgatttaaacaactatgatacgtcagtgtgaatagcaggaagaattcaaaaggaagttgttatctgaaatgggtattttaaggtttggtagatgatgttagggacagatgcactccatgaagaaaaacatggcaagaataaatacgagga

SEQ ID NO: 369187 - DNA, 571 bp, Homo sapiens
agggattgtatagaattggtgttgtttctcctttggatgtttgtcagaactcagtgaaactatctgatcgaggaggacaattttttctccagatttttttttttttaaacttctagttcaatgtttttaatagttataagatgattcaggttacctatttcttcttcgaaaactttggctgtttgtgccatttggctaagtagttgaatttatatgcacatagctttttaaaaataatgttttcttattaaccttctaatatctgtgaggtctgtgggcatgtccctttttcaattctgctgtttataatacattttgtctttctctggtattttccttgtcagctaaaagtttatcttctactttttttttggagaatcaattcttttttgaagaatcaacttttgktttctttatttttttctatttattttttattcgtattttcttttatttctctttattatttcctgcttctgcttgttttgggtttcttttgctcttttttttctagtttcttaatgtggaagcccagactgttgagttgaggtctttcttcttgtctaatgta

SEQ ID NO: 369188 - DNA, 578 bp, Homo sapiens
ttttaataattgcataaggtgatattttcttaactgggtttgacatttttcaaataaagtcattagagaagatgtttccaacatttgatgggatgttggttatggatgacctctaagatcctctccaactccaaggtttttgaggtgtgcatgtgatcccccaagtttacaaacacaaattttataaatatatatatatatatatatatatatatatacacacatacacatatatgttaagtatatattcatagttctaattacatttatattatatatacatgtaaatacgtatacacaaaaagttctgaaatattcttcagtattataatttattatatatttgttattktctttttttccactataaacatgtgataatttgtaatccaaaaatgttattattttacttacaaagcatatattgtgcaacaaatttttaaaaaggaaataaggaagcaggttgttatttttcaaatctataaaatacctagctttaaaaaaatggattttactaaactgacatatttaatactttaaaatacttgaagaaaggacaggaattagccattgtgaat

SEQ ID NO: 369189 - DNA, 651 bp, Homo sapiens
aaaaacaaaataaaaacaaacaaacaacaacaacaaaaaaacaagaacaaagcttggggtattacactacctgacttcaaaatacactacaaatctatagtaaccacaaaatcatgatactggtataaaaacagacacatataccagtggaatagaatagagaacccagaaataattccatatgtttatagccaactcttttatgacaaggcacaaagaacatatattggggacaagaaagtctcttctataaatggtcctggaaaaaactggatattcctatgcagaataaacttagactcctatccctcatcttacacataatctgacttacaggtggaatccaggctcacaaaagcagatagcagaatggtggttkccaggggatagaggaaggaggaaatggggagttgttggtcagatggtatcaagtaacagttacacaagatgaatacgttctgaagatctgatgtatagcaaaatacatacaatactgtattataatgatatttgctaagagggtagatcttatgtttgtaatacacacatacacacaaagaaagaaaatggtaactgtgaggtggtggatatgttagcttaattgtggtaatcatttcacagtatatagacaaatcaaaacatcaagttgca

SEQ ID NO: 369190 - DNA, 651 bp, Homo sapiens
aaaaacaaaataaaaacaaacaaacaacaacaacaaaaaaacaagaacaaagcttggggtattacactacctgacttcaaaatacactacaaatctatagtaaccacaaaatcatgatactggtataaaaacagacacatataccagtggaatagaatagagaacccagaaataattccatatgtttatagccaactcttttatgacaaggcacaaagaacatatattggggacaagaaagtctcttctataaatggtcctggaaaaaactggatattcctatgcagaataaacttagactcctatccctcatcttacacataatctgacttacaggtggaatccaggctcacaaaagcagatagcagaatggtggtttccagggkatagaggaaggaggaaatggggagttgttggtcagatggtatcaagtaacagttacacaagatgaatacgttctgaagatctgatgtatagcaaaatacatacaatactgtattataatgatatttgctaagagggtagatcttatgtttgtaatacacacatacacacaaagaaagaaaatggtaactgtgaggtggtggatatgttagcttaattgtggtaatcatttcacagtatatagacaaatcaaaacatcaagttgca

SEQ ID NO: 369191 - DNA, 651 bp, Homo sapiens
aaaaacaaaataaaaacaaacaaacaacaacaacaaaaaaacaagaacaaagcttggggtattacactacctgacttcaaaatacactacaaatctatagtaaccacaaaatcatgatactggtataaaaacagacacatataccagtggaatagaatagagaacccagaaataattccatatgtttatagccaactcttttatgacaaggcacaaagaacatatattggggacaagaaagtctcttctataaatggtcctggaaaaaactggatattcctatgcagaataaacttagactcctatccctcatcttacacataatctgacttacaggtggaatccaggctcacaaaagcagatagcagaatggtggtttccaggggatagaggaaggaggaaatggggagttgttggtcagatggtatcaagtaacagttacacaagatgaatacgttctgaagatctgatgtatagcaaaatacatacaatactgtattrtaatgatatttgctaagagggtagatcttatgtttgtaatacacacatacacacaaagaaagaaaatggtaactgtgaggtggtggatatgttagcttaattgtggtaatcatttcacagtatatagacaaatcaaaacatcaagttgca

SEQ ID NO: 369192 - DNA, 613 bp, Homo sapiens
gaaatcaacagaaataaatctttaaaattctcaaatatttggaaattaaacaatatatttctaaataactcccaattcaaagaagtgacaaggaaattatacaatattctgaattgaatgaaggtaaaaatacaacatcaaaattagtggatgcagctaaaacagtgctgatagagaaatttatagcattaaatatttatattgggaaataatagaggcctcaaatgagtaatctaagttcttaccttaagaaattaaaaaagaaattaaatccaaggcaagcaaaaagagggaaataataaagaggaaaaaaaatcaatgaaatggaaaataaaaaaataacagagaaaaatcaatgaaacccaaaacaggtccatgaaaagattttaaaaaaaattgctaacctytagaccctcaatgtccagtagaactttgtataatgatgaaaacattctatatagcagcaccctccaatgtggaagccacttgggactactgatcacttaaaatgtggccagtgtgactgaggaactcaatttttaatgtaattttattgaaattaatttacatttaaatagacacatgtgactagggataactattgaacagtgca

SEQ ID NO: 369193 - DNA, 584 bp, Homo sapiens
gaacccccgtctctactaaaaatacaaaaaattagctgggtgtggtggtgggcaactgtaggcccagctactcaggaagctgaggcaggagaatgttgtgaacccgggaggcggagtttgyagtgagccaagattgggccactgcactccagcctgggtgacacagcgagactctgtctaaatacatatgtgtgtgtgtgtatatatatatatattctttgtttacggcatttatcaattgaattatgttgtgtctagaattttatttccccttcttggattcactgggctttatgaatctgtgagttggtgtcttctaacaatgttggcaaattctcagccaaatctccttaaatatgacatcttcccaattttctctcttttctctttctgggactctaaacataacatagccttcaaactgtattctcattcatttttttcacattttgcatttctgtcactttgtatctatttcagtaagttcttcagctctagattctagttccctaattcacttttcaactgtctattttgttgttaaatccatccactttaaaaaaatcagtgatatttctcataag

SEQ ID NO: 369194 - DNA, 584 bp, Homo sapiens
gaacccccgtctctactaaaaatacaaaaaattagctgggtgtggtggtgggcaactgtaggcccagctactcaggaagctgaggcaggagaatgttgtgaacccgggaggcggagtttgcagtgagccaagattgggccactgcactccagcctgggtgacacagcgagactctgtctaaatacatatgtgtgtgtgtgtatatatatatatattctttgtttacggcatttatcaattgaattatgttgtgtctagaattttatttccccttcttggattcactgggctttatgaatctgtgagttggtgtcttctaacaatgttggcaaattctcagccaaatctccttaaatatgacatcttcccaattttctctcttttctctttctrggactctaaacataacatagccttcaaactgtattctcattcatttttttcacattttgcatttctgtcactttgtatctatttcagtaagttcttcagctctagattctagttccctaattcacttttcaactgtctattttgttgttaaatccatccactttaaaaaaatcagtgatatttctcataag

SEQ ID NO: 369195 - DNA, 584 bp, Homo sapiens
gaacccccgtctctactaaaaatacaaaaaattagctgggtgtggtggtgggcaactgtaggcccagctactcaggaagctgaggcaggagaatgttgtgaacccgggaggcggagtttgcagtgagccaagattgggccactgcactccagcctgggtgacacagcgagactctgtctaaatacatatgtgtgtgtgtgtatatatatatatattctttgtttacggcatttatcaattgaattatgttgtgtctagaattttatttccccttcttggattcactgggctttatgaatctgtgagttggtgtcttctaacaatgttggcaaattctcagccaaatctccttaaatatgacatcttcccaattttctctcttttctctttctgggactctaaacataacatagccttcaaactgtattctcattcatttttttcacattttgcrtttctgtcactttgtatctatttcagtaagttcttcagctctagattctagttccctaattcacttttcaactgtctattttgttgttaaatccatccactttaaaaaaatcagtgatatttctcataag

SEQ ID NO: 369196 - DNA, 584 bp, Homo sapiens
gaacccccgtctctactaaaaatacaaaaaattagctgggtgtggtggtgggcaactgtaggcccagctactcaggaagctgaggcaggagaatgttgtgaacccgggaggcggagtttgcagtgagccaagattgggccactgcactccagcctgggtgacacagcgagactctgtctaaatacatatgtgtgtgtgtgtatatatatatatattctttgtttacggcatttatcaattgaattatgttgtgtctagaattttatttccccttcttggattcactgggctttatgaatctgtgagttggtgtcttctaacaatgttggcaaattctcagccaaatctccttaaatatgacatcttcccaattttctctcttttctctttctgggactctaaacataacatagccttcaaactgtattctcattcatttttttcacattttgcatttctgtcactttgtatctatttcagtaakttcttcagctctagattctagttccctaattcacttttcaactgtctattttgttgttaaatccatccactttaaaaaaatcagtgatatttctcataag

SEQ ID NO: 369197 - DNA, 478 bp, Homo sapiens
attaaatagggagaaattatagttcarcaagtggtactagaacaattggatatccacatggaaaagaaaaaagaatgattgagttcttcatacctgtacaaagattacccaggatcacttcattccccacagaagaattagccccaaatccatctgacacctaaacttaaaagctgaacatagaacacttctagaaacaagcatagaatgaaatctctgtgatctttagtgagacaaagcttgtctttgatctgacaccaaaatcactgcctattaaagaaaaaaatcatagtttggactttaccaaaattgaaaatatttgctcttcaaaagtcaccattaagaaaataaaaatacaggcacacatgagagatactgcaggtttggttttagaaagccacaataaagtgaacatgtcagtaaagcaagtcacatgaatttctggtttcccagtgcttataaaagttacgtttacatg

SEQ ID NO: 369198 - DNA, 478 bp, Homo sapiens
attaaatagggagaaattatagttcagcaagtggtactagaacaattggatatccacatggaaaagaaaaaagaatgattgagttcttcatacctgtacaaagattacccaggatcacttcattccccacagaagaattagccccaaatccatctgacacctaaacttaaaagctgaacatagaacacttctagaaacaagcatagaatgaaatctctgtgatctttagtgagacaaagcttgtctttgatctgacaccaaaatcactgcctattaaagaaaaaaatcatagtttggactttaccaaaattgaaaatatttgctcttcaaaagtcaccattaagaaaataaaaatacaggcacacatgagagatactgcaggtttggttttagaaagccacaataaagtraacatgtcagtaaagcaagtcacatgaatttctggtttcccagtgcttataaaagttacgtttacatg

SEQ ID NO: 369199 - DNA, 478 bp, Homo sapiens
attaaatagggagaaattatagttcagcaagtggtactagaacaattggatatccacatggaaaagaaaaaagaatgattgagttcttcatacctgtacaaagattacccaggatcacttcattccccacagaagaattagccccaaatccatctgacacctaaacttaaaagctgaacatagaacacttctagaaacaagcatagaatgaaatctctgtgatctttagtgagacaaagcttgtctttgatctgacaccaaaatcactgcctattaaagaaaaaaatcatagtttggactttaccaaaattgaaaatatttgctcttcaaaagtcaccattaagaaaataaaaatacaggcacacatgagagatactgcaggtttggttttagaaagccacaataaagtgaacatgtcagtaaarcaagtcacatgaatttctggtttcccagtgcttataaaagttacgtttacatg

SEQ ID NO: 369200 - DNA, 630 bp, Homo sapiens
tggagactgttgaaccaccactgtagctgaagaagttgggatacagggaccagtgtcccgaggctgcacagggcatcagggtcctagtcctggcccattaagccattcttttctcctaggcctctgggcctstgatgggaggggctgctgcgaagatctttgaaatgtcttcaaggtctttttcccattgtcttggatattagcacttggctcccttttagccatgcaaatctctctagtaagtggttgttctgcagcctgtttggattcctctcctgaaaacatttttttctttctctaccacatggctaagctgcaaattttccaaacttttacagcctgcttccttttggtataaattccaactttaagtcattcatttgctcccctatctgatcataggttgttagaagcagccatgtcacctcttgaatgtttagctgcttagaaatatcttctgccagatgcgctaggttaccattcttaagttcaaacttccacagatcactaggacacaaatacaatgtagccaagctctttgctaaggcacacaagggtgacctttgctccagttcccaataacttcctcgtttccatctgagatcttgtcagcctggccttcattatcca

SEQ ID NO: 369201 - DNA, 630 bp, Homo sapiens
tggagactgttgaaccaccactgtagctgaagaagttgggatacagggaccagtgtcccgaggctgcacagggcatcagggtcctagtcctggcccattaagccattcttttctcctaggcctctgggcctgtgatgggaggggctgctkcgaagatctttgaaatgtcttcaaggtctttttcccattgtcttggatattagcacttggctcccttttagccatgcaaatctctctagtaagtggttgttctgcagcctgtttggattcctctcctgaaaacatttttttctttctctaccacatggctaagctgcaaattttccaaacttttacagcctgcttccttttggtataaattccaactttaagtcattcatttgctcccctatctgatcataggttgttagaagcagccatgtcacctcttgaatgtttagctgcttagaaatatcttctgccagatgcgctaggttaccattcttaagttcaaacttccacagatcactaggacacaaatacaatgtagccaagctctttgctaaggcacacaagggtgacctttgctccagttcccaataacttcctcgtttccatctgagatcttgtcagcctggccttcattatcca

SEQ ID NO: 369202 - DNA, 630 bp, Homo sapiens
tggagactgttgaaccaccactgtagctgaagaagttgggatacagggaccagtgtcccgaggctgcacagggcatcagggtcctagtcctggcccattaagccattcttttctcctaggcctctgggcctgtgatgggaggggctgctgcgaagatctttgaaatgtcttcaagrtctttttcccattgtcttggatattagcacttggctcccttttagccatgcaaatctctctagtaagtggttgttctgcagcctgtttggattcctctcctgaaaacatttttttctttctctaccacatggctaagctgcaaattttccaaacttttacagcctgcttccttttggtataaattccaactttaagtcattcatttgctcccctatctgatcataggttgttagaagcagccatgtcacctcttgaatgtttagctgcttagaaatatcttctgccagatgcgctaggttaccattcttaagttcaaacttccacagatcactaggacacaaatacaatgtagccaagctctttgctaaggcacacaagggtgacctttgctccagttcccaataacttcctcgtttccatctgagatcttgtcagcctggccttcattatcca

SEQ ID NO: 369203 - DNA, 638 bp, Homo sapiens
aagtcattcatttgctcccctatctgatcataggttgttagaagcagccatgtcacctcttgaatgtttagctgcttagaaatatcttctgccagatgygctaggttaccattcttaagttcaaacttccacagatcactaggacacaaatacaatgtagccaagctctttgctaaggcacacaagggtgacctttgctccagttcccaataacttcctcgtttccatctgagatcttgtcagcctggccttcattatccatatttctatctgcattttggttccaaccacttaataagtcactaagttccaaactttctctcatctttctgtcttcttctgagccctctaaagtcttccaacctctgctcattacccacttccaaagctactaccacattttcaggtatctttatagcagtgtcctgctcctcagtgccaattttctgaatgaacccatttttgcattgctataaagaaacacctgaacctgggtaatttctgacaaaagacctgaatccacaggtatatgaggagtaattcatgacaagctgcacgaataaaaataagaaatccaggcctaaatacattgtagggtaaggtggaacacaaaagaaaatctaactttaaaaaccaga

SEQ ID NO: 369204 - DNA, 647 bp, Homo sapiens
ttctatctgcattttggttccaaccacttaataagtcactaagttccaaactttctctcatctttctgtcttcttctgagccctctaaagtcttccaacctctgctcattacccacttccaaagctactaccacattttcaggtatctttatagcagtgtcctgctcctcagtgccaattttctgaatgaacccatttttgcattgctataaagaaayacctgaacctgggtaatttctgacaaaagacctgaatccacaggtatatgaggagtaattcatgacaagctgcacgaataaaaataagaaatccaggcctaaatacattgtagggtaaggtggaacacaaaagaaaatctaactttaaaaaccagaaagaaacaacaaatcatccacagaagaaaagcagttcgacagcagatgtattaatcataagaacagtagatagataaataatacaaagtgtgacaaaaaaaaaaaacaacttttgatctggaattatgtacccagcaacactatctttaggaaaaagagcaaattaatcacatttccagataaatcaaagccaagtttaccaccaacaatcctacactaatgggacttcaaaaaagatgtatttattgagggaaaatgcataaagcaaacaca

SEQ ID NO: 369205 - DNA, 610 bp, Homo sapiens
agggtgtcatttcctcagtgtatatttttattgactttgtgtctttatttctcagtcctctattctgttccattaatctagatgtctatttttgtactactaccatgctgttttggttaccatacccttgtagtatagtttgaagtcaggtaatgtgatgcctgcaactttgttcttttagctttggattgctttggctagttgggctctttttgggttcsatgtgaattttaggatttttttcctaatttgatagagagtgtgttgggtctgtagattgctttgtacagtatgataatttttaacagtagtgattcttccaatccatgagcatggggtgcttttctatttgtcatgtatgatttctttcatcagtgttttgtagttctccttataaatatctttcacttccttggttaaatacatatctaggtaattttttgtagctataataaatgagattgccttcctgatttggttcttggccagatgttattggtatataagaatgctattgatttttgtacattaattttgtgtccttaaatgctacagaatttatcaaatctaagagttttttggtggagtcttaatatggtttggctgtgtc

SEQ ID NO: 369206 - DNA, 610 bp, Homo sapiens
agggtgtcatttcctcagtgtatatttttattgactttgtgtctttatttctcagtcctctattctgttccattaatctagatgtctatttttgtactactaccatgctgttttggttaccatacccttgtagtatagtttgaagtcaggtaatgtgatgcctgcaactttgttcttttagctttggattgctttggctagttgggctctttttgggttcgatgtgaattttaggatttttttcctaatttgatagagagtgtgttgggtctgtagattgctttgtacagtatgataatttttaacagtagtgattcttccaatccatgagcatggggtgcttttctatttgtcatgtatgatttctttcatcagtgttttgtagttctccttataaatatctttcacttccttggttaaatacatatctaggtaattttttgtagctataataaatgagattgccttcctgatttggttcttggccagatgttattggtatataagaatgctattgatttttgtacattaattttgtgtccttaaatgctacagaatttatcaaatctaaragttttttggtggagtcttaatatggtttggctgtgtc

SEQ ID NO: 369207 - DNA, 512 bp, Homo sapiens
gcagcttggggtttggctcgtggatgctggggacaaggcctgagccccagatgtggctgggcctgacccaggcagctccaccccttccttcccaggaaacaccttttgctcgagcwgtaggaactaggcgtgtatacattctgctgcctgatcctggctcctggctgagggtttgtgggctcagatggactagacacccggccacaaccctcctgggcatagccttctggctcccccagcccaggcggaggcattgagcgactctcctcacccagagtgttttcccgaaggcgcttctgcctgagggcaccaggctgggccaggtactgcagggcgctgaccagcactggcctgggggccccaagagccccagatggcatccctctcacacactccccctgtctcaccaacagctataaatagactcggctctctgctggcacggcctctcccgaggaagcttttaattctctgcgtcctctgcagggggtggctcccacaggcctgggagg

SEQ ID NO: 369208 - DNA, 512 bp, Homo sapiens
gcagcttggggtttggctcgtggatgctggggacaaggcctgagccccagatgtggctgggcctgacccaggcagctccaccccttccttcccaggaaacaccttttgctcgagctgtaggaactaggcgtgtrtacattctgctgcctgatcctggctcctggctgagggtttgtgggctcagatggactagacacccggccacaaccctcctgggcatagccttctggctcccccagcccaggcggaggcattgagcgactctcctcacccagagtgttttcccgaaggcgcttctgcctgagggcaccaggctgggccaggtactgcagggcgctgaccagcactggcctgggggccccaagagccccagatggcatccctctcacacactccccctgtctcaccaacagctataaatagactcggctctctgctggcacggcctctcccgaggaagcttttaattctctgcgtcctctgcagggggtggctcccacaggcctgggagg

SEQ ID NO: 369209 - DNA, 512 bp, Homo sapiens
gcagcttggggtttggctcgtggatgctggggacaaggcctgagccccagatgtggctgggcctgacccaggcagctccaccccttccttcccaggaaacaccttttgctcgagctgtaggaactaggcgtgtatasattctgctgcctgatcctggctcctggctgagggtttgtgggctcagatggactagacacccggccacaaccctcctgggcatagccttctggctcccccagcccaggcggaggcattgagcgactctcctcacccagagtgttttcccgaaggcgcttctgcctgagggcaccaggctgggccaggtactgcagggcgctgaccagcactggcctgggggccccaagagccccagatggcatccctctcacacactccccctgtctcaccaacagctataaatagactcggctctctgctggcacggcctctcccgaggaagcttttaattctctgcgtcctctgcagggggtggctcccacaggcctgggagg

SEQ ID NO: 369210 - DNA, 577 bp, Homo sapiens
tccaaccctctgcaaagtctgggcagcaacacggtcacttctactgccagctggccagcacacataaacaatcaagtcattagctggctggggtagtgtaacatcagggcagagaacaaaacacctgtactcaagatgtgggtataaaaacacttaaggctccctgatagccagaactcatcacaatcaagcaagagttgtgagaagaaggtaccaggcatgagctgacctcctgtgggccccacatttccccacttttcatgctggaaatccaaacaagcctccttggctaccacaagaccctcttatttatcagggaaagcacactttgtctctatatcagcacacatgcagaagaaaaaagcaacattctttcagcagtgcagtcatgttactgtyttcacaaaaatgaaggctctgaaactcagagaggtgaagtgattgcccacgtcacaagctaatctctaaaatgtactcttgtttacacattttgtgcactttggcattataacaagtattacatcatacgttctctgttgtttctctttctgaatattgcaaacaggctgcaacaaga

SEQ ID NO: 369211 - DNA, 578 bp, Homo sapiens
caaaatggcaagccaatcagtaatctcttaaagtaagggcccccagagggcggtaccctcattgcagtggcaaactagargcaactcacttctctacccgcaaaggaatcaggggggatcagtcatttcaagccctagagctgaaagaaaaagagaaaaatcactgccgagtatttggagcaacaggttctccctaaatttgtgtgaggtgggtgaccaaaagtccccaagctgagaatttaatagagagtgattctgaactggtcattcccaggagccaagcataattccttctgagtaacaaaccttcatcctaagcctcaaagatttctcaaaaataaaactacaaagcaaagaagcaattctcaatgaaaaacaacccaccacatgtgaaaataaagcactgagtgagaagcagcagaaaacgtagtagaaacagacacataaatatttcagatgttgaatttggcagaccaaaacatgaagaaaacacaaagtcagaaatatctgaagagaacagaaaactattttttaaattacaaagcagatatggaaaaacaccaaataaaacttatgag

SEQ ID NO: 369212 - DNA, 578 bp, Homo sapiens
caaaatggcaagccaatcagtaatctcttaaagtaagggcccccagagggcggtaccctcattgcagtggcaaactagaggcaactcacttctctacccgcaaaggaatcaggrgggatcagtcatttcaagccctagagctgaaagaaaaagagaaaaatcactgccgagtatttggagcaacaggttctccctaaatttgtgtgaggtgggtgaccaaaagtccccaagctgagaatttaatagagagtgattctgaactggtcattcccaggagccaagcataattccttctgagtaacaaaccttcatcctaagcctcaaagatttctcaaaaataaaactacaaagcaaagaagcaattctcaatgaaaaacaacccaccacatgtgaaaataaagcactgagtgagaagcagcagaaaacgtagtagaaacagacacataaatatttcagatgttgaatttggcagaccaaaacatgaagaaaacacaaagtcagaaatatctgaagagaacagaaaactattttttaaattacaaagcagatatggaaaaacaccaaataaaacttatgag

SEQ ID NO: 369213 - DNA, 578 bp, Homo sapiens
caaaatggcaagccaatcagtaatctcttaaagtaagggcccccagagggcggtaccctcattgcagtggcaaactagaggcaactcacttctctacccgcaaaggaatcaggggggatcagtcatttcaagccctagagctgaaagaaaaagagaaaaatcactgccgagtatttggagcaacaggttctccctaaatttgtgtgaggtgggtgaccaaaagtccccaagctgagaatttaatagagagtgattctgaactggtcattcccaggrgccaagcataattccttctgagtaacaaaccttcatcctaagcctcaaagatttctcaaaaataaaactacaaagcaaagaagcaattctcaatgaaaaacaacccaccacatgtgaaaataaagcactgagtgagaagcagcagaaaacgtagtagaaacagacacataaatatttcagatgttgaatttggcagaccaaaacatgaagaaaacacaaagtcagaaatatctgaagagaacagaaaactattttttaaattacaaagcagatatggaaaaacaccaaataaaacttatgag

SEQ ID NO: 369214 - DNA, 578 bp, Homo sapiens
caaaatggcaagccaatcagtaatctcttaaagtaagggcccccagagggcggtaccctcattgcagtggcaaactagaggcaactcacttctctacccgcaaaggaatcaggggggatcagtcatttcaagccctagagctgaaagaaaaagagaaaaatcactgccgagtatttggagcaacaggttctccctaaatttgtgtgaggtgggtgaccaaaagtccccaagctgagaatttaatagagagtgattctgaactggtcattcccaggagccaagcataattccttctgagtaacaaaccttcatcctaagcctcaaagatttctcaaaaataaaactacaaagcaaagaagcaattctcaatgaaaaacaacccaccacatgtgaaaataaagcactgagtgagaagcagcagaaaacgtagtagaaacagacacataaatatttcagatgttgaatttggcagaccaaaacatgaagaaaacacaaagtcagaaatatctgaagagaacagaaaactattttttaaattacaaagcagatwtggaaaaacaccaaataaaacttatgag

SEQ ID NO: 369215 - DNA, 555 bp, Homo sapiens
cctgcactaatttcttatcatcttacttcccatagcttaataagttctgagaagtaagtactccctctctcccacgaaaggctstagttattcagtattatgatcactaaccccactctttcctttccagcacctcccccattctcccacctgccacacctctggtgtcctgacgtcagacccttcttatctcctgtggggtggcagaggctagccgcttgctgtgtggggtcagcaacatgttccatatatgaacacttagctaccacccttgtgcttaacctcacatcccacccccatcctcgctcctcacccttgcccctgggaccctccatatctcagggcccgggagcttctctattactcagtaaggaagacaacctcctttaactcagcatctttgtccacaggcacttcagctttttaaaaatccaatccgccaatccctgacttttaattaaaaagttcaatatatctatctatgtatatatatataaaatgtttaaagtaattactgataagaaatgattcacttctgctatttagctttttgca

SEQ ID NO: 369216 - DNA, 569 bp, Homo sapiens
ggtaagtgaaatccttttgcacatatactaactggtattctaggagccgccaaataaatgctactcaaacatggaaggaaaggctgggtgtggtggctcacgcctgtaataccagcacttggggaggcccagatgggcagatcatgatatcaagagttcgagactagcctggccaacatagtgaaaccctgtctctatttaaaaaaaaaattacaaaaattagcagggtgtggtgacatgcacctccagtcccagctacttgggaggctgaggyaggataatttcttgaatccggaaggcagaggttgcagtgagcagagactgcgccattgcactccagcctgggtgacagagtgagactctgtctcaaaaaaaaggaaggaaaatggaaaacttcagcaaattgtctttatatatattttttaattttctacctatctgtatccttaataccaagtagataaagcattagtacagtggaattttatactccagattaattcctttttaaaaacacttgtacattttttattgtggtagaatatacataacagaagtcaccattgtaa

SEQ ID NO: 369217 - DNA, 556 bp, Homo sapiens
tttattttctgtgtttttattaatgaraatcctgttggtacctattgaggctgagcaccatgataattatactgtataggtgattagaaattaagccaaaaacaaagacacctgatattttagtgagctttcttaacctttagacaaatgaacaaatttgttaggtgaacagagattaaacggctgaatttaagctactataaaacatttatgttcttttgtttgctattagaagagaataagtaggagacaactaggaatttggaatttagaagaatattttaatattcttacagaattctatgctatgaatgctttcttgctaaagtgaggtatttatttgtatattcttaagcttttaaaaaacgttacttgtctactttatgaagagtcagatattgttatttgtttgtatgagcgtactattgattctgaaaaatcttataaacaagaacaaatgagattaatgaattgctacattggaagttagtttgtaaccatgcctttttcgctagtcatttgttaataaaatttaagaaatgaaaagcaaggatga

SEQ ID NO: 369218 - DNA, 611 bp, Homo sapiens
tctgcgcaggtcagtttctagaagtttctcatccacatatcactaaggtgcctaggtccatgccctgcatatggtagtaatcaaatatatagaaatatgcactctttctataagaattcagtctttctacaagaaatacactgacctagatttagataggtaataactaaatggagttggaaaccaaaagttatctagattgttcttaccaccttatgccctaccaacaaaaagcctttttgttttacatatatggttattttgttggtttgaaagccatcaaaaatttgtcagcctgcaacgaacacaaaaatgtgtatggtagaatgtataggtgtattaattgaaaccagtttatccttctaagcattgcatctgcttctgtaatttaggtaaatgctatgattagtagctaactaggccaaakctaataaggatcatgaaatgtacctgcctttgcaaaggagattcatggttgtgtgtgtgtgtgtgtgtgtgtgtgtgtgtgtgttttaagttactaatcctattttaaaacaaagtagcacagtctatttaagtttttttctgtcaatttttcttggtctttactaggtgacaaacatgttagt

SEQ ID NO: 369219 - DNA, 589 bp, Homo sapiens
gtggtatctgactatgattttaatctgcatttccctaatgactaatgttgagcatcttttcaagtatgtattggctatgcatatgtagtttttggtaaattttctgtttaatctttagccccyttcttttattaaaattgggttttatgtctcataattgagttgtaaatgtttgtacttattctgaatataagtaatatatcaaatatacatagtgtgaaaaattttcccatttgtggatttgacttttaattttcttattgatgtatttcaaagagcagaaattttaatgttcatgaattttataattttttactttataaatttaagcaaaaacagtttagattttaaaaacagtttagatttacataaaagttgcaaagggagtatagagagttctcacatatcccccacctatcttttctcctattattagcatattacattaccatggtacattagtcaaaactaatgaatgaatattgatacattattattaattaaagttgctactttatgtagttttccccgaatgcgaatgtcctttttctgttccagagtcccaaccagggaaccactttgtgtttta

SEQ ID NO: 369220 - DNA, 589 bp, Homo sapiens
gtggtatctgactatgattttaatctgcatttccctaatgactaatgttgagcatcttttcaagtatgtattggctatgcatatgtagtttttggtaaattttctgtttaatctttagcccccttcttttattwaaattgggttttatgtctcataattgagttgtaaatgtttgtacttattctgaatataagtaatatatcaaatatacatagtgtgaaaaattttcccatttgtggatttgacttttaattttcttattgatgtatttcaaagagcagaaattttaatgttcatgaattttataattttttactttataaatttaagcaaaaacagtttagattttaaaaacagtttagatttacataaaagttgcaaagggagtatagagagttctcacatatcccccacctatcttttctcctattattagcatattacattaccatggtacattagtcaaaactaatgaatgaatattgatacattattattaattaaagttgctactttatgtagttttccccgaatgcgaatgtcctttttctgttccagagtcccaaccagggaaccactttgtgtttta

SEQ ID NO: 369221 - DNA, 644 bp, Homo sapiens
gaaaatgactgtgctaaagagggacatcacataatgataaatgaatcaattatttaagatgatgtaacaatatgaaatatgtatgcacctaacaacatgaagcaaaacacagcagaactaaaagaaaaaatagacaagtgtgcaattctagttgggcctattgatattcattgttctgtagtagataaaacttttatacagaccattttatacagaaaatcatcaagaatatgaaagatctgagtaacaccattagccaactggacctaattaatatttaaataacattttattcaaacaaaataatacacattmttttcaaatgtacatgtagcattcacagagacagtttgtatttctagtcataaaaatgtaattgaataatatttttagaccataataaaataaaactagaaatatttaagagaaagataaccagaaaatatctaaatatttggaaattaatcaacataattctaaataattcatggagagaagaagttcaaagaacttcagaaatattttaaataaaaagaaaataagattatgtcacattaaatttgtaaaatacacttgacacatttctttgaggaaaaatatatagcattagaagtatatataataactttttaaaaaaaggtttt

SEQ ID NO: 369222 - DNA, 644 bp, Homo sapiens
gaaaatgactgtgctaaagagggacatcacataatgataaatgaatcaattatttaagatgatgtaacaatatgaaatatgtatgcacctaacaacatgaagcaaaacacagcagaactaaaagaaaaaatagacaagtgtgcaattctagttgggcctattgatattcattgttctgtagtagataaaacttttatacagaccattttatacagaaaatcatcaagaatatgaaagatctgagtaacaccattagccaactggacctaattaatatttaaataacattttattcaaacaaaataatacacattattttcaaatgtacatgtarcattcacagagacagtttgtatttctagtcataaaaatgtaattgaataatatttttagaccataataaaataaaactagaaatatttaagagaaagataaccagaaaatatctaaatatttggaaattaatcaacataattctaaataattcatggagagaagaagttcaaagaacttcagaaatattttaaataaaaagaaaataagattatgtcacattaaatttgtaaaatacacttgacacatttctttgaggaaaaatatatagcattagaagtatatataataactttttaaaaaaaggtttt

SEQ ID NO: 369223 - DNA, 516 bp, Homo sapiens
ctgtacatctcaagggattttatttagcatatagattaacaactagagttttttttcaaacctcagaagaattccctgccaataaacatggttacttttccttccctatgtattttcatgctgcccttcaggacctttgttgaattccagataaatggwctcacacaatgtgtattcctctgtgtttgtctgttggtcaatgtctatctattgcactgagtagttcacccttaatatttattggataaatatgccaaaatttatttattgtctatactgttgatgaacatttgagttgttcccttgttggattgctataagtacagttggatttttacaagtatagttgtatcagacattggtgcacatttgtactagtttctcatggatatgaatctaggagtgggttctgtggtgggcgtatgtttgtttttggtggatacagccaaagcaaagacattgtgccaagttgcatttcaaccaagaatgcatgagtgacagttgctccccacatcc

SEQ ID NO: 369224 - DNA, 516 bp, Homo sapiens
ctgtacatctcaagggattttatttagcatatagattaacaactagagttttttttcaaacctcagaagaattccctgccaataaacatggttacttttccttccctatgtattttcatgctgcccttcaggacctttgttgaattccagataaatggtctcacacaatgtgtattcctctgtgtttgtctgttggtcaatgtctatctattgcactgagtagttcacccttaatatttattggataaatatgccaaaatttatttattgtctatactgttgatgaacatttgagttgttcccwtgttggattgctataagtacagttggatttttacaagtatagttgtatcagacattggtgcacatttgtactagtttctcatggatatgaatctaggagtgggttctgtggtgggcgtatgtttgtttttggtggatacagccaaagcaaagacattgtgccaagttgcatttcaaccaagaatgcatgagtgacagttgctccccacatcc

SEQ ID NO: 369225 - DNA, 516 bp, Homo sapiens
ctgtacatctcaagggattttatttagcatatagattaacaactagagttttttttcaaacctcagaagaattccctgccaataaacatggttacttttccttccctatgtattttcatgctgcccttcaggacctttgttgaattccagataaatggtctcacacaatgtgtattcctctgtgtttgtctgttggtcaatgtctatctattgcactgagtagttcacccttaatatttattggataaatatgccaaaatttatttattgtctatactgttgatgaacatttgagttgttcccttgttggattgctataagtacagttggatttttacaagtatagttgtatcagacattggtgcacatttgtactagtttctcatggatatgaatctaggagtgggttctgtggtgggcgtatgtttgtttttggtggatacagccaaagcaaagacattgtgccaagttrcatttcaaccaagaatgcatgagtgacagttgctccccacatcc

SEQ ID NO: 369226 - DNA, 474 bp, Homo sapiens
ccagttgtagatgtgttagactgtttgatattgtcccacagattatcaatactatttgcattttatttatttttttatttctttgcttcacatttaatattttctgttgctatgtcttcaagtttgtgatcatttcttctgcgatgtacattttgctgatattccaatctagtgtattttaaattcagacttcctagtgtctatggaagtttcatgtgccttttagagaacttttatcactctctttcatgtctctgttctccttaatttttgtgatcatatgaagtattttttgcatctgttttatgtcctttttcttctagttccatcatatctgtcatttctgagtagtttttattaattaactcttaycctggttagtagtcatgtttttctcattctttcttattgagtgccagatactgggttttgtgtttgtttttggttgatatattttgttgtattcctttagat

SEQ ID NO: 369227 - DNA, 635 bp, Homo sapiens
ataatctcatctcatgcagcagtagctcttcatctgtttgccctcagtgggtgttcaggtagggagtggttgttatttgctgaccctgatcttacatgctatgtccctagaatgagtatgtcagcatgtggccaagcccatctcataggactggtgacaagtattcattcattcatcagacagaaactgatcaccttgaagtcaccagccgcatactgaaatatcagaccagagaaactgatcaactttcaacttcagcaaaaggtgtttgagtttggcccctctgacagacaagtcataattctgattttacttaactggaatggtagagagaataatgtgacattttatttgcacaaagagtactttccaatatcccattgtatatgcagtatataattcactaagatccttgtcatgcttttcctaattatttctttttttgggggggaaagttatacaattcatttttataacattttaatgtaaaactaacaccatattrtgagcaagatatcatagtttacataattcccttggatttattgcttgcggttctgtgtattactcataacaatatcacacattaaaaattgcttctctaccttgcccattatatttatagagagggtcat

SEQ ID NO: 369228 - DNA, 608 bp, Homo sapiens
actttggggttcaggttcccataggtaggctgacacacacctgggcagatgttgcaacagcagtctttcagagctgtgagggcaagggatgtccaaacaggatggagtattccacctccgtcctgaaactgacagtgtggctgtgtatgtacagctaatgtaccatgaaagagcgtgaccatagtccacatacctgtgtggagatgtgagttccgcaggggtgttatattgacctacatcagtcaagcaaaagtaggagatattttttctgaatgcaggtagatgtgttgcattgattttcaggcttcttgaaactattagtagtgaccctttcccaaggccaccacactacacaactctgagaagcacyaggcacatggaaaacaagaggacaggtaactcctgaagctgagtggtgtggcagccctgaatcctaatatgaagtcaccatcctccagctgtctttggccacctctgtctaaacagctcaagggtgcatcaataatctacattttccaaaccaagcacactccctacttccctatcctcacttccctctgacccccagtcccctgtatgctcttcatgatggtggtgaagcattgtca

SEQ ID NO: 369229 - DNA, 502 bp, Homo sapiens
gagtaaggtgcaagggaattttgacataaagtgraagttttgagtttttaaagctggcactgctggtcctggacgcatgccatgaattggccaaacctttccatccgtgagtggcagctctcagaagctcgtccttaaaccatggctgttggcctccatcctaatggatattgtgaagcatttttcccacttgaaggagactgtatttatcacttagaaagtagagcaacccggagcctagtgagcatttctccgcttcatcaaaggcccttgatttcacttcctttgctttagaacattaattacatggcccttggcatagggagggtttgtcaccaagattcctttcttgcctataagccgcagaatagactctcacccacccgagatggagccatggagaaggcacagctgtgcccttccagagcctttccctatatggacttgctgattatgttcacgatgttctaagatgctgaccccagaggggctgcccagagtt

SEQ ID NO: 369230 - DNA, 461 bp, Homo sapiens
tgtttcctggacatggcaaagttgctggcagtcaggaaagagaacctgcgtgttggtgctcggaagcagttcctgaagatctcaatcttcggctgtccccagcacacctcctgacactgggagtctccacacacctgagccagctgctgccttccagaacccacctgttcaggaggcccaattccctttaaagaatagtcttccttacacatggtgcacaatagtctgccccagtacgtggtccaygggtcagaaattatgtttctccctccacagcagcctgtgctctcactcacccacagactcgcccagctggcaaccctccctcctcccggctggctggctgtggctgggggctgctccaaggtgccccagcactgttcctgctgtgctctaagcccgcatgccctcccgcaggatgctctggtggagacaccacatcctggctccacgttaaaccg

SEQ ID NO: 369231 - DNA, 460 bp, Homo sapiens
tgataatagttgttactgagaaattataaacatgaagaaatattttgtaggaccagggtttgtagtggtatatgcaggcacagccataatgtgtgccatttgatgaataatgatgaaatagaagtatagatattaaatatccttcttcccaaatggccaagagagatcaaggcagaacactcagagtgaggccaaacctgcacctacttccctgggcacaatggctctgccaagcccaaggtcagcctcattttgcctgccctttcccacgagggcagcctgctggctggtagagttccgtgtcttcccttctagctggagcctggcagctgcaaatgtccataattatggaagatccactagttttctgctctgtggttgaaacaaggacagtttctctttttattgctgttctgtggcttcatgttctgaatmgccggtattattaataatggccaag

SEQ ID NO: 369232 - DNA, 649 bp, Homo sapiens
ttttcccacttcccacactggggstctctgattcgggttctcctgaggctcagcctccggtggcattcctgagaccttggcaacttccctgtctccctttcaccagcacaggcccccgaacggatttgagtaagtcttggttctcgtttctgttttatttgggctccttcggctacaagaaacaaagataaggttaagaactgaagtagaaaaaaaggtcttgataaataaaacagcatccttggaaagtttaaatatttctgttagaaaactttagacttaataaaaatttcatggataggcaagacgtaaaataaatatacctagaatcaattacattcttccataccagcaataacctgaaatgcattatttataaggaaattctatttacaatagaaacaaaaacataaaatatttagaaataaaattaagaagagttgcctgacctttatacagaaagtttactgggaaatataaaagccttaaatcaagagatcaatgcactactttcttggtaggagagcaaaatataatcatgttttttgttagcaggtaaattgatgggttacacttagtttgggtatgatttttcatgacacatttgagaaatgttttaaatttatcaaggacgacaacaacaacaaca

SEQ ID NO: 369233 - DNA, 649 bp, Homo sapiens
ttttcccacttcccacactgggggtctctgattcgggttctcctgaggctcagcctccggtggcattcctgagaccttggcaacttccctgtctccctttcaccagcacaggcccccgaacggatttgagtaagtcttggttcwcgtttctgttttatttgggctccttcggctacaagaaacaaagataaggttaagaactgaagtagaaaaaaaggtcttgataaataaaacagcatccttggaaagtttaaatatttctgttagaaaactttagacttaataaaaatttcatggataggcaagacgtaaaataaatatacctagaatcaattacattcttccataccagcaataacctgaaatgcattatttataaggaaattctatttacaatagaaacaaaaacataaaatatttagaaataaaattaagaagagttgcctgacctttatacagaaagtttactgggaaatataaaagccttaaatcaagagatcaatgcactactttcttggtaggagagcaaaatataatcatgttttttgttagcaggtaaattgatgggttacacttagtttgggtatgatttttcatgacacatttgagaaatgttttaaatttatcaaggacgacaacaacaacaaca

SEQ ID NO: 369234 - DNA, 649 bp, Homo sapiens
ttttcccacttcccacactgggggtctctgattcgggttctcctgaggctcagcctccggtggcattcctgagaccttggcaacttccctgtctccctttcaccagcacaggcccccgaacggatttgagtaagtcttggttctcgtttctgttttatttgggctccttcggctacaagaaacaaagataaggttaagaactgaagtagaaaaraaggtcttgataaataaaacagcatccttggaaagtttaaatatttctgttagaaaactttagacttaataaaaatttcatggataggcaagacgtaaaataaatatacctagaatcaattacattcttccataccagcaataacctgaaatgcattatttataaggaaattctatttacaatagaaacaaaaacataaaatatttagaaataaaattaagaagagttgcctgacctttatacagaaagtttactgggaaatataaaagccttaaatcaagagatcaatgcactactttcttggtaggagagcaaaatataatcatgttttttgttagcaggtaaattgatgggttacacttagtttgggtatgatttttcatgacacatttgagaaatgttttaaatttatcaaggacgacaacaacaacaaca

SEQ ID NO: 369235 - DNA, 621 bp, Homo sapiens
tctgaaacaggaatgcatttaagtggaagcaaatacaagcacataagtgtgcacaattacgtgtaagaacttgaagtatgatgattaactacaaacaaacaataaacaaatgaagcaacaagagggaaagatcaaccaagagctgttgctggcataaatgattacaggttgagtattcctaatcctaaatgcttggatctaggagtgttttggatttcggatttttctttttcagatttgggaatatttgcattatgctaaccccagttcaacatttctaaygggaaaatccaaagtctgaaatgctccaatgatcctcatgacagcacacaaaatatttccattttgggagcatttctgttttcagatttttgacttagaggtactcaatttgtaggtctttatgaaaaagtctcactttgcaaaatttactaaaataaaaagcaaattatccagatatccttagattccttttacttacccttgggctactgaggatgtatttagcacatgcgggcagctggaaatgcctggacattcacggcactccatcatgacttattctggcagaagcatgaaagtgatgctcccaggctgggaaccaacagtgtccccatgaaa

SEQ ID NO: 369236 - DNA, 586 bp, Homo sapiens
tcaatttgtaggtctttatgaaaaagtctcactttgcaaaatttactaaaataaaaagcaaattatccagatatccttagattccttttacttacccttgggctactgaggatgtatttagcacatgcgrgcagctggaaatgcctggacattcacggcactccatcatgacttattctggcagaagcatgaaagtgatgctcccaggctgggaaccaacagtgtccccatgaaagcctcctgtggctttgaaatgacttttgcaaagatgatgacagtgacagaaatctaccatggctgactccatcttgcttctaacctcacaggcttgctgtctttgctcattcgtgggtgtaggccaagccaaccatggaaggaattcagcttacagtttaacttcgaagcaaggatgatagcagtccttcccccaaactggccacctctttgttcagggctgaaactgcctttgtaagactaaataaatgtcataagcttaggattatgagatggccccaaattccgctaaaatataggcatcgtttctgtaatcccttgatgcttagaagtcatgtggccaggagtcaca

SEQ ID NO: 369237 - DNA, 487 bp, Homo sapiens
atatatgtacccaacacaggagcacccagatttatataaaacattcttgaagaatggcctataatatgctttgattccaatgtaagtgtggagtaggggcaattataaaatgataattatttcaggtatttatcatcatgaagttatatatacatgttcacatacatatatacatacacacacacacacatacatgtaactggrccctttgggatttcagcaacacagatttttttagtcactgaaatcataaaaattctgatcaggcccttgcttgatggcacaggttaactgctcactttttgcccaacattctatgttcctacaatataaatataaactgctgatgtcctgtttctttgtcaagctggaggaaataacttcagggtcacaaaaaagtctgcggaaggaatgaacgccctgaaggacattgtaaccagctgttgatgcccagaagtcttgttgctcaaggttttatctatgatga

SEQ ID NO: 369238 - DNA, 487 bp, Homo sapiens
atatatgtacccaacacaggagcacccagatttatataaaacattcttgaagaatggcctataatatgctttgattccaatgtaagtgtggagtaggggcaattataaaatgataattatttcaggtatttatcatcatgaagttatatatacatgttcacatacatatatacatacacacacacacacatacatgtaactgggccctttgggatttcagcaacacagatttttttagtcactgaaatcatraaaattctgatcaggcccttgcttgatggcacaggttaactgctcactttttgcccaacattctatgttcctacaatataaatataaactgctgatgtcctgtttctttgtcaagctggaggaaataacttcagggtcacaaaaaagtctgcggaaggaatgaacgccctgaaggacattgtaaccagctgttgatgcccagaagtcttgttgctcaaggttttatctatgatga

SEQ ID NO: 369239 - DNA, 563 bp, Homo sapiens
aagatcccaagatccaggtccctctcccatctcccacggagcactggctgtttatccccaaatgtgcaggtgtctgtaccagtctctctctctctccatctttcttccctcacctcacttcccccagtcattccaatctagacccctattctccaaataagtttttgattttaatatcctgtgagaggaaaaataaaccctggatccctcaagtaaagtgatcaaagctggcctttgtactaattacttattcattgaaaaaatcatcatgttctatgatatttaagtattaagcactatttgagggagaaagaattagttattgatcctgtctcccaggtttccaccatctggggagagagataagatatccaaggaatcacctgcctcagaggagaggagcctccagccctggagcagctggaraggcccaagttggcctttagcccagggcaggggtcttatgtaaaacagcaagaggggactttctgtagcagggctgtgctcaccctgtgtccagagagctggggaatgggttttgctgaatggaaggagttactgga

SEQ ID NO: 369240 - DNA, 521 bp, Homo sapiens
ccactaatggtgatgtgatgggaatcacgctgtcacaggtaaggtgaagtactgggggagcatgcagtagggaggctgaagcttagtgagggatagctacaacagtagagtgggtgatgcaggatgaccagtttgttagatgaatgggtgcagaaggggcctctcagcagaagaattgcaccttcaaagcacagagacacaccagaacaggcaaggcttgtgggaaaaggatgattgccatgcaactgtacctagggaaaaacggaggacagggaggaatgagaccagaaaagggagcaaatgggaggccgagacatgtggatcctttgaggttgggagttcgagactagtctggccaacatggtgaaaccccatctctactaaaaattagccaggtgtgatggcggccccctgttatcccagctacttggctgaggcaggagaatcacttgaacccrgaggcggaggttgcagtgagccgaggtggtgccactgcactccagctgggccaacagagtgag

SEQ ID NO: 369241 - DNA, 563 bp, Homo sapiens
aatttgtcaaaaactcatgaggaaataagtccaacttctcgattatcctggggaatattccaaggcctgaagtctcagaatacataggcagcacaatgctgtgtctcctgtgagatgttggttacaattaatcgccttgggtgggttttggcttaaggtatttgatttggagcaactctccaaatcacaatggkaaaactccccaagatcgaattcatccaagaccttccttgcaggcaggccatagtcacagcctacctaactggggaaattgtcagagtgcatttccctgtggatgctgaacaaaggactgaaggctcctcacatgacagaacacaaactgtgacaagaaactgctcaatgtgtgtcatgtctgggcttagcctgatcctgcatgtgctctctgtgtgcaggattccttttatttctgtggcaatctcttcctctgaccttacaggcttatagatgttcctgagttgatgcatagcaacccacagatgaaagagtgggtggagctgaaatatatgggcagaaggtgacagaaggtgactgctatatcatgg

SEQ ID NO: 369242 - DNA, 563 bp, Homo sapiens
aatttgtcaaaaactcatgaggaaataagtccaacttctcgattatcctggggaatattccaaggcctgaagtctcagaatacataggcagcacaatgctgtgtctcctgtgagatgttggttacaattaatcgccttgggtgggttttggcttaaggtatttgatttggagcaactctccaaatcacaatggtmaaactccccaagatcgaattcatccaagaccttccttgcaggcaggccatagtcacagcctacctaactggggaaattgtcagagtgcatttccctgtggatgctgaacaaaggactgaaggctcctcacatgacagaacacaaactgtgacaagaaactgctcaatgtgtgtcatgtctgggcttagcctgatcctgcatgtgctctctgtgtgcaggattccttttatttctgtggcaatctcttcctctgaccttacaggcttatagatgttcctgagttgatgcatagcaacccacagatgaaagagtgggtggagctgaaatatatgggcagaaggtgacagaaggtgactgctatatcatgg

SEQ ID NO: 369243 - DNA, 556 bp, Homo sapiens
tggtgttttgatatcgtcactgagccacaaccccagcccctggtttcttgccattggaagtctcattctgtgagaaaaataaatcccaaattgttcaagccactcctggttggacattccgtggctgcaaccagatgcaatcctaagagaaatgccagtccagcaatcccacagtgattgccccgtctgtaactctaaactcctacagatttgttctgtagcacctagaacagcaatctccaatgagtgaattggtcattcccccagatgtttcattataaatcagttgtctggtatttgggtgtacttcccctctaagattggactatttcagaaactccagagcaaaggttgayagtatgtcaactctcggaataatgaaggtgattagaaacaacatttatgcagacgtaggctcacatagctttacaaagaagttgggtctctaacagtgattggtaaatagagaagatatggtaaagaaggattcccaaggatttaacttttgtccatgacttacttttaaggcagaaggaatgtgtgtaggtacagcatg

SEQ ID NO: 369244 - DNA, 441 bp, Homo sapiens
agcagtgacttttttttacagcatctttcaccttcttgcatgagggttttccttaggtggagggctcttgaaagtactttgcatttcattctcccaggatctctgctctgactcttgatrcattagtcacagttccaagagggaacagggtaaatgacttcatagtcaaaacccaaacctaaacagatggttcctttatcccaagaaaatgcaaagacttgtaggtctcctgtggtaatgggatttggcctgaacgttaagggataccagagtcagcaggctgggattcaggcctgggagccaggcatcacgggctttcttcttatttcaactccaggccaattgactatgtggtcttccagccaagtatttgcccaggatatgctaaaatgacaaatgcctgagaaaaccgtaggtaggctgaccccattctccaagtgt

SEQ ID NO: 369245 - DNA, 561 bp, Homo sapiens
tatttttcttgttttattgcactggctagaactctattacaatgttgaatagaagtggtttccttgtcttgttcctgatcttaaaggaaaaacattcagctttgtattattaaatatcttgttaggtgaattttatcctttggaataatacaagatgagtctacctcctctatcaatgaaagcatacttttgtacttatgtgtcatgtactggtgatatagcagtgaaccaaacatacagaaatccctgcctctcatggagtttacttacactctagaggggaagatgaacaataaacaagatacactagtaaaatctagggtgtgttgayggtgagaagagccaatggaagggagagatgaagtatcagtgggctgtataaaatgttagagattgtggcctggaagggctaatgagcacatcactgagttttttcttagtcctggccattcattctatccctctttccctatgactactgcttcagactctcattatttctcatgtgtactatgcaacagcgtccaacctggtcgtccttgtccttaggcttatcaaacc

SEQ ID NO: 369246 - DNA, 560 bp, Homo sapiens
ccccaagcaggcattctaagaggcaggaagtagaagaactagggtggctatactcagaattggcactatataatttctactttgttcttttcatcaaagcagtcacagggctcggcagatttaggggagtggaagagcaagattttatctcataatgggagagagataagtacatgttccatgtgggatgaaagatattgttgcactcatctttggaaaatatgatttgtcacaaacaggcttatgacaactaaccaccagattatcaaacctgcttggcaatgtcctaacatatccttaaattctgcagttgcaggatggactctgctgaaaatcaagactagaattcactgttaagtcatgcaggattacaaagacaatggaatgcacggcctcaacagatgttctttgcaaagtcaaaactcctaatatgaaaggaataggatcckgagacctggaataagaatatttgagtaaacaagcctgcaaatagtaaatctccagctttatgaacactctggactcaaaggaaaaaatcatctccctgtttctaaacagcc

SEQ ID NO: 369247 - DNA, 534 bp, Homo sapiens
agacgcattttttgccctgctttgccccttgctatgcaccaggaggctgactctaggaatctcctgccagctggcttcccatagggcttggtcagcagaaggcacctgcaggaaatacaggaggaaagaggtcagggcacttcttcctgtcttcactggtgtctracaaagcctgtgatgctttgctgttgtagctcccatggaatgaggggagttcgttcacaactcctgtccccagggctctggtaacttggtaactctatttcctccttttgtccttttggccctaggagtgatcgtggcttcccagtgttgctggtgtctggtgccttgtcacccttgtttgctccttatccctttgcacagcactgtaagacacacctgatccacactcaatttgtgccatctagttgaactcagggccttgccacgaccatggctgacacatctacatgcccaagatcactctacccgtgaggcccagaggtggagccatatattttccattaactttcattgtaaaagttaatctcg

SEQ ID NO: 369248 - DNA, 534 bp, Homo sapiens
agacgcattttttgccctgctttgccccttgctatgcaccaggaggctgactctaggaatctcctgccagctggcttcccatagggcttggtcagcagaaggcacctgcaggaaatacaggaggaaagaggtcagggcacttcttcctgtcttcactggtgtctgacaaagcctgtgatgctttgctgttgtagctcccatggaatgaggggagttcrttcacaactcctgtccccagggctctggtaacttggtaactctatttcctccttttgtccttttggccctaggagtgatcgtggcttcccagtgttgctggtgtctggtgccttgtcacccttgtttgctccttatccctttgcacagcactgtaagacacacctgatccacactcaatttgtgccatctagttgaactcagggccttgccacgaccatggctgacacatctacatgcccaagatcactctacccgtgaggcccagaggtggagccatatattttccattaactttcattgtaaaagttaatctcg

SEQ ID NO: 369249 - DNA, 562 bp, Homo sapiens
ttttcttaccatggtgggttcctgttaggcaagaactgcaactccatgagcaagttgtcccaacaccacaggggcagaccttcatcacatagcaactcccaaaatgggaattggagtggattttagaacacagtcagctaacattgagaacatcatggttgtaggcaaaactttccrttcctctatttgtctctctgctccgttcttgggtccatattctcctacacattttggatgcttgaaatactgattctgaaagaataatcaattagcaaatagttacaaggagtaggacactcaaggagtctagttgaaaacaaaggaccagcatgataattgtacaaaaagtacttgtagaaattcaaaagtggaaaaaacgctatatattgggaaagattaggaaaagttacacatagaacagcaaggtgagctgagccttaagtaggtaggaaggttggatgagactcagcagggtagacgggagaagccatggcatttgtggagtacaagttgacagaggcaaggaggtaggtttggtcaggtgtgttaaggagacagtgag

SEQ ID NO: 369250 - DNA, 497 bp, Homo sapiens
caaaaaaacaattcgagtgttctgggatgggggaagtttcacaagatgccatttacttcaaatttttcttcaagtggtgtcattgggttgtggttggtggctatgacaccaagagaaagcaagttaacttggattaagtctcttttctgctttccaaattacatagatttctcagggtctttgccttccccacatctggactccaggaatgaatcatttaaggaggcacccccggacaggagtttctgttctctacagttgttctaatgtgcactctgtacttcgactgcctgtcagacaaatcagggaagaaagcaggagtctctaaagcagtcatgcaaatttccccaggcttacagtctcaaagaaattgggcctggccaaaatgacytcaggcatccactgaggagaagaacttgcttctaagaacttctctccagccttccatgtttccttccatgacaggcatctgtggggtgacaattaggtgtggtggg

SEQ ID NO: 369251 - DNA, 615 bp, Homo sapiens
gatggttctaacatatgcaaagcaattaaagtaatacaggacatttaaaaaggattcaaaatacatgatcatcccaaaagatgtagaaaacgcatttaacaaaattaaaatcctttcatgaaaaaaaagaaccctcaacaaactaggtgtagaaggaatttaccttaacttaataaaggctgtatattaaaagctcacagtgatgtcagactcaatggtaaattaacaaaagcttttcctgtaagatcagcaaggcaaggatgctcactctcaacatagcactgaaagtatttctaggcaacatwgtacaggaagtcgtagccaggccagaaaaagaaataaaagtcatccaaatcagacaggaagaaataaaattacctctttacagatggcatgatcttatgtgtagaaagccatgaagactccacaaaaacctattagaactaataaatgaattcaataaagttgcaggtacaaaaatcagtgcatttctataggctaataatgaactatccaaaaaggaaattaagaacaattcatttacagtaacatcaataattaaaatacttaggaataggcaaccaaggagatgaaagagttatatactgaaaacta

SEQ ID NO: 369252 - DNA, 615 bp, Homo sapiens
gatggttctaacatatgcaaagcaattaaagtaatacaggacatttaaaaaggattcaaaatacatgatcatcccaaaagatgtagaaaacgcatttaacaaaattaaaatcctttcatgaaaaaaaagaaccctcaacaaactaggtgtagaaggaatttaccttaacttaataaaggctgtatattaaaagctcacagtgatgtcagactcaatggtaaattaacaaaagcttttcctgtaagatcagcaaggcaaggatgctcactctcaacatagcactgaaagtatttctaggcaacattgtacaggaagtcgtagccaggccagaaaaagaaataaaagtcatccaaatcagacaggaagaaataaaattacctctttacagatggcatgatcttatgtgtagaaagccatgaagactccacaaaaacctattagaactaataaatgaattcaataaagttgcaggtacaaaaatcagtgcatttctataggctaataatgaactayccaaaaaggaaattaagaacaattcatttacagtaacatcaataattaaaatacttaggaataggcaaccaaggagatgaaagagttatatactgaaaacta

SEQ ID NO: 369253 - DNA, 447 bp, Homo sapiens
agggcataggacctgatatatggaaccatcttatcttccaccatcactatcattccatctccatgagcttatcttccaccaccactccatctccatgatttccatagagatcccctgcaggtgagattaagaggacttcaaagattggcaccctcatgactagacagatcctggagagtttaaaagtattttttccctttagaaatcaattcctactacataagaatgggtagttttccccaaaggggatatttagtgaatamcatcttggggaactatgttcaattgtggtataggtttccctgaaggcctatggttggtttcatgaaattatcttccaagccagactgacagttttcgagatgactggatttttcttcaaggaaaagcaagcttacctgttctccaggatcatgcatactccctgtggtcttttctgatgctagg

SEQ ID NO: 369254 - DNA, 447 bp, Homo sapiens
agggcataggacctgatatatggaaccatcttatcttccaccatcactatcattccatctccatgagcttatcttccaccaccactccatctccatgatttccatagagatcccctgcaggtgagattaagaggacttcaaagattggcaccctcatgactagacagatcctggagagtttaaaagtattttttccctttagaaatcaattcctactacataagaatgggtagttttccccaaaggggatatttagtgaataccatcttggggawctatgttcaattgtggtataggtttccctgaaggcctatggttggtttcatgaaattatcttccaagccagactgacagttttcgagatgactggatttttcttcaaggaaaagcaagcttacctgttctccaggatcatgcatactccctgtggtcttttctgatgctagg

SEQ ID NO: 369255 - DNA, 591 bp, Homo sapiens
attttcctgatggtgataaggtggtaatagactttacttcattgcctggtgcccttcagatatgcttcctacaaaactcctcagcagaacaaatatagttactgaatttggttactggtacacaatgaaataacagtgcaataacatagttacatggttataatatagttaaatcatgcagcaagttgcacacaatagaaaatgcagttaggcagagagaatgaaattaagggttagaggtaaaagagaggatgtatctttagatgtgatttgaaatgaaaagcagacaccccagaaaggacaaagatgtcaccagatgatgcctgaagaagctgcttctcttgtcaactaargcaagactgggtaaggacagtgggaagggcatgttcaattggctgtatagctgattttgtatagcccttcttcccctccactgtgatcatactgatttagtccttattaccttttctggcctttacaattgctaaatagctgatcttccagttctcttctgagttatcccacaaagcactgccaaatcaattgtcctttaacaccactctgattatatcatccttctctcccaaatcc

SEQ ID NO: 369256 - DNA, 538 bp, Homo sapiens
cacaacctcacaccttattcaaaaattaactccaaatggatcataggtctaaatgtaaaattwaaaaaatacaaatgttaaaagtaaatgtaggagaaagcagcctgtattttcccatattacaaacttttctgtattacgaactgtggttaggcaaagaattcttagacatcttaccaaaagcataatcagtaacattaaaaattaataaattgaacttcatcaaaattaaaaatttctttctacaaagaccttgttgagagaatgaaaagacaactcacagattggaatgaaaatatttgtaaatcatgtatccgacagaggacatgtattcagaacacataaataagtctcaaaattcaacaataagaaaacaagcaattaaaaagtgtgcacagacttgaacaaacactttacttttgagggagatgccaattaaacccatgacgtaccacaacatgtctataagaatggctcaaaaatcaaatgcaataccaagtgttggtgaggatgaggagcaactgggatatctcacaca

SEQ ID NO: 369257 - DNA, 538 bp, Homo sapiens
cacaacctcacaccttattcaaaaattaactccaaatggatcataggtctaaatgtaaaatttaaaaaatacaaatgttaaaagtaaatgtaggagaaagcagcctgtattttcccatattacaaacttttctgtattacgaactgtggttaggcaaagaattcttagacatcttaccaaaagcataatcagtaacattaaaaattaataaattgaacttcatcaaaattaaaaatttctttctacaaagaccttgttgagagaatgaaaagacaactcacagattggaatgaaaatatttgtaaatcatgtatccgacagaggacatgtattcagaacacataaataagtctcaaaattcaacaataagaaaacaagcaattaaaaagtgtgcacagacttgaacaaacactttacttttgagggagatgccaattaaacccatgacrtaccacaacatgtctataagaatggctcaaaaatcaaatgcaataccaagtgttggtgaggatgaggagcaactgggatatctcacaca

SEQ ID NO: 369258 - DNA, 633 bp, Homo sapiens
tcactagcagttatgtatatagcattgagggtggggaaaggagagtaggaaagaaccaaatatcctggtgtaactgccctgtgaccctgcattacctcccagatcccatctgtccgcttgcagttgccagagtgtttcaccatctcatgtattttgctgtatttcttctccgtgcgttttccaggggcagtgcaattaggaacactgactagagaataagaaaggaagaataatagagtataagtataattgtaaaaagccattatgatatgctttcaaagccagtaatcagcactcttgcttatcatgcaaatcactattagtatttttatttgaactataactgtgtcttgttatttgacagagagtgcttttgagaaaaacctaacatctgcccacaattggattcctttccaagcattccttggaggaagaggaaaaggatacatacgtcaggagggtaatttaatacttstagttaacatcttgaaaaggacccattgtaaaaggggaagctgaaggggatgaattaagaaacatgctgagtaacttctggttgtccttgaaagcaaatatggagactttttgtctttaaaatgagaagcttcaaaattggtcttttgcaaaataaga

SEQ ID NO: 369259 - DNA, 580 bp, Homo sapiens
ctgctaattttttatatttttggcagagatggggtttcaccrtgttagccaggatggtcttgatctcctgatctcgtgatccgcccgcctcggcctcccaaagtgctgggattacaggcgtgagccactgggcccggcctacaagcatcttcttcaaaggaaaatcctcaagaaagaatgtaaagaaagcagaaatgaagaagttaatttattataaattcacaacgagaagaatagttggcattttcaagtgtcaagagatgcagcaccaaaagtgtaataagacagagcctaataatgaacttgatattgaacctgattttgagggactagtgaaaatcagctctttatgataacaagagcaaggaaacttgaggcacagacatcatcaccaagtgtagtttaatacaccttttttttccccattgaattttcctgcttttcagatgtgcaagaactgagcccgctataatcaaataaccccaccaaagctttcctaacaggaattcatgtaatgagtctttttagcctgaataatgcgttttgccttaaagtctattttgtccgcaatctccacagg

SEQ ID NO: 369260 - DNA, 580 bp, Homo sapiens
ctgctaattttttatatttttggcagagatggggtttcaccgtgttagccaggatggtcttgatctcctgayctcgtgatccgcccgcctcggcctcccaaagtgctgggattacaggcgtgagccactgggcccggcctacaagcatcttcttcaaaggaaaatcctcaagaaagaatgtaaagaaagcagaaatgaagaagttaatttattataaattcacaacgagaagaatagttggcattttcaagtgtcaagagatgcagcaccaaaagtgtaataagacagagcctaataatgaacttgatattgaacctgattttgagggactagtgaaaatcagctctttatgataacaagagcaaggaaacttgaggcacagacatcatcaccaagtgtagtttaatacaccttttttttccccattgaattttcctgcttttcagatgtgcaagaactgagcccgctataatcaaataaccccaccaaagctttcctaacaggaattcatgtaatgagtctttttagcctgaataatgcgttttgccttaaagtctattttgtccgcaatctccacagg

SEQ ID NO: 369261 - DNA, 631 bp, Homo sapiens
ctgtgtggtaaaagttctgattcccagtggatgaatgctgccactgggggatatgatgagaatcccattttactttaaactatgtggctgccaacaggtctcttagggctcctcatctcaagaagccagcaggcaagggaaggacaaaccatccttgcaggaataattcgtactgatcatttggaggagattcggctagtatagctgctgttacataatgaagaaaaggaagaatatgtttcaaactcagatgaaccactggggagtctcttgatactctgttgcctaatttggatggttaatgggtaagtgcaatagacacagcctcagaaaggcgtggtaatcagagacttaaatcctcagtttccatagttaagctactaagatcatgagaggtgcttcctaggagtgaagagaatmggaatgtctaggaaggacatcatgaaaactagttgtgctcttaaacctaactacagttgatcctcaaggacttgagagttaggagctctgacctctgagtaggcaaaaattcacatataacttttggctttccaaaaccttaactcataatagactactgtagagaaggtttacctataatgtaaacagttgattaacacatatgttacgt

SEQ ID NO: 369262 - DNA, 614 bp, Homo sapiens
gttctgctactctggcctttctgacacctcttcatgcgtattttttgaacattttagaagtgtttgtatctgagaaagaagtatgcttcaaggaagcactttttgaagaaagacagctaatttagcaatgattctacccttttaggcctaggcagcaagaatttggaagtataaactcactaaaggaaaaggactgaagaagcaaataaaattttgaatcgaaaagagtgaggtgagaaaaaawatccaagtgaacaaacagcatgaggcaaaggcaaagaagaaatactctgattactccatagcctttcaatgtttttcaaggacatttgcatatttcccaaatctcattcttttgaaaatactgaaatgcatgttaatttacacttgtctggaaatagatcatattctaaaccatgaatagtaggtaattacaaactagagctttaaccaatttccaagaaggtgttgataaaaatcatctaaaatggggtttttagcccaatcctgaaccaccccctacttgaggcctcacttcagtgctctgtacacatatggggcaattacatctggaagacaatgaagcagcaacttggagctctaattaaagacag

SEQ ID NO: 369263 - DNA, 561 bp, Homo sapiens
aatacttaggaaatttcaaaaatacttggattttttatgcctcacaaattaatggtaatgataacagagcacatcttttggcagtaatcatggattatgcttcattgtgcatcaagaattcatacttttcaagaagctaatttcaggtttcatggctgaaatttattcttggcctggaacaaactgtattctagaaggcaaactcaaaagtcaatcacttgattattctcaccaaagaaagaaaatactggtacaaaacaaaactaagatccttatataatctactaatctaaatgactccagttatcaatgccaggaatgaaatgcatctgttrttgcttgactagttaagattaagaaagtagcatacttaaatatcttttccccacacactcacctcccatttttgactattataaattctgcagtctttgtaccaattaattattattacattcttataaatactatgatattcaccttgttttataaaagaaatatgtgagtagattccatctgtaactttaaaggtaacttacatgatttttgtgttcaacacta

SEQ ID NO: 369264 - DNA, 561 bp, Homo sapiens
aatacttaggaaatttcaaaaatacttggattttttatgcctcacaaattaatggtaatgataacagagcacatcttttggcagtaatcatggattatgcttcattgtgcatcaagaattcatacttttcaagaagctaatttcaggtttcatggctgaaatttattcttggcctggaacaaactgtattctagaaggcaaactcaaaagtcaatcacttgattattctcaccaaagaaagaaaatactggtacaaaacaaaactaagatccttatataatctactaatctaaatgactccagttatcaatgccaggaatgaaatgcatctgttattgcttgactagttaagattaagaaagtagcatacttaaatatcttttccccacacactcacctcccatttttgactattataaattctgcagtctttgtaccaattaattattattacattcttataaatactatgatattcaccttgttttataaaagaaatatgtgagtagattccatctgtaactttaaaggwaacttacatgatttttgtgttcaacacta

SEQ ID NO: 369265 - DNA, 620 bp, Homo sapiens
taactgccatttcttcagctatatgtgtaacccttcttgttctcccaatacctctctaaggtaaatattagaaaccacagcttacagatatgacctcctartaggtggcatagcaagatttgaacctaggtataccttctttacgctgaaactctgatgtgtgttctctttcccctctatcatacttcctccattatatatatataattatatacaatagcatctactccatattatctgtattatttaaaaattcttttaaataaatatctttttctactgcctcagccatctgtagatctggacagagccaatcaagtttcttcagtgagatggctagagttggccatgtttgaaggaaaactggtcagctaatcttagatggacagcaaggaagctgggagcaggcagttagaaggtggaattccacctggtctggcccaccactcctccctcttctttcatttagaaaggaatggagaaataggaggattacaatggaaagacagcaaatcaccaggaaagacttttcggttggcacaaaccctgaatgatcctgtggttatatattcaactgcctatgaaggtactgctgtactcacttacatacatatgcaggc

SEQ ID NO: 369266 - DNA, 568 bp, Homo sapiens
agaatcaaatcaagaactcaatccctcttacaatagctgcaaaacaaaataaaacacctaacaataatcttaatcaaggaggtgaaagatctctacaaggagaacatagatgacacacacaaagcatagatgacacaaacaaatgtaaatacatcccatgctcatggattggaagattcaatattgtgaaaatgaccacactgcctaaagcaatctacacattcaatgcaattcctattaaaataccaatatcatttttcatagaattagaaaaaacaatcctaaaattcataygaaacaaaaaaaagatcccaaatagccaaagcattccttaacaaaaagaacaaatctggagtcatcaaattccttgacttcaaattacactataaggctattgttatgaaaagagcatggtactggtataaagtagatacatagatcaatagaaaagaatagagcattcagaaataaagccaaatacaaccaactgatcttcgacgaaagcatacaaaaacaacttggggaaaggacacttattcaataaacagcgctgggaaactggatagcc

SEQ ID NO: 369267 - DNA, 578 bp, Homo sapiens
tgggggaaactatccccatgattcaattatctcctcctggtccctcccatgacttgtggggattatgggaactataattcaagatgtgatttgggttgggacacagccaaagcatatcacagtccaagaggcaattttgccccaccccaaagaccaaataacacaacgcctcacactactcagtggattatctaccataactttaaaaacctccctatggtcagcaaaaacattcatctctttatcacccatcacagaatcaggagctcattagtttaaccttcagtccagaattgtactcaatcagaaataaygattacatttaatcattaattattaatgattattaataattatgtaatccttaattattaatgattgataattatccatttccatgcatctccactattgtcatatttatccatcatctcctgtctagtctactacatatactcctgtctatgacttcacaatagtctcaggctaatctatttttcacagagcagccacacacttgtttgaaatgcttcaaggagcttttcaataaaatccagtgtactcaccagaacctgcat

SEQ ID NO: 369268 - DNA, 577 bp, Homo sapiens
attttttgttttctgaattcctataacaygatgggcttcttgtcatgccaacttgtcctgttatatttctttatatattaatttatttgttcccaaattaaataataaactcctggaggacatggcattattttttaagtctttatttcttcacaccacttcgcacaaatattttgccactacctagtggactaataacgaagttgtggcagagattaccaagttgttcaccgagatttttgttctgttctttttaggcacagagctagatgggatttcctagcctcttctgcagggaaatgaagcctactgactgactgtgccatttccaggcttattccgtataagcctttccagtttctctctctctgcctctgttctcttcttctgataaagatgaatcctcatggattggcaaagccacatgatgaaaggagcttaggtcctgaaatcaccttgctgaggaagctgtccatagatcaggaacacctgtgttggactatcagcaagaaataaacatcaattgtttttaagccaacacacattcatgggtctacttgttatagcagcttacggt

SEQ ID NO: 369269 - DNA, 577 bp, Homo sapiens
attttttgttttctgaattcctataacacgatgggcttcttgtcatgccaacttgtcctgttatatttctttatrtattaatttatttgttcccaaattaaataataaactcctggaggacatggcattattttttaagtctttatttcttcacaccacttcgcacaaatattttgccactacctagtggactaataacgaagttgtggcagagattaccaagttgttcaccgagatttttgttctgttctttttaggcacagagctagatgggatttcctagcctcttctgcagggaaatgaagcctactgactgactgtgccatttccaggcttattccgtataagcctttccagtttctctctctctgcctctgttctcttcttctgataaagatgaatcctcatggattggcaaagccacatgatgaaaggagcttaggtcctgaaatcaccttgctgaggaagctgtccatagatcaggaacacctgtgttggactatcagcaagaaataaacatcaattgtttttaagccaacacacattcatgggtctacttgttatagcagcttacggt

SEQ ID NO: 369270 - DNA, 577 bp, Homo sapiens
attttttgttttctgaattcctataacacgatgggcttcttgtcatgccaacttgtcctgttatatttctttatatattaatttatttgttcccaaattaaataataaactcctggaggacatggcattattttttaagtctttatttcttcacaccacttcgcacaaatattttgccactacctagtggactaataacgaagttgtggcagagattaccaagttgttcaccgagatttttgttctgttctttttaggcacagagctagatgggatttcctagcctcttctgcagggaaatgaagcctactgactgactgtgccatttccaggcttattccgtataagcctttccagtttctctctctctgcctctgttctcttcttctgataaagatgaatcctcatggattggcaaagccacatgatgaaaggagcttaggtcctgaaatcaccttgctgaggaagctgtccatagatcaggaacacctgtgttrgactatcagcaagaaataaacatcaattgtttttaagccaacacacattcatgggtctacttgttatagcagcttacggt

SEQ ID NO: 369271 - DNA, 500 bp, Homo sapiens
cagccagccaacacctgttccctctagagaagtttacaagcaaactcacgtgaactgaatgagttgactgtagttatcttaatttgactttctttaagctatttcaagctttcctccacctcaagtgcaattgtttgaagctattagctagcattaatgtcaagtgactcccattacgtgaatggatgagaagtaattaaagtaaaggtaagtgttgatatctttcatggaattcttctggaggcttaaagtactgtataaactgcaaaacaatgcaattctctayggacaacaaagtacaggatctcctgcagcagtttctgaaggcaaaagaaaatgtggcaggtagatacaggtgtcttattctgatttctaaaccaccactgcccttttaaaggagaaaatattaatttgttgctaaagttaaaaattgaagaaatgatttcatagctcctagaatttacctaagaaaattacacagggtaactaatccttatcgc

SEQ ID NO: 369272 - DNA, 621 bp, Homo sapiens
atagagaagaaaaaacagaaaagtcaaggcttcatataagttaagaaatgagaaatcaataaaaactctacactagggaggagacatagaggaatttttttttcatttatctccactgatttggatgatgtagtttaatagttttaccaaatttatttttgcttcaacctgctgtcttggcttacgtaatactgagaatatatggccaaaagagcagatatgaagggttatagaattattttactggaggaaaatagcatgactattgccttccataatatataattgattcatgacaaagaataacaaaggcatatcccattaaaataaaaacccaaatgtaagatcgcttgggtttttccacaaatattcagtgcttacctacttcataccaggtatgctgctaggtacttttgtgtaatggcgacagtgatgctggcagtaaaggtagacaactaagttactgagttctttctgtgccmaggaattctctgaaatatggatgactgttaaacaagttaaattcactgagaaccttatgaagggccactgttactatctcattttactgatgaggagactgagacacagaaagaataagtcaattgttcatgttacaca

SEQ ID NO: 369273 - DNA, 550 bp, Homo sapiens
ttattcaaaacatttggtctttgtacctaagatgtcataagtttatagacagtaatatctcagagggtctgggatcatgaaaatattaggttgagaaactttctattccaaggaaatatatctgaaaactattgtctgtttagtcaaaatagctttccttaaacctaatcaaaattcttcctactgcaattctgactcatttattaggcctccacataatttagctcatcctttcatcaaaagtattcttaacacaaaatgcaatcaaactcttaatctaaataaaacaaagagcaccaattccctaaacatctatctaccatatgtctccaattgttttataagatgtgtaacttgagtagggttgtcaggcaagtattaaatttgaaattcaagttaaatttaaaatccagataaacaacaactaattttytagtataaatttgtttcaagtactatctgggacaaatattgcatgggatatacatatactacaaagtattcatttatactaaaaaagtatttattaattctctgaaattaaaattca

SEQ ID NO: 369274 - DNA, 618 bp, Homo sapiens
aaccaactggcatttaaatctcctgggtgtgttttaattttaaaatgaaagttaaattttagaaatctggacctattaaaatttgtgggggagataaaggtatttccaaacytcttgttcattagggccaacgactataagacatacaaatagatagtggtagtagaaaaatcagcagacacaggcactaaaataattcaaaagccaagcgcagggaaagaaactgacaatgagaatcatccagtttgatcttcagctctaggatgctagtttaaatgcagaatcctgggctctataccagaccaaataaatcagcctctctggaggccaagccccagtttctgaatggccactcagcaatcttgatgcacactaaagtttgcatttggattctagaaaatgattaaaataaattgaccagtgatccataaaactccatcactggaacccttagagtctatgtcattgataacattgaaatgacatcagcatgtaaacagaacattatagcttaattttaagtgatatgactcctcctaacttactgtgtcattgctgtggacaagtgagaaagttttctctgcaggtccatccagaaattattccagaactaaagtt

SEQ ID NO: 369275 - DNA, 580 bp, Homo sapiens
taagccaaaagaaaacaaaatgaacctaagatctctctacattttttgaccttaataactaaagcagagttgaatatactacagatcatccacttaaacatgatgtagatctcattggtcatacactttggttgctgaaagaaagactgagattatagaaacttttcttgccttcaatgattaaagcaatcattgagaatcaaaaaacttaaattgcttccccaagatttcaccattayttactgacggaactaagactaaaatcgagattctctgaagatttgtcctgtattccaaccattttctcaaaattaaaatggaaatagaaatccctcctcttgggagaccacacagtaccaaagaaagagggactgctttggagtttgatacatttgaacacagattctgacttcatttaccagctacaaggccttgggaagttactttagctctgagtctcagcttccttagcagaaaatgaggatgctaatgtttagtacacatagtggtttattcaacaagtatttgaggagtaacatggagccaaccattcctttagggcaacgggaagacaataatg

SEQ ID NO: 369276 - DNA, 580 bp, Homo sapiens
taagccaaaagaaaacaaaatgaacctaagatctctctacattttttgaccttaataactaaagcagagttgaatatactacagatcatccacttaaacatgatgtagatctcattggtcatacactttggttgctgaaagaaagactgagattatagaaacttttcttgccttcaatgattaaagcaatcattgagaatcaaaaaacttaaattgcttccccaagatttcaccattatttactgacggaactaagactaaaatcgagattctctgaagatttgtcctgtattcyaaccattttctcaaaattaaaatggaaatagaaatccctcctcttgggagaccacacagtaccaaagaaagagggactgctttggagtttgatacatttgaacacagattctgacttcatttaccagctacaaggccttgggaagttactttagctctgagtctcagcttccttagcagaaaatgaggatgctaatgtttagtacacatagtggtttattcaacaagtatttgaggagtaacatggagccaaccattcctttagggcaacgggaagacaataatg

SEQ ID NO: 369277 - DNA, 514 bp, Homo sapiens
ctgcaatctcatgatagaacttgaacagatgaggagttgcttcttatagatgagcaaaaaaagtagtttcttaagatggaatctcttcctggtgaagatrctgtgaatgttgttgaaattacaacaaaggatttagaatattacataaacttatttgataaagcagcagtgggatttgagaggattgacttcaattttgaagaaagttctactgccagtaaaatgctgccaaacagcactgcatgttacagagaaatctctttgacgaaagatttttctttcatgaaggaaagagtcaaccgatgtggcaaacttcactgttgccttattttaagaaattaccacaaccaccccagccttcagcaaccaccaatctgatcagtcagcagccatcaacataaaacgaaatcctgtaccagcaaatcgattatgatttgctgaaggctaaaatgaccattggcatttttaacaataaaatattttagaagtaagatatgtacatgtttttagaggt

SEQ ID NO: 369278 - DNA, 519 bp, Homo sapiens
acggtgtatcttgaagtcatcaccacaataagatctagagtatggatagaaactttttcatcaccacgataagatctagagtatgcatagaacttttctccaaataattttaatcctctttaacaaaaatacaacatatgaaaacataattggtaaaattaatgaattaggaaaccatttccttcttggaaagagcttttcagaagagactctcttaaatagtgaaattatctgaagcatttaaaatatgactcaaatgttaaaaaatgttattagcatgacagtttaaagcatttacatacrtgtaacatagggtacacttgtgaaagggaaggtaaccattgtaatcacattagtaatcaacctaaaacaatgtttggagaaagtaggctgcacctaatgttccaagatttttgctgactgagaagcaccacaggaaatatggtaataaactcttccccaacattctagttgagatgagatttgcaaaacaatagggagcgctggtcatcaaggtga

SEQ ID NO: 369279 - DNA, 556 bp, Homo sapiens
atggatagaaactttttcatcaccacgataagatctagagtatgcatagaacttttctccaaataattttaatcctctttaacaaaaatacaacatatgaaaacataattggtaaaattaatgaattaggaaaccatttccttcttggaaagagcttttcagaagagactctcttaaatagtgaaattatctgaagcatttaaaatatgactcaaatgttaaaaaatgttattagcatgacagtttaaagcatttacatacatgtaacatagggtacacttgtgaaagggaaggtaaccattgtaatcacattagtaatcaacctaaaacaatgtttggagaaagtaggctgcacctaatgttccaagatttttgctgactgagaagcrccacaggaaatatggtaataaactcttccccaacattctagttgagatgagatttgcaaaacaatagggagcgctggtcatcaaggtgaattcttagacatctcttgaccaagtcattttcttcaatgaatcaggtaacactgcagacaaaaaggcctaaattttca

SEQ ID NO: 369280 - DNA, 575 bp, Homo sapiens
tacattgtaaagagttttgcattgtaaagagttttgcacaggagatgatacatccatcgaatgtttaaaaaacaaacccacactggctgtggagtagaaaacagaactggggaagggagaccaatcaaaaggattagtaactattagtgatggtgcccaaatgattctgagtaatggaaaagtcacccccagggcaaaaggcctgagagttgaaccagaccacgtgccaccaaagccctggcaggtcaaagcagtgagccaaatcagtaatgaaatctagcagagataaatgtcaggtcctgcctgggtctaaagatcccagaactggcccacatgatctggataatcctttgtttcccttcccatgttctggactgaaaggtagatacagatgtcagagattaaaaatatattttyctaagtcagctcagtgacataaaatccacgtgtcttagttgtgtggccagttgggcttgctagcagtgcccaagctgaactccatcctaaagttctaggcctccctcccaaggagagggcaggcccaaggattccttctgtgcgggcaggtctgtggg

SEQ ID NO: 369281 - DNA, 596 bp, Homo sapiens
tacacagtggctctgacctgatactaatctggggaaaccaaaagctttactcggcctaccagtyagagtagaggcttaatggaggtcgagtgatcaatggagtttcagctcaggttcatctctcattagacccgttgagtccctggacccatcctgtgctatttccccagttccagaatgcataattaaaagagatatacttggccgggcacggtggctcatacctgtattaccagcactttgggaggccgaggagggcagatcacaaagtcagtagttcaagaccagcctggccaacatggtgaaaccccgtttctactaaaaatacaacaacaacaacaaaaaaaaatagctgggcgtggtggcagacacctgtaatcccagctactcgggaggctgaggcaggaaaatcgtttgaacctgggaggcggaggttgcagtgagccgagattgcaccattgcactccagcctgggcgacagagcaagactctgtctcaaaaacaaacaaacagagataggctcaacagctggaagaatccccatgttggttccctgacctgtaaagacttgtaacgggaagggccaagtggaagcc

SEQ ID NO: 369282 - DNA, 554 bp, Homo sapiens
cacctggtgaatgtccagctgtctgtttcaggttgtaaggttactaccaatcactaacttccagatttctgattaaatctaatgattaaagcacacagaagacaaaatagtccttatttaaatcaggcattcttatgtctcccagagttgatcattttcctatctcctgtagcacagatgtccctggttgacaatggtttgacttaatgattttttaagaatgagacacattcagtagaaactgtattttgagtacccatacagccattcggtttttcactttcatacagtrttcaattaatcacatgagatagtcaacattttattataaaatagcctttacattagatgattttgtccaactgtaggttaatgtaattgttctgagagtgtttaaagtaggctaggctaaactatgattaggataaatatattaaatgcacattcatcttctgatactttcaatttatgatgggcttattgggaattgaggagcgtctgtactcccagattgcattcttctttggctgaggaataaagcaatgttgcagttg

SEQ ID NO: 369283 - DNA, 539 bp, Homo sapiens
taatataaggggttggagtagaatgatttaaaaaataccttccaattctgatatttatctggggtttaagttgcagaagaatatcaacgattactttctggaaattagaaagaatcarttggggtggagggaaaagtgacctaaacaacttgaaatcacttgtagtaataaaatctaccctgctatcaaaagcaatttcttacacatctttagtaattaatggatttaacagtagactttgccattgtcttagttttgtagggctaccacaacaacatatcacagactggggagcttaaaaaacagaagtttattttctcacagttttagaggctggaagtgcaagatcaaagtgttggcaggtttggtttctcctgaggcctctctccttggattgaagacagctgccttctcacaagtcctcatgtgggctttcctctgtgtgcacgcatccatgtcttttcatgtgtctagatttcctctttgatatggtttggctgtgtccctacccaaaatctcatcttaaatagtaatcgtaa

SEQ ID NO: 369284 - DNA, 497 bp, Homo sapiens
aaaacatcaaactcttttacatatgccactgtatattgttttactttattargttcatattaattttatggtttaaagactcaacagtggtgccatgttgtctggtttcctctcattgggcaaaagttagtatcccagccaggagtggtggctgacgtctgtaatcccagcactttgggagcctgaggcaggcaattgcttgagctcaggagttgaagaccagcttgggcaacatggtaaaacctcatctctacaaaaaatacaaaaattagccaggcatggtggcatgcacttgtagtcccagctacttgagaagctgaggtaggaggatcacctgaacccagggagctcaaggctgcagtgatccgtgattgcaccactgtgctccagcctgggtggcagagtaagaccctgtctcaaagaaaaagttggcatcccactactgggtaattcttcttgattatctgttattctgtgttcataatattaaatcttat

SEQ ID NO: 369285 - DNA, 497 bp, Homo sapiens
aaaacatcaaactcttttacatatgccactgtatattgttttactttattaggttcatattaattttatggtttaaagactcaacagtggtgccatgttgtctggtttcctctcaytgggcaaaagttagtatcccagccaggagtggtggctgacgtctgtaatcccagcactttgggagcctgaggcaggcaattgcttgagctcaggagttgaagaccagcttgggcaacatggtaaaacctcatctctacaaaaaatacaaaaattagccaggcatggtggcatgcacttgtagtcccagctacttgagaagctgaggtaggaggatcacctgaacccagggagctcaaggctgcagtgatccgtgattgcaccactgtgctccagcctgggtggcagagtaagaccctgtctcaaagaaaaagttggcatcccactactgggtaattcttcttgattatctgttattctgtgttcataatattaaatcttat

SEQ ID NO: 369286 - DNA, 497 bp, Homo sapiens
aaaacatcaaactcttttacatatgccactgtatattgttttactttattaggttcatattaattttatggtttaaagactcaacagtggtgccatgttgtctggtttcctctcattgggcaaaagttagtatcccagccaggagtggtggctgacgtctgtaatcccagcactttgggagcctgargcaggcaattgcttgagctcaggagttgaagaccagcttgggcaacatggtaaaacctcatctctacaaaaaatacaaaaattagccaggcatggtggcatgcacttgtagtcccagctacttgagaagctgaggtaggaggatcacctgaacccagggagctcaaggctgcagtgatccgtgattgcaccactgtgctccagcctgggtggcagagtaagaccctgtctcaaagaaaaagttggcatcccactactgggtaattcttcttgattatctgttattctgtgttcataatattaaatcttat

SEQ ID NO: 369287 - DNA, 497 bp, Homo sapiens
aaaacatcaaactcttttacatatgccactgtatattgttttactttattaggttcatattaattttatggtttaaagactcaacagtggtgccatgttgtctggtttcctctcattgggcaaaagttagtatcccagccaggagtggtggctgacgtctgtaatcccagcactttgggagcctgaggcaggcaattgcttgagctcargagttgaagaccagcttgggcaacatggtaaaacctcatctctacaaaaaatacaaaaattagccaggcatggtggcatgcacttgtagtcccagctacttgagaagctgaggtaggaggatcacctgaacccagggagctcaaggctgcagtgatccgtgattgcaccactgtgctccagcctgggtggcagagtaagaccctgtctcaaagaaaaagttggcatcccactactgggtaattcttcttgattatctgttattctgtgttcataatattaaatcttat

SEQ ID NO: 369288 - DNA, 536 bp, Homo sapiens
ctctttgctttttttttttttttccaagtttgcattgaggggtgaaagtttgcttaaytgacctgtatattttacaagtgataaggttaggattttacaattcttactctaaaaagtatttccaacagtgacctggcagatatttagaaataggaaacaaaacagtttctcctctaatcgtcctccaatcgcctctaatcatccttccaccccgaaattccttacactcgagagaaaaagttacttgataacaaagctctcttaggggaccttttaaaaatacattgaagtaacacagttactttaccgtaagcacttaatgtattaaatagggcttcggtacatgattgcagtgaagtttctggctcagtcaccggctgggggatcttggactgctatgaaacctctgtacctcgagctccttaggtaaagtgggggtagtcagagcacccacgtctttgggaaactgtgagggttacagaagctaacccaggaatgcctgggagcactgccagaagaatatgaagtgctcaata

SEQ ID NO: 369289 - DNA, 553 bp, Homo sapiens
actttgttgagagttactacttgacagcaagcacagaaatgacaaatttaaaacttttacacatggcatttaccaaaattcccagtgattattttgtttaaaagagggaacctaaatatctactctattccctttcagttaactccacagaactttgtaggcatccatgaatacctgtaatagtgggttaggtgtggagataaggaatttggacaaagttgagtaagtttttactgggtatctgctttgcacccagtagtctgcaacatgagtttaaactcaggttactactttcacttatactttatggagaagatagacagtgagggaggaatgggaagctgtcatgagagtgcaccgtcttggaattacataactggggtctttcctcaataacattttgagcatctgaaaaatagtttaaaaaattgtcttaatatctattaaaaggcatgtctagkgaggaaacaggagagtctgagcaatcccttggtggcgatgaaggtggtagttcacacaagtaacagtggaggcaaaggtaagcgcaagctgc

SEQ ID NO: 369290 - DNA, 510 bp, Homo sapiens
atggtgttcagagggaccagcttctttttcagttgtctttagaactcaagaataatcaataatttagtgccccttcaacagccatactcagcaagaagcatggaacatgctgagcaagaagaatcagaagcttgatcctctaacagaaatagaagagggtagctttgcccattgccactgtctttactgccccttctgcccctccacattcagcatcactccaaggatgtgtcagcatcttgcccatgcaggtagaaatttgtgagtargcctccatacttcctcgggggaagaaagagaaactagtgctggttttaagaatgtagctggcttttcatcagaacccttatgctaacctgaccacacttgctctcggggaagttcaagcctgtgatgtgcataaactccaacaagcctggctttggtgttcagcatgcacattccataaatatctcttgcaggcataccccacagctagactgcaggattaaaataacttccaaaaggtgc

SEQ ID NO: 369291 - DNA, 526 bp, Homo sapiens
gtaggcgccaatcctggagcagtaggccatacatgctgtacctgccttccaccccctgctttctcccctggctgagaygggtctggggactgctctttggagttcatcacctcactgctgtgattggtcagagcagttcctgccatgacatagaggactcgtgtgtcctaaagaagagcctcccacctcggtgccctcagccccaggtctttcccgataatgctggcattttgtcctaaatgcaagagtagcacctcattaagggtgttggtgggcaggggatttcctagtgtagacaaaggaggtttttattccactgctactccaatggctcaagagagaccaggcatcacacaggctggcagagaatgctgcattaaagtgacctttatgaactagaggacatgaggttcctggtacccacaagatcctcctactcccagtgctagcagctacagagaccagaatagagatgacatccgctcttctggaagggcctctgacagttcagttcagaatgaggatg

SEQ ID NO: 369292 - DNA, 526 bp, Homo sapiens
gtaggcgccaatcctggagcagtaggccatacatgctgtacctgccttccaccccctgctttctcccctggctgagatgggtctggggactgctctttggagttcatcacctcactgctgtgattggtcagagcagttcctgccatgacatagargactcgtgtgtcctaaagaagagcctcccacctcggtgccctcagccccaggtctttcccgataatgctggcattttgtcctaaatgcaagagtagcacctcattaagggtgttggtgggcaggggatttcctagtgtagacaaaggaggtttttattccactgctactccaatggctcaagagagaccaggcatcacacaggctggcagagaatgctgcattaaagtgacctttatgaactagaggacatgaggttcctggtacccacaagatcctcctactcccagtgctagcagctacagagaccagaatagagatgacatccgctcttctggaagggcctctgacagttcagttcagaatgaggatg

SEQ ID NO: 369293 - DNA, 586 bp, Homo sapiens
gattatacaggtgtgcccaaccttaataaacgaaaccttaaaaccagagaactttctccagctagaatgatagaaagaagatacgtgaagtttgagaagctcaaagtgtgagagggccttgaaccaccattgctagaggagaaccatatggaaagaatgagaaaaattacaggcaacttctagtagcaaagactaccacaggctgccagaagaatttgaattcaaccaataacctgaatgagcttccagaaacatacatacacctgtaaacgcctccatttgcccttgtgtgattctgaatgcaggacccagctgaacaacacactatacccagtcttctgacctacagagctatagaaaataaatgcttgttattttttctttycttttctttttttttcgagacagagtcttgctctatcgcccatgctgaagtgtagaaatgctgttattttaagccactaaatgtgtggtaatttgttatgactgctgtagaaaactactaaaggaacagtaaaatattttacatctatcagctcagcaaaaattaaataaagtgttaatgaagattgaggaatgggaaaat

SEQ ID NO: 369294 - DNA, 556 bp, Homo sapiens
aatttgaattcaaccaataacctgaatgagcttccagaaacatacatacacctgtaaacgcctccatttgcccttgtgtgattctgaatgcaggacccagctgaacaacacactatacccagtcttctgacctacagagctatagaaaataaatgcttgttattttttcttttcttttctttttttttcgagacagagtcttgctctatcgcccatgctgaagtgtagaaatgctgttattttaagccactaaatgtgtggtaatttgttatgactgctgtagaaaactactaaaggaacagtaaaatattttacatctatcagctcagcaaaaattaaataaagtgttaatgaagattgaggaatgggaaaatatacaccagtagtatattggtcagtataagttgatgcaaayaccccagagagcaattagtctttttctggtaagatttttagagtgcatatctttagacctacaaattccacttctagggctctgtcctggagattgagcatatgctcatggagacatgttataatgttttctctcttcgtt

SEQ ID NO: 369295 - DNA, 611 bp, Homo sapiens
attctgggcactgtgagaatctctgggatgtcacaagcagcgtgcaggtaagggctgtgtcatgttgaaatacatggtctcggagaggccaatatgcagctataacattaacactgtatgatggtgttcactcaaggatgtactggaggtaaaggaaacagaaggcaggagatcccagcctaggcacaggcagaaggttggaaaaggactaaaacaaacaccctgcaaagagttccagaagaaggcagcttcacaacagatagaaaatacacattaatagctttcatttaaaaaaaaatcagtcagatatattactccctacagatatccaaatgaatggtacataatgtcaaaaggaaatacttgacattaggggcaggtgcttcctgaagactcagaaaacccacaatctcaaagagagaccatcacccagagcttttgtttttagaaatgtttaagctaaattgcwttactttttccaccattggagctggaattatgtgtatgtgttggcggggggggggcggataattttaacaaagaaacaaagggtttttttttttctgttttggagggtttttttttttttttttttagattcagaagaaaga

SEQ ID NO: 369296 - DNA, 387 bp, Homo sapiens
cacaatttgtagatctatagattgtactgtgtgcataatatttcgaaagatgaagttaaatgtcaggggaaaaatacaactaacacctaaaaatgtctcaagttctatctattgagactcagtaatgggactactggttaccatatgaatactttttaaaccatgcctccattttaataaaatttaaactaatttaaaaaaataaaatctttcacttcccttcttcatgctgcttctttccttatttttagcttktctatagttgcggtacaatggcagccaccatgctattgatttttatttaaaacatcattcacatgaacattgctctcagatgccatacaaaaaatagctttgacatatttcacccctaaaatgaaatgaaat

SEQ ID NO: 369297 - DNA, 456 bp, Homo sapiens
gctaaaacatatatttcttcataaacagtagttagaacaaaataccctttacttaaaaatgaagatagtacataaagccataagctcatatttagcaaagcctctcatcaagacttggcagaatatcgactctatgctaatacgtcattaaatattgatttattgctaaaacagtgtgttaagatttaatcaaatagcaacagataaatcaagttgccatgtaattaactaaaaattacrtaagcatccaatacttacatttagcaaaatcttgtttttaattaaccacctacacctatattaaatttaatgaaaatgatataaaattctagacttggctattttacaagagcaaaactgaaagttacctttgagttgtctatttttaatggaatgaatgtaaacaagattgtagcgggcatatttaattaacacaatgaaagaggtttttattta

SEQ ID NO: 369298 - DNA, 569 bp, Homo sapiens
cttctgtctttgtttttctcctttagttgagagagaaagaagattgagatatttatttattatactcaaggaaaattgtataaaagatcaaaatactgtattatatctcatttcagggcctcaaagaaactttgtaagagaatattctttaagctcaagaataaacagggcctcctcttcccctaaattgaractaccttactcaggattttctgaggtacatggagggagagagagagagagagaaagggagagaaagaaaaagagagacacacagagagaacatgaaaaagagagagtgaaccagctttacttagagaaacctgactttttttttttttatcacccagaagaggtggaaaatagaacaagagacatttcctaggtatctttatgacatgggaccagaaaatgtgagatggaatttgcagccaaaaatacaagtaggagaatagagtttatgtgctttggagctcagattttgattacttctactagtaatctctgccaaatccatttctccatctctaaccaagaatattagcaagttttcctctcatcaaatggcc

SEQ ID NO: 369299 - DNA, 612 bp, Homo sapiens
ataacgttattacgtattcattgtttcactctcacacctcttctaatctattttcttcccagtatcagaatggtgttttcagtgtatatcagatcttgttgctctaatattaaacaagccttttttttaacttattagctcctcataggataaaatgcaagcttccattatgattctaacaggccctgcttaaacagggccagtttatataccagtctatctggtacaattattagcctggctcatttcactcctggtgcattgaccttatatcagctccatatcaacaatcaaytccttctcaagtcaggatctctgctaaaatctaattctcactcttccctcaggtctcagtttagatgccatctccttagaggggaaaaggcaaaagaattggcatatgttgctaaaaatttatgcagtgatcttgttgcaatgatcagtttcttgacctcaatagaaaacaaattgctcagttaagattcatcttatttttggcatattcatcaactctgtaccttaaaattcaatgcctcaactatgctccctgatggaaactctaagaaaaccttgacctggacatctttttgtaatataataattgaaaacccc

SEQ ID NO: 369300 - DNA, 623 bp, Homo sapiens
actgggccaggcagacccaagagcagctggttcttttcttgattcacatctgtgtctaataattcatgcctgactttgatgtagtcattggcaaacaatatttctcaaaaccctgaatttagcccaagaatagtttcatattttatatttttaagaacttaacccatttccccacttcccactatatctcttaacacaactgagtgtgactaaaatgactcagcataaccttagtagcaatgtatttcatttgtgcaagttgttctcaagcactctctcctatattgattctatttatttttgaatgctcatggtttttcttcaacttattcttgtaayagtttaccccattagatccttcctaataggtaacattttattaccttttttttaatccaatctctactcttgtctaagctttataccatctataaataggagcaactcactctcttacatttattcagtcagcaaacttttattgaaagcgtagaatttttctggcactgaaaggtacaagagatataaaagtaggttatttcagatcctaaattaaaggtgaagggaagaaaaaagcactacagttaataataataacagctgtaaaattataataaacccta

SEQ ID NO: 369301 - DNA, 564 bp, Homo sapiens
ggatctcttataagactccttaccttgatagttctgggcctgattagtttctacttttcctaactgaaactccattgtgaggtattagaaaatgatctcaagacaaaatcagctgcgatgctctcacattttttgttacctgagttcataattttctacaaaaactggcacaaatattctgcactattttaagcactccaatcccattaaaaacttaaagaaaatattttgagcatttataaagcaagataaattatcctactaaactagctcattgctacaggacatggaatgtcaaatatactttttataaagtactattttaggcatttattttaaaataacaaaatatggagggcatgtaaaataactggagaattcttaggatgtttgatgttaacctgatattttaatattaattattttatatctactatatgtcaattaattcatttcatgttatttgtcaatatattaataatttaagracagaaaacacaagcttcatgaggaaaaaaacccctcgaacatgggttttaaactttatgttttgaatgccttcat

SEQ ID NO: 369302 - DNA, 471 bp, Homo sapiens
cagtgcatcaaaaacactactaaagctaagcaatatcatccaaatgccaacacaagctgattaaagaaaactaaattctaagctattggagtaaactgccagaatctgttttcaaaacctgaaatgctttctctgaaattcaaagtagcaaaacgtcatcctagattcttaccaggatttgattttaataaaayacactgaccttcagtcagcattcatttctacactgactcttttataaaggttttagaatcatgatatcaaaaatatccaagcaaaattaacattcactgctcgtgtattttgagtaaagctactcatgtcttctaaatgtacaatttaattcttattatacatataacatttattgctatctgtctctctaaaaacaagtataaaaataaaggttctacatttcattatatggctactctttaatttttttaatttaagtacacacacacattcatt

SEQ ID NO: 369303 - DNA, 620 bp, Homo sapiens
gcaatatgtaaaactatatatatatagttatatatatagttatatatatagttatatatatagttttatatatagttatatatatagttttatatatagttatatatatagttttatatatagttatatatagttttatatatagttatatatatagttttatatatatagttttatatatatatatatatcagaagtgtagacagtatagaagcaagccaatttgaatttgtgaatgaagacagcatagtgagattctgtatcacttaatgatggaaaatgtttcgttcttctttactgcactctgaataaatcrtacatgattcatgaataggaccagtatttgaagttttcaaaaactgagaaaaaaggaacaagagaaacgatcatgtaatttaattattgatattcaatcttttaattattttattcataaaaaagacaatatttgaacacctgctatgagccagtttctgtgctggtatttttaaaacacacacacatacacaaacagaaacaaaaacaaaattctattttaggtttctgtgaaggaagctcttgagcaaacttactacgtagcatttctacattcagaataggatccagtaaaagagctttat

SEQ ID NO: 369304 - DNA, 582 bp, Homo sapiens
tattttcattttttatctcttctttgattttaggatttgcttatacaatctgatgttttaaacacatttttataatcttatttcatattaatattgcttcatttaaggcttatgtgcatttacatttattctaaaatcacaattacattggtgatttaggtctaactatgtactaaattgagttcattgtacacttaatcctttatttcataagttcttcctttatatattggagcttttcttctgaccagtgtaacttcccttgtattttgagcttttacattttttttttctgtaatttaggatagactcttgtctcttaacaatatacagagcaatttggttttgtttcatgtatgtagttttctaagttttatggatgagaaaaataggacctgcttggtttctgtttctcataatccttagygctcaatccctggacgcttgtagaatttttttcgtctttgatgttaaaaatctgcctccattttgaatttcaattcacctattctatgcttagatttttattactatatattttttacttatttacttttttcagcctcttatctaattctcttt

SEQ ID NO: 369305 - DNA, 548 bp, Homo sapiens
accttattgcatcattccatgcctccaagtcttcaccaggaaatactaatttcttgcaatttgcaacatggagctcgctaattcctatctaattttccagatatgatggctctggtaagttctattttatgcagaaaatcaatattaccttttggtcaagtctttaatataattattttccaaatagtcactttkctagctagaggatcttttataactgtatctgaaatttggagttgagactaatgcttattctgttatttagattaaggctaagtctaagccatttggatatcttcttttgtgaaggttctttcaagtcttttgccaatgtttcaaattgtgtttatgccgtctccttattgcttttctttactgcatgtatttttttttcttcaacttttattttaagttccaggttatatctatgcaggatgtgaaggtttgttacataggtaaatgtgtgccagggttgtttgctgcacagatcaacccatcacctaggtaatcagcccagcatccattagccattcctccagatgcatgtg

SEQ ID NO: 369306 - DNA, 530 bp, Homo sapiens
cacaatctcatcgggttaattctacatttcattggtatgatcattcagcttccatcttcatactacaaatgggtattgataatgtcatttagcataaagaagccctaaccaattacacacaaatgatagctacatgggtattttgttattaaacaataaagttatcttatgagaaaaagctatattatagaacatctggcttcagacatatagcagcccaaggggaaacttgcatgatcattaaaactgagtgctatgtctatataccagataaatcagataatattattaaaccaatggctaatatgaaaacccaaataaataaccttttgaatccaacaccctttctaaacaattggctaagaagatggtttggatcttggggaacttggtggcaaaaactgttacttactctrggaattataatcatttattgtgttttattgtttttgtcttcatttttgctgcaacatctctttgcaatggagtaaataaatgcatgaccaaaaaaactaaaataatggttgctc

SEQ ID NO: 369307 - DNA, 544 bp, Homo sapiens
ccaaaacaacaacaacaataataacacaaacaaacaaaaaacaataaagtggggattgagggaagagccttgaggctcccagaagggttggggagaaagattccttcagggaccagggaggacagcacttacccagtcacaaatttacctgttttaagaattggtctcttttccaccagtatgaagtacaattagttttcaaatatgtagactgggaaatcgaagtaagtctttgtgaatgaaaggtctacttaagtttctttttgacaacccaaagtgaccccagcttyggagcttccaaggactctggagagaaggtaacagattaagtgttccaactgtgcacctccctcgtccattggcatcttgggaaaaggaggaaagaaccaactgtgacctcagcatgggagcagaaccagaaaaacccagggagtctgggggagagggaggagagcagggagaggtacaggcattgttggataatgagcttaacttatccaacaaagctgatctgcaaaaccaacaggcaccttaggaaaatcac

SEQ ID NO: 369308 - DNA, 489 bp, Homo sapiens
agaaaaagtgttctaatgagtatttttcttttctttttttctttttcaagaggaggccttggtagttctatgctttcrttcccaagggtcccgtttcctgcccctcatcctggagtttctaccaaggtttcttattccctctttcctgttctccttttcatgagttttttttttgttgttgttattttgttttgcttcattttgttttgtttttgagactgagtctttggtctgtcacccaggctggagtgcgttagcacgatctcagctcactgcaacctctgcctcccagattcaagccattctcctacctcactcagcctcccaagtagctgggattacaggtgcccgccaccatgcctggctgattattgtacttttaatagagacaggatttcaccatgttgtccaggaacttctgacctcaggtgatccacctgctttggcctcccaaagtgctgggattacaggggggtgccaccgcacctg

SEQ ID NO: 369309 - DNA, 565 bp, Homo sapiens
ttttaatagagacaggatttcaccatgttgtccaggaacttctgacctcaggtgatccacctgctttggcctcccaaagtgctgggattacaggggggtgccaccgcacctgatgaagttttatttcttttggccaccatctgtggctttgggacttagtcttagtttacacaccacctaactgggaaataaycgggaaagagtgaattcataaggagtgaaatcactggttccactgatttggggaatggagtagaaatgggtaaagaaatatactcctggcacagaaggattgatgttcacagaggttaagttcgggaaaacagaatgagttctgaaatccatacatttgaattacaagggatttcatgtaaaaggaggagaacaacggccttttccaactttttggatggtatcagagtctgttttgcatataaaagcttgttttagtgctttagaagcatgacatttaggatgctgaaactaatcgtgctttgaatcttaacagtttcagacttcacttaccactgataccaatttgcacccgctcattatggaagttgtt

SEQ ID NO: 369310 - DNA, 517 bp, Homo sapiens
cattaggtatttgtcctaatgctctccttccccttgccactatgccccaacgggcctatttttatttttttatcaatacatagttagamacatttatggtatacatgtgatattttgatgcatgcattcagtgtgtaatgatcaagtcagagtaattaagtcatccattactttacacatttatcatttctttgtgttggaaacgttcaaaatcttctcttctagctattttgaaatatacaataaattattgtcaactatatcatcctactgtgctacagaacactagaacttattccttctttctaactgtatctttgtatccattaaccaacctctcttcatcctcctcctccctacccttcccagcctcttgtagccatcattctagtttatgagatcaacttttttagctcccacatatgagtgagaatgtgcaataaaatttttgaaaatttagtaatcgggtctcacaaggctgtataatcttgttctactacatcacttgatccccaac

SEQ ID NO: 369311 - DNA, 517 bp, Homo sapiens
cattaggtatttgtcctaatgctctccttccccttgccactatgccccaacgggcctatttttatttttttatcaatacatagttagaaacatttatggtatacatgtgatattttgatgcatgcattcagtgtgtaatgatcaagtcagagtaattaagtcatccattactttacacatttatcatttctttgtgttggaaacgttcaaaatcttctcttctagctattttgaaatatacaataaattattgtcaactatatcatcctactgtgctacagaacactagaacttattccttctttctaactgtatctttgtatccattaaccaacctctcttcatcctcctcctccctacccttcccagcctcttgtagccatcattctagtttatgagatcaacttttttagctcccacatatgagtgagaaygtgcaataaaatttttgaaaatttagtaatcgggtctcacaaggctgtataatcttgttctactacatcacttgatccccaac

SEQ ID NO: 369312 - DNA, 574 bp, Homo sapiens
gtttacatcatcctaatcactgctgcccagccattctcctgtttatgctggaagaagccccgctggtagggggaatcccaagtcagagctgcagaccaaagagcagacattaaattccacttaaatactggatgctctcccctcccaattgttctggatgctgctatacttgccccccgcctaggggmcccattatgtaggaggtcccaaatagccatcggttgtacttgctttcctgttgctcatgccttatccagccgaaagatcaaaagcaaatggaaccatagtgagattctgcaccacccatcgggtttctgtagctccagagagggcgaatgagcatgatgatcacatattcccaaaaccggccaggtgctgggccaacaggtgatttactgctgtggaaagccaataggagattactgaaggggtcaggccataggacatcagtggctaaatgatttcctaatggcctgaaagagtcacagtgcctccctccctgcctaatttcatagcagagggtgtcctttggactagggagagaaactggattattaaccctagctggatggtt

SEQ ID NO: 369313 - DNA, 574 bp, Homo sapiens
gtttacatcatcctaatcactgctgcccagccattctcctgtttatgctggaagaagccccgctggtagggggaatcccaagtcagagctgcagaccaaagagcagacattaaattccacttaaatactggatgctctcccctcccaattgttctggatgctgctatacttgccccccgcctaggggacccattatgtaggaggtcccaaatarccatcggttgtacttgctttcctgttgctcatgccttatccagccgaaagatcaaaagcaaatggaaccatagtgagattctgcaccacccatcgggtttctgtagctccagagagggcgaatgagcatgatgatcacatattcccaaaaccggccaggtgctgggccaacaggtgatttactgctgtggaaagccaataggagattactgaaggggtcaggccataggacatcagtggctaaatgatttcctaatggcctgaaagagtcacagtgcctccctccctgcctaatttcatagcagagggtgtcctttggactagggagagaaactggattattaaccctagctggatggtt

SEQ ID NO: 369314 - DNA, 512 bp, Homo sapiens
aggacacctgttggctgtctgagagctgaagctagaaggtagggttgcctggtttccacctcatctggcacatgagcagccagagactcrgatttttgcccctatgggcatgtctacagatgactggaaaagagctgcaagtattgattttggggtcacgaatacattttagcaagtaggtaaattagcaaatatggaatctgtgtataatgaagattgactatgtcctatttctgtgctaccctgaatttatgtggatatgtgatgattttaacaacactacggctcaattatgcatgtgacttcatgctagttttagcgccatttagattttgaactgtaagtttatcttgcatgattttattatttctttccatcccacttaaagaaaggtagagaattgcctgtggtttactggtagtggtgacggtgaatttcctccagggcacgaaactagctttccaggggtaatacgaatcagctacagagcaacacaaaaggaattaatagaa

SEQ ID NO: 369315 - DNA, 562 bp, Homo sapiens
cccccaaccatgtgtgtgtgtgtatgtgtgtgtgtgtgtgtacacaatgctgtggaatgaccacatggctccttttgggtaaatttgcaaagatcttctcaattccccttttgtctyttaagacataattatttataatttgtccccctgtggatggagagccatccagtgtacacagagcccacctgggatgaaagtgtctaagaaattacacatgtacaaatgcaatgtccaaaatatatcatcactcagggctctgagctagaatgacccagaatgaagaaaggatgatggctgtgccacctaagactaaaggagttgagatgcttgtgtgcatgcagtcaatcagagaaaaaactgcaacagaagatggcaaccatccagctcattcataacttacagaatcagtctgtggcatccaacggggaaccggagataacagaagccatctggatgacttcaataaaaataaaccaatatttgatgtctcttgtcagctataaacataagaaatagggacttaaatgcttccttttaattgatacttctgaaaatgttctta

SEQ ID NO: 369316 - DNA, 562 bp, Homo sapiens
cccccaaccatgtgtgtgtgtgtatgtgtgtgtgtgtgtgtacacaatgctgtggaatgaccacatggctccttttgggtaaatttgcaaagatcttctcaattccccttttgtctcttaagacataattatttataatttgtccccctgtggatggagagccatccagtgtacacagagcccacctgggatgaaagtgtctaagaaattacacatgtacaaatgcaatgtccaaaatatatcatcactcagggctctgagctagaatgacccagaatgaagaaaggatgatggctgtgccacctaagactaaaggagttgagatgcttgtgtgcatgcagtcaatcagagaaaaaactgcaacagaagatggcaaccatccagctcattcataacttacagaatcagtctgtggcatccaacggggaaccggagataacagaagccatctggatgacttcaatmaaaataaaccaatatttgatgtctcttgtcagctataaacataagaaatagggacttaaatgcttccttttaattgatacttctgaaaatgttctta

SEQ ID NO: 369317 - DNA, 562 bp, Homo sapiens
cccccaaccatgtgtgtgtgtgtatgtgtgtgtgtgtgtgtacacaatgctgtggaatgaccacatggctccttttgggtaaatttgcaaagatcttctcaattccccttttgtctcttaagacataattatttataatttgtccccctgtggatggagagccatccagtgtacacagagcccacctgggatgaaagtgtctaagaaattacacatgtacaaatgcaatgtccaaaatatatcatcactcagggctctgagctagaatgacccagaatgaagaaaggatgatggctgtgccacctaagactaaaggagttgagatgcttgtgtgcatgcagtcaatcagagaaaaaactgcaacagaagatggcaaccatccagctcattcataacttacagaatcagtctgtggcatccaacggggaaccggagataacagaagccatctggatgacttcaataaaaataaaccaatatttgatgtctcttgtcagctataaacataagaaatagggacttaaatgcttccttttawttgatacttctgaaaatgttctta

SEQ ID NO: 369318 - DNA, 494 bp, Homo sapiens
aatttcatactcattaaacaatagctcctcattccctctccccacaattcctggcaaccattattctaatttctgtctccataactttgacaactcaggcacctcatataagcagaatcgtacagtatttgtgcttttgtggctggcttcttttgtttagcataatgtcctcaggkttcctccatgttgcagtatgtgtcagaatttccttcatttttaaaactgaataatgttccatggaatgtatacatcacattttcttcatccattgataggcacttgggctgcatccacattttggctattgtgaataatgctgctatgaacatgggtgtgcaagtatccgtttgagtctcagctttcaattctttggggtatattcccagaagcagaattgctggcttgtgtcataattctatttttaatttttagaggaaccattatacttttttttttccatagcacctgcacaattttaactttacaggactgga

SEQ ID NO: 369319 - DNA, 617 bp, Homo sapiens
gttgaaacacgaggtactcaaggtggcctgcctgccattttgctttcaggggcctgagcacccagtggcatggatgtgggtctgcatcccatgtgatgtgaatgtcctgcctgttctcaagtgctgtgaagtgcactgtaaaacactaatctctctcagctgcacccactcaggcttattcagaactgcacaaggctcattgccttggaatctttgtagagaggaaaactcaaggcagctagctggaccttagtatcggggcaaatggaggttctgacaggtaaactggaaacagtgccttccaaagggaaatctgccattttgctttcttttggtgccttcattttctgcttcactgggaatttgtgattgtagatatagaatatgaattttaaaactctcccatttgggcttccattttaatgtctctgagttggcaatacacggaccttttcttctgaacttctggacatctgcttcttcaagtctaaggtagccttcagactacctcctrtttctcactctcctactccacattcctaattccctataatatctaaccgctgggcctagcataatttcctaattgttttctgtattcacatctttactagctc

SEQ ID NO: 369320 - DNA, 591 bp, Homo sapiens
gaaaatcctgctcaaaactatgtaaatctaaaaggagatgtagtggctgagaagtggtgggcttaatcaagctttagttttgcagaagctacatgcagggctctgatgatgcccacaaaattcacttcccctcctttcttgtggtttcattctgacagcagcttggtttcatgatagccagatggctacagccctstagatttcccaccctgtatctcacgtctaaggaaaaacctcccttataaacggtataatgaaaattccaaacctgatttgccttacccataattagcttcctttcccactcctgaggcaattactgtggtcagctgggtatgggatagttgtttcattacaaaagtcagtcagggcctacccttcccccaattgaaaatagggtcaaactcaggcaaattgcctgggctgacagtgtggacaggttgtttctgaaagataattcaggctagtcttctatctggaaaaaagacgtctagacaatgggttgcaaaaatgacagacgtctattaaaactaggatgaaaaatgtaactgggtgatttcttaggttctttccaatgccgcaatcctatga

SEQ ID NO: 369321 - DNA, 591 bp, Homo sapiens
gaaaatcctgctcaaaactatgtaaatctaaaaggagatgtagtggctgagaagtggtgggcttaatcaagctttagttttgcagaagctacatgcagggctctgatgatgcccacaaaattcacttcccctcctttcttgtggtttcattctgacagcagcttggtttcatgatagccagatggctacagccctctagatttcccaccctgtatctcacgtctaaggaaaaacctcccttataaayggtataatgaaaattccaaacctgatttgccttacccataattagcttcctttcccactcctgaggcaattactgtggtcagctgggtatgggatagttgtttcattacaaaagtcagtcagggcctacccttcccccaattgaaaatagggtcaaactcaggcaaattgcctgggctgacagtgtggacaggttgtttctgaaagataattcaggctagtcttctatctggaaaaaagacgtctagacaatgggttgcaaaaatgacagacgtctattaaaactaggatgaaaaatgtaactgggtgatttcttaggttctttccaatgccgcaatcctatga

SEQ ID NO: 369322 - DNA, 591 bp, Homo sapiens
gaaaatcctgctcaaaactatgtaaatctaaaaggagatgtagtggctgagaagtggtgggcttaatcaagctttagttttgcagaagctacatgcagggctctgatgatgcccacaaaattcacttcccctcctttcttgtggtttcattctgacagcagcttggtttcatgatagccagatggctacagccctctagatttcccaccctgtatctcacgtctaaggaaaaacctcccttataaacggtataatgaaaattccaaacctgatttgccttacccataattagcttcctttcccactcctgaggcaattactgtggtcagctgggtatgggatagttgtttcattacaaaagtcagtcagggcctacccttcccccaattgaaaatagggtcaaactcaggcaaattgcctgggctgacagtgtggacaggttgtttctgaaagataattcaggctagtcttctatctggaaaaaagacgtctagacaatgggytgcaaaaatgacagacgtctattaaaactaggatgaaaaatgtaactgggtgatttcttaggttctttccaatgccgcaatcctatga

SEQ ID NO: 369323 - DNA, 591 bp, Homo sapiens
gaaaatcctgctcaaaactatgtaaatctaaaaggagatgtagtggctgagaagtggtgggcttaatcaagctttagttttgcagaagctacatgcagggctctgatgatgcccacaaaattcacttcccctcctttcttgtggtttcattctgacagcagcttggtttcatgatagccagatggctacagccctctagatttcccaccctgtatctcacgtctaaggaaaaacctcccttataaacggtataatgaaaattccaaacctgatttgccttacccataattagcttcctttcccactcctgaggcaattactgtggtcagctgggtatgggatagttgtttcattacaaaagtcagtcagggcctacccttcccccaattgaaaatagggtcaaactcaggcaaattgcctgggctgacagtgtggacaggttgtttctgaaagataattcaggctagtcttctatctggaaaaaagacgtctagacaatgggttgcaaaaatgacagacgtctattaaaactrggatgaaaaatgtaactgggtgatttcttaggttctttccaatgccgcaatcctatga

SEQ ID NO: 369324 - DNA, 540 bp, Homo sapiens
tgctgtgagcaagaaaaggaattgatggggagtccatttaaagcataaatgcccctccacagttaggagattttaaattttgaaaaaattgggatttcatcagctaatctgtttctcttccccaaaggactctctgtttttacttaaccaagtatgcattttgtgcagctgtaatgcggtgtctgtgcatttctctcttgatgtcacccctcctactccccgacacacaacacccatgcctggaagtgtgcaaaaargagaaagaagcagccatctctccaaaacagactcctccccacccccgcacttatgcatattccaatgtgcccaaaaatgtgatcaatcatagattatttaggtttgacaaatgcttttcaaaattcatgtgatccctggaagggttaaggctcattcacactccgagtaaattgctttaatgagataatcagatcaccagctcctgagggctgccagctcagcaaaatttcttctgcaaatgtgcacttttgttttgagagtaggagggggtagggaaggcaa

SEQ ID NO: 369325 - DNA, 517 bp, Homo sapiens
aacatgctctcccatgggcccctcccacattgctgccacacttaccccagattctgttggctttaaaggagtcttaaaaaaagaactaacaagtatatcacttaaatcacaaaagctacaggagctggaaagaacagtcccctagtttcacagacaagaaattgtttagagtcaaagccaaaactagaacaaagggtcttctgccatcaagtctaattttctttctgctaagtcatatgtgtccactaaaaatgacctgaaaatrccttgaatattatgtttctgtatgagctcccaactcccaagtatataataaaaatgaaaggccagtccttataaaaattggaaatgatagtagttgttctgacaccattacacctgtggatgtctcctgaatttacgaggtgccttccaagcactcactcctcctactttactcagaatgtctgctgataaaatagtgttacgtttgtcaggtagggaccctagacacaggtctttcctacagttgttgtaa

SEQ ID NO: 369326 - DNA, 550 bp, Homo sapiens
aggttattttcagtgaagtgatgagaagraagagttcaaataggattgatttaatagagctatgatgtgaaaaatctcacaacatgttttctgcctgaaatggccaatcatggaagcattaaaatcagagtggggaaggaagcgaaggcatcccagagaggcacccaaattaaagaatgatagcaccttgccattcctgtgtggagaaataaaagtgttaaagaatgagaaatagcgaaagaaacatttgaaggagtcatcatctgtgagctacaaacagcttcagccataaatttagtgcaagaaaatgtccccactaccctctcttcaccaatgacccaagaaattaaaagaaaaccttcatgttttttttgtgcctctatctccctacttcctccaaagaatacactctttcttacctgtattttgttcctattatcacaaaattttattctctttaatatttcaataatgtaattggcttgtttctcttgtgctattcactattctcaaagagtattattcatttacacactctttaaagctgcct

SEQ ID NO: 369327 - DNA, 550 bp, Homo sapiens
aggttattttcagtgaagtgatgagaaggaagagttcaaataggattgatttaatagagctatgatgtgaaaaatctcacaacatgttttctgcctgaaatggccaatcatggaagcattaaaatcagagtggggaaggaagcgaaggcatcccagagaggcacccaaattaaagaatgatagcaccttgccattcctgtgtggagaaataaaagtgttaaagaatgagaaatagcgaaagaaacatttgaaggagtcatcatctgtgagctacaaacagcttcagccataaatttagtgcaagaaaatgtccccactaccctctcttcaccaatgacccaagaaattaaaagaaaaccttcatgtttyttttgtgcctctatctccctacttcctccaaagaatacactctttcttacctgtattttgttcctattatcacaaaattttattctctttaatatttcaataatgtaattggcttgtttctcttgtgctattcactattctcaaagagtattattcatttacacactctttaaagctgcct

SEQ ID NO: 369328 - DNA, 608 bp, Homo sapiens
caggtagcaggcatagtacccagtaggtggttttgccccctcttaaattctccagtgtctattgttttcatcttcatgtccatgtgtactcagtgtttagctcccacttataaatgatatttgattttctctttctgtgatagttcgcttaggataagagtctccagctgcatccatgttgctgcaaaggatatgattttttaaaaatgttttatgaccgtgtagttccatggtgtgtatgtaccacatttattatagctaagttgacaaacttctatttcctctttcaaaaccatttcaactcacagtttcatcttatttttgctctactcattatcactagaccttttttcccccattttctctgcytcatatcttttctttgttcaggtctctgttttttccatcagtgggaaattcttgataatgaactctaggtctctttgtttgttgctttttcttgagcagttttcttctcttcttacctccacgttcagccaagcatttttacgtgccgttttcttatgtgtttgtgaacaaataattgaaatttgaaaggtaagtgccacagaccaaaagagccactcgaattgcctccatcaggtttg

SEQ ID NO: 369329 - DNA, 608 bp, Homo sapiens
caggtagcaggcatagtacccagtaggtggttttgccccctcttaaattctccagtgtctattgttttcatcttcatgtccatgtgtactcagtgtttagctcccacttataaatgatatttgattttctctttctgtgatagttcgcttaggataagagtctccagctgcatccatgttgctgcaaaggatatgattttttaaaaatgttttatgaccgtgtagttccatggtgtgtatgtaccacatttattatagctaagttgacaaacttctatttcctctttcaaaaccatttcaactcacagtttcatcttatttttgctctactcattatcactagaccttttttcccccattttctctgcctcatatcttttctttgttcaggtctctgttttttccatcagtgggaaattcttgataatgaactctaggtctctttgtttgttgctttttcttgagcagttttcttctcttcttacctccacgttcagccaagcatttttaygtgccgttttcttatgtgtttgtgaacaaataattgaaatttgaaaggtaagtgccacagaccaaaagagccactcgaattgcctccatcaggtttg

SEQ ID NO: 369330 - DNA, 581 bp, Homo sapiens
tcttgtctgcgaatgccccacttcacattgtagctggaggacactagaggcactctgccctgggttttataaccttggcacaaccttgcacggagcacaagcattgtaggacatcctgttctaggaagaaaaaggacatagcctggaatgttccagacatttcctctttatctcaggacatttcattattgacttattctacaattattctgagagctgcaataggcagggtggggagagctgggttagccagcgctatctggagacctgtcttcctgcaaaataatgttagcttttgtgttttgagaatacgtatgtatgtttgtttgtgttcagtattcagtaatcttaggctgtagtaaagttttcaatttctgtcaccatcaaacgggtataaaagagaaaaagcataatacataatcctgttgtcagctaacagggagagcaaggagagagagagaagcagaaagcatgcactatgcgctaarttattttatggttaaataattatactggtgttaatttcatgtggtgactttgacttcattaacatatatcacattttatggctattttgtcaa

SEQ ID NO: 369331 - DNA, 581 bp, Homo sapiens
tcttgtctgcgaatgccccacttcacattgtagctggaggacactagaggcactctgccctgggttttataaccttggcacaaccttgcacggagcacaagcattgtaggacatcctgttctaggaagaaaaaggacatagcctggaatgttccagacatttcctctttatctcaggacatttcattattgacttattctacaattattctgagagctgcaataggcagggtggggagagctgggttagccagcgctatctggagacctgtcttcctgcaaaataatgttagcttttgtgttttgagaatacgtatgtatgtttgtttgtgttcagtattcagtaatcttaggctgtagtaaagttttcaatttctgtcaccatcaaacgggtataaaagagaaaaagcataatacataatcctgttgtcagctaacagggagagcaaggagagagagagaagcagaaagcatgcactatgcgctaagttattttatgsttaaataattatactggtgttaatttcatgtggtgactttgacttcattaacatatatcacattttatggctattttgtcaa

SEQ ID NO: 369332 - DNA, 579 bp, Homo sapiens
taaagtggaccaatcagcactctgtaaaatggaccaatcaacactctgtaaaatggaccaatcagcactttgtaaaaatgcaccaatcagygctctgtggctagctagaggtttgtaaaatggaccaatcagcactctgtaaaatggaccaatcaacactctgtaaaatggaccaatcagcaggacatgggcagagacaaataagggaataaaagctggccaccccagccagcagcagtaacctgctcgggtccgcttccagctgtggaagctttgttcttttggtcttcacaatgtatcttgctgctgctcaatctttgcgtctgtgccacctttaagagctgtaacactcactgtgaaagtccatggcttcattcttgaagtcagggagaccacgaacccaccagaaggaataactccagacacagtatgctatgagaaagagaggtatgaactgtaataaatgtataatgaaatacaaggaagatggtaccaatttgggcttcgtgactctgaatatttcagtattgactgagctttgaacaagttctaagtaatttatagtactgttaaaagcta

SEQ ID NO: 369333 - DNA, 579 bp, Homo sapiens
taaagtggaccaatcagcactctgtaaaatggaccaatcaacactctgtaaaatggaccaatcagcactttgtaaaaatgcaccaatcagcgctctgtggctagctagaggtttgtaaaatggaccaatcagcactctgtaaaatggaccaatcaacactctgtaaaatggaccaatcagcaggacatgggcagagacaaataagggaataaaagctggccaccccagccagcagcagtaacctgctcgggtccgcttccagctgtggaagctttgttcttttggtcttcacaatgtatcttgctgctgctcaatctttgcgtctgtgccacctttaagagctgtaacactcactgtgaaagtccatggcttcattcttgaagtyagggagaccacgaacccaccagaaggaataactccagacacagtatgctatgagaaagagaggtatgaactgtaataaatgtataatgaaatacaaggaagatggtaccaatttgggcttcgtgactctgaatatttcagtattgactgagctttgaacaagttctaagtaatttatagtactgttaaaagcta

SEQ ID NO: 369334 - DNA, 595 bp, Homo sapiens
attagaattcaaaacattttcaattccttcccgaaaatgatgagctaatgttgaaatgcctatgaagacagaagaacaaaagaaaatgttgcaggctaaggtatctgacaagaatggagaaaagtgtgtcacagattgtaaaatttagctcattgagaagggaacagaaaaatgatgcatgatacttcaaaagggggaaaaaagtctgtcatgaagcttctgagtccagattgtctggatgagcagaaatattagaaacaagctaatcactgtctgtcttttactctcccagttaaaaacaaaagggaaaaagaagccactcggtatttcctacgtgtactaatgaaaaaaacttttattgttcctttctcaggagttgyggagcaaaggtaactttatcatgtggttgcagtcataaccacttgtgaaacttaaaataatgatgcctagacactattgcagaccaatgaaatcaaaatctctaagggctgggtacggtgggagggttggaggcattgatataaaatttctgcaagtcatcctagtgtacagttatgaaagcaaaacattggaagaaatagtgcagcaaggaagg

SEQ ID NO: 369335 - DNA, 646 bp, Homo sapiens
ctgcaatataaatgaaatcaagtatttggagctgtcctgaaagaacagattctagttaagggggcattgagggagagcattcttctataaattgactttctaatatatcatgtttttcataagcacttcataaatcttgacacatttctttgaaagtatattatcaccactttataggcaaggaaattgttttggaaagcagagctgggatttgaactagcattgccygatcctagtgccttatgctcttataattactgttttccacatttacttaaccttttatcaatttttgacatttagagcatttctcatttccaacaattataaaattgttggatggtttcatgtctgtattttcttccccatgtttggagttacttctttggaacagaatctcagaagttattcgagactgtgacaaggtttatgtttttttttttacatattgccaaattgcttgcaaaggagttgtacaaaattacaatgcatccagaaaggtatgatagctaggtctcaagaatatttaattattttcaatttaataggcaaaaatatatatattttatctcatttcttaattttcatttggtttatcggtgaatcagggcatttccgtgtggtaagttggtttgctttgtccatt

SEQ ID NO: 369336 - DNA, 633 bp, Homo sapiens
cagaaaataggtaggtgggcaaatttaggttataggtataggtacaggcagagagtaagttataaatgagcgcaaaactgccccgacgtgcttcatggaatcatcaaatatcagagtttggaacacatgaggaagttgaggctcagagaggttaagtgacctagccagcaagcaagggcaggtctgatacrggaaataaactatcttgcctctccactaaataatgcaattgtgtcccaaatgcatagggaggactgtctcctttcagcagccagaagttctttgaagagatattgacccaatggaatgacaacccccatctagcatgaaaaagacaacaataacacacaaacataatcttatttcggcacagtaaaaaccctctaacgtaggaagcagaaactggaggtggaattacttgctggactttcctttcacctttgtggagatgcccagtgcagtaggaaaggaacgaggctcactttcatcctcttcgatgtagttcactatgggcctggagctggtgaaagtgtgttttcactaaattaggtctgtatgataacagtgaggaaatttatttccacactaccaccaagctagaagcttgccctaaccaaatccacaacaggaatg

SEQ ID NO: 369337 - DNA, 601 bp, Homo sapiens
caagtctaactgtatccttagtctgactcttctaacttctcatgaaaatataactctaactggggctacctggatgcaactgctttgctcattttattagacgagcatctcttgacttctatctttcccagtatttaactcaattctgattagtccttcttccttctcttaacaatcacttctctttcatcaggttctggcacacaattacatgcacggtgccaaaggaaccatttttggcattagcaatagatatttcctggattaatctattccgtttttaagatttaaaaatatatttgtaacaactttggtcctgcaggggcagaaacgtgtgatactttttctcacccatcgtaagtgggtgaatgttcctcatccaacactctcataaaccaaacacagtttaacaacaaaaaagcwcaacaaatttattaatcaaaattttatgtctcactagagcctttagaaatgaagacccaaattccagggaaaactgtccacatttatgcttagattctatgaagaatggacagctatgtagaaatgtgattagataaaagggtatatctaatggtaataaactaagagggtgaaccca

SEQ ID NO: 369338 - DNA, 594 bp, Homo sapiens
ctgatcagattctttctggcctctctgtagcacttcttccttctgggtatgaggcactgaccacctgcaatgagggtcttcaagggaaaagggagagagttacctttctaggttttatgccatgctttggggaagatgagttctagcttctgtaaccagccttggagaaaagaaatactgatttctatgtttcacttccagggagagagagaggtaggagacatgattggagaagatcagaaagacctcacttctgaggtcttccagtctccttcagtttaaaatactcagcatgccaaagtatcatactttsgggtagtgggttctgagccctacgttttctaatgtgttctcttgtacaaactgcaaataaacaaacaaattcctgaaagactaagatgaaaaatctgatgtaagagaaaggtatgaaggaaagataaaactaagaaagagatgatgcaaacagaaaaataaagtataatctcagtgtgatcaaacattattaaatgaggaacaatttttaagccagaaagaatattagtctacctattagaaacctatttttgtatgttttaatataaattaaaaacatta

SEQ ID NO: 369339 - DNA, 629 bp, Homo sapiens
atgccattcttcccacgcaagcattagtccagcagtcagcccatccagaatacatgccgaaagcatttcacaggggaatacttaaaaagtgtattttacatttttagagatagagtttcattgaaatctcaatttgtgtgcaggactcattaagagattgagataatgctttcatttgttgatgataaacgttaatttattttctctattaagccactgcaagtctttgggttcaggatgcaataaatccttatatgaaagatctggttcagacattttattccctgtccattggcagacacaattttccttaactgcaaaatcatatcttggggtcataaagaactgtcgttgcttctaaatcttcaaaatttgtttcatttaaatgtattggccaattgctgcagttaatgatgatgaataggattaagattaaatttttaataaactggattgactgtagccataggcagaaactagytatctaaatgatgtcatctctgttgctagaagtttcctgcattataaatattttcctattaggttttaaggtacctaaaacttcgtttaaaattatttgtttaaaccattggtatcataaaaccacattaagatactcatcagggaga

SEQ ID NO: 369340 - DNA, 552 bp, Homo sapiens
gattttctaaatcaacacctgtcagagtaagtttctctttcagaagttttctgtaagttactctaatttttatcacggttcttaattgatcccactgtttagccagatataattttgatgtttactccttgtcctttctattgaacttacattatccttcttattcttcatgccttcttaggaaacacttccttccagataacccctaagccaggttatgtgttgttgctatatgtagttggaacaytgtattttttccttatcacttatataatttttggttatttatttagttatctatatctgtaggtctatgaggagaagtacataccttgttcatttttatatccctgtatcctgcacaaagcctagatcaaattatgcttaataaacatttattgaattaataaatatcatatttttgaatttggaaaattagtatttgtaaaattccatcatgacactgactatgaagttctttcaaactatattctcttaccttcagtgggttaatatatttcagaaccctaggtcaatttcagtactaggtat

SEQ ID NO: 369341 - DNA, 541 bp, Homo sapiens
tcatagactatttgcaggtttcttacttaatcctccttgagcattggtggaaacctgtggaggcttgaatgaaggccttgtagcgagggtatgcagcaaatcttgttgggaagcagcctctctgagctaaatgacaagttagcatcccctaagttagcacatctgagtgaagaaatctgtggaaaatttgttttccaaagatatttgatattctgcgacctatttaaaatttaaagtaactttgggggccagtcatyaggagaaagtgtcaaatattctctctttgagtacacttatttaacaaatttagctaggcatttcttcagtggtactctcagagacaggacactggtacggagatatgtatgagaatttggtagtgtagctgttttctccgtagtccttgctctagttctacataaagactttggtcttcaaactgcccaacccagccttatcccctaagtaaagagaactcaataaatgtggtcatgtaaaggaataatttatgatgcttgggattaaaaacaaataccaaacc

SEQ ID NO: 369342 - DNA, 546 bp, Homo sapiens
tcatatgtgttttgtattttatggagcttttatgtttgttcacagtgggagtgttggtctgttacaaggtattttgtcatagctggaagcagaagtctcaatccaatgatgtggattagttggaagtttgattagcttctggctgaggagactgagaagagctctaggcagatgttgtacgaaaaaagtgtgaawgtcgagatgaccattacaattctaaagtttattttttctctttaagtaagcctcaaatatgtttcatgccatccttattctaatgaagataaatgataaaatggaattaatgtaaaatgtttgcttcatacacacctttaaaaacatattgtgtatctgaagcactactattctgtgtctgggcagactgattgctctattttcataaccaaacctggaaggctaaagttttcttgaattacctgaagtggaacattaagagacagtatgtctacatgtgacatctttttgctaataatttaggattggtttctacactaagatttttctaattcgaccacctattagttg

SEQ ID NO: 369343 - DNA, 575 bp, Homo sapiens
cactttggcctatcctacacgttgggtatcataaacatgcaggcattcccaatgagctgataggtaggtgttacttgaggtgaaaacaatttttttttttaacttctggggcagacagagtttatctccaaatttctacaaatagcctctgatgcaaaatcttccagaactatttttcaaggtattttatatgttctgtctctgaacactttaaaaaatgttttaaaagtttttttaaagataggtttaaacaagcttcaagacaggtgtatatggattttttaaaggctagagggaaagtgagaratcatttaatttaaagcttcatcctaaagttgtgggaactgaagcctagagaggtaaagaaaagtaaatgcctacaatcactcagtggcagaaattagctcatggctcctgacttcaagtcttgtactcttttcacagtagatacagtggatttaactatgtacaattgaaacttttataggtcaacacttttagaatattaggaattacaatctgatagcaaaacaatcaggataaaatatgtgactacttacacacagatggaaatt

SEQ ID NO: 369344 - DNA, 606 bp, Homo sapiens
gttctctttggtaaacaaatgagcaatgacatggatattagtgacattgataagtattaattgataattaagttgatgataatggggaaaatgttaagaatcatgaatttgacctcaggaggggaagctcatcaaaatcagatcgtatctaaatgagacatgtccttaaaatgaaaggcagctctggtctataagaactcatartaattcaactagtgactactaaagtattttcaaattacagatcttacttgaatttggtttgttgtatagggaagcctcatttataaataggagttgaatttccattttatgaatacgttaaaatccttataaaccattttttaaataatttacagaagcttccctaataatcttgtttaaagtattaattttctaaactaatttttttttaatgttctggtcacaaacttgagttctgaattaatgaaatgtgagaaatacctttgccagacttcacatattttctctaatgtttatatttggaaaattttatgaaagaaaacattttttgaccacgcagaggcaccatatatgaagcattttggttcaacggagagttctgtggctatttctgcagaatct

SEQ ID NO: 369345 - DNA, 606 bp, Homo sapiens
gttctctttggtaaacaaatgagcaatgacatggatattagtgacattgataagtattaattgataattaagttgatgataatggggaaaatgttaagaatcatgaatttgacctcaggaggggaagctcatcaaaatcagatcgtatctaaatgagacatgtccttaaaatgaaaggcagctctggtctataagaactcataataattcaactagtgactactaaagtattttcaaattacagatcttacttgaatttggtttgttgtatagggaagcctcatttataaataggagttgaatttccattttatgaatacgttaaaatccttataaaccattttttaaataatttacagaagcttccctaataatcttgtttaaagtattaattttctaaactaatttttttttaatgttctggtcacaaacttgagttctgaattaatgaaatgtgagaaatacctttgccagacttcayatattttctctaatgtttatatttggaaaattttatgaaagaaaacattttttgaccacgcagaggcaccatatatgaagcattttggttcaacggagagttctgtggctatttctgcagaatct

SEQ ID NO: 369346 - DNA, 603 bp, Homo sapiens
gttcaaattatttgtgtccacatagtgaatataatgttggctatgacatggactgagagtgtatttttatattaaattgcagtactaaggagctgtttagtagatcaacttctgttatggtgctatgcttggataagaagagaaatgattgacagttttgcaggatcatgctgaaaaatcccacccacttcaagataattaaaacatgaagtaggctgtaagtggaagtgtctggagaatggcattttttttttcctgacaagtgatgtataggatttgattctttgggggtagtaatttgtttccagttttgtttaactctaaactatccatgaacatagacctcagagactccatatcgttayttgatttttctcatttacatatgctacaaacatatttatttactgtgggttcgttactgatggaacaaagataaataaaaatacagcttctcccatcaggttgccacagtgtaatgctcaaaatatagtcagaattacttgggtgctgtgaaaatgtagattccctatgattctaaagattctgataaaagtttgcagtagaacccaggaaacttcatcttcatggacttctgcatgg

SEQ ID NO: 369347 - DNA, 450 bp, Homo sapiens
tttcttaagaatgaaaataacgttttctttatcaaagcaagccaaaatggactataaattatayagatgtttcttggctcacagagaactataattcatctggaaccaagtaggaatggatctccatatttttaaatttttatatttttaaattttgtgggtacatagtaggtgtatatatatatatatgtggggtacatgagatatgttgatacaggcatacaatgtataataatcacatcagcataaatggagtctctatcatgttaagcatttatcctttctttgtgttacaaacaatccaattatatatttagttattgttcaatgtacaataaattattattgactgtagttaccccgttgtgctatcaaatactagatcctagtcatcctatttaactatattcttgtatacattaaccatctctacttccccatcacctcact

SEQ ID NO: 369348 - DNA, 617 bp, Homo sapiens
gttgaaacacgaggtactcaaggtggcctgcctgscattttgctttcaggggcctgagcacccagtggcatggatgtgggtctgcatcccatgtgatgtgaatgtcctgcctgttctcaagtgctgtgaagtgcactgtaaaacactaatctctctcagctgcacccactcaggcttattcagaactgcacaaggctcattgccttggaatctttgtagagaggaaaactcaaggcagctagctggaccttagtatcggggcaaatggaggttctgacaggtaaactggaaacagtgccttccaaagggaaatctgccattttgctttcttttggtgccttcattttctgcttcactgggaatttgtgattgtagatatagaatatgaattttaaaactctcccatttgggcttccattttaatgtctctgagttggcaatacacggaccttttcttctgaacttctggacatctgcttcttcaagtctaaggtagccttcagactacctcctgtttctcactctcctactccacattcctaattccctataatatctaaccgctgggcctagcataatttcctaattgttttctgtattcacatctttactagctc

SEQ ID NO: 369349 - DNA, 596 bp, Homo sapiens
gctctgctcgcgatttccgcccaggagcgccgggtggctggagcagtgaccgcgtcccagccccctttccgctccgcagcccccgggctgctgccggcgctgggctggaagccaggcccctgccgatcccaggagtcgccgcggacgccgcgagccctgccagggaatgagcagcgagcccaggaaaccactgagccaaagtagtaacaaagaaggccagcgtgcgcgggcggcggccgagccaggcttccagggccgcacgctgggccsggcgcgaggcagatggcagaggggaggaaacagatggctgtccagtggcgctgcacaggaagcgccagggctggcaggaagacagaagggcggccttcgctgcaacgggaatttaaataaatacaccggcccacacagggaatcccctaggattccagggtcctggcgtgcttgcggggccggggtctctagggcccctgcagtgccagaaaacctatggggctcacaccgaccccgaacccctcctctacccacttacgccctggctgcctgcagcctggaggactttgggctggtatttccatccctatcgcctcactcgggcc

SEQ ID NO: 369350 - DNA, 602 bp, Homo sapiens
atttattcaaataagcgagcaagcatataagcaaatacagtgatggattttatttatttgtttatttttggcttcctgcgggtctcccaagatgctaaatgaaacaagaaaagtcaaattcaggrcgggcgcggtggctcacgcctgtaatcccagcactttgggaggctgaggcgggcacataacctgaggtcaggagtttgagaccagcctgactaacatggggaaaccccgtctctactaaaaatacaaaaaaattagccgggtgtggtggtgggcgcctgtaatcccagctactagggaggctgaggcaggagaatcgcttgagccggggaggcagaggttgcggtgagccgagatcatgccattgcactccagcctgggcaacaagagaaaaactctgtctcaaattaaaaaaaaaaaaaaaaaaaagagagagaaaagtcaaactcatcaaagacaattgggaacaaagaaggaagctaacacttaatgtgctcccactatgcaccacaaatcctgtaaagtgggacttacaaattcccatttgacagatgaggaaatggaggtttagagctgttaaatgtcttgcccaaaggcca

SEQ ID NO: 369351 - DNA, 571 bp, Homo sapiens
aaccacccgtaatcttgggtttgatttcctatgtatcacataatattgaaaccaagtctaagactttatattgtgactgataagcttacatgtttcagagtgaggcaactggttgcaaaatcgttttcttccacaactaacgtattaaatattctcagtttcgccatatttagacgtcccaaggttcaaaacaaatgcattgtggcactgcaattctctacattgtctaacaatttcttcaatattttttttgtccttgcttgactttacagattgccctcctgagagcaaattcttgcccatgtctttttctgtgggtatctagrtctaaacaggttggggtaagatttttgtaaagcgcggtcagttaagactagaattttccaccacccattgatgagaaaatgttaaacttatcaaggaaatgaacgtcaagttgcacccctccctgctgcagaatagcaatcccgctgtgggcgaagtgaaactggacttcagtgagttcccagaacgaattttgcagacttcggtgcactcctgggcctgataaccgatctgcccgtggagctgc

SEQ ID NO: 369352 - DNA, 571 bp, Homo sapiens
aaccacccgtaatcttgggtttgatttcctatgtatcacataatattgaaaccaagtctaagactttatattgtgactgataagcttacatgtttcagagtgaggcaactggttgcaaaatcgttttcttccacaactaacgtattaaatattctcagtttcgccatatttagacgtcccaaggttcaaaacaaatgcattgtggcactgcaattctctacattgtctaacaatttcttcaatattttttttgtccttgcttgactttacagattgccctcctgagagcaaattcttgcccatgtctttttctgtgggtatctagatctaaacaggttggggtaagatttttgtaaagcgcggtcagttaagactagaattttccaccacccattgatgagaaaatgttaaacttatcaaggaaatgaacgtcaagttgcacccctccctgctgcagaatagcaatcccgctgtgggcgaagtgaaactggacttcagtgagttcccagaacgaattttgcagacttcggtgcactccygggcctgataaccgatctgcccgtggagctgc

SEQ ID NO: 369353 - DNA, 576 bp, Homo sapiens
gggataatcgtgcccaacaacattgctggaaaattcaataagcgattatgaatttaaagtatttacccagagtttaaactttcccttagatggacaatcccctaatcagtagctcttcttattttaatgaattttacttctttttttgagttcctacagtggcagatttcacatgcatytccccattcgattgcaaattaactttttaaaagtaaaaagtaacattaaaactcacagctggaacatattctaattactatcaaaaaatcagtgaatgacagagagcagcaccttccacaaatttgtgaattactctggaaggatttgtttggcaagaaccctgacatctgaattgataatggcagaacggacacctgtccttcaacaccagtactcagttgaaccgtttgtatttgccccagtccctgcagagagagatgagtgtcggacagatggctcacagcccggggacgatcatagattcttttttcgcttttaccacaccctctgtgggtgttccaccagaagaaaagaaaaagggatcctattttatgtttaaagcttaaatggattgaa

SEQ ID NO: 369354 - DNA, 535 bp, Homo sapiens
cgattatgaatttaaagtatttacccagagtttaaactttcccttagatggacaatcccctaatcagtagctcttcttattttaatgaattttacttctttttttgagttcctacagtggcagatttcacatgcatctccccattcgattgcaaattaactttttaaaagtaaaaagtaacattaaaactcacagctggaacatattctaattactatcaaaaaatcagtgaaygacagagagcagcaccttccacaaatttgtgaattactctggaaggatttgtttggcaagaaccctgacatctgaattgataatggcagaacggacacctgtccttcaacaccagtactcagttgaaccgtttgtatttgccccagtccctgcagagagagatgagtgtcggacagatggctcacagcccggggacgatcatagattcttttttcgcttttaccacaccctctgtgggtgttccaccagaagaaaagaaaaagggatcctattttatgtttaaagcttaaatggattgaag

SEQ ID NO: 369355 - DNA, 586 bp, Homo sapiens
tcttctaggtgttgttgggtagaaatcagcattggctggggattgagactggaggaagagcaggatgaagtggtcagacacaaacaagtttcaggaagaggtatgctgctgttttttgtaactgacaccagaatggatcatccttctttgttgtctctatcttgggatcaggtgtctcttctcttctctctttttaaaaaatggagatgcttgtggccctgcaggttaacatgccctaatgtaccattactgacactccagctgccacacacgctcatygcagtagacacaacatgtgcttacatatatgtgcatgcaggcatacccacacagcagcaactgagctgaaacttgtcacagaatcctgaatattttacctcatgtggaaaataatgttgaaatggcagagaaatagacaagatcaagaaggcaagtatcttactggtaaggctaccaaaaagcctcacactctagatcaaactaaatctgcaaggcagggatccctcttgtctaaatcacaaggagctagagaacactgagattgcactgcttggtattccacaaataaatctccaatgtctgactc

SEQ ID NO: 369356 - DNA, 586 bp, Homo sapiens
tcttctaggtgttgttgggtagaaatcagcattggctggggattgagactggaggaagagcaggatgaagtggtcagacacaaacaagtttcaggaagaggtatgctgctgttttttgtaactgacaccagaatggatcatccttctttgttgtctctatcttgggatcaggtgtctcttctcttctctctttttaaaaaatggagatgcttgtggccctgcaggttaacatgccctaatgtaccattactgacactccagctgccacacacgctcatcgcagtagacacaacatgtgcttacatatatgtgcatgcaggcatacccacacagcagcaactgagctgaaacttgtcacagaatcctgaatattttacctcatgtggaaaataatgttgaaatggcagagaaatagacaagatcaagaaggcaagtatyttactggtaaggctaccaaaaagcctcacactctagatcaaactaaatctgcaaggcagggatccctcttgtctaaatcacaaggagctagagaacactgagattgcactgcttggtattccacaaataaatctccaatgtctgactc

SEQ ID NO: 369357 - DNA, 622 bp, Homo sapiens
tctctctcgtcatattatctgcttcccttagtagatggctgtgctttgccaatgtttctttttcaatttgaactccccgaagttatttggctaatgcatatgttaaagttagaatattccttgcctaagctggcccacttttatttactgtcataatattaatgtacaggaagattgtgattgaagaaaattcccctgacttttttttaacacaagtgtctcaaagtcaggctctcttcattctctattttaaaaataaaatttaattattttaacataaatgtagaacttttgccagaggtagttatactctgaagctaataaagcttaagcttcagggtctttcattcgtatggcctctgtgaatgctgagagattctgggacttgtagagtgttctaggtggggaataaaaactagattataatcaagaaatattttaaagtaagcttctctgaataaagggacataactccaagactgtggtgatttctttcccatgctaataaatatttactyttgtacttgattcttttttgtcgttattcataatgttgtattttgttgttgttaaagagggtatttcaaattctataggcttcaggccctatacaacttgaatt

SEQ ID NO: 369358 - DNA, 489 bp, Homo sapiens
atgataaatgtaattgctgtcttactttaagaaattgtcacagccacttcaaccttcagcaacaaccttattgatcagtcagcagccattaacagcaggcaagactctccaccagcaaaaagaaaacgactcactgaaggctcaggtgatcattagaattttttagcaataaagtattttaaaattaaggtatgtatatgttttaggcgtaatatattgcacacaaaatagattactgtttaatgtaaacataacttttgtacrcattgggaaacaaaaaaattcatgtgactcactttactgagatattcactttattggggtggtccggaactaaacctgcaatatctccaaagtatacctgcatttagtctgagatagtaaaaactagctattaaaacatcataattcttgcaaatctattacatagcttagggactgtaatacatcataagttaggtttgtgaaatgcaggcatgtacaactcaa

SEQ ID NO: 369359 - DNA, 629 bp, Homo sapiens
atttaaagtatacaattaagtggcttttaatacattcacagttatgcaaccataaccacagtcaattttagaacattttcaccacatcaaaaagcaacctcatatcctctaactgtcactccctaggcccccaaagccccagtcttagacaaacactgatctactttctgcttctatacatttggactttcctggatatttcatataaataaaatcataaaacatatgatcttttgtgactggctgcttcttccatattgtaacatgtatcagtacttcattcctttttacagccaaatagtatcccattgtgtggatayaccacattttatttatctgtttacccaattgatgaacatttggattgttcccacctttggttgttatgagtaatgttgctatgaacatttatgtacaaatgtttgtgtggacatatattttcatttctcctaggaatgcacacacacacacacacacacacacacacacacacgagtaggattgttgggtcaaatgatgactctatgtttaactttttaaggaactgccagacgttttttccaatgtggctgcaccagtttacatccccaccagcagtctatggaggaccccaagttctctacgtttca

SEQ ID NO: 369360 - DNA, 629 bp, Homo sapiens
atttaaagtatacaattaagtggcttttaatacattcacagttatgcaaccataaccacagtcaattttagaacattttcaccacatcaaaaagcaacctcatatcctctaactgtcactccctaggcccccaaagccccagtcttagacaaacactgatctactttctgcttctatacatttggactttcctggatatttcatataaataaaatcataaaacatatgatcttttgtgactggctgcttcttccatattgtaacatgtatcagtacttcattcctttttacagccaaatagtatcccattgtgtggatataccacattttatttatctgtttacccaattgatgaacatttggattgttcccacctttggttgttatgagtaatgttgctatgaacatttatgtacaaatgtttgtgtggacatatattttcatttctcctaggaatgyacacacacacacacacacacacacacacacacacgagtaggattgttgggtcaaatgatgactctatgtttaactttttaaggaactgccagacgttttttccaatgtggctgcaccagtttacatccccaccagcagtctatggaggaccccaagttctctacgtttca

SEQ ID NO: 369361 - DNA, 573 bp, Homo sapiens
agtactatttgtctttttaaataacacacatatgtttgtatgtgtgtctttgtgtgtgttggtgttgtatggtaacccgacctgatagtaataagttaacaagaaatgasggtttccagatggaggttgctggggggagagtgctaagtgaacatgctatgcgaactgcatgctttttacaagaggttgaggttctcccatccagtccaccaccactgaactgccctgtatttaagtccccttcaggaaaccctgtgcctgctttgctggctccaggtctcttcttcagcctcttgaacctggtgccatccctactgcagttaatacgggtccagtacaacaagtgtctatttagtagcctggagaaaatgcataatgatttaatagtgattatgtctgggtgttagaattattagtgatttgtattttctttgtaatatttttctgagcttttgttccttaatttctttccatgagcgtaatgtatcgtaaaacaagaaaaatctgtcacttgagttctcagataggacaatattatggtcatgtttttggtttgttcatttgtttaagctt

SEQ ID NO: 369362 - DNA, 410 bp, Homo sapiens
tgtggtagatccacaagatgctgtgctggaggctgaactacacctggcattttactatgagggagaacctgctggcagaggagatggaaagacagcgggaacttgcactgcaggggagggtgctacaggggagtgtggcaacaagtgtgttttattataagccaattagtactatttgtctttttaaataacacacatatgtttgtatgtgtgtctttgtgtgtgttggtgttgtatggtaacccgacctgatagtaataagttaacaagaaatgacggtttccagatggaggttgmtggggggagagtgctaagtgaacatgctatgcgaactgcatgctttttacaagaggttgaggttctcccatccagtccaccaccactgaactgccctgtatttaagtcccctt

SEQ ID NO: 369363 - DNA, 616 bp, Homo sapiens
acgatctgacttcagatgtatcagatacacaaattagcactatcctccagaaccaaactgcatccacctggttataacaatctcattctaaatcccagcagtttgggaggccgacgtggggggatcacgaggttaggagatcgagaccatcctggctaacacagtgaaaccccgtctctactttaaaaaaatacaaaaaaktagccgggcgtggtggcgggcgcctgcagtcccagctactccggaggctgaggcaggagaatggcgtgaactcgggaggcggagcttgcagtgagcggagatagcaccactgcactccagcctgggcgacagagcaagactccgtccagagcaaggctccgtctcaaaaaaaaatgccattctataataaaaaaaaaatccctttaatgcctcttttataaactctcttgaacagggttcaatatagtatcaccttttaccaaattccagtgcaaaacaaacaacatttcagatggcagtgtactaaaggattcttgcgagtaactcgcagtataatttttgtcaggtcacttactgggtaggcagaataatggcctccaaatatgtctatgtcctaatccctggaacctgtaac

SEQ ID NO: 369364 - DNA, 601 bp, Homo sapiens
caagcacaggcacaccaagaagtagctacaagaatgttgatagcagcattgttcgtaatagcttataactggaagcaaacttgaatgtccatcaagagtaaaatggttcaataaattgtgatagtcatacaacagaatattatatagcaatgaaaaggaaaaaaactactgcaaaatatggttgaatctcacaaacattgttgaaagaagctagaccaaatgaktatttaataaatagttctattaatacaaatataaatgatatatagtgttataaatcaggttagtggttactctgtgggtttcacagaatgaaaaaggctatggagggtttctatagtgctattcaagttgtacagatttctaaatgtgtgctatatttcaataaaataagtaaattaaaacaaaaccgaaaataggctggcacctgagtttcttagagtaatccaagacgagttagggctgtgggtgaaagattgagaaaacactacacttatgagacaagagactgggaatccaggaggaaagatagtcaaggagaaattcacagtagctggattgcctaaaggtttttaaagaacagagtatttaatgttcactt

SEQ ID NO: 369365 - DNA, 601 bp, Homo sapiens
caagcacaggcacaccaagaagtagctacaagaatgttgatagcagcattgttcgtaatagcttataactggaagcaaacttgaatgtccatcaagagtaaaatggttcaataaattgtgatagtcatacaacagaatattatatagcaatgaaaaggaaaaaaactactgcaaaatatggttgaatctcacaaacattgttgaaagaagctagaccaaatgattatttaataaatagttctattaatacaaatataaatgatatatagtgttataaatcaggttagtggttactctgtgggtttcacagaatgaaaaaggctatggagggtttctatagtgctattcaagttgtacagatttctaaatgtgtgctatatttcaataaaataagtaaattaaaacaaaaccgaaaataggctggcacctgagtttcttagagtaatccaagacgagttagggctgtgggtgaaagattgagaaaayactacacttatgagacaagagactgggaatccaggaggaaagatagtcaaggagaaattcacagtagctggattgcctaaaggtttttaaagaacagagtatttaatgttcactt

SEQ ID NO: 369366 - DNA, 581 bp, Homo sapiens
ctttttggtggaagagagtggggaggagagggtgagaaaataatgactgatccttgtgatagggtaggggtataatgaagaggaagaagttaactacaagtttgagactggtgaggagttgcatataattcttaagataacacggcaataagtaagtaagaggtaaaaaaatcattcatcattcatcattcaaaatgtttatagagtgcmtggctatgtgccagtcactgggaactaactggtatataaaaccaggtgaggtccctgctctcctggagcttacagatgctttggggtggcagctgttaggaaaataaatattgactatatgttattacaaactaagataaactgtctgaaggaaagaaacgaagttctttgagggtgtatacagactgaactgtgagaccagggaagcctttctcaaggagatctcccttgagccaagattcaaagatggagaggaaggttgaggatatatttgttgtttacgtaggaccagaatgtatccactaggaatggtgtttggctgctagtcattaagaagactaactgccatgtgacatttgctgtactacatg

SEQ ID NO: 369367 - DNA, 620 bp, Homo sapiens
actaagttactcattagatgtggtcagtgagggagaggatttgaagaggtgaagcctgagattctggtctgttatcctttgactctgtcattcaagtgatcttgggatagaaaagaagaagtgagtatcaaccaggactggggatcaggaatctgggaagtgcttgtatacrgagaacttcatgatcggtaccaaaaaaaatgctatctctgattcagaagagcccttgaccatttctgtgtctgaacataaaataggatcagttaatccataccaaatataatatccatcttctctctctctctttttctctctctctatttctgggaggctttcagttcaaagtgggtggacattagacttcacctatttgtcattgccttgaagtgacagatgtaccctcactccatgcctggtactgttggttcaactcttgcctgacaccagcctgattcacttttttctcctttttctcatgtcttctcatatacaataagcactaactgaggtgtccacatggactttattaaagtccatgagaattagaggattcaggtagttcctatttcatcatgcaatgcagtcttggtaaccacagtatccattcataaggcaggaaa

SEQ ID NO: 369368 - DNA, 620 bp, Homo sapiens
actaagttactcattagatgtggtcagtgagggagaggatttgaagaggtgaagcctgagattctggtctgttatcctttgactctgtcattcaagtgatcttgggatagaaaagaagaagtgagtatcaaccaggactggggatcaggaatctgggaagtgcttgtatacagagaacttcatgatcggtaccaaaaaaaatgctatctctgattcagaagagcccttgaccatttctgtgtctgaacataaaataggatcagttaatccataccaaatataatatccatcttctctctctctctttttctctctctctrtttctgggaggctttcagttcaaagtgggtggacattagacttcacctatttgtcattgccttgaagtgacagatgtaccctcactccatgcctggtactgttggttcaactcttgcctgacaccagcctgattcacttttttctcctttttctcatgtcttctcatatacaataagcactaactgaggtgtccacatggactttattaaagtccatgagaattagaggattcaggtagttcctatttcatcatgcaatgcagtcttggtaaccacagtatccattcataaggcaggaaa

SEQ ID NO: 369369 - DNA, 620 bp, Homo sapiens
actaagttactcattagatgtggtcagtgagggagaggatttgaagaggtgaagcctgagattctggtctgttatcctttgactctgtcattcaagtgatcttgggatagaaaagaagaagtgagtatcaaccaggactggggatcaggaatctgggaagtgcttgtatacagagaacttcatgatcggtaccaaaaaaaatgctatctctgattcagaagagcccttgaccatttctgtgtctgaacataaaataggatcagttaatccataccaaatataatatccatcttctctctctctctttttctctctctctatttctgggaggctttcarttcaaagtgggtggacattagacttcacctatttgtcattgccttgaagtgacagatgtaccctcactccatgcctggtactgttggttcaactcttgcctgacaccagcctgattcacttttttctcctttttctcatgtcttctcatatacaataagcactaactgaggtgtccacatggactttattaaagtccatgagaattagaggattcaggtagttcctatttcatcatgcaatgcagtcttggtaaccacagtatccattcataaggcaggaaa

SEQ ID NO: 369370 - DNA, 537 bp, Homo sapiens
aaatacttgtatataaaaggttataattaaattaaaatgaaaataaactcaaaaaaatttgcaacaaataagccaaaaggttcaaatttgtgaatataaagaactcatagaatttaataggaagaacattaagaccatggtttcaaaaaagtagccaaaggwtgtaatggttttcaaatgaagacaatcacatgggtggtgaaacatacaaatattttaacttttcttcaataagggaaacatttttacaatgatataccaatttccttatcaggaacattaagatgttgaagataatgctagtggagtggggcacaatggaaactgtcataacaaattacctggaaaacaattgccttaaaactgttcacagcctttgaccaaagaatttcattttggggattgtatcattaagaaattatcagaaatatggttaaagacttatgcccaatgatgttcttcacagtgagaatttgaaactgaaacacaagaaaaagcctatgaatccaataataagggaatggttaaatacagtgt

SEQ ID NO: 369371 - DNA, 537 bp, Homo sapiens
aaatacttgtatataaaaggttataattaaattaaaatgaaaataaactcaaaaaaatttgcaacaaataagccaaaaggttcaaatttgtgaatataaagaactcatagaatttaataggaagaacattaagaccatggtttcaaaaaagtagccaaaggttgtaatggttttcaaatgaagacaatcacatgggtggtgaaacrtacaaatattttaacttttcttcaataagggaaacatttttacaatgatataccaatttccttatcaggaacattaagatgttgaagataatgctagtggagtggggcacaatggaaactgtcataacaaattacctggaaaacaattgccttaaaactgttcacagcctttgaccaaagaatttcattttggggattgtatcattaagaaattatcagaaatatggttaaagacttatgcccaatgatgttcttcacagtgagaatttgaaactgaaacacaagaaaaagcctatgaatccaataataagggaatggttaaatacagtgt

SEQ ID NO: 369372 - DNA, 537 bp, Homo sapiens
aaatacttgtatataaaaggttataattaaattaaaatgaaaataaactcaaaaaaatttgcaacaaataagccaaaaggttcaaatttgtgaatataaagaactcatagaatttaataggaagaacattaagaccatggtttcaaaaaagtagccaaaggttgtaatggttttcaaatgaagacaatcacatgggtggtgaaacatacaaatattttaacttttcttsaataagggaaacatttttacaatgatataccaatttccttatcaggaacattaagatgttgaagataatgctagtggagtggggcacaatggaaactgtcataacaaattacctggaaaacaattgccttaaaactgttcacagcctttgaccaaagaatttcattttggggattgtatcattaagaaattatcagaaatatggttaaagacttatgcccaatgatgttcttcacagtgagaatttgaaactgaaacacaagaaaaagcctatgaatccaataataagggaatggttaaatacagtgt

SEQ ID NO: 369373 - DNA, 604 bp, Homo sapiens
catgaagtgtccccaaatatactcgcacagcccacactcagctgcatctgttgttcctagttggccttttatcatatatgcatttggtttttttcaccaagggatttttgtcttcctaactggatttagagctccttgaaaacagggccgatctcatgcatctctgggtcccccttggaacagccatggtgaggactgattgcctccttcacccccgcactttctactcttcttccttcctgtccccctacccaccacttgtcccttcctatcttggtgaaatcaagccacaccaacaagaaggcaaaaaaaatagkccaggtttcacccttcctaatctccttccctgtgtggtttgttagtgtttgccttgtggttccacaatgtcatgagaaggaagtctttttatgagaaggagcttttctcatcaatgttatgagaaggaacttttcctctacttggcagagaggtactagccatgtcttataacccttggccctcttgagggtttccagaactcccttctttccatgtttattcaaattccattttcattatcgtacttcccagtttcacccaacatccacgttatcacccaagtata

SEQ ID NO: 369374 - DNA, 524 bp, Homo sapiens
gaggatggcaagacaggaagacatgaacagacaatacacaaaagtacmcaattatttctgaataatggcattatgagtgatcataatgttattttgcacagtttcctcaatgaacttaatattagattacattaatcagaaaaaagtaaacttggccggccgcggtggctcatgcctgtaataccagctctttgggagatggagggtcacaaggtcaggagttctagaccagcctggccaacacagtgaaaccctgtctctactaaaaatacaaaaaattagctgggcatggtggtgggcgtctgtagtcccagctactcaggaggcagaggcaggagaattgcttgaacccaggaagcggaggttgcagtgagccaagatcgctccattgcactccagcccgggtgacagtatgagactctgtctcaaaaaaaaaaaaaaaagaagagagaaaagaaaaagaaaaaaaagtaaactcacataaagtaattagactcagaacctttctggaggggagcaatcac

SEQ ID NO: 369375 - DNA, 524 bp, Homo sapiens
gaggatggcaagacaggaagacatgaacagacaatacacaaaagtacacaattatttctgaataatggcattatgagtgatcataatgttattttgcacagtttcctcaatgaacttaatattagattacattaatcagaaaaaagtaaacttggccggccgcggtggctcatgcctgtaataccagctctttgggagatggagggtcacaaggtcaggagttctagaccagcctggccaacasagtgaaaccctgtctctactaaaaatacaaaaaattagctgggcatggtggtgggcgtctgtagtcccagctactcaggaggcagaggcaggagaattgcttgaacccaggaagcggaggttgcagtgagccaagatcgctccattgcactccagcccgggtgacagtatgagactctgtctcaaaaaaaaaaaaaaaagaagagagaaaagaaaaagaaaaaaaagtaaactcacataaagtaattagactcagaacctttctggaggggagcaatcac

SEQ ID NO: 369376 - DNA, 524 bp, Homo sapiens
gaggatggcaagacaggaagacatgaacagacaatacacaaaagtacacaattatttctgaataatggcattatgagtgatcataatgttattttgcacagtttcctcaatgaacttaatattagattacattaatcagaaaaaagtaaacttggccggccgcggtggctcatgcctgtaataccagctctttgggagatggagggtcacaaggtcaggagttctagaccagcctggccaacacagtgaaaccctgtctctactaaaaatacaaaaaattagctgggcatggtggtgggcgyctgtagtcccagctactcaggaggcagaggcaggagaattgcttgaacccaggaagcggaggttgcagtgagccaagatcgctccattgcactccagcccgggtgacagtatgagactctgtctcaaaaaaaaaaaaaaaagaagagagaaaagaaaaagaaaaaaaagtaaactcacataaagtaattagactcagaacctttctggaggggagcaatcac

SEQ ID NO: 369377 - DNA, 643 bp, Homo sapiens
ggccacagtgaggtagagcacaaagcagtttcctggatcccctgattccaggcattggctcctgcatagcattcctggacccaccctgggccagaggggagcccactatactgaaaggagagactcaggcctagaagcattcaaaaaagctgaataaagagccctggagtmttgagtgaacatttacagtagccaggcagtaatccccatgagcctataggtggtgatgtccatggagaggaattcttcttcatgaggaaagaagtggaaagagcgaagactttgtcttgtggcttggatgtcagctcagctgcagtaggatagagtagcaggtagagtcataatgttcccaacttcaggccctgggtctcagacaatattctggacctgtcctgggccaggagagacctcactactctgaagggtaggacacaagccttgttggattcctcatctgctgattgaagagtcctgggtccttgagtaaaatcagtggtagccaagcagtgactgccatgggcattgggtgagactcagtcctgtgctggatttgggtctgatacagcacagtcccagtgttggtggccacagggttgcttgtgtcttccctcccctagctccatgtaacttagcatggaaagag

SEQ ID NO: 369378 - DNA, 545 bp, Homo sapiens
atcataacatcttatttgattgaactttgtgtaccttcagagttggtattctatctagtatggaacagctaaacaatgtaatcagaaaggctgtactaygaaaatcaaagtgaagattacagattcatttttctcttctctgatagaaaactaatatacaaatcaaggctgaaacaaacagaaaatgggaggaaagtggacaagaaagagaaacacaaaatattagaactagatgagcatgtggtactcccatttgtttttcacatggggaagctgaggcatgtaaaatggctggtctaaaattattcttatatcaaatacctgaattctatagtctagtggagcttatggacaagacaaaagcttggcttgatacccaagtctccaacattttgcctgtcattatttttgtgtcgtggttgagaaaaatggctctgaagtcagacaaaacaagtgttcactatgcactagtgatgactttggatgagttaattaatttgtctaaggctcatttattcatctgtaaaaaaaaaggggggaaaata

SEQ ID NO: 369379 - DNA, 559 bp, Homo sapiens
aaatcatatatatgtatatatttttttttcagtgctctttctttcttcttgtagayacaagtttccatccaacagcttttggtttcattctatcctaaagaatcttgtttaatatttcttgtagtgtaggtcagatgatgatgaattattttttgtatccttttatttgccaatctgctttccagtttatccagccaatgtgttctttcaaatattatactttatagttatagaatttttatttgattcttttttttaaaccaaaatcaggtttaatttctgtcagaaaaactctgacttcacttctcaagtcaaataaatgtattaacaggcatcccagtgaccactttacttgatataaagttttcctctaaagtaagtccccttcatgtcaggtatttttaactcacactatccttgctttgctccaggacaatctcactcaggcaaaatgccacctttgactgcacttggggtgaatgagaggaaatctttaaatgaaaatactcctcgctaccacatactctctaatatgcctgaattcagaacaccacaatac

SEQ ID NO: 369380 - DNA, 580 bp, Homo sapiens
ctttgactgcacttggggtgaatgagaggaaatctttaaatgaaaatactcctcgctaccacatactctctaatatgcctgaattcagaacaccacaatacaggccaacataggccattcataatgctttgtcttgctgttaaggtatcccagggaggcacttaccaccttttgaacagcattagtttggaggaatgagttttagagcctaggaagcctgctgctgtctcwtccttcccaggtagctcagggaaggagtggcagcccactctgtgtcagttgccactaaaccctgatgaccagtcagtttgctctggtgaggaaagcacagcaggtgacttagctcagtcaagacaaacctgagacccaaggatggaattgtgacttctaaggttagaaagcagaggcgaatgagaacctttatttggttcttatagtttctatttctctgctaggttttcacattatttctctattatatgcatatttccccttaagtccttgaatgtatttaggataagcctcaaaatccaaattctgtcttccctgtggtgggcagcaaggcaattgttcagctctc

SEQ ID NO: 369381 - DNA, 580 bp, Homo sapiens
aaataaaagatttatattttaccctgcccatgtactctggagaactatatcctaatcatggcatttgttattgttgacaagccattttaataattgaaagcaaaccacttatttttctcagcaacatatccaggtgacttcacagcaaagaccttctggtgaaactatgtgtcattatcatttgtaagctgctaagttctctgtgacccccgcctccccagatggacttgtttcaacatctgagtccacgagagtgagcacgctctgagaaaatccaattctcatttggacataaaatttttataaacaaaaatatattctttctgaatttccttataagatccaagccttcaaacctttgaggctgttactaacaggtttataactcaagtttctaatatattactttgtcttttttgaggagagatactttttcttatatagttcttctctggtttgataaattgaataatgtcaggccatgagggtgaacacacaggtaagaaagttaatatgtggttgaggtggggtgggaaaatgattggtgggtrgaaggagtgaaaatcatccagtgaagata

SEQ ID NO: 369382 - DNA, 475 bp, Homo sapiens
cctgcttgttgatcacttgtattcaacaagttactcagtaaatttggctgtgctacatcgatgcattaattttggtttgcaaaagcctattctctgtgttatagtaaaggccttgtttcctcccaatcaataatactttatgctaaaaaacagggcagattctaggcaaatcttgaaatgggaagattgttttcttaattatccatctgcttttcctttctgagccctccaaaacactttttttggttacctctcatttacrcaattcagattcttttactatgatgcccaacagtttaggacagatatatgagagggaattttctattaagtggtggggagtggtaacagactaactttccaataccttagtttccatatatataaacttacaactaaaatatctcttcacagaaatgttataggatcaaaaataaataaggtcatataatatacaaaacagaatagaccaaac

SEQ ID NO: 369383 - DNA, 442 bp, Homo sapiens
gcctctgatgtctgtcattctattctagtgaacttttttagctcccacatatgagtgagaacatgtgatatttgtctttcggtgcctggcttatttcacttaacataatataggattattcgttttgagagcaaaaatctgctgattgtattcaaagataccaaaggtaaccgttacatttatatcgtatttaaagtttaatgagtgttctcacgtatatcatctcatctgaacctttacagtggtctggctggtataccgtacctcattttgaaaatcaataaactttctttgaggggttaaaggacttgccttgtgaactcatgacttctgactctagtttyagaactattctcattgcctcaggctgctgtgagatgtaatgtatttttcaccttgcaacactgcctttcgcctgtcattagatgtgaagatgtagtgt

SEQ ID NO: 369384 - DNA, 572 bp, Homo sapiens
gattgtattttcagatcatagctatatttaattacatcttctgtcacataaaaaatggctaagatttttaacctttctttttcaagagtaaaggcagctccctggcatgaccaggaatgggccttttgttgaacacaaaattgagatttatggtgctgggttatataaagaaaaaggaaaataaatgtatttgtcttgtgactataaagaatgatttcttgtagatttagctttggacttctacatacaaaagagggatgtgtgatgtggcacagtaagactaaatcctaatgtgtacaartcacctggatattgtgttgaaatgcagatgcagacttaggagatctgagggagggccttagatctgcatttccggtaagatccccattgatgctaatgcatttgggcctactggccacactttaagaagcaagagtatagaagaaagaactaaggtatatagtattcaagaagtctggctttagttccagtttcatcactaattagccatgagacctcaccaatatcacttaaatatattcctcatgtataagatgatggggctggactta

SEQ ID NO: 369385 - DNA, 584 bp, Homo sapiens
caaaaattattattgatatattttttattctttcttttgtcatactaaatctggtatatattttacccttacaagacacctcaaatgctcaatagcccacatgtacctactggctactctattagcatagcttagagagatatagagactaccaytgactttttaaaaacagtttattttgaactaattataggttcacaagatgacgagaaaagaggagtaaggccctggatacccttcattctgtttccagtaatactgatatcttacataactgtagtacaataagaaaaccagaaaatttattctggtctgtcattgccttttaaacacagccttttctaccctatatacctagatttctctgagctcacaagttgaataaggtctttcttctcctatggaaataaatgaataataagagagataggctaaagctatttcattccagtttgctttctcctagagtgtatagcagatgtcaccttccacttataaaataaagatcttttccatctacccactgcagtgtattatactcttccttattttagatagttttgcttttgctaatgtggtaacaa

SEQ ID NO: 369386 - DNA, 550 bp, Homo sapiens
ggttcataatagtaagtgaggatattttgtatttctctaggattggttgtagcatcacctttgtttttctgattttgcttatttggatcttctctcttttattctttattaatttaactaatgatctaactagcaatcttgtttatcctttaaaaaacagctttggttttgttgacactttgtatgcattttggggtctcaattttattcagttatcctctgattttggttatttctttttttatagttttggggttagtttgttcttatcttctacgtgttcttctacgtgtgatgttacattgtgaatttaagagctttctaacttctttatgtaggcacttagcactattaactttctccttaacacttttagctgcatccctgaaattttggtatgycatgatcttcatttgtttcattcaatattttggtattttcatttatttcaaatcattttttgatttctgccttaattttactgtttaaccaaaagtcattcaggaggtagtaggccattatcctacctgatttgacaccggaacagaaa

SEQ ID NO: 369387 - DNA, 579 bp, Homo sapiens
tttcacatgctactttttaaaacagttttattaagatatcattgatataaaattgtgtatatttaaggtgcataagttgatgttttgatatacatataatgtgaaatgatcatcacattctagctaacatgtatatatayacacacacgtatatatagatgtagaatatatacatatcacgtatatatagatgtggtatatatattctgtgtgtgtgtgtgtgtgtgtgtgtgtgtgtgtgtgtggtaaaatagcttaatagctatgctgttagcaaatttcatgtatataataaaatattgttaactatcatcaccatgctgtattttagatctctagaacctttatctgaaactttatgtcctttggccaacagcaccttatggtatggtttggctctgtgttcccacccaaatctcatgttgaattataattttcagtttaggggagggagctgttggaaggtgattggatcatgggggcagatattcccctttctgttctcatcttagtgagtgagatatcacaagatttggttgttttacagtgggtagcacttccccctttgctctctcctgc

SEQ ID NO: 369388 - DNA, 613 bp, Homo sapiens
gaaaaacaagctcataagatctgctgtagagattaagaagagcytaattaatatttttaaggagcaataaattcgttctcaatgcacacttataattatgtcatttaagtttcttcatacacacctttattttgcaacataaagaaaaaaaaacctttgaaataaattaccagagtatttatttggtcttgcttaaaggaacatggcagcagatgcttcaatgtatggagacataacctaagttagcctaatatttattaaatgagaacacatatcatagattaagtgagtttaaagagcatatttcagaaattgtgctaatgtgtttctcagcaaggagcctctgctccttgatcacttctctccaggaagccaagtctcatgttatacattaccggagagggaagttgaagaagacaagtcatcaagacggagacaggaaacttattttgtaaactcttgaaatctgaatgtgtaatatatctctcaataaactataatatcctgagttatcacagtttattcagaggcatatttaacagaaaaaaggcaggaggtatattttctgcctcctgagtgtgacatttagggattatctttctggttaaagcaa

SEQ ID NO: 369389 - DNA, 613 bp, Homo sapiens
gaaaaacaagctcataagatctgctgtagagattaagaagagcctaattaatatttttaaggagcaataaattcgttctcaatgcacacttataattatgtcatttaagtttcttcatacacacctttattttgcaacataaagaaaaaaaaacctttgaaataaattaccagagtatttatttggtcttgcttaaaggaacatggcagcagatgcttcaatgtatggagacataacctaagttagcctaatatttattaaatgagaacacatatcatagattaagtgagtttaaagagcatatttcagaaattgtgctaatgtgtttctcagcaaggagcctstgctccttgatcacttctctccaggaagccaagtctcatgttatacattaccggagagggaagttgaagaagacaagtcatcaagacggagacaggaaacttattttgtaaactcttgaaatctgaatgtgtaatatatctctcaataaactataatatcctgagttatcacagtttattcagaggcatatttaacagaaaaaaggcaggaggtatattttctgcctcctgagtgtgacatttagggattatctttctggttaaagcaa

SEQ ID NO: 369390 - DNA, 517 bp, Homo sapiens
tgccttcatagactgaagcttgatactgctatctaagaggccactcatcctctggatctctctctggaaactgctgacagaaaactcattttccactgactatgtaacacaagttaagacttataacagatgccccagtgacggtggtaaacttttccctcccatggtgaagatgaactgcttagagcaagatgctctgaatgtggggctgcagctcatatcaagaaaggctctacgccaaaggctttgtgccatggaactgacacctattatcctcatcattgttataaatgtcaaagtcatcagcatcaytcagacaaatcacattaatttgtgccaggcacttcaacatggtaaagaactcaaatagtataatcagatatacacatatgcatacttaacttaatatgcatgaattcagctctgcacagttgccccctaacccacaaaaatgtgtgtagggattaaggtagagacagaagaggaaagaacacggaaagaaaggaaaaatggttaa

SEQ ID NO: 369391 - DNA, 570 bp, Homo sapiens
gttaacagctgtgtgcaaaatcactacatacttaggcttaaggtcctgacaaaayctaatcagcatcaaattgcattttgtcatactcatataaaattttagggctttgtgtttctttaaatagttctgaaattcagaaataatcccctgagagactggcataataaggctgtctaccaaccacagactttctggcacgcaatgaaattcaaaaagggtaacactattgtttttctccagccttctcacctccagataaacaatctggccattcagaagcaaaaaaatacccagggcactaagttcacgacagggttattctgaagctcgagcaatcccaaggcagaaatgccctgattttgacccagaattaaatactgggccttggtagacttacacgacagacctccttcagtcactctggagtaaggtcataccagtttttctgtcaacaaagcaagttaacagataagcttaagagctcatgatgatacaaaatataattcaacatgtgaatttctgatttctatcagcaaagagtctgagacccaatggtgtgttgataaatac

SEQ ID NO: 369392 - DNA, 589 bp, Homo sapiens
tttgcacccaacaaacatatgaaaaaaagctcaatatcactgatcattagagaaatgcaaatcaaaaccacaatgagaaactgtctcatgccagtcagaatggtgtttattaaaaagtcaagaaaactgatgctggtgaggttgcagaagaaaaagaatgcttctacactgttggcaggaatgtaaattagttcaactattatagaagacactgtggtgattcctcaaaacctagaggcaaaaataccatttgacttggcaatcccattactgggtacatactgaaaggaatataaaccatactattataaagayacatgcatgcatatgttcattgcagcactgtttgcaacagcaaagacatgcaatcaacctaaatgcccgtcaatgatagactggataaaggaaatgtggttcatatacaacatggaatactatgcagccatggaaaggagcaagatcatgtcctttacagggtcatggatggagctggaagccattatcctcagcaaactaatgcaggaacagaaaaccaaacaccgcatgatctaacttataattgggagctgaacaataagaatacatggac

SEQ ID NO: 369393 - DNA, 589 bp, Homo sapiens
tttgcacccaacaaacatatgaaaaaaagctcaatatcactgatcattagagaaatgcaaatcaaaaccacaatgagaaactgtctcatgccagtcagaatggtgtttattaaaaagtcaagaaaactgatgctggtgaggttgcagaagaaaaagaatgcttctacactgttggcaggaatgtaaattagttcaactattatagaagacactgtggtgattcctcaaaacctagaggcaaaaataccatttgacttggcaatcccattactgggtacatactgaaaggaatataaaccatactattataaagacacmtgcatgcatatgttcattgcagcactgtttgcaacagcaaagacatgcaatcaacctaaatgcccgtcaatgatagactggataaaggaaatgtggttcatatacaacatggaatactatgcagccatggaaaggagcaagatcatgtcctttacagggtcatggatggagctggaagccattatcctcagcaaactaatgcaggaacagaaaaccaaacaccgcatgatctaacttataattgggagctgaacaataagaatacatggac

SEQ ID NO: 369394 - DNA, 602 bp, Homo sapiens
ggaaactttatcacattactggccactcattattcactaaaaatattaatcttaaagcataattgaacttatcttagtctataaaggacaaatgttctcaatataccctgagccaatggtcaaaaaattatrttttgcataattattgaattgctcatgaaatatcttcaagaaaattaaagctttctgcaagacaactgagaaaacatcaatcattgcttctttgcattaatgaataactctgtaacagctcagaggaatcacataatcaagtcaatatgcacctttactttgtaaatgctcagataagccatgggaaacttcaatcaggtctcctcctttccagaagaaacagtagaacagcacaatatgacatacaaagcttcatttctcaaaggttccaatttggatgtttctaaaaagatgctggctattttttctttagcaattgctttatacaggactagacattcaagatgtgtcagcagaagaaatggacacaccttggagaaagaagtggaactgatgagacctcaagtctaatgatcaagcttggtcagcatgggcttgacttctgctctgtcctttatttcctgatcagc

SEQ ID NO: 369395 - DNA, 559 bp, Homo sapiens
attgtctcatactcttttgtttataagaaccctgagagaaatacagatggagtttttgraacatgtaataagattttataattcaacaccacagttttataaccttgcctctccaagaaacttgcattttattcctaaaggacttatttgttttttactgagtgtttttaaaacacatttgaggagatataaacaacatttaaacaattttacatgatatcctttgaattatttagaaaggcagatgtaccctggatgcctatgagttttgtcaatcacaacttacaaaaacgattttttaaaaaaagaataaaatacataatgataacaatgtggtggggaacaagggaggaaaagaacagcatagcatgaggagggctgcagcctaaatataagactatcctcttactccacacagatattttgggtatttcataataagccctcgctgctgcacaatgcagagggagattaaagctaatactagacttcaggacaggtgaggagagtgtggaacagaaatctgagaaaggactggaggagaaagattccagatctc

SEQ ID NO: 369396 - DNA, 559 bp, Homo sapiens
attgtctcatactcttttgtttataagaaccctgagagaaatacagatggagtttttgaaacatgtaataagattttataattcaacaccacagttttataaccttgcctctccaagaaacttgcattttattcctaaaggacttatttgttttttactgagtgtttttaaaacacatttgaggagatataaacaacatttaaacaattttacatgatatcctttgaattatttagaaaggcagatgtaccctggatgcctatgagttttgtcaatcacaacttacaaaaacgattttttaaaaaaagaataaaatacataatgataacaatgtggtggggaacaagggaggaaaagaacagcatagcatgaggagggctrcagcctaaatataagactatcctcttactccacacagatattttgggtatttcataataagccctcgctgctgcacaatgcagagggagattaaagctaatactagacttcaggacaggtgaggagagtgtggaacagaaatctgagaaaggactggaggagaaagattccagatctc

SEQ ID NO: 369397 - DNA, 635 bp, Homo sapiens
catttggagtcttacagctatgtgtgtttattttgccattggccagtagggagtttaaaagctcactttgcagtgtcatggaagrcttactgtttcactttattttggcttcaatctagttttctcaccttaaaaacaatttttacaattgatttgttaactactttaagttcttaaagaaaaaagatgtgatctaaattaactaatacataattttcccttaaaatgtttttgtcaaaaagatattgtcactttgagttgtattttactgagtattagtaaaattgagtatttcttcattactcatttatagttcctccttggtggtttgcaatttattttctttgtccatttacttactgaggtctttttttttcctttataatttgtgttttgtgtggtaagactatcaagcctatcaaactttttcatatttgtcacgaatattttccagttattttttctgactgtgattttttgacttaaaaaagtctctttgttatttagtataattttccacagtatctttggaagcagtcaatgaattattattattgttatttgtaatttcttccattgcttttaagcttagaaattctgcactgactgagaggtttgacaaatataaacttcaa

SEQ ID NO: 369398 - DNA, 520 bp, Homo sapiens
tcctctctctctttctcactgtctccaacccccgtttctctctctctctctctcacacacacacatacacacacacaaacacacacacacacacaccctttcgtggcctaagttagtctcaggttcattttctgatgtttgcagatcctacactgataacaggacacaaaattagattccaggtctgtgcagyccctttgggttgacacctgagttgtactgtgtgctggcttatcacttattcctggaaactgtctctcaggtcatcttccacagtctgcagcttggagtccagtcctgccccacacctgagaacagcccaggtctccagggccccagcccacacccaggatgctaggcttctctcatcctggagaggagacagttcctgggggatttcaccaacctgaaccctcatcagatttccactgcccacctgcccatgatccaagcagagttctttccatttgctccttttactctaaagagcctcatcaagtgtcctgtttatgtgcatgtg

SEQ ID NO: 369399 - DNA, 598 bp, Homo sapiens
gagactattattctaagtgaagtaactcaggaatggaaaaccaaacatcatatgttgttactcataagtggaaggtaagctatgagtatgcaaaggcataagaatgatacaatggactttarggactcaggcaaaagggtggaagggcggtgagagataaaagactacacattgggtacaatgcacactgctcgcgtgatgggtgcaccaacatctcagaaatcaccactaaagaacttattcatgtaacaaaacaccacctgccccctaaaaacctattgaaataaaaaataaattaattttaaaaaaagaagtagagaaacttgatgagtctgtggggtatgccaattagcccagaatatccatgtcttctcatccctcattggttgagggttcacagacctactgtgcaagcactggggtggccaagggcagagatgggtcaaaccatcctggcctgtgtcattcagaacttcctctgcagtgaaggctctggctctctggtgggcattgatttgagacacacgaacaggcaaaggagtttgcactttaaatcactgtgtaatcatggagtgatttaaagcaggtaaattgtgct

SEQ ID NO: 369400 - DNA, 518 bp, Homo sapiens
ttttcccagcattgtttttttaatgaaatttggccctcaatgtgagcaaatgcagacagcagacttttcctaacagtctaatatgtaatcmaatgccattagctactgactgtctggagaaggaaaaaaagaagctctggatcacatctgagtgttttgttcatgtagtggagaaatcagctttatttttcatgacccaatgacagtgaaagtagcttctctgatctgagcagcagactggcctaacagcttgtagtaaaactcctattcattattaaccctatcatattccttaagtgtggaaatgcttcaaataataggatccagttcccagtctccaggagattacggcaaaggcatcataatgtgcaatatatcacgtgacgacaagtaccagaaaacccatttcctataattaggagtgttatctcttattcttaagcaaacttgatgacatattgtatgaataaaagcatgtgatttgtcaaaatggctccttaaccagcccactgttgtta

SEQ ID NO: 369401 - DNA, 518 bp, Homo sapiens
ttttcccagcattgtttttttaatgaaatttggccctcaatgtgagcaaatgcagacagcagacttttcctaacagtctaatatgtaatccaatgccattagctactgactgtctggagaaggaaaaaaagaagctctggatcacatctgagtgttttgttcatgtagtggagaaatcagmtttatttttcatgacccaatgacagtgaaagtagcttctctgatctgagcagcagactggcctaacagcttgtagtaaaactcctattcattattaaccctatcatattccttaagtgtggaaatgcttcaaataataggatccagttcccagtctccaggagattacggcaaaggcatcataatgtgcaatatatcacgtgacgacaagtaccagaaaacccatttcctataattaggagtgttatctcttattcttaagcaaacttgatgacatattgtatgaataaaagcatgtgatttgtcaaaatggctccttaaccagcccactgttgtta

SEQ ID NO: 369402 - DNA, 579 bp, Homo sapiens
ccaacataatactattgaccatacaaataattatggaagatctattagggggagattatgctttaaaatgtctaatggttgatccttaccctctggaggctcacagtctaattgatgtactcaggcaagtacacaaagagaaacaacacaaagcaaggtctgccatccttatcctcccactgcaaatacatagaaataattcccactggagaaacccataattaccaaaatgaagatcaagaatacaaggaatgctgataactttgagaaatcaatcactagagagctagacgtaggaagccagattayaggaattccaagagtcggagtggggtgaataaaaagagatagtgagcctaactaaagtatttattgtgaaagcttaaaataaagagaacaaataaagatgatcctaggagagacctggagattgttcacagaaagagcagacggtgctacaacgggaaagattaaggatggcgctggggaagtgggagttcctgaggatggaggtggatgaggtgcaaatggacaagcacctcagttggagggctggcatccagacgttgtcgtccaacc

SEQ ID NO: 369403 - DNA, 513 bp, Homo sapiens
gacaccagctttcagaccatagcagacatacttacattatttgttgtttattgaaaacttaaaagtatttgagtgtcctatatttttatttgccaaatctagcaattctgtttatgaagctcactaattttacaatttccttttttttwaaaaaaaatgggaatttttcattaatgccagtcccccttcactaatctacaaatcctagaagactgaggacaggattagggataaattggtcttgtattaatcttgctgatttgtccttcgtgtttgaaatagtatctggaacatagtaggagctcaataaatattgtcaaatgaattaatgacctgttggagaaaaacagtataaacatgaacaagtttcttttttaattttaattttaatttcatgttctgggatacatgtgcaggtttgtaacataggtaaacatgtgccatggtggtttgctgcacctatcaacccatcatctaggtattaagcccagaatgcattagctatttttccta

SEQ ID NO: 369404 - DNA, 326 bp, Homo sapiens
aatataacaacttcctaacaggatctttggacttcagttttgtccrtcttcataccattatcctacctgaatgacctttgtaaaacacaaaagcaccatgtctgttcttgtgtttaaaatcaccaaaacaccatgtctgttcttgtgtttaaaatcaccagtggctgtttacttcccttaatataaattaagcaattctttaccagaaccacagtgcactccctacaagtccttgatggcatcatgctctcctctgactcctctggatcctttatgcctgcctggagactctaacaacatcccaacacaaaccacacagatcacat

SEQ ID NO: 369405 - DNA, 570 bp, Homo sapiens
ttcgaataaacatgtggctaattttagtgtgcttattgttcattgtctttctccccatgctagcaagtaaactccacaaggcagggtcttgcttgtcattgttgcatcccaagtgcccagaatagtgcctgacacacagcagtttatatctcgtgagtgttaaaagaatgaacgtattcacaratcataaatagaaactcaagaaatgtgttatgcagttgaggtaaagtagaccacaaaaatgagtatacaaaggaattaaagactgccaggaataaccaaataatccaatggcaaaatatacaattccaatattagacttctcaagaaaatcagtaagcaatccaaaaatgaggtgattaacaacaagtcaaaatattctaatttaggagcaacagagtgtttccaaatatgaggattataaattttttgtttaattccaacaatttgagagtgatgagagcttgttgcttttgtgaattctaaatgtttagtgtacaataatacctgttaatacttctctgacctacaatatacctcacacggtttaggaaatgctgccatgaaata

SEQ ID NO: 369406 - DNA, 542 bp, Homo sapiens
gaggacccacagacccactgaaggaagcagattgctcctacaggacctgggagacaccccaaatacagtgagtgcccaagctgtgtaagtgggaaagggagatcatctgcccccaaacacacaccctcactggggaaactgaaggtctagtttatgggagaagatttcgacctcacaaagagctgaggaaatttagagagctgagcaaaatacagggatggaggaagcagtgggaaaggccctgtgagctcmctagtcctcaagcaggccattcctgcctggcatcacagggatcccttgggagggtggtcagaggcataggggaaatgccacaaggagaaggaagtctccagctgaactttgtaacaatttgaactggtcaagaagcctcctggccagatctcaggggagggcatgaatccggagtgcagactccacaggcgggggaagaactgaaacctactttctttcccagctgggaggtgggtagcctggggcaagttctcagccctgcttgcccactgcctggaaataagctcagt

SEQ ID NO: 369407 - DNA, 558 bp, Homo sapiens
atatctcaaggaactagagaatcaagaacaaaccaaacccaaacccagcagaagaaaggaaataaccaagatcggagcagaactaaatgaaattgaaacaagaaacaatacaaaggataaatgaaacaaaaacctggttctttgaaaagataaataaaattatagamcgttagcaagattaaccaagaaaagaagagagaaaatccaaaaaacctcaaaaagaaacaaaacgggagatattacaactgacaccacagaaatacaaaagataattcaaggctcctatgaacacctttacacacataaactagaaaacgtagaagagatgtatacattcctggaaatacacaaccctcctagcttaaataggaagaattagataccctgaatgaccaataacaagcagcgagactgaaatgataatttaaaaactaccaacaaaaaaagtctggaaccagaaggattcacagcagaattctaccagatattcaaagaattggtaccaatcctattgacaccattccacaagacagagaaagagggaaccctccctaaatc

SEQ ID NO: 369408 - DNA, 558 bp, Homo sapiens
atatctcaaggaactagagaatcaagaacaaaccaaacccaaacccagcagaagaaaggaaataaccaagatcggagcagaactaaatgaaattgaaacaagaaacaatacaaaggataaatgaaacaaaaacctggttctttgaaaagataaataaaattatagaacgttagcaagattaaccaagaaaagaagagagaaaatccaaaaaacctcaaaaagaaacaaaacgggagatattacaactgacaccacagaaatacaaaagataattcaaggctcctatgaacacctttacacacataaactagaaaacgtagaagagatgtatacattcctggaaatacacaaccctcctagcttaaataggaagaattagataccctgaatgaccaataacaagcagcgagactgaaatgataatttaaaaactaccaacaaaaaaagtctggraccagaaggattcacagcagaattctaccagatattcaaagaattggtaccaatcctattgacaccattccacaagacagagaaagagggaaccctccctaaatc

SEQ ID NO: 369409 - DNA, 607 bp, Homo sapiens
gcctgtgaacaactgaatcttactaacaaccactgagttatcatggaagcggatctggtcccaattgaactttgagatagctgagctctagttaacaccttgtgattgtagtcttgtgagagaccstaggctaacaccttaattgtagcctcatgacagattttaaagcagaggagcccgctaagccatgcctgaatttctgcccacagccatgcccacagcaatggtgagatactaaatgtgtgttgtttgaagccactaagtttttgagaaatttgttatgcagcagtagataactaatactatctgtgagatatctacctgtattgatcagattaggctaaattatgctgcagtaacaaatgaccaaaaatctcagtagcttacatccacaaaagtttattccttactcacattatatgtccattgaaggttggctgtaactatggttaacattttcttcccttcagaacactccagaactcaggctgacagacctgcctctatctggaacattgcaaatcatcctggaagaggaaaaagagagcagggcaaagtatgcgttggtttttacagcttccgcatggaaaggttatatcatacatct

SEQ ID NO: 369410 - DNA, 481 bp, Homo sapiens
ttgctttttgtcgttaggatcagtttcagaggcttttaaatgttttgtttttaaaatcagtttcactgaggagtgggtcagtgaagcttctcaagctgtcgctctggacattggttctgtaacttcttaatttattaaaatgcatttaagttttaagctacrtagtagtataaaaattttgcaataccctttaggccttggtttccattgggtaaaaattggcagcagatatgactagagttgaaggattatgaaaatgaagaagtaaagtaagaatggtagacgtacataacaaaatgataagagttaaaatttgcacataatacaagaaaaagataaagtcaggagcaagagacacaagaattttgcctttaaattgtttctgttcttgctggtgaaattttgtgaataattataaattaagacaaaccagtttacactattgtagctaaaagtatggaaagacctctgaaaatgtagt

SEQ ID NO: 369411 - DNA, 481 bp, Homo sapiens
ttgctttttgtcgttaggatcagtttcagaggcttttaaatgttttgtttttaaaatcagtttcactgaggagtgggtcagtgaagcttctcaagctgtcgctctggacattggttctgtaacttcttaatttattaaaatgcatttaagttttaagctacatagtagtataaaaattttgcaataccctttaggccttggtttccattgggtaaaaattggcagcagatatgactagagttgaaggattatgaaaatgaagaagtaaagtaagaatggtagacgtacataacaaaatgataagagttaaaatttgcacataatacaagaaaaagataaagtcaggagcaagagacacaagaattttgcctttaaattgtttmtgttcttgctggtgaaattttgtgaataattataaattaagacaaaccagtttacactattgtagctaaaagtatggaaagacctctgaaaatgtagt

SEQ ID NO: 369412 - DNA, 597 bp, Homo sapiens
gtgaatgccattattttgttcttttttatagctgagtagtattccatggtatatatataaaacacattttctttaacttgttggttgatgagcatttaagactggttccatatatttgcaattgtgaacagtgtactataaacatgctgtgcaagtgtctttttcatataatgacttattttcctctgggtagatacccagtggtggggttgttggatcaaatggtagttctacttttagttctctgtggaatctccacactgttttccatagtggttgtactagtttatattcccaccagcagtgtagaagtgttctcttttcaccacctccaagccaacatctgttattatttattttttaattatggccatttttgcagaagtaaggttgatcttatttttaaaagcacaacacaaaacaaaatgtatatgggtatttatatttgtatttgcttaggaaaaattrtggaagggatacacaggcaaccatgaattgcagtaatcacttcactatggaataagaaatgagattgaagaaaacacattttctagatgtgattagaagtagtctctatagcagcactatacaataaaa

SEQ ID NO: 369413 - DNA, 458 bp, Homo sapiens
tgcaattattgaactctattattgtagtgtgaaagcagccatatgctaaaaaatggaagtgmcagtgttgcaataaaagtttatttacaaatatgggcattgggctatatttggtccatgggccttaatttgctgacccttgctatagatgatgaagaaacgaatgaataaaaatgaacgaatgggattttatttaataatgccatttaccagaaagaaagtattggtactataaaggactctttatccagaaaaacctggattctattttcatcccattacataagagtcttttatcttctctggcgtcatgcctttattgtaaaatggggtctgataatcccttctttgtttaaaggtttggaactgtcaggtctgtaaaggtaaaatctatgccttatttgtctttattctcagggcctaacagaattctcacatgtctaagcataataggttga

SEQ ID NO: 369414 - DNA, 435 bp, Homo sapiens
gggcattgggctatatttggtccatgggccttaatttgctgacccttgctatagatgatgaagaaacgaatgaataaaaatgaacgaatgggattttatttaataatgccatttaccagaaagaaagtattggtactataaaggactctttatccagaaaaacctggattctattttcatcccattacataagagtcttttatcttctctggcgtcatgsctttattgtaaaatggggtctgataatcccttctttgtttaaaggtttggaactgtcaggtctgtaaaggtaaaatctatgccttatttgtctttattctcagggcctaacagaattctcacatgtctaagcataataggttgacaggcacttgctgaatgattaaaaggttgaggtgaatcagatgtttgatgaagcaggtggttggaccagat

SEQ ID NO: 369415 - DNA, 596 bp, Homo sapiens
ccagcctgggcaacagagcataagaatgtagtcattgcagtgcatttactgacataggttatagaatgttataatatgttggttataacacattattaagtgaaagaagctacttttaaaatagtatacaattaggatatactatagttcatatagaatatagtaattatttctgttaagaaaaaatcctagaaggataaaattctataaaagtatataaagcaaaatggmaaaagtgctcatttctggatgttaaagttatggtttatttatttattcgagacagagtctcactccattgctcaggctggagtgcagtggcacgatcacagctcactgcagactcatcctcccaggctcaagtgatcctcccaccccaagcctcccaagtagctgggaccacaggcatgcatcaccacgcctggccagttttatttttttctggagacagggtctcaccaaactggtctcaaactcctgggctcaggctatcctcctgccttagcctcccaaagtgctaggattatgggtgtgagccactgtccgtgacctggttgtggtttttttagttttccttttttatgcttagctgcaca

SEQ ID NO: 369416 - DNA, 579 bp, Homo sapiens
ctgagtagctggaaccacagacatgcaccaccactcctggcaatttttttttggtagagacaggggtatctcatgatgttgcccactctggtctctaattcctaggcttaagcaatcttcctgccttggcctccaaaagtgctgggattacaggtgtgagccaccacacctggcctaagggttgttaaatacttgcatgataatgtatattaataagtggtagttacagtcacaaggctgtttgaaaaataataagtggtagagccagattctatagtctgatggagcctgaatgcctggtcatcaccctatactgcctcaaagagaagttccctgcaaacgaatagacagtaagagtcaatgaggggatggtagctatgaaggagraggaagtcctttggaaataagaagtggtaaaggtggtggccacacagggaggaggaacccgacggagaaatggcaaggagctgaatcaggtcctcctttcatagcggtggcctggctggcctctggtgtccctttccatggacatggggggaggggtgaccacatgacacaattgggactgtgttcagggtg

SEQ ID NO: 369417 - DNA, 574 bp, Homo sapiens
aaggcttacaatgctgaatgtcttctgatccagctcttcagattcttcagaaatgggaactggttcaccacttgccgtgatatgaactggagcatctgacactgaagatttcttggatctttccctaccatcagacttggattcactcaactaaagaaaaagtgaaaagaaaacaaaaacaaaaccccaatagcaacaaaggcaaaatgactaacacttccagaaaataattactgtctcattttattctacaagtgctcattctcattgaatatcctcatctattttaatttgtttttttccccaattttatttggggaaacaatcaaagctactctgtaatgttactctgaaggtaaagcattaaagagtgttcagayctactattctcctctactgcatacccaaacatgcttctgaagaactcagttattgagactaataagggctgatatgcaatttagtctcctaaaatgtaaatatgctgattgtttttactttctacattttttattatgatttgcataccttttcttcctttatgtctttttctttctgtatagcttcttttact

SEQ ID NO: 369418 - DNA, 589 bp, Homo sapiens
aataaattacattaaataaaacaaaattaatgacttggatccatgtgctgtggctcatgcctgtaattccagcattttgggaggctgaggcagaaggatcacctgagcccaggagtttgagaccagcctgggcaacaaagcaagaccatgtctttaaaattaaaaaaaaaaaagttaaaagaaataaaagagaaaaataaataaataaaattaatgactctaaaattattctgagtggtgccagwacatagctgaaagcaagtgatactgcaagggaaaaaggaaaccaaagaaaaataatatgtaataagctcttaccttatcatgtcatgtattcctttaaacaacccatgagctggatatcattattctcgtttcatacatgagaaacaggctaaaaagttaagcgatgatcaagtacacgtagactgcatatggcaagccaataatcaaagacaggttgactaaaacttcttgcctctttctctgacctcgcgtggtgccatctgcgttttgaattgggagtattaagtttctctgctgagagagaagagggaattccatgctaggcagagggaacagtatgaac

SEQ ID NO: 369419 - DNA, 441 bp, Homo sapiens
atcttacacaagccaggatggctattataaaaagtcaaaaaacaacagatgtgggtgagggtgtggagaaaagggaatgcttatacactgttgatgagagtgtaaataagtacaacctctctggaaaatagcatggaaatttctcaaagaactaaaagttgaattaccatttgatccagcaatcccactaccgggtatctacccaaagraaaagaaatctttatcttgaaaagatatctgtactcatgtttattgcagcatggttcacagtaacaaagacttagaatcaacctaagtatctgtcaatggatgagtagagaaactgtggtatatgtacatacaatgaatgactagtcaaccataaaaaagaatgaaatcatctttttcagtagcatggatagaactggaggccattatattaagtgaaataactcagaaaca

SEQ ID NO: 369420 - DNA, 604 bp, Homo sapiens
tcattagttcttatagattttgggataggcagtggaattaggagcaatgttttgagggcaggggatggatctcacaaagtacattctcaagggtggggagaattacaaagaaccttcttaaggatgggggagatgacaaagtacattgatcagttagggtggggcagaaacaaatcacaatggtggaatgtcatcagttaaggctattttcacttcttttgtggatcttcagttgcttcaggccatctggatgtattcgtgcaggtcacaggggatatgacagcttagctgtgctcagaggcctgacattcctgccttcctatattcataagaaaaataaaatgaaatagtggtaaagtgttgaggcggcgaaaatttttgggagtggtatgaagagataataggcaatgtttctcagggctgctgcaagcagaactaggggtgacrtgggaacctagagtgggaaagattaagctgaaggaagattttgtggtaaggggtgatattgcagggttgttagaagaagcatttgtcatatagaattattggtgatggcctagatgtggttttgtatgaattgagaaactaaacgaaagacacaagg

SEQ ID NO: 369421 - DNA, 598 bp, Homo sapiens
cctgggcaacaagagcaaaactccaagtcgaaaaataaaataaaataaaataaaaaataaccagaagattttggaatctgcccaagagtgtgctaagggatgaaaaagaaatttcgacacagcacattttcaaacaataattwaaaaaaaaaaactatttcatttctatacccgaacaagtagaaataactcaatgatctattatacttattaaaataatataaagtgctatttctgacagtgttaatatgtgttgaaatagttttctcaatttgtcttttgccttttatttaaatttgttattcaatatactgtgttacattaaaactattggcctaacttgcactttaaatgaaactttcatgattttgtaacatcatgctttgaacatttggaaaatattgcattactgagttattcagaccttccaagtagtgacacatttcattgtacaataaaataaaatgacaatcactaatatcacattaacattatttttaacatcttaattgtgaagttttcatgctcagagtactggatggttttctaaaacactaactcttagttgaaagcttacattttttttttattgataaca

SEQ ID NO: 369422 - DNA, 605 bp, Homo sapiens
tgatgtcaagtttacctgagactcctgccgttttttaatagcatgcttatatatttatgtaattttcttgcatcaaattcagtaaacttagatacaaaaatccacaggtttctagaagaatttaaaaaaaggcaaattaagttagtctggtggaaartatttagtttttttcatggaactccttccctccaggcacaaacacatatacacatacacagccctctatggaacaaactcttaaggatattaattttcctatgcattttttcaaaacttcatatatgactaagactccagtgaaactaaacattaaattttacttctcttccaaatcgcttcattttatagtctttagggtgaaaagcagtacaatcctaatttgaaatgcaccaaagacataaattaaatcaggaagtgactcagattcatattgtgatcctgattatgcatataagggacaggtatgttaataactggagtggaaataccatcagataatatgaattatgcttgtaaagaattgtcttaaataatgcattaaaaagttaactgtcacttaataatggtaatgtaatggtcccaagagtaacacaaccaaacaccat

SEQ ID NO: 369423 - DNA, 589 bp, Homo sapiens
ccagttttaaggcatggtttgaggggctgttcctgtttaatgactagttctccaaccttcccatgatttatgagctaccaaccaattttctgcttaaattgagcagtttacttctattgcaaatcaaaactaactggcgaagattctggaacccaaggcagcacctctcacctacagaaaataacttacgtaaggctttcctagcaaactgaaacctgtttggtggcagtgttgtcactaaagcctgggtttctgaattcatgattctaaagtgttaaactatgcaaactcagtcaaaggaaacttatgagattgacaagtgaaaactgtagcaggttgagcagcaagtatgaactgaacagaaagagaaagaaaaatataagagtggttgccatttcttgccatttctctctaaggtaaagtagaccactgattccagtcagttattcagataaataaggcctgatcttcagatgccagcattcctctctgggctggccctccagccacaaagsctgtattatcctgcatctccctgaccacctaggatgggtccagggactccaccagaattttcttttaatgagtc

SEQ ID NO: 369424 - DNA, 562 bp, Homo sapiens
ctattcaggtcttggccatgagctggggctgttattcaattacataaactgcaagcacacatccgagtctgccagcgaaaagcataaaactcaaccactaaattctccactattataaaaaactaaggacaaagagacgccaggtccagagaaccaaaataaataagctatggtgtgacagcattgttacatagcttagtgactgcttcagaccaaaacataggaaactcaattatttgtggtcttgggaggtgggcattcctccacagtgacactattgacattaggagctaagataattctttgtgacggcgggtggggggtgggggcggggtgcagcggggtggggactgtcctgtgtgctgagaatgtttagtggcctccctggcccccatccaccagatgccattagtaccccatcccaggttgtgacaataaaaaatgtcttcagatatgtaatagytgagaaccactggtgaaggcagactcaagagtgagaaaagacactcaaccataggcaacaccaaccttggctgaggatacaagtgaaaaaccatggagg

SEQ ID NO: 369425 - DNA, 566 bp, Homo sapiens
aatattgcattttatttattcatttgtttctcattttgatttgtttctactatcttttagaattaccaagaaattttatggaaatcatcattttgaagtcaggtaataagcagaaaaataaagaactgcaatattatctatcttcttaagtgtatatttagcattctcttgttcagttatccagatgattaaatttatttcttgaaaagcaaatcacatatcaaatttggccttactttttggcacatatgatggtaatgtggattaaatgttatgaaaacagctaaatttaattaaaaatatactttagaactaaaaaactaaaaatctcaggttaaaattttttcataatctgtgtaaatctgaaaataygagtaaaattattgaattgtattgaaatgaaggtaggaaaaataaattttataaaatgtttacatatatttataaactatgtatgtttcctttattactagtttaaatgtccttactcataaacagaagatctaaatatgggaaataatcaaattccatcatgtttaatatttttctttctccagtcatataaa

SEQ ID NO: 369426 - DNA, 596 bp, Homo sapiens
taaaaaggtccagaggtcagctctccaggattcatgtagcaagatcacaaattagtgcaggtcccaggctcctttcagcttttcattcagaacagaacaggttaagagcacagatagcccaacttcaccacttcctagttatttaatctttggcaagtcacttcatctccctctgcctcaatttctacatctgtaaatagatttataatcactaactataaattactttaatgaaaattgttaattggaactgtggatagtaatttgcaataactactcaaaagtaatagtaggtaatgtttaatragtgtttctcattttcagactctattcttaactccttacttgctaaataaggtaccaattgtataatgcaggatcaaaacgccggcccagttaatgtgtctgcatgattcctgctcttaagtactatttagggtgaagaaattgagatccctagtttatatgattgttgtgaagcatgtataaattaatacatataaactgtgaagaatcattcttgctacatagtaagtactaaatatactgcctgctattagtctttatcttctttattactactgcatttctgatgt

SEQ ID NO: 369427 - DNA, 571 bp, Homo sapiens
tatgatccataagtttagctcagaaatctgaaccatcagttgaacagatttttgtgaactacrgagtatatttataacagcaataccaggagtttgagatcagcctgtgcaacatagtgagattgtctccagaaaataaaacaaattagccaggtgtggtggcttgcacctgtagtctcagcaactcaggaggctgaggtaggagaatcacttgagcccaggcatttgaggccacagtgaactatgatcatgctactacgagaccttgtcttcaaacagactcttagagcaataactggcacatggtaagcgtttatcaaataaacctcatggttctttgtatttcaatcagaacaattggcacacttggatatgaatatgcctgacttttttctgtattttgagatcttagaagtcagcaatcttgtctcatgcaacttactatcccctataacattttaacaatactttataattacaatttgcatttggtttacagagttttttcatgtttatcatttataccctttttaaagatgcttaaaggagtggtcaaatgtttccaccttgt

SEQ ID NO: 369428 - DNA, 552 bp, Homo sapiens
atatttacaatgctattgccatttacagttggaaatgtcaacatttgcaaagatttattacacaattatctgagacatttatataaacgaatagattctattcactctcaacatttgagaagaaactacagtataatttaaaatacatattaaataataagaaaactaaatagtggtaaaacctataagaaaactttatttttaatttggattaaattacaggtcattgaatctagtaaaaattactgacttactattccatatttttattttatraaaaacttgctagtttaaatttgttttaataaaaggcatatttcaagccttataggaatccatatcatagtaatcaagatttataacagcattatacaaatttaatgctgtggatttttttcaggccctttgatgtaaaaagttaaaataattttttcatatcaaggggaaatgttactgtttcccagactaccaccttcactttagaagggaacatgacacaccggggcctgtcgtggggttgggggagggatagcattaggatatatacctcat

SEQ ID NO: 369429 - DNA, 552 bp, Homo sapiens
atatttacaatgctattgccatttacagttggaaatgtcaacatttgcaaagatttattacacaattatctgagacatttatataaacgaatagattctattcactctcaacatttgagaagaaactacagtataatttaaaatacatattaaataataagaaaactaaatagtggtaaaacctataagaaaactttatttttaatttggattaaattacaggtcattgaatctagtaaaaattactgacttactattccatatttttattttataaaaaacttgctagtttaaatttgttttaataaaaggcatatttcaagccttataggaatccatatcatagtaatcaagatttataacagcattatacaaatttaatgctgtggatttttttcaggccctttgatgtaaaaagttaaaataattttttcwtatcaaggggaaatgttactgtttcccagactaccaccttcactttagaagggaacatgacacaccggggcctgtcgtggggttgggggagggatagcattaggatatatacctcat

SEQ ID NO: 369430 - DNA, 421 bp, Homo sapiens
agggaaaccaataaggtcaaaggcaatgagattgcgtattgtatgttttaaatagaggtagctgaragattgggggaaaaataaagcaatgctgctggagcttttttatgccctgcccccaatttttgcttttttggtgttgtcttagatcattaagaaaacaaaaaagcaaaagaataaaatgaaaaaggatcaccaaaaatcgtggcaagaaagatgataaggcgtaagtctgagaaagaggagtgaggcatttaatgtttgttttacatgctgctcagggcactagagtcattttcaaagacacatttttaaaagatacgcataaaggcaaacaatataaatttgtccgctaatatcattagaggaaaatgcatgggtgcagttagtagtgattattaaatttaagaacttttcctcc

SEQ ID NO: 369431 - DNA, 570 bp, Homo sapiens
atatatatatgcacacatataagacatcaatttctcttttagcctccaccycatacaattcaacaattgctaataaattaggaggaggggcatattgatgtactgcttgactataacacaaagaagtgtagttagcaaaaagctgcagtgggtaatgaacagtattttaactcggcagtttaacctccgtgtctgtcagctgtgaccttttaccaaccccaatgagagtctgatttctcacttttgctactcactgctggatgagtgaatgtagaatttgacagcgagaggttttacatgaaaaggaaaggtacttaaaaagcatgttttgtgatgataggctacatttattcactgttcattacgcttggtgcagcagccgcgttggtggattgattgggtgtgagcagcttgtctgctatggaagtgaagaggcgttattgacctgcatgggagctgaagtgacctctagatgacccccctttcacctgaaattgaccttgaaaacaacgtagggttcactcccatttaaaaaggagggaaattcttctaacagcatgtgaattatta

SEQ ID NO: 369432 - DNA, 628 bp, Homo sapiens
tttctacactctgacagacaacataagccagataaaaggccaaccaaatacccagatgctgttgctggaaaattacatactggaactcagcatctgggtttcacagctgccaagttcaccccatgggtgcccatggtgcttggctcagctactgggccagacaggatgggggtggacatcatggaacaagcagatcaccacaatgaacaagatagaaagccaagtacataataaaatagcatgaacctgccaatatggtttcaaatgcataaaaccacacttttgtgttccaaacataatgctgagtacaagtttttcctctttggggtacagatgatttaagggccattaatggtaagcctgtggttacactctcttaccacgtgaaagatgtcagtcataaaagaaattataattagacaatgrattgcaatgcccttcctttacatccagttaaaaatacctaggaggatagctaaccagaatgtggagaagcatttggtataagaagcctatatcaacagggtaaaaatgcactaagtcaatatataaaacagcatgaaaaatccaagatggcaacagggtaatgaagtgagtattacagcctcctctggtttcacctcaggat

SEQ ID NO: 369433 - DNA, 722 bp, Homo sapiens
gttttaacaaatattttatgataaaaatagaacttcaactatttgggttactaacgtaaaggaagtattaaataaaatggatgctaagtttattataaaaaactgatgtatattgttttctattcagcttctttgcctttctgtaatgcaggctgaattctgtaagaaatatgttaactcttaactgtcgcacataatattgatcttttttttgcaagatttatctctatcctgtctttacaatatcttttgatcaatttattttgtgatttccctatgaattgcttttattttatccagacactaagtatattaacacagcaacctatattagccctcgatttacagtttctttgttttagtgtcatttgtagtatttgtagacaacattttcactttgagttatttattttataccactgaattaaaggaaaaaaattgaacttgagaaagtgggtgtaagactgtcacatcttgttttttcgtaattgttttcaacatatgtaatacatattcactaattttgtataggractgatacctttatttttttctaaattttctaaacttcttatgtatttatttttaactgacaaattattattgcatgtatttatgggtacaacatggtattatgatatagctacacaatatggaataattaaagcaagctaattaacatacccattacctcacctacttattttttgtggtgaaagcat

SEQ ID NO: 369434 - DNA, 722 bp, Homo sapiens
gttttaacaaatattttatgataaaaatagaacttcaactatttgggttactaacgtaaaggaagtattaaataaaatggatgctaagtttattataaaaaactgatgtatattgttttctattcagcttctttgcctttctgtaatgcaggctgaattctgtaagaaatatgttaactcttaactgtcgcacataatattgatcttttttttgcaagatttatctctatcctgtctttacaatatcttttgatcaatttattttgtgatttccctatgaattgcttttattttatccagacactaagtatattaacacagcaacctatattagccctcgatttacagtttctttgttttagtgtcatttgtagtatttgtagacaacattttcactttgagttatttattttataccactgaattaaaggaaaaaaattgaacttgagaaagtgggtgtaagactgtcacatcttgttttttcgtaattgttttcaacatatgtaatacatattcactaattttgtatagggactgatacctttatttttttctaaattttctaaacttcttatgtatttatttttaactgacaaattattattgcatgtatttatgggtacaacatggtattatgatatagctacacaatatggaataattaaagyaagctaattaacatacccattacctcacctacttattttttgtggtgaaagcat

SEQ ID NO: 369435 - DNA, 636 bp, Homo sapiens
ttaatgagctgatgccccaaatactgaaaatggattcatatttcttaacctcttttgaacctctagttaaaaactgtggtgtgaattcaaaaggaaaaaagaatgtcaatggtgtttttaaactattcatttggggaactattagtcaacctttacaaactacttgatagtaatatttagccaagtctaaaattaatgtttttatygattagaatactaaaagaaacctattttagtagttattttatatttttaaggatcgattatatgtcatataattcataaacaacagttaatagatacttaaaatttaagaaaatatttacatgttaaaattaaatattaataacaatatatggataaaagcatatagaactaaatatacatgcacacaaatgagtaaaaataaaactgaaaaagctggataaaattgatatcaaagtcaatatcctaggctaatgttatactatagtttacctttagcagaaactaggtaaagtatacacagtatctctttattatttctttcaactgcatgtgaatataaattatctcaatacaattttcatctaaaaattaaatgttacataattacaatttgatctatctatagcctctaaatttacaaaaggaata

SEQ ID NO: 369436 - DNA, 551 bp, Homo sapiens
tcatctaatctgacagattagacaatggcacaaaacccccatcaccgatgtctaaacaaagacttcatttcagaagagacaaagcttcatgcagactgtgttgccactaataacttttctaagcggaaaacaatgtacattttactaatgaaaaacaaattgcagcagggaagatgaatgtcttggcttttctgacattttaaataatctgccctcccttcccttttgtgcctttaatatttaccttcatatcaatctttgtgtaattttgttaattggccatggtgctgacatcagaaaaatggaaagcatcacaatcacagtccaggaccttaaaacccatgttgtaagggaaaaacaattttgctattctttataagcaaaatacatgagaaagcagtacctttcattagaaccagaggtaagctggacttyggggtgcccacactacagtgaaaatacactcaaaagggctgtaacctgattttctatgcaatgtcatcacagctgaacattaaaagtgagactggagatgtgcatatttaccatca

SEQ ID NO: 369437 - DNA, 486 bp, Homo sapiens
tttgccccctttgaagatctctattgtacaaaaggcttgtcagtatccctgataactactaggttgatcatttaaccctcttatcacttaagagctaactcttccttcaatgctgaatcatcacagtgtgcaagaacaagacatgtcatgtacatggaaaggggacacaataaatatgatatttagaggaaagcaggaaatagacagttttcatttatcttcagagttagaaatatagacctgaaaggacaaaacagggatgtgagaattctattttaatagctacaaaatttgagatgtggtcaggtattgaacaagctccactgtgaacagagaaatctactctatgagaaataaattcctagacataatttggccaatagtcagtactccargtaatttaggggtttgtagattcaaattttagattgttagaaattatctatgttcattatacaattaagaaaattgactcaaagagaccaa

SEQ ID NO: 369438 - DNA, 551 bp, Homo sapiens
catgcaggtttagaattaataagttcagtttgagtggaaattttgtaaccaaagcatttaaaagcttattatagtgaaagaaatgcagaaatacctgttccagccaaatattatgtacagtatacggaaaaaaaattaccattctgccatggaaaaaatttatatttaggtcacattctataggagttccctcctctagacacgtttaaacatacccaaatcatatatcaaagtaggtataggaattacacttcaaatatctactatgggcacccccattttgccttgaaaattatgctatgtttcytcatgctctagctctgatgaacgtttttgtgatatcctcgttttcatgcccactattggctcaatgcctctggtctaatatttaaggatgcagattttttgcaactctccctattcaagaattggagtctatttccccacacaatgcatcaagactagttttgtgactagtaacaaatgtaataaacttgaagttctgcaagttctggacactagacctcaaaacatctagcaacttctgcctt

SEQ ID NO: 369439 - DNA, 585 bp, Homo sapiens
aaaagtaaattaacagtagaacacatcctttgttcatgcaggtttagaattaataagttcagtttgagtggaaattttgtaaccaaagcatttaaaagcttattatagtgaaagaaatgcagaaatacctgttccagccaaatattatgtacagtatacggaaaaaaaattaccattctgccatggaaaaaatttatatttaggtcacattctataggagttccctcctctagacacgtttaaacatacccaaatcatatatcaaagtaggtataggaattacacttcaaatatctactatgggcacccccattttgccttgaaaattatgctatgtttcctyatgctctagctctgatgaacgtttttgtgatatcctcgttttcatgcccactattggctcaatgcctctggtctaatatttaaggatgcagattttttgcaactctccctattcaagaattggagtctatttccccacacaatgcatcaagactagttttgtgactagtaacaaatgtaataaacttgaagttctgcaagttctggacactagacctcaaaacatctagcaacttctgcctt

SEQ ID NO: 369440 - DNA, 462 bp, Homo sapiens
ctgctgctctagtggaatacaattgcttgagaaaccagcagacaaaatcagcaaatgaactgtccaaaatcgtaatagatgataatcataacagtaaatttagtgttttaagcccctaaattttgaattggcttcttaggcagcaatagataatagataaggtgcttaatcattctctttcccaacagacccttggattaatgacctgggtttggaccatctagaataaaatctttagatggcagtcagatccacctggaaagatatctctttaattcttaaacaaaaactatgttaattctgtamttgaaaatggccatagaaagatgaatagacagggacaaaatttataccttaaagtgaactacagagaatttattcaatagatactttgagaataaatataatgtacaatgtaaactatatgggcaaacataccagaaagtatacaatgttgacata

SEQ ID NO: 369441 - DNA, 512 bp, Homo sapiens
ttaactgggttcaaatttccataaatgtctgtttcctggatggactgcggtgtatattcaaaagtaaattctcttgycataccaggcagtattttctggacatggcagcctaggaagcctaggttgtgctttctaagccatatgagacaataacttgccattactcaaaatatgcagttggcatggatatgcaggcataagtgacttctctcttctttccataaatatattctaacaacaatgtttgttttcaaaccttttctaccaactcatattaacctgtgaagaagaatctggttcattattttgtttgtttgtttgtttgtcttgagatggagtctctctctgtcccccaggctggagtgaggtggcgcgatctcggccactgcaacctccacttcccaggttcaagtgattctcctgcctcagcctgccgagtagctgggattacaggtgtgtgccaccacacttggctaattttttgtatttttaatagcggcgaggtttcacca

SEQ ID NO: 369442 - DNA, 589 bp, Homo sapiens
gctttgtgaaaggccaaacttgagagggatgaactaggatatctggtggaagaaatttctaagccaccaagttctcaggctgctgagtggttacttctaactgcttacagtgaacctctagagacaggagaaacagagggggaaagtctgtattttccatataatattcagtcttgccatgaggtggggaataaaagagcattttcaggagagaaatccaagagtgaggcccagctagtactttctaaagagattagcatggctaaaagagaaccargtgctaaaagtcaagaccatggggaaaaggcccctgaaggcatttcagaaatctttgaggctgaccctcccctcacagacccagagacctaggaggacagaagggttttaggggacaggcccaggcatggctgccatgtgccacctctgagcagttcttgcttctccccacatcactgtcactctggctcaagcagccttaagtgcagcttgtgccaaaaactcagaaggtacatgttctaaaacttggtggcatccacgtggtgctaattttgcagacttacagaaagtgagagctgtggagacttggcag

SEQ ID NO: 369443 - DNA, 487 bp, Homo sapiens
ttttctctgcaattgtagagcacatgttttcagatgtttgtaagttcgtttatgtttctatgtctttgcgtgctactatgtttagagctmtttagctctagtgatagaatcaaaattgactcacaaattacaaatttaacagaataaatatttcctatcctttcaaattgtctttgttgctggatttattatctagaatttgaaatacatttctggaagtaaatttgcataatcagagagtaaagggggaaaaaatggcaaaatataaaaccaagttggtctagtgtataatccaagggtggttttaacatcttgctatactctgaaaatttattttcatttaacaattctgaatatgtatatgtaaatatatatagtttaaattatagctaatttccttgtaagaagctgaaggcataaaagagggagatggattctgtttcactaaaccaaagctgacagctctggtctgatcccaaaaatctta

SEQ ID NO: 369444 - DNA, 585 bp, Homo sapiens
ctctttgctttttcctcatgaattcaagatggctactggagatcctgcaataattttcacttcccaggcagcaggatggaaaactaataaggcggcaaaaatggttggaatatttcattttccagctttatctgcaaggaaggcagtaaaataaactatgtgtaagagaaaagaagagtaggcaagaatagatattaaggtagcaacgagcattttgccactccaatcagtcttagttgatgttaattcttctacccacaccttcctagaatattagaattctgcaagttttcttacttaaaagcaaggcctaagcctgtcataaacagkccttaaagagactggccataaacaggatttctgcagcaatgtgacatgctcgtgatggctatcatgcacactgctaaaagttgttggtttactggagcagggcaaggaacacctggcccgacctggagcggaaaactgctctaaccacaaattatagcaggagtggcctgtgccttagcaatatgcttttgctgcaaataatcagccagagtctgtttctctgctcctcactaggaatgcttttagttaatctat

SEQ ID NO: 369445 - DNA, 591 bp, Homo sapiens
aacagtccttaaagagactggccataaacaggatttctgcagcaatgtgacatgctcgtgatggctatcatgcacactgctaaaagttgttggtttactggagcagggcaaggaacacctggcccgacctggagcggaaaactgctctaaccacaaattatagcaggagtggcctgtgccttagcaatatgcttttgctgcaaataatcagccagagtctgtttctctgctcctcrctaggaatgcttttagttaatctataatctataagaactatgcttatcactggctttctgtcaataaatgtgtgggtcaaactctgttcatggctttcagctctgaagtctgtcagccccctgatttccactttatactctattcctgtgtctttgtctttaattcctctggtgccactgggttagggtctccacgaccgagctggccttggcaattgccatattttacattattcttacatatttgttttcttcctaaaatctgctgtccatgtttataaacttgtgttagcttcaaaatcctccaaaacaaaacaaaaatagaactgacgtggaaatgaggaccaaacatgtt

SEQ ID NO: 369446 - DNA, 560 bp, Homo sapiens
cctgctccgccccccgaaatacgacggaacagagtatcgaagaatcgtgagactacaaaagacatatcacacatgcaaggggaataccagaaagaccaaaaaaaaaaaaaaaaatagagaaagaaacagataaaataattgaaacaataaagacagataatttcttccaaattaatgtcagacaccaaaccacagataggaaactcaggggacattaagttaacattaaggataaatagaaaaaaatacacctagacataccatattaaacttcagaaaatcaaagattaatacaacatcttaaaagaagccagaggacaaaaaccatctcacctatagaggagcaaagataagaattttatctgaagcgagtacagtaaactatttaaagtgttgagagaaaaaaatacaccaacctaaaattacatactctgcgaaattatctttcaattgtgaaagagaggaggggattcaagatgtctgactaaaggcatccgacactcayctcttccacaaagggaacaaaaattgtaaaaagataattacactttcagtaaata

SEQ ID NO: 369447 - DNA, 596 bp, Homo sapiens
gtgaaaagagaaaaagaaagtcattatataataaggggattmgttcagcaagaggatataataattctaaacatatatgcacccaacactggagcaccagtgttggaaatataaaggaaatattagatctaaagggagagatagactccaatgcaataaatgttggagactgcaacactccattctcagcattagacagatcatctagacagaaaattaacaaagaaatactgaatttaaactagacattaaaccagatggacctaacagacatttacagaacatttgatccaatagctatagaatacacattcttctcatcagcacatggaatgtgctccaggataggccatatgttaggatacaacacaagtggcaacaaattttaaaaaaaatcaaagtcatatcaagttttttatcagaccgcaatggaataaaaccagacatcaataaaaagaagagctttggaagctgtacaaatacatggaaattaaataacaggtccctgaatgaccactgggtcaagaaagaaattaagaaggatattaaaacatttcctaaaacaagtaaaattggaaacacaacataccaaaacc

SEQ ID NO: 369448 - DNA, 654 bp, Homo sapiens
tcccgctttctcttgggggattttctaaaggttatgctgctaacaaatggtagatccagtgccaagacctatgtcctctgcttctatgtttttagcttgccacaagtctcttccacaatatgccagtgctgcgcaataatcacaataggcattttcttctgttcataacatttattgcagttccactacttatatgcccaaaggcgttgttatgtaatagagaagagcaagaagctggtgttcctcaacattccctagacattcatttgaaaagctactttctctgtaagctacggaacaaccaatgactttttttttaatttttgagggggataagggtgagacatgctaactgaaataaaatgatatgttctacaaacaaaggaagtcctggagattattgataagtactcagatttgggaactatactgtgagaatatcattaaaaccataaggcaaccagctggcaaactattatttctagagatgcagtagatttcaattgacttgtttcattcactggggttcccttttcttttggatatttcttactatgctatcaraagtgttttagcattttctataatctgaaacgaattgtttaagaaagtgtaatttacatgctaagcctgtacaaggacacaaacatagtc

SEQ ID NO: 369449 - DNA, 625 bp, Homo sapiens
ctatgtatattttaacacaggacaaatttggcaagggaaatttttacattgtatgtcagaatattcatcttttggagatttggcagttgctgtagctatcgttgcttagactttgaaataaatgtaaaatgtagtcaaaagagcctaggactaagagttgaaagaagtaatacaaattgcttgttactcaagttgcaaaatctttctatgcttcattttcataaaagacatgaagaccattcagtgtcttaataattacttatgcataataaccccttgtgataacgttaatgaaaatttgccctacctagcttgtagtgaggacaaagagataatgtttatgaaagtgatttataatctgtaagcacaaagtaaacacaaacaagakattaactgtgatggctaatttaatgtgtcaacttgactaggccattacgtgcccagataattggtcaaacactgttctggttgtgtctgtgggatgcttctgtatgaaactaacatttgaattggtagactgagtaaagtagattgccctacccaatatgggtgggcctcacccaatcctttgagtaagggagaatttgcatgctctctctgcctaactgtctttgaactaggatac

SEQ ID NO: 369450 - DNA, 595 bp, Homo sapiens
gcttgggaaaatggaggcatttgaggccttcaagattgggtataattgtaatggagagaaatgggagagacagaagtggggcaggaatattaaaagcaaatgtgtaaagatgagaaggagaaagacatgttgaagaacagccagaggttcagtttcgttacagacttactgtgtggtaacattacatactgagagayggagtaggaaaggtggtttgtagttagattgcagaggatgaatgaatggtctgtacttcaccagagaacaatggagagtcagtggaagtttaaagtatagaagtaactccaaaacatccagagcaattaggcagatgtgtttaaggaagattataaggggaagaaaggataacatccagccagttagaaaaagtattgcaatgggataagggaaaggtaataaggcagagagagtgaaaatttaaaaatagaaatatgggactagagccactcctaagatgcatggggtcacaggcagtttttttttttttttttttttttttgcaaggcccttctctatgtaaactaccgatctttaaaaactgttttacaaaatttatagacctacgtgaaatata

SEQ ID NO: 369451 - DNA, 595 bp, Homo sapiens
gcttgggaaaatggaggcatttgaggccttcaagattgggtataattgtaatggagagaaatgggagagacagaagtggggcaggaatattaaaagcaaatgtgtaaagatgagaaggagaaagacatgttgaagaacagccagaggttcagtttcgttacagacttactgtgtggtaacattacatactgagagacggagtaggaaaggtggtttgtagttagattgcagaggatgaatgaatggtctgtacttcaccagagaacaatggagagtcagtggaagtttaaagtatagaagtaactccaaaacatccagagmaattaggcagatgtgtttaaggaagattataaggggaagaaaggataacatccagccagttagaaaaagtattgcaatgggataagggaaaggtaataaggcagagagagtgaaaatttaaaaatagaaatatgggactagagccactcctaagatgcatggggtcacaggcagtttttttttttttttttttttttttgcaaggcccttctctatgtaaactaccgatctttaaaaactgttttacaaaatttatagacctacgtgaaatata

SEQ ID NO: 369452 - DNA, 536 bp, Homo sapiens
tctctgtctgcagtccctgccttatcaatttcatacagtctgatgactttaaacactatctatatgctgaggcctctcaaatttrtatgcaacccagatagctgctctgaactccagatttgtctctgtaattactaaatcttttatgcacacagtaaaaaaaaaaaacaactaatagttatctcaaacaatatgtccaaatgaagctcttatttttccttaaaaacatgcttggccgggcacagtggctcactcttgtaatcccagaactttaggaggctgagacgggtggatcacgaggtcaggagtttgagaccagcctggccaacatggtgaaaccctgtctgtactaaaaatacaaaaattagctgggtgtggtggtatgcacctgtaatcccagctacttgggaggctgaggcaggagaattgcttggacctgggatacagaggttgcagtgagctgagatcgcaccactgcactccagcctgggtgttcgggcaagactttgtctcgggggaaacaaaacaaaacaaca

SEQ ID NO: 369453 - DNA, 468 bp, Homo sapiens
agacaaaactatgttcatgccctgctggctcttaacagtctaatggaagaacagtaagcgaatctataagaaaatctatttgtaagtgtcagctttcctcccaaacttactcctccttattttggggagacatccgagaactgttcttctttcttatacccctcatccagttagtcctcaagctctgtagatgtgatctccttaatgtctcccacatctgatacctctccctgtcctctctattttggttcaaacctcacttgctcttgcctaaatcattacattaattttctaaatatgttttatacgttcagagtatacttcctgaaacaaaaatctagtcttattaattccctsttctagaggaagtctttttgtacattttgggtattttgttaattaaaaagactgcaactctagcacttcttaaatatttgattataaggcatggataagacagaaacaaca

SEQ ID NO: 369454 - DNA, 538 bp, Homo sapiens
atggtaaaaacaggagcaagaaagagagttcagggggaggttcacacacttttaaatgaccagatcttgtgagaattcactgttgtgaggacagcaccaagggaaggaagmtaaagcattcatgagaaatccacccctatgatccaatcacctcccatcaggttccacccgtaatactggggattacaattcaacatgacatttaggtgaggacaaatatgcaaactgtattagggagtatggttcaatattagtgcttttgttccttttgagattcctgtaactatattctgtaatgactcgagttggagtcagtcctgagggctgtctaaagaggacaagggaaggaaggatgagactggttctgttgaccctacacataaaatagactcaatctaataaagtattttctaatacggtaaaataaatatctccaaagagttttacaatgtcctttaacattgataagctttttctttagtggtttcaccaagattccttgagctcatggctttttaaaacagcctgggtttcccaa

SEQ ID NO: 369455 - DNA, 496 bp, Homo sapiens
tgttcttcagattatctcaaaagaggttgagatctgaaatgatgagaaagatagtcaaaaaacttttaaaatatatccttttctttttgcagacctgtgccacagtgactatttctagagcgccacctgaaaactctagaacaggtaagaccagcagcaggtctgccttatccccagtagacacaaatctgcacatgtcatcaagaatacccctggttgctgtaggtcccagaggactagggaagtggaggtgatgactccagatggctgtgcacgctatgccctsaaagccagactctagtcttctgaggaagaggaagtaaaatagcaccttcatccactggggatagagaggttgcaggacacctctccagtttctatttagtgccaaaccaccctggaaaaagtacccagaggatgaaacgtcaacccttcattttggagggtaatcatccacaatcccccacactaagaagcctaccttattattccacaa

SEQ ID NO: 369456 - DNA, 501 bp, Homo sapiens
  misc_feature (1)...(501): n = A,T,C or G
tattcttggtagaaatgtaaagtgggtcaaccacttggaaaacagtttggcagtgcctcanaatgtcaactgtagtgtggcacagcaattaaactcttaagtattttattcccctagggaatgaaaacacatgttcacacaaaaatttgtacacaaatgttcacagcagcattattcagaatagctaaaaagtggaaacaacccaaatgtccctcatctgttaaatggatgaataaaatgagatgtatctatgcaatggaatattgtttcaccataaaaatgaagtactgatacatgctacataacatggatgaatctcaaaaacattatactaaatgaaagcagccattcacaacagaacacatatcatatgttattcaaaggaattatcaagaataaacaaatcygcacagacagaaagtagattcgcggttacctggggctgcagggaaggggaatggaattgggtgggaaaggatggggagtaactgctgtcaggta

SEQ ID NO: 369457 - DNA, 573 bp, Homo sapiens
tcttagatcttatgtgtaaataactgttgcttatatatttcaaacaagaacccttacacatcctaacaaaacatcactccaaagaactaatcaactttgagatttagattaccccaaataaggatccctgttaggatcacaggaggtggtaataagaaagaatgaaacttcatccctagtctctacaggactatactacagttactcaataagcattgttggtttctcttgggagcccagtgtgagggcaccaaatacacatcatcagagtcccagactgtggctgtccgtaattgaacactcttgacctaagcatcagagggatttaattctgtgccatccaaggagcagcaacttaaaactactcgtatttggcttctctgatkttgactaggggagttgtttattggttagttgttggtgattggttgcttttttcctttctttgttttggtttgggttttttgttgttgttgtgctgagaacaggaggataaatgtaccccatataatatcataacttaaaactcaccccagtaagagggtaccttgagcctgtcattactgttgattg

SEQ ID NO: 369458 - DNA, 607 bp, Homo sapiens
ccgtctcagcttataaaagcttcacattttaaagaatgctctaacaggtgggttcacattctcacagatttctccattactgacaaaacaggtcaaatttcaagtttctagccagaggaagcaatygttacttccattactatgggagatgtgggaaagggaagtgagaagcaaattagagtaggtgggctttcaggttccttctagtcctgctagaattcgcttgatgtttgtccattcggaaggctcatagatgcattttgtcacaatggagacatttttctctttcatattatgtggaacattaaaaaaaataatagtctggcaatgctttggggagttacgcttttcctagtgtgtggttcttggctgaaggtatatgatggttgggaaaaaatcaacaaaggactgctctgtataatattatgtctctggtagaaagtggtttggagggttttatgaagcaaagattctaaaggtaaaatctttaacaagtcacaactctgaaaggctgatcaaaccttacataaataaactaaaaatctccaaaagaagcaagtcaccaagtgttcacatttgatttgaatatttcatttaaatattttcc

SEQ ID NO: 369459 - DNA, 500 bp, Homo sapiens
ctagaaagtccaagatcaaggcacagtagtttcgtcgtctggtgggggcttctgtctgtctccaaggtggcacctttctgccatgaaacactgtgtttttatatggcagatggtggaagggcaagtgagaggtgaatgctgcatgaagtttattttacaaggttgtgaatgccattcacaagggagaagtcttcatagcttaatcacctcttaaagctatcacatgggcaacaactgaattttggagggtattcgttcaaaccatagcatgtgggttttatccaaggtatgcaaggcttgttcaacattagaaaatcaattaacataattcatcacatcagcaggctaaataggacaaatgatgtaatcatatcaataaatgcaaaagaagcatttgacaaaatccaacacccattcatgmtaaaaactctcagagaactaggaatagagggtaatttcctcaacttgaaaaagaacatctacaaaaaagaacatctaca

SEQ ID NO: 369460 - DNA, 656 bp, Homo sapiens
ttttaaaacaataaaccatgccaagtagttttactttccttaaatatcatataaaaatgtatttctattttctgaaacttgatcaagcatactgtgaaagaacgtttaattcccattcctccttgaaagttaaataaaagctataaagatttccttcttcgtttgctgttttggttttgtactgaaatcccayggaccatattatttactgaatcaggtcctcagaataatccactgtttaccaagggcatgtaaacatggtttctagttaataggtgctatttactgaagagaaccaccgtttatacagcacaacacagttacaagagatgctttctatcatgtgaagaaaagtttctcaccagattattatgtttttctgattttttctggatagtgggtggggagaattagtgggctggagaaagattacaagttcaatagcataaatgatgtgtgtaaatagcacagggtacttttatgctgccaaacattcatagaagattgcattattaagctaaaaacttgtaagcttttaaacacaaattggcaaaatgtctaaacaggccattcttatatgtattgatctaaagctatgtggtgaaatatccaatttgtttatttttggttgtcttcatgttagaatatgataatta

SEQ ID NO: 369461 - DNA, 589 bp, Homo sapiens
actttggtctttccatgctctttaagggcaccaatctcatcaaaggtgccccacctccatgacctcctctaaacccaattacctcccaaaggccccacccgtcacactggggattaggacttcaacatagcattttgggggtcacaaatattcagtccacagcactttccattggaaagtagtagagacattaaacttaatcagtttgtgaatctgagtgttactgtttctcttgtgtctcagtttcctcatctttagaatagggataataatttcacacaccttataggttttttgtgagcattgaagaagttaatatatgcaaaaagcccttggcatagtggctgccacaggttagtatttgataagtgctggctattactacccacagaccacagtaagaatacacccacccagctagataccacacatcagaaacaacatcttccttgctctttttttgtgtgttgagagcagccaaataactgaggtcatggcaaaatatttggtggaaaactctaaaccaatgtttgcaatctgggtggaactgaaaaagtgttctrtgttttgctgtcctggttaagtctgc

SEQ ID NO: 369462 - DNA, 557 bp, Homo sapiens
tttctcacaggctctggtccaagcagttatgtagaacaactaggcaagtcttcatcgagagttgcccactcagagaacatgaattccagggtgatcatgagaggtggtgggtgtgattcttcgggttgtatcatgaaaagggtattgaagctgcagcctcaaggccttactgtgcagcttgtgttcaaatgttttttgcacatctggggagtgggaagaggagggcaagagagaaagctggatgttagagaagagaatagatgctaaacattcttcaacagaagaccccagcaagagatttgacacagcagctattcctragttatttagactgtcttgttagtatgtagaaaataaaaacaatgctactgattttccacagcttcaatttctttagtgatttaatttggctttgtcatttaccaagcagttcttcaatatgtgtgcctctgatatttttttcaagctggaaagtaaaatggacactgctgcttaaaaattttcctacaaagacactttgaagaataatgaatatcagataagtgttctctaaaacc

SEQ ID NO: 369463 - DNA, 586 bp, Homo sapiens
tttcactggaatgaaggagaaggagtagccaaccttaaaggtagagccaggactacttatattcatgtggtgtttgtctactctctgtctctcctttcagactatgagagtttctgggggagggagtaaatcatggcgtcaccatatataacccagaataagtgttcagtacattttaaaattaattaattagttagttagttatagtatttgtttgatctttgcactaacaacaaagaaaaacaaataaataaaaacttaaccaatcaatcagcaaatgaaaaaccaaagacaaactaattggcatttagggcctacactggggattagtagtaataatccttttggttctttgagaaagatttcatttagatatatgagatatattatctgtacacaaggatctaaaatctggcaaatagaaaagtagcaagaaaactaagactgaagaagttgtarctacctcttattagcaagataacttttaatgggctacacaccctacaacagctggtttggccaattctctttttttcagtctgcactttgggcataataagctttgctttagcttttaaaaaaggca

SEQ ID NO: 369464 - DNA, 544 bp, Homo sapiens
ttttaaaaaaggcaggattaagtctttgaaaagtaatagtcctcttaaatttgtgcgtcctggtttttgaaaaacagaaatgaactcacagaccgtaactatggtaggagacaggctgaattgcaattttgtttcatgtttggggagtaggaaaaatagaacctgaaagttgaaaatctccatcttataaatgartatcattgcctctacctagaaagctactactgacctatcaaaaaccttgtagacaagttaatacttctgtgatgtgtgcagctctttaaacaatctgcctgtcatgccagagagtacattttcacttggcttctttaacagacagtctaagaagaaagaataataccaaggactccacagctgcttctgcatgaggcaagggttttccatctgtactgtagtatttggcccttaaataactttttacaccccacagtgcatgtctatataacaaggaaggaaagggagttggaactacatggggccacatgagaaatggaattgcttcttttggcttaagggcataggc

SEQ ID NO: 369465 - DNA, 575 bp, Homo sapiens
tgtaagcactcaaggaatagtagctgcttttcacagttctctcctgttttctgtctccatgttcctcctctgtttcgcttcctttctccttcctttccctttacatgtctccccagcctcagccttatgcttgtcagtgacatctaggaagacccacagtccctgcacaggaagcccctctgcttakaggccccactggctctcattcaagactctgtcagctttgttaccacagtatgtctttcgtcaacttgtaaacaccacccatgtatttttgcctgttttaagggcccagctttagagtgttaattgaagtttgccttctgcctgtaatattttcttaaacaacttgcttaagatgtagtgaagtgtaccatccccaaaaccatccaaataatatgatgctgaaaattagaaagtcttgtttttggttgttgttgaattctttttttttttttttttactttttatttggaaataatctaacacagagaaaagttctaagaattaataataatgtacagaagacctgtatatccttagcgcagatgcacttattaataacattgtaaatt

SEQ ID NO: 369466 - DNA, 525 bp, Homo sapiens
cccagtcagggggttatggacagatctctgatatccctgagatgagccactaggagaaggggtggctacaggattgtagatcagtggtcttactcttttctgcctgccagccctggagagtcagggcagcccggacaaggaaaatttcyttcagcacagcatacccactctgccaaggggcagccagactgcttatttaagtgggttcttgatccccctcctcctgattgggtaagacctcccaacaaggggtctccagacaccacatatgggagtgttccagccagcatcaggttggtgcccctctgggacagagctcccagagaaagaagaggtgctatctttgctgttatgcagcctccactggtgatacctccaggggcaggagaaacccaggcgattagggtctggagtggacccccagcaaaccgcagcagccctatggtagagcagcctgactgctaaaagaaaaacacaaagcaacaacatcaatgaaaaagaccccacaaaaaccccacccaaagg

SEQ ID NO: 369467 - DNA, 459 bp, Homo sapiens
cagttctttgtacatctggtggmgtttggctgtgaatccatttgatgttgggcattttttggttggtaggctgtttattactgattcaattttagagctcatgattggtctgttcagggaatcagtttcttccttgttcagtcttgagagggtatatgtgtccaggaatgtatcaatctcttctatgttttttagtttgtgtgcatagaggtgtttctagtagcttctgatggttatttttatatctgtagggtcagtggtaacatcccctttgtcatttataattgtgtttatttgaaacttctctcttttcttctgtattagtctaggtagtggtctaacttattagtttttttcaaaacaccagctcctagatttgttgatcttttaaatttttgtgtgtgtctcgatatccttcagttcagctctgattttggttatgtcttatcttctgtgagc

SEQ ID NO: 369468 - DNA, 459 bp, Homo sapiens
cagttctttgtacatctggtggagtttggctgtgaatccatttgatgttgggcattttttggttggtaggctgtttattactgattcaattttagagctcatgattggtctgttcagggaatcagtttcttccttgttcagtcttgagagggtatatgtgtccaggaatgtatcaatctcttctatgttttttagtttgtgtgcatagaggtgtttctagtagcttctgatggttatttttatatctgtagggtcagtggtaacatcccctttgtcatttataattgtgtttatttgaawcttctctcttttcttctgtattagtctaggtagtggtctaacttattagtttttttcaaaacaccagctcctagatttgttgatcttttaaatttttgtgtgtgtctcgatatccttcagttcagctctgattttggttatgtcttatcttctgtgagc

SEQ ID NO: 369469 - DNA, 431 bp, Homo sapiens
agcatggataggactgttgctgtagcatcagcagaggtgctgttgtatgcctcagggggcctctccccagggacactctgggccactaccagtgtgtatgctcagccrtggatggagtgactgttctgcattcaagagctgggactcttgcccggtgaagagtggggatgagggctttcagggaagaggggctggactcctctccatatggtggctatggtgtgctggaggtgccagtgtaatgacttggccctttgtttctttcccagcctcagggctgttaggtcagtaccactacaactgtagtggtgaagaggttgtgggttgactctggaatttcctccttggagaaatgctgggctgcctctgactgcagtgatcaggcaggggcaaggtggttgtactggagtcccaggtgggtggccctgccc

SEQ ID NO: 369470 - DNA, 398 bp, Homo sapiens
cagcataagttaaatctgggctgtgtcattatgcctagcacatctaagagtgtgctgttaacttactgatttatttgaaggtaacactgtagttaataatctgtctgccaatctgcctgccagcttactgaattattaactaggattctgggatttgttttatgtacctgtttgctttctacacctaggagtgtagaaaacatgatctccaggrctctcttgtgccagaggagaaatagcctcggagctaacatagaaactcatgctaacactttgaaaaattctgttttggtttatattcaattaaatagaagtaccataaaaccccaaaaatgtttctcacttataaaaaagcctactattggcagaaaagctctagacttcattttttttctaca

SEQ ID NO: 369471 - DNA, 307 bp, Homo sapiens
ttttctttgtcaaagtggtcatagagtcctgcccaggatcaaggaaaggagaaatagactttacttcttagtgggaatggaagttatagaggtgtggctatttaagcaatacataatctgtcttagctatgataagcaaagatgccsttcctgaacatttttgtatgggtctctgacagtaacaaaagtagcttatattttctttaatataattacttatttgctaagtgtgatggtttattttatatgtcagtttgacagcaccacagggtgccttgatttaattttgcttgtggtgtgtctatag

SEQ ID NO: 369472 - DNA, 631 bp, Homo sapiens
attaaaattaaaaatgaaaagctttaaaaataactttgctgaggtcattgttgtactcttgcaatttgaagagttttaatttttgttttaaagtttaatttttaaaatcctgtgctgaggcttctggagtgctaatgacattctatatcttgagctgggtggaggtttttaatgaatttttgaattgtaaaatttgttaaactgagtgcttaatatttgtgcatgttactatatgaatgttacactttttcacaaacactttttagtaagtttaccacctcccccataccctgaaaacactcatgcttggatttaccccacatcaatcaaatcagattctctggacaagagacacagcattgagagtttttattcttatttttttcagctttattgaggtatgaytgacaagtaaaaattatatacatttaatatgtacaacttgaaggtttgatatatgtgtacattgtgaaatgattaccacaatcgagctaattaacatctttcatgtgtgtatgatgagaacacttactctcagcaagtttcaagtatacagtacagtacaatattattaactatagttaccatgctgaatattagatctccagaacttatcatcttataaccaaaa

SEQ ID NO: 369473 - DNA, 567 bp, Homo sapiens
gtgtttcacaaattcttcccatatctatagtctcataatgtaggttttcaacataatgaaatgtattgggtgaactatcttaccaccatttttttactgaagacatttctccgagaattcttggtccttccgtttcttaggtctgctgcatatctgtcatcctggaacttctctccactgctcccctgagttgatctatttctggaacccctggactttctgacttataccttcttttyggtgaagtataatctttggcaatttctatagaaaagttaaacagaagtaggttgctgttgttattgtgttttggtccttgcacaactgacagtgtctttatcataccacatactatattgatagtatggctggacatagaattctaggttggaaatcattctacctcagaatgtttgaagatattgcccactgtcatctagcatccagcattgttgataaatctgatgcctttatgattcccttggctttatatatgacctgtattttctgtgagttcttatctactctttatctgtggtatcatgatcataatattcaaatgtgtct

SEQ ID NO: 369474 - DNA, 567 bp, Homo sapiens
gtgtttcacaaattcttcccatatctatagtctcataatgtaggttttcaacataatgaaatgtattgggtgaactatcttaccaccatttttttactgaagacatttctccgagaattcttggtccttccgtttcttaggtctgctgcatatctgtcatcctggaacttctctccactgctcccctgagttgatctatttctggaacccctggactttctgacttataccttcttttcggtgaagtataatctttggcaatttctatagaaaagttaaacagaagtaggttgctgttgttattgtgttttggtccttgcayaactgacagtgtctttatcataccacatactatattgatagtatggctggacatagaattctaggttggaaatcattctacctcagaatgtttgaagatattgcccactgtcatctagcatccagcattgttgataaatctgatgcctttatgattcccttggctttatatatgacctgtattttctgtgagttcttatctactctttatctgtggtatcatgatcataatattcaaatgtgtct

SEQ ID NO: 369475 - DNA, 540 bp, Homo sapiens
acataaaaacaaatttgtttttctataccacaaggcttttgtgccaaggtggccatgtgtgtcaaagtcagggaatccctcctcctggaagccaagaggaagtctctcaaaactagaagggaaaggtgttttctccacatcaatccagctttggagacattctattagcgacatatgccccttcccccaaaaacaacaatgaagtgttctatgtgctaacaacatagctttaaaaaaaataaaataaaataaaacaaaattctgcatttttataaaacttgataaaaaatagtatttcaaactgtacagtcaccagaagtacacagttatcaaaaatgcacacacttcacttggcatctccagcaccttcagctttctgcgcctggtctgttttggcatctccatttcctgcagggttatttccctccttgccascatcagcttttccctttttccctttgggtaccttctctcccttctttgcaggggccttttaggcgtgggctctggctttggaggagcaggtttagcagacaacct

SEQ ID NO: 369476 - DNA, 610 bp, Homo sapiens
tgaacccattttagcttaattgcctctttaaaagccctgtatccaatatagatctgaggtactgggggttagggcttcaatatataaatttggaggggactaagttcagcccataacagcagccatctttctagcccagtgccctgcacatagtaggtgctcagtgatttttttttttttttgagacggccttgctctgtcacccaggctggagtgcagtggtgcgatcttggctcactgcaacctccacctcctgrgtccaagtcatcctcccacctcagcctccaaagtagctgggattacaagcatgcaccaccacgcccagctaatttttgtatttttagtagagacaggatttcaccatgttggccaagctggtctggaactcctgacctcaagtgatccacctgccttggtctcccaaagtgctggaattacacatgtgagccaccacgcctggcctcagtgaacaatttttgaatgactgaatgaaaagaattagccagaagttcctgtgttgagagaaaagggtgggtattattaggaggagtgtggtgatgctgtggttgcaactggaccattcagagaaaatagcaatcagttttttaaa

SEQ ID NO: 369477 - DNA, 539 bp, Homo sapiens
ggcgatttcctgctctggtgctcatgtgaagaactgcatgttcctatgctgatagcactgcaggtgaccctgtcaacccggggtttgtgaccatatgtccctctggtaagtgggtgaagcccacagacctcttcccaaaataatgtttttatatacataaagcgaaataaataggattataaatgaaatcaattgtttcaaaatagtattatcaaaatatattagcatactaagtaacaacatctagtgacagggctagtagctaccacarttttgaagtagatacaagtgtagaagctggaaatcaactggtgcattcttctcaatcctaggaaaccactggaccccagattctctccagaatccatttcttcactttagttaaaaattagaattgacagccgggtgcagtggctcatgcctgtaatcccagcactttgggaggccaaggtgggtggatcacttgagctcaggagttcgaggccagcctgggcaacatggcaaaaccccatctctactaaaaatacaaaaattagctg

SEQ ID NO: 369478 - DNA, 581 bp, Homo sapiens
tttataaagaacatatttctttcttacagttytgaaggctgagaggtccaagggaccagcatctggtgagggtcttccttgcttcatcatttcatggtggaaagaagaaaagcaagaaagtccaagagagagaaagagggggctgaactagcttttatgacaaacctactcttgcagtaatgaacccactcttgagataacgttaatccattcattaggacagagctctcatgacctaattacctcttaaaggtcccacctctcaacagtgttgaactgggggcttatgtttccaacacgtgaactttgggggcacagtcaaaccataacagcttcctttttggatggagttgcttacgttcataattaatctttactttttttttctcttgttggattacatggcagatgtttttgttttgttttgttttgttttaagacagagtctcactctgtcgcccaggctggagtgcaatggcgcaagctcagctcactgcaacctccgcctcctgggttcaagtaattctcctgcctcagccgctcaagtagctgggattacaggtgcccaccaccatgcccag

SEQ ID NO: 369479 - DNA, 581 bp, Homo sapiens
tttataaagaacatatttctttcttacagttctgaaggctgagaggtccaagggaccagcawctggtgagggtcttccttgcttcatcatttcatggtggaaagaagaaaagcaagaaagtccaagagagagaaagagggggctgaactagcttttatgacaaacctactcttgcagtaatgaacccactcttgagataacgttaatccattcattaggacagagctctcatgacctaattacctcttaaaggtcccacctctcaacagtgttgaactgggggcttatgtttccaacacgtgaactttgggggcacagtcaaaccataacagcttcctttttggatggagttgcttacgttcataattaatctttactttttttttctcttgttggattacatggcagatgtttttgttttgttttgttttgttttaagacagagtctcactctgtcgcccaggctggagtgcaatggcgcaagctcagctcactgcaacctccgcctcctgggttcaagtaattctcctgcctcagccgctcaagtagctgggattacaggtgcccaccaccatgcccag

SEQ ID NO: 369480 - DNA, 581 bp, Homo sapiens
tttataaagaacatatttctttcttacagttctgaaggctgagaggtccaagggaccagcatctggtgagggtcttccttgcttcatcatttcatggtggaaagaagaaaagcaagaaagtccaagagagagaaagagggggctgaactagcttttatgacaaacctactcttgcagtaatgaacccactcttgagataacgttaatccattcattaggacagagctctcatgacctaattacctcttaaaggtcccacctctcaacagtgttgmactgggggcttatgtttccaacacgtgaactttgggggcacagtcaaaccataacagcttcctttttggatggagttgcttacgttcataattaatctttactttttttttctcttgttggattacatggcagatgtttttgttttgttttgttttgttttaagacagagtctcactctgtcgcccaggctggagtgcaatggcgcaagctcagctcactgcaacctccgcctcctgggttcaagtaattctcctgcctcagccgctcaagtagctgggattacaggtgcccaccaccatgcccag

SEQ ID NO: 369481 - DNA, 581 bp, Homo sapiens
tttataaagaacatatttctttcttacagttctgaaggctgagaggtccaagggaccagcatctggtgagggtcttccttgcttcatcatttcatggtggaaagaagaaaagcaagaaagtccaagagagagaaagagggggctgaactagcttttatgacaaacctactcttgcagtaatgaacccactcttgagataacgttaatccattcattaggacagagctctcatgacctaattacctcttaaaggtcccacctctcaacagtgttgaactgggggcttatgtttccaacacgtgaactttgggggcacagtcaaaccataacagcttcctttttggatggagttgcttacgttcataattaatctttactttttttttctcttgttggattacatggcagatgtttttgttttgttttgttttgttttaagacagagtctcactctgtcgcccaggctggagtgcaatggygcaagctcagctcactgcaacctccgcctcctgggttcaagtaattctcctgcctcagccgctcaagtagctgggattacaggtgcccaccaccatgcccag

SEQ ID NO: 369482 - DNA, 540 bp, Homo sapiens
ttttaatttcttcatatattttcagaaattgtatcttagtgtaataaacaaacaaaaaacaacaaataaggaaatttttaacccctcacatgcaatattgaggtagaatcataatgggaaacttctttttaatttataagatttgggggttggggagtggcagatttttcttatcttcaaaacttaccagaggaaccaaattatgttgtaagacctgaaagcccttgctttatctcttccctaaacatttttctgatgatcattatagcatctgyaacctttttctgaaatgctcacaggtgttatagaagctcctggaatgcccagtgggattgcccagtgtcccctgagcagttccaagggagctctctccacaacaaggaccgtcaggtcatttggtcaaggggtgaccacagcaactaaggcatagagcaactcaggaaccctttgggggctccattgctgtcaaaactttcagtctagcaccctcaacttctattatggtcatattggttcagaaagtgaggtgtatctttctat

SEQ ID NO: 369483 - DNA, 558 bp, Homo sapiens
ccaccctcaggtttgatcatttgctagaatggctcacagaactcagggaaacaactctcattcaccagtttatggcaaaggatatggcaaaggatgtagatgaacagccaggtgaagagaaacacagggcaaggtatgtgggaagaggtgaggggctttcatgagttctccgcctcaccaccatcccagtgcctccacatgttcaacaacccaaaagctctccaaactccatagttcagggatttttatagaggtttctataggcatgattgattaggtatgattgattattaactcaatccccagcccctctccccttcctggagsatgggggtggagctgaaagctccaagcttatgatcatggcttggtctttctggtgaccagtcccactcaggagcccaccaacagttgtctcgttagaataaaagatgctcctattacccaggaaatttccaggaaatagaagtgtcaggaaccatgaatgacgacgaacacatatgtttcttattataatcacagcatcatagtgtactattgcattttactgtgtttaaa

SEQ ID NO: 369484 - DNA, 558 bp, Homo sapiens
ccaccctcaggtttgatcatttgctagaatggctcacagaactcagggaaacaactctcattcaccagtttatggcaaaggatatggcaaaggatgtagatgaacagccaggtgaagagaaacacagggcaaggtatgtgggaagaggtgaggggctttcatgagttctccgcctcaccaccatcccagtgcctccacatgttcaacaacccaaaagctctccaaactccatagttcagggatttttatagaggtttctataggcatgattgattaggtatgattgattattaactcaatccccagcccctctccccttcctggagcatgggggtggagctgaaagctccaagcttatgatcatggcttggtctttctggtgaccagtcccactcaggagcccaccaacagttgtctcgttagaataaaagatgctcctattacccaggaaattyccaggaaatagaagtgtcaggaaccatgaatgacgacgaacacatatgtttcttattataatcacagcatcatagtgtactattgcattttactgtgtttaaa

SEQ ID NO: 369485 - DNA, 567 bp, Homo sapiens
tcattataaaacacagttctgttagggaacaaccttggtgaaattgactcattgctaaaatcagacatagactttagtatttagatgtctttaacttgtttttttaactgagttttaacatgctgagttamaaaatcatgtcacacgctttcttttgatgaacctgaaaagttacatgaaaactgaagtcgtatttaacaacaacaaaagcaagatataaggaattggttacttggcctgaagagaacttctttgctgaacatttacattgagttcagggtgccaagctcaagtggtgggtttttcatttttaaactcttaggtcacttatgggccagagatgccctcatacaggcaggtccccatatccaccatgagacttgtcttctgccaccatccaaggaattcaagattttttttttttaatttgagatctcaggacctcagccaccctcagaaccttcctcggtagagcagcatctaactcatgccccactcaactcactggttcaagtggaaaagccactcaggaattgctttataggaactatgtttaagaaggtgaat

SEQ ID NO: 369486 - DNA, 583 bp, Homo sapiens
ttaaaactggtgtcttatagtgcctcaaattggattctgttcaaacgtgttataacaagttagtaccagattattttggtgcaaaagaaatttaaagccatgaatagttttttttataatacatatttttcataaatgtttgaagaccccctcatattttacagtactttttatatgttaagatataaaaaacacaaaaatsattgtgttacaattaactaaagtatttagtgcagtagcattttatacacataggtatcataggaaaaataggatatatcatataacttctacagacaagagcagagactccatctaggtttgcgtaggcacttctctgatatttgcatagtgacaagattgtttaatgatgtatttctcagaaagtagcttccttggtaaatgatgagtggctgtactttagacttaaattcctattcttactctcattacttaaggtagtagaagcttagttaatttattttatatctctcttttataatacatgcatttaatacaataacatttactaagcataatttatctgtattccacaaattttgctaagttgtattttccttta

SEQ ID NO: 369487 - DNA, 583 bp, Homo sapiens
ttaaaactggtgtcttatagtgcctcaaattggattctgttcaaacgtgttataacaagttagtaccagattattttggtgcaaaagaaatttaaagccatgaatagttttttttataatacatatttttcataaatgtttgaagaccccctcatattttacagtactttttatatgttaagatataaaaaacacaaaaatcattgtgttacaattaactaaagtatttagtgcagtagcattttatacacataggtatcataggaaaaataggatatatcatataacttctacagacaagagcagagactccatctaggtttgcgtrggcacttctctgatatttgcatagtgacaagattgtttaatgatgtatttctcagaaagtagcttccttggtaaatgatgagtggctgtactttagacttaaattcctattcttactctcattacttaaggtagtagaagcttagttaatttattttatatctctcttttataatacatgcatttaatacaataacatttactaagcataatttatctgtattccacaaattttgctaagttgtattttccttta

SEQ ID NO: 369488 - DNA, 583 bp, Homo sapiens
ttaaaactggtgtcttatagtgcctcaaattggattctgttcaaacgtgttataacaagttagtaccagattattttggtgcaaaagaaatttaaagccatgaatagttttttttataatacatatttttcataaatgtttgaagaccccctcatattttacagtactttttatatgttaagatataaaaaacacaaaaatcattgtgttacaattaactaaagtatttagtgcagtagcattttatacacataggtatcataggaaaaataggatatatcatataacttctacagacaagagcagagactccatctaggtttgcgtaggcacttctctgatatttgcatagtgacaagattgtttaatgatgtatttctcagaaagtagcttccttggtaaatgatgagtgrctgtactttagacttaaattcctattcttactctcattacttaaggtagtagaagcttagttaatttattttatatctctcttttataatacatgcatttaatacaataacatttactaagcataatttatctgtattccacaaattttgctaagttgtattttccttta

SEQ ID NO: 369489 - DNA, 576 bp, Homo sapiens
taatgttccactgaatggatgtaccatcatttgtttgcctttcacctatgcaaggatatactgtttgcttctaacttggggcaatataaataaagcaattataaacattcatgtgcagattttgcttagttataagttttcaaatcatatgaataaataactaaaagtgtgatgactagattatgtggtatgtctatgatagggtttgtaaaaatgactgccaaattattttccagagtgatgtatcattttgtattttcattaaaattaatgtcagtttctcttgctctgtattcttaccagcattaaatattattttttaaaaattaacatatgtagtggtatctcattataattttaatttgcttttttctaattaaaactattgcttttcatatgcttaaatgtaatacatctttgttgcaaatttttaattgggtagtttattattattattactatttagttttaactttatatgttgtatagttttttaatcaaatatgtgttttgaaatatattctgtgtgttttctttttgtaatattatmttgacaaaacattttttaataaagtg

SEQ ID NO: 369490 - DNA, 596 bp, Homo sapiens
tttgttttgttttgttttgttttgttttaggtacaatggtcatgcagagagaactccccatgaggctgtaagtgtggggtgaggaataggtagcaatgaagaacaagtgagggccatggccatttaagccacttgactgagccctagatagaatctgctagaacgcaacttatatacaccattttccaacttactatggattttagtgtcactacccaatgttaygactcagtggatcagatacctagttcatcaaggactgttgaggacacctgttcccttggttccaaaattattagtgttcaggcccaaccaggatgcaacgtcaagttatgcactttttttttcatttctaagagactggattacaatttttctgttgggtttaccagagctcccatactacatttggagctgccagaaactgttgaagtgcaattgtttctgagaagttaggaggcacaattggtggtgtgactcacactgtaggcttttcagcaaatacttgaggctgtgattcccactcaccactggtagcctcgtgggctttctcagtaagtagttcagagtaacacacacatatatggtaaatgtta

SEQ ID NO: 369491 - DNA, 518 bp, Homo sapiens
agtggctgcatcaatgtatacactccatacagtgtaaagtagttttgtggttttatattttcacaaaaattagtattgccatctgtattgttttatttcagatattctgatatttatgaattgtyatcttataatgatcttaatttgtatttgtgttttcataattataagatgtttgattagtgatgtttgattttgtttagtgaacatttggcctggctgatttgggaactgttacctcaatgttttgttttgttttgtttgtttgttttttcagtgtaaagaggttgtttttaattgtgtatatgtaacattagacaaaactatttaaagtcaataaatttttattcagggaattccatgttgtgatttcttccactgtccattaaggtcactttagatcctctaaagagctggagtcaaaagatttatcttcatgttagccatttttaatgaaatgatgcttattttaatccagttgtccttttcagcccataattcttttattttggtttctg

SEQ ID NO: 369492 - DNA, 618 bp, Homo sapiens
tattttagaatgtcataattacctctactggtgctcttaatttttgtctgtttgtttgttttcagttgcagtccrtaggcacttgctttaaccgtgaagaattaccttcagtacttcaggtaagacacatctgctagttatgaattctctcagaattcatttctctggaggcatttttattttattaattttgagaaatacttttgctgaatataagatttttggcttacgtttatttttcagcattttgaatatataggtccactatgactttcattgtccatgatataaaggtagctattaatattattagcatttccttgtacatgataaattatgtttctgttatagttttctaatttttctttttatgattatgacaatttttataatatgtgtggggggtggtatctttgcacatttctaaattttagtttgttgagcttcttgtgtgtagattaatttatttttaattaaatatgaagttttcagctagtgttttttatctcctctcctggatcacctaatatgcatatgtttgcatgtttaatacttttttatgtttctccaagactctcctcatttttcttcattgatttttccttattcttcagcatt

SEQ ID NO: 369493 - DNA, 565 bp, Homo sapiens
  misc_feature (1)...(565): n = A,T,C or G
attttgttaatatgtgtatctcatatgtaggcattgtatttttgtttctaattttaaattgaaattgagtagacacacttataagtgggagctgactgatgagaacacatggatatatgaggggaggggaaaaacacacactgggtaactgcaggagactgggggagggagaacatcaggaagaatagctaattggtgctgggcttaatacttgggtgatgggatgatctgtgcagtaaaccactgtgacatacatttacctatgtaggaaacccgcacgtcctgcacttgtacacctgaacttaaaagttgaaaattaaaaaggaaaaaataaaaataaaantttgagtagacaattgaatttatacactttgwaaaacctatacatattccagggtgcagattgctagtcttttgatatcatcattaagctaattcattgacaataagtgaatattaaataaataaggcaactagtggctgggcgtgatggcttatgcctgtaatcccagtactttgggaggccgaggagggtggatcacggggtcaagagttcgagaccagc

SEQ ID NO: 369494 - DNA, 578 bp, Homo sapiens
ctcccttgtcacccagtctggtgtgcagtggcatgatctcagctcattgcaacttccatctcctgggctcaagcagttctaaggcctcagccttccaagtagctgggactacaggtgcacaccaccatgtctggctaattttcgtatttttagtagagatggggtttttccatgttggtcactcacactggtcttgaacacctgacctcaagtgatccactcacctcagcctcccaaagtgctgggattataggtgtgagccaccatgccaggccttgatccatgatttccaatgtctrcattcaaacttgtaaaacggtgctgcttggtcttgatcacaatactatcacagaagattagacttaaaaatatccacggaaattaacccattcaaatgcggtcattttacacacagagaaatttcaaaatattttggccaaacttacaggaggagtgaattaatttcccgttgttgccataatgaattaccacaaattcagtggcttcaaacaacatatatttattatcttagaggttctgtaggtcagaaattgaaaaatcagtttctcagggctgaa

SEQ ID NO: 369495 - DNA, 578 bp, Homo sapiens
ctcccttgtcacccagtctggtgtgcagtggcatgatctcagctcattgcaacttccatctcctgggctcaagcagttctaaggcctcagccttccaagtagctgggactacaggtgcacaccaccatgtctggctaattttcgtatttttagtagagatggggtttttccatgttggtcactcacactggtcttgaacacctgacctcaagtgatccactcacctcagcctcccaaagtgctgggattataggtgtgagccaccatgccaggccttgatccatgatttccaatgtctgcattcaaacttgtaaaacggtgctgcttggtcttgatcacaatactatcacagaagattagacttaaaaatatccacggaaattaacccattcaaatgcggtcattttacacacagagaaatttcaaaatattttggccaaacttacaggaggagtgaattaatttcccgttgttgccrtaatgaattaccacaaattcagtggcttcaaacaacatatatttattatcttagaggttctgtaggtcagaaattgaaaaatcagtttctcagggctgaa

SEQ ID NO: 369496 - DNA, 547 bp, Homo sapiens
ttgtggttacattgggctgtccaactataaacaagtttggagtcaggtaaaaggaaaccagtatgctatttaaaaatattattgcaatagggagaaatacactaagaataaaacaaatgtctcaggagtcaggcaaaataatttttttttttaatgaaaaaagtaaagctagagggtgtgaggaagtggaataaaagagcagtgtgcttaggtagtagatcagagaatgtgtaaccctgaggccagagtatttcctgagacaggcccttaaggagggttgtgtttgctgagggtggtcaacattcagggtyctggggaaagagagaattttaactaaggtctggttaagaatgattttcttctgattgatcagtgtgggcaaaacagttcaaccaatcatttgtggggtaaaaaaggacaattaggaaagtgtgtgtctgatgttgtcatatgtaaacaagggagtgatctgtgagttttacctaagtcacatagagaagggggattctttgcagtagccatttttccagaaaatagaagtgtagag

SEQ ID NO: 369497 - DNA, 576 bp, Homo sapiens
attaaaaaaaaaagaaccaaaaatcaagtgagcaatcacagtaccttcttcttcttcttttttttttatatcacttttagaaaagtagcactgaagagagtatagaaaagacagtcttgaattgcctatactrttcctccccaatccctagcaatggctgcatggcatggagagaaaatctgtgcacttgtgggagggagagtggggtgattgtgggtcttcacattggaactgagtgctgccctgtcacagcagaaacactagacagacctcagatggtacccacagagggagcatttagaccagtcctagccaaaagtgaatcatgtatcctagcagttggaacctgagttccaacaatcctcttccccatgggctaaagtgctctggagtgctaaattattttaaaagtcaatctaagccacaataactaaaatttctgggcaagtccttatgctgtgctgagcttagagccagtggatttgggggtacacatgaactagtgagatctcacctgaggtggccaaaggaaatgtttgcatcacctgctccccaaacccaggtagcacacctcaa

SEQ ID NO: 369498 - DNA, 551 bp, Homo sapiens
catcttttcgcacaaatatctactttgttccacattgtttaaaggtagacacttgttgtggaaaaataaacttcaatcttcacctacctaattaggtacattgctatctttaaggtatcaaggtacattgaattactttggcacctctgttgaaagttaatcagtggtgtctttgggattgtatttctgtatttattaatttatgcaatgatttatttatgtctcatgtgagaatgagatattatgataactgctctagatttatggtaagttgtgamcttcgaaaaggtgaatccctcaattttgtatgttctttttcaaacatgatttcagaaatgttaggctttttgcatttcctaaaatattttagtccaatttgtcaccttttagaataaaccttttgaaatttaattaggattgccttaatttacatattgatttttggaaattggaaattataataatatgaagtctttcattctgtgaatgtgacacatctctattttattagtttgtattgtaatacataaaaattttcacagttttactgc

SEQ ID NO: 369499 - DNA, 603 bp, Homo sapiens
aaaaaccccagaaaacaaataacaaaatggcagtcaaaaatcgttacctcacaataatgacattgaatgtaaatgtcctaagctctccaatcaaaagacatagagtggttgtgtagatagaaagcaagagccaaccatctrttgtctacaggaaacatacttcattataaagacacatagagaccaaaaacaaagggatggaaaaagatatttcatgcaaataggaaccaaaaaaagggcagaagtagctatacttacatcatagaaaatagatttcaagacaaaaactataaaaggagataaagaaggtcattatataataataaaagtgtcaattcagcaaaataatattacaattgtacatatatactcacccaagactggagtacccagatatataataaagcaaattttattaaaaccgaagagagagacagaaacaatataatgatagctggagacttaaacacacccactttcagcattagacagatcactcagacagaaaatcatcaaagaaacgtcagacataatctgcagtatagaccaaatgtacctaataaatatttacagagctttccatccaacagctgcagaatacac

SEQ ID NO: 369500 - DNA, 619 bp, Homo sapiens
ttgtgttacggtagccctagcaaacaaatacactgagacactcttttcaaattttcttttagttctttagatgtgatgtatttcttctttttcttttattytttctttctttctttctttctttctttctttctttctttctttctttctttctttctttctttctttctttccttttccttttctgagatagggtcttacactgtcaggctggagtgcagtgacacaatcatggttcactgcagccttgatctccccaggttcaggtgatcctcccacctcagcctcctgagtagctgggactacagacacataccaccacaccctgctacgttttgcatatttttggagagatgtggtttcaccatgttgcccaagctgatcttgaactcctgggctcaagcaacctgccagtctcagtcttgtggaagtaccggaattacaggtatgagccaccacaccttcattgaacacacttaaaatatctgatgtattatttttcaggtttttctctggaacatttctattgattgcattgttacctatgtatgcatcatactttgtttttttctgtatgtcacatgtacttttgttgaaagcctgacctttaggatagtac

SEQ ID NO: 369501 - DNA, 619 bp, Homo sapiens
ttgtgttacggtagccctagcaaacaaatacactgagacactcttttcaaattttcttttagttctttagatgtgatgtatttcttctttttcttttattctttctttctttctttctttctttctttctttctttctttctttctttctttctttctttctttctttctttmcttttccttttctgagatagggtcttacactgtcaggctggagtgcagtgacacaatcatggttcactgcagccttgatctccccaggttcaggtgatcctcccacctcagcctcctgagtagctgggactacagacacataccaccacaccctgctacgttttgcatatttttggagagatgtggtttcaccatgttgcccaagctgatcttgaactcctgggctcaagcaacctgccagtctcagtcttgtggaagtaccggaattacaggtatgagccaccacaccttcattgaacacacttaaaatatctgatgtattatttttcaggtttttctctggaacatttctattgattgcattgttacctatgtatgcatcatactttgtttttttctgtatgtcacatgtacttttgttgaaagcctgacctttaggatagtac

SEQ ID NO: 369502 - DNA, 619 bp, Homo sapiens
ttgtgttacggtagccctagcaaacaaatacactgagacactcttttcaaattttcttttagttctttagatgtgatgtatttcttctttttcttttattctttctttctttctttctttctttctttctttctttctttctttctttctttctttctttctttctttctttccttttccttttctgagatagggtcttacactgtcaggstggagtgcagtgacacaatcatggttcactgcagccttgatctccccaggttcaggtgatcctcccacctcagcctcctgagtagctgggactacagacacataccaccacaccctgctacgttttgcatatttttggagagatgtggtttcaccatgttgcccaagctgatcttgaactcctgggctcaagcaacctgccagtctcagtcttgtggaagtaccggaattacaggtatgagccaccacaccttcattgaacacacttaaaatatctgatgtattatttttcaggtttttctctggaacatttctattgattgcattgttacctatgtatgcatcatactttgtttttttctgtatgtcacatgtacttttgttgaaagcctgacctttaggatagtac

SEQ ID NO: 369503 - DNA, 564 bp, Homo sapiens
atgttaactttgtgtaaactgatttgcaaccaatcaaataaacttactctttctcctttataggaagaatgaaatgctgcatcatttagaatgaatgcataaaaagtgatcactgttatggagttgttcacacaatttcttaaaaccatttaaagtgtataataataattataaaatgtatataagaacactraagttagccttgttatcaggaatattttaagaggtgttcaaaagtaggcaaaaattcttctttgtagtatatacaacaataccacacctaatatgcttacctaacattccattttctaaacccatttccactatcaaatttgggacattatgtaagtcactaataatccctgagtatgtgtttatttttattttatatgtttttacataatttacttatggactacctagaagagacctaagagacagttgaagatacagcagattatttaataggatgactcaggagtgtcaatggatataccagatatgtcaaatgaaaaaattattattttcccaatagaacattctaaagtatctataggcttaata

SEQ ID NO: 369504 - DNA, 564 bp, Homo sapiens
atgttaactttgtgtaaactgatttgcaaccaatcaaataaacttactctttctcctttataggaagaatgaaatgctgcatcatttagaatgaatgcataaaaagtgatcactgttatggagttgttcacacaatttcttaaaaccatttaaagtgtataataataattataaaatgtatataagaacactgaagttagccttgttatcaggaatattttaagaggtgttcaaaagtaggcaaaaattcttctttgtagtatatacaacaataccacacctaatatgcttacctaacattccattttctaaacccatttccactatcaaatttgggacattatgtaagtcactaataatccctgagtatgtgtttatttttattttatatgtttttacataatttacttatggactacctagaagagacctaagagacrgttgaagatacagcagattatttaataggatgactcaggagtgtcaatggatataccagatatgtcaaatgaaaaaattattattttcccaatagaacattctaaagtatctataggcttaata

SEQ ID NO: 369505 - DNA, 571 bp, Homo sapiens
cccctaaccccccattagacttaactattttatgttgtattaaagttagtcatgttagtcagtatgctatgcttccatcatgaattgatgtaaagtatttttcagaagaaaaaccagtgtaaatttgaaaatatttaataaatctcctacttattaagatgttaaggctctgcatttaatttttttaagtgactggattactatccactgttagctactaattaaacatagtattgtacctccttgatctttgctatgggactctgcagtgctttctttccagtagactagaaatagtaaacatccccatcccattgactctggatttgtccatgtaaatggctttgaccaacaggatgtggcaagaagagaagtgtgctcactcctaaataaaggcttcaagaagaactataatatgcttgaccctcgagcttacttcargaacaatatcatgtctcagagagtagatgctttttctggccaatgttctagaattaaagaaattgtggagtcaacaagaactcaacagaacttcagtcatcaggagaagaaataaacatttgtttttgtt

SEQ ID NO: 369506 - DNA, 620 bp, Homo sapiens
tactatccactgttagctactaattaaacatagtattgtacctccttgatctttgctatgggactctgcagtgctttctttccagtagactagaaatagtaaacatccccatcccattgactctggatttgtccatgtaaatggctttgaccaacaggatgtggcaagaagagaagtgtgctcactcctaaataaaggcttcaagaagaactataatatgcttgaccctcgagcttacttcaggaacaatatcatgtctcagagagtagatgctttttctggccaatgtyctagaattaaagaaattgtggagtcaacaagaactcaacagaacttcagtcatcaggagaagaaataaacatttgtttttgtttttttctaagctaataagattgggggttgttctttaccatggaaaaaggctgactaacacatatgctaaaggcctttatataaaaagagaaaatataatttcacctaatagagaaagggaaaaaataatatttaaaaagaaaaatactaattaaaacctatttttctctgcaaaaaaaatgctcaggatagtaaaacctattgaaataaaaaaagacattaggtatataaagaaaaaatataaaatt

SEQ ID NO: 369507 - DNA, 620 bp, Homo sapiens
tactatccactgttagctactaattaaacatagtattgtacctccttgatctttgctatgggactctgcagtgctttctttccagtagactagaaatagtaaacatccccatcccattgactctggatttgtccatgtaaatggctttgaccaacaggatgtggcaagaagagaagtgtgctcactcctaaataaaggcttcaagaagaactataatatgcttgaccctcgagcttacttcaggaacaatatcatgtctcagagagtagatgctttttctggccaatgttctagaattaaagaaattgtggagtcaacaagaactcaacagaacttcagtcatcaggagaagaaataaacatttgtttttgtttttttctaagctaataagattgggggttgttctttaccatggaaaaaggctgactaacacatatgctaaaggcctttatataaaaagagaaaatataatttcacctaatagagaaagggaaaaaataatatttaaaaagaaaaatactaattaaaacctatttttmtctgcaaaaaaaatgctcaggatagtaaaacctattgaaataaaaaaagacattaggtatataaagaaaaaatataaaatt

SEQ ID NO: 369508 - DNA, 642 bp, Homo sapiens
acctatttttctctgcaaaaaaaatgctcaggatagtaaaacctattgaaataaaaaaagacattaggtatataaagaaaaaatataaaattttatgctatatgttaaagtagggtatgatggttatttttatgtgtcagcttgtctaggttatgatggctagttatttggtcaaacattattctggaagttcctgtaagggtatttttggatgagactaacacttaaatccatggactttgagtaaagaagattgtacttcttagtgtgagtgagcctcattctaacagttagatgcccaaatagaaaaaagactgacctctcacaaatgagaagaaattatgtcagtaggtgaccttcctctcagtttccatttgtcttcactttgtctccaacatgtctgctcaccctgaagactttggtttgacagcctctataattgtttgatccaattccttaaaataaatgtgtgtatacatatatacagctgtcccaccacagttctaagggattggttctcctcaaatacgaaaatatgagaatgcttatgtctcttacataaaatggtgyagtatttgcatttgcatataacctatccacatcctgctgtatactttgcttatctctagattacttatgtaa

SEQ ID NO: 369509 - DNA, 635 bp, Homo sapiens
tatttttctctgcaaaaaaaatgcccagggtagtaaggcctgatgtccttagaagagacatcagagatcttgctctcactctccatgctcatgcacagggaaagtttatgtgaggacatagagggatgcagctatctacaagccaggaatgattcctcaccaaaaaccaaattttctggtatcttgatcatgaatttcttgtctccaaaattgtgatacacacatttctgctatttaaaccacccagtcacatattaactcttgaataatttaatttcagaggattttagtcaaaatcataataaatgtgttttttaaatatccatggagtatgatcaattttctctgtgatacatcataacacacccttaaaaatgtaagagcaaattaatatgagcaataaacaatggtgcaaagtctatttttagacttctccagatgactgtattwttttgcaaaaagcccccaaattttctctacaatgatttcattattgtattgacaagtgtatgtgtgtgtgtacatatatgtgtgtgtttgtgtgtgactgaatgtgtataaacatcatgtgctgcataacattttagtcaacaatgaagcaaatatacactaatgatcttataagattataatag

SEQ ID NO: 369510 - DNA, 603 bp, Homo sapiens
tgaatatatgtatacatatgcatatgtacatatgtgaatatatatctatatacttgtatatacctgaatatatgtatacatatgcttttatatatattcaaatatatatgtgtatatatacttatacctacttaaatatatacatatatatactgatatatacttgagtgtatatatactttccagtcttagaaacattattgatgatttaaatgctattgtaggtaaaaatggggatttaccattataatctccttgaataaacagtggcatcagaggcagaagcaagtcagagtctagtcactggcatatggagaggaaagctctatacatatctagaagggaggcccgtctatcttgtttccatctctgtctcacacactgacatctttattcagaagccacatgcaatgcccaggaaaagcagaagcagttyggcttgtcaaatgaatgtctttattatgttttaaataactagatttccttatatttatattttgctgatttgagtagatagtatagacatttgttaaaaaataaagagtatttaaaagagtaaacagtgcaaaataagttactctttctccccagttttaaagtttt

SEQ ID NO: 369511 - DNA, 687 bp, Homo sapiens
tttggaatgtttgtaacacatggaaaggatacatatttgatgtgagaaaaaccctattttaccctcatatcattactatacattgtacacctattttcaaatatttaatgtacccaataaatatatatacctactatctactcactaaaattaaatagtaagagaaggattatactcccattaacaaaccatccccacaccccgtactcttcccaggatctggtgatgacactaccattatcgcattcacaaggaaaatgcttccagcttttgcctattcagtatggtgttggctgtgggtttatcagagatgactcattattttccattatgttcctctgattcctagattgttgagggtttttaacataaagggatatttcattttgtaagaagtattttcttcacctattaagatggtcaagtggtttttgtttttagtttgtttatgtgatgaatcacatttattgatttgtgtatgttgaaccaaccttgcatcccacgaaaaaagcctacttgaccatagagaattatcttttcgatrtgttgctagatttgatgatctccaagtattttgttgagaagttttgcatttatattcatcagggatattgacataaagtcttctttttgttgtatctgtgccagtttttaatataaaaatgaagctagcatcatagaatgaat

SEQ ID NO: 369512 - DNA, 576 bp, Homo sapiens
atacttaatgttatgtacataaatatttatttatattagagtacttgctttgtaattctttcacttggataaatgtagcaaatcacattatttgagtgtaacaatctcctcttgatggcctctatgtttcttaatttctgctactgtggatagctgataagaatatacttgtataaatctctgagttaatgcgtgaaagaattgtycttgtataaagaagtggaagcagtattttaaggtatagagcatgtaattcctcatctttataaaatcatacagtaataaactctttgccagtgtggttgtatcaatggatacttgtacattcctcagcatttacttcaacatctgatgttttcaaatgttttaattttctccatcaaatggtcataaaattttatcttatgacctttattttaatgtcttcattatcaatgatgcttgcctctatgtgactcctttctacagaaagtaaattcctgacttttcccactttctattggttttaattgcactttcttattgtctttatgtattcgtaatagggatacttttgtcgtatcagcaagatataag

SEQ ID NO: 369513 - DNA, 515 bp, Homo sapiens
caaagagaattaggctcccacacaataatagggggaaacttcaacactccactgatacttagatcatcgaggcagaagatactcaggacatgacctcaaaattggacaaaatagatttcatagacctctgaagaactccccaccaaaaacaacagaatatayattcttctcatcaccacaaggcacatattttacaatcaatcatatagtcataaaacaatcctcagaaaatgtgaaagaactaaaattacaccaaacacactcttggaccacaaacaataaaaatagaaataaataattaaaaaattgcccaaatatatgcaaacacatggaaagtaagtaacctgctcctggatggctttagataaataatgaaattaaggataaaacagaaattctttgaaactaatgagaacaaatacacaagttaccagaatctctgggatttaaggcagtgttgagagaaatttatagcactaaatgtccacatcaaaaaattagaaagatctcaaatt

SEQ ID NO: 369514 - DNA, 515 bp, Homo sapiens
caaagagaattaggctcccacacaataatagggggaaacttcaacactccactgatacttagatcatcgaggcagaagatactcaggacatgacctcaaaattggacaaaatagatttcatagacctctgaagaactccccaccaaaaacaacagaatatacattcttctcatcaccacaaggcacatattttacaatcaatcatatagtcataaaacaatcctcagmaaatgtgaaagaactaaaattacaccaaacacactcttggaccacaaacaataaaaatagaaataaataattaaaaaattgcccaaatatatgcaaacacatggaaagtaagtaacctgctcctggatggctttagataaataatgaaattaaggataaaacagaaattctttgaaactaatgagaacaaatacacaagttaccagaatctctgggatttaaggcagtgttgagagaaatttatagcactaaatgtccacatcaaaaaattagaaagatctcaaatt

SEQ ID NO: 369515 - DNA, 515 bp, Homo sapiens
caaagagaattaggctcccacacaataatagggggaaacttcaacactccactgatacttagatcatcgaggcagaagatactcaggacatgacctcaaaattggacaaaatagatttcatagacctctgaagaactccccaccaaaaacaacagaatatacattcttctcatcaccacaaggcacatattttacaatcaatcatatagtcataaaacaatcctcagaaaatgtgaaagaactaaaattacaccaaacacactcttggaccacaaacaataaaaatagaaataaataattaaaaaattgcccaaatatatgcaaacacayggaaagtaagtaacctgctcctggatggctttagataaataatgaaattaaggataaaacagaaattctttgaaactaatgagaacaaatacacaagttaccagaatctctgggatttaaggcagtgttgagagaaatttatagcactaaatgtccacatcaaaaaattagaaagatctcaaatt

SEQ ID NO: 369516 - DNA, 508 bp, Homo sapiens
cagaataaccattagtggtgccacaatttacaaacacaggtttctataagatcctgtcattcattttttccccagccttcaagatcaaatctatttattgtcttttaacgtgttttattcaaaatctttcttcttcttaattagttacattttcagagggtgcatatgcatagatgcagtaagttttcagtttaacttcttctgagatagtttactgacattgccctagctatttttttcaacaaataatgttggcatttttttttttttaaatagaggtggggtctcactatcttactcaggctggtcctcaactcttgggctcaagccatccacctgcctcggcctccaaaagtgctgggattacaggcgtgatccaccgtccctggtctatttttttacttctatccaaatatattcagaaaaatggccaatacagtgctctgttctctgataaagtagttattgaaggggactagaraagtaaaacaaacagaacaaaaaaccc

SEQ ID NO: 369517 - DNA, 623 bp, Homo sapiens
gacaaagttcaatgtgtggctgcagcayattaactgtgtacccttggacaagcaactatcatctactaattcagagctgcaaaggttaacaagaattatacaccagccaatccactaacaattttttttaagtaacacaaagttacaactgagttgcatctacaagcaaatccatcaccaacaagttgggtttataattacacaagtggaaagaatccaagatattggtcaaacctacctgaagcaaatgttggaataagagggaaaaaattcttttttatataaagaaaagaatttacaaacaataaaaaagcacaacacatacaaagtattttcaatactgtcagaagaaagaaatctaaaatatttatgtccagcaatttctattttcaacaagtgactggcccttttcttttaaaggtcaaaatttttattctaaaagaggaaaatgaaataaaggtaatgcagcccatgtgtatttttagtattccaaccagtatgtgctctgtcgcagtgacttgtcaagtcttcagtgcctggtggcaatttccattgttgaaattattgttgtcggtgtctgattcagccaaggctcatatttagcaattctaataacatcccca

SEQ ID NO: 369518 - DNA, 513 bp, Homo sapiens
ggcctgagaaccagagatgccaacggtttaaatcccagtccaagtctgaagacctgagaatgtgggggtgggccaatggtggaaatcctggtcaagtctgaaagtgcaggaatcaagagcaccaatgcccaagggcaggagaagatggatgtcccagctcaagaagagtgaattcaccctgctgaaaaattcttaacagggaggtggttagactgaggtagttctagtgtctacctaagcccaacataaacagtaaaatgaaaatagagactttaccaatcgaaactgcagctgccctctaaccaaggtctttccattctaaccaatcaagtatattttctttgtcttrctcgtgtgtccacctacaaaagctctctgcccaccctgctgtagcagagcgttctatacctcttctggttttaagtgatgtctgattcatgaattatcctttactcaaataaactctgttaaattaatattgtctaaaatttgggttttctttttttcaaatca

SEQ ID NO: 369519 - DNA, 523 bp, Homo sapiens
ttggccaggctggtattgaactcctggctctagtgatccacccgcctcagcctctcaaagtgctgggattacaagcgtgaaccactgcacccagccctagaaataatttttaattaccaggcckgaagaaattagatacatacctatgacatatattttaagaagcaggtaacttccaattacatagaataatattaataatttgaagtcccctaaaaccttgctactcaatgtgtggatcaaggaccagcagcatgaatgttccttgggagcttttgtagaagcaaagcttaatccaaacctacagaagctgcaatttaacaagagctgcaggtgatttgtatacatattaagttggagaaatactctgagctatacactagtccatttgcctcttcagtgtactcagtaatgatgaagaacttttgaaaattacatttatttctatttcagaaaactctccatcatagttctcatcagttccctttaaatacagttattatatgaaggtaaatatactaag

SEQ ID NO: 369520 - DNA, 611 bp, Homo sapiens
agtcagaactaatcccaaaacttctcactgggcaggctctctgcagacaggatggttgcctggcatatccatcttgccaccatgagagaaggacttcagcctgcccaagaatggattccatccagaggacaaaagtgcccagaaaagagaaagcaagaccatgttctcctcagaatatgtcagcctcagaaccagccctcacttactgctggccttgacatttaaatgaacccacaaattctcagttgttactgaagtgggcttgagacggttttttgtcacattgggtgtgctgaaatagttgtggactattatagaaaggtaatgatgtattttctatttctcatagttagtaactggaaccagacaarttatctgcctaaagccagtcatttagtgaagtaactagggcccatacctgtgacttgtatattagagttttgagtattctattcactagatcatacagttttctcaaacatatctgtggaagttacttagaaaaaataaaatacaaatttcttttctggattctttccctatacatttagttattcattttccatcacttagttactctgacggctcagattttattgtgctatagaaga

SEQ ID NO: 369521 - DNA, 575 bp, Homo sapiens
gaagaataagaatattttgtgctgttattttcttgggcaaaaatttttagaaggctggaacaatcttgtaattttattctctagccttccaccattcctttacttataaaaaatagcattttaattaaaataatcctgaattccatgcaagattaaacacatgagaatagtcagcaatcttttggaacaaaaaaaaagaataaagagtgactttcactgtcagacacytaagtgtattatgaagcaacaatgatgaaaactaagtgataatcagcccatgggaataagtgcatagtccagaaaggaaaaaatgtccataaaatcattttggtatttaaagcaatggagcaattatgacctatttgatgaagacagtattatatgaacaagtggttaagccactagagaaagataaagttaggttcccattgtctcagaatttacatggaaattaattaaaatatgaaacaagtcttagtaaagatacagaacaataaaaacttccattccttactggtgagactgaaaataatacagctattctggaaaacagtatgccaacttattacgaagtt

SEQ ID NO: 369522 - DNA, 440 bp, Homo sapiens
cagaaaaatcaggcaagagaaataaagaaaagccatccaaataggaagagaggaagtcaaactatctctgttgacagacaatatgatttacacctagaaaatcccatagtccctgaccgaagcttctagatatgataaacaacttcagcaaagtttcaggatacaaaatcaatgtaaaaaatcagcagcatttccatacatcaacaatgtccaagctgagagccaaatcaagaatgtaatcccattcatgatagccacaaaaagaataaaatacctaagaatatagctaaccaggtatatgaaagatctctacaatgagaattacaaaacactgcttaaagaactcagagataaaamaaacaaatggaaaaatatcccatgttcatggacaggaactatcaatatcactaaaatggccatattgcccgaagcaatttaca

SEQ ID NO: 369523 - DNA, 647 bp, Homo sapiens
agcatttccatacatcaacaatgtccaagctgagagccaaatcaagaatgtaatcccattcatgatagccacaaaaagaataaaatacctaagaatatagctaaccaggtatatgaaagatctctacaatgagaattacaaaacactgcttaaagaactcagagataaaaaaaacaaatggaaaaatatcccatgttcatggacaggaactatcaatatcactaaaatggccatattgcccgaagcaatttacagattcaatgctattcctatcaaactaccagcatcattcttcacaaaactagaaaaaaaactattttaaaattcatatggaaccaaaaaagagctccaatagccaaggcaatcctaagcaaaaaaaataataataaagctggaggcatcmcattactcaacttcaaactatactaaaacacaacagtaaacaaaccagcatggtaccagtacaaaaacaggcacatagatcaatgggacagagcccagaaataatacctcacacctaccaccaagtgatctttgatgaagtcaacaaaaacaagcaataggggaaggactccctattcaataaatgatggtgggataactgattagccatatgtagaagattgatgccggaccccttccttaca

SEQ ID NO: 369524 - DNA, 315 bp, Homo sapiens
acagagcccagaaataatacctcacacctaccaccaagtgatctttgatgaagtcaacaaaaacaagcaataggggaaggactccctattcaataaatgatggtgggataactgattagccatatgtagaagattgatgccggaccccttccttacatcatatacaaaatttaactgatgataaatccaagagttaaatataaaacctaaaactgtaaaaacccttgaagataacctaggacatgccattctgaacataggccctgacaaaggtttcatgatgragatgccaaaagcaattgcaacaaaaacaag

SEQ ID NO: 369525 - DNA, 554 bp, Homo sapiens
gaaccgatacctcaccaaagaagattagacaaaccaaaggcaaacaagcatgtgaaaagataatcagcatcatacatgattatgaaaatccaaattaaaacattatgttactactacacacctattagagtggcaagaatccaaaacattgacaacactaaatgctggcaagaatgcaaagtgaaaggaactctcattgatagctagtaggaatagaaaatggtacagycactttagaagacagttcgacagttcctcacaaagctaaatgtagtctcatcatatgatccagtgatgctcgcaggtattcacccaattgattagaaaacttatgtccatacaagagcacacatgtgaatgtttcatagcaaccttattcataatcactaaaaaatggaaacaactagttaggcatggtggctcatgcctataatcccaactaaatgggcagctgaggtgggaagattgcttgagcccaggagttcaaagctgcagtgcaaaatttttggaatctatccatctgacaaaagtctaatatacagaatttacaagga

SEQ ID NO: 369526 - DNA, 467 bp, Homo sapiens
taggctctggagacatgtttcaacaagtattgggcagtcaggatcacaccgttttattagttacaagtgaaaaatagttcattatggtggattcagtgaaaaagagtagactggggtgtccacgacatccttaagaggcctagagaaataggctctctgcttccaggaattggcctgacagtgagagtccccctaccccctgtcactaagcctgggatgctacagtttgccctgatgtcaagcttggacacagctgctgctaccctacgtcccatgstgcacctgctccagtggctagaacagcaggctgtcacctccaggagtcagatgcctccaccaaaggtagatcccggtggagcctccttcctcaggctgatccttctcaagggagggtctagggtgtgaggatcagcttggtggagcctgaaaactcctgcgacccagctgtcaaagttgcaactctgagt

SEQ ID NO: 369527 - DNA, 611 bp, Homo sapiens
gaatgggcttttaagtagtttccagtttgggtctatacaaacagtgccactatgaacatttttacgcatgtcttttgtgaacatacttgtttgattctgttggctctaaaccctgggccacagccatatggtgtgttcagcagtgtaagaaggtttcattggttccaygtccatacttttcatcgttggcactttagccatcctaatgactgtgtggtgataccttcctgtggtcttaatcacatttgtctgttgcctcgtgggcgtatttctttcttcactttaagttctgggatacatgtgcagaacgtgcaggtttgttacataggtatacatgtgccgtggtggtttgctgcacctatcaatccaacagctaggttttaagccctgcatgcattaggtatttgtcctaatgctctccctccccttgcctcccacctgccgacaggccccggtgtgtgatgttctcctccctgtgtccatttgttctcattgttcaaatctcacttttaagtgagaacatgctgtgtttggttttctgctcctgtgttagtttgctgaggatgatggcttacagcttcatccatgtcccagcaaaggacatgagttca

SEQ ID NO: 369528 - DNA, 611 bp, Homo sapiens
gaatgggcttttaagtagtttccagtttgggtctatacaaacagtgccactatgaacatttttacgcatgtcttttgtgaacatacttgtttgattctgttggctctaaaccctgggccacagccatatggtgtgttcagcagtgtaagaaggtttcattggttccacgtccatacttttcatcgttggcactttagccatcctaatgactgtgtggtgataccttcctgtggtcttaatcacatttgtctgttgcctcgtgggcgtatttctttcttcactttaagttctgggatacatgtgcagaacktgcaggtttgttacataggtatacatgtgccgtggtggtttgctgcacctatcaatccaacagctaggttttaagccctgcatgcattaggtatttgtcctaatgctctccctccccttgcctcccacctgccgacaggccccggtgtgtgatgttctcctccctgtgtccatttgttctcattgttcaaatctcacttttaagtgagaacatgctgtgtttggttttctgctcctgtgttagtttgctgaggatgatggcttacagcttcatccatgtcccagcaaaggacatgagttca

SEQ ID NO: 369529 - DNA, 594 bp, Homo sapiens
attcatcatgtgttctgcgaattgtgcaattctcttatttataaatgaattggaactttggcttgccacatggctcggcgttttctattgtgccaaggttgccagcgtccrtcacccactcttcatctggttgaagatgaggatatccaagctggtcccatggatgatcctggggtctctgctatatgtatctatgatttgtgttttccatagcaaatatgcagggtttatggtcccatacttcctaaggaaatttttctcccaaaatgccacaattcaaaaagaagatacactggctatacagattttctcttttgttgctgagttctcagtgccattgcttatcttcctttttgctgttttgctcttgattttctctctggggaggcacacccggcaaatgagaaacacagtggccggcagcagggttcctggcaggggtgcacccatcagcgcgttgctgtctatcctgtccttcctgatcctctacttctcccactgcatgataaaagtttttctctcttctctaaagtttcacatcagaaggttcatctttctgttcttcatccttgtgattggtatatacccttctgg

SEQ ID NO: 369530 - DNA, 443 bp, Homo sapiens
catcagcattgcagcaacatttctcaaaaaaatgatggagttgttcaacactcctgacacaggtgaaccccgctggcaaattagtttctcaaaagcggaagtgggcagaacaaattatatttccttatgtgtgtgtgtggagaaggggagacaagggattcawgctgaacaagattattatttcattagcaacatggcagacacgcagacacacacacacacacacacacacacacacacacacacacacacacacacacagtcttataatcatattcatctgtttcttcccggacccctccttccaatgaaattccttctctttacccatctggcaacaagatgaatggcagcttttctagctctaggttgagtaactttcagttactgcagggagcaaactgcctttctgacaagaagaatgaaatatgaaagggtgacat

SEQ ID NO: 369531 - DNA, 620 bp, Homo sapiens
gggctctccatagtctatctttgagggttcttgtgaagttactatgtgtgrcatgaaggctgcttacatttttacatgcatttgatccctttaaaatggtccagaagaaagtggtatatgaaagtacattctgaaaccagaaacatggagcatgacacttcaagctacaggatctggagtcaggtgggtgttccccggtgctgctagccagctttgatcttaactctcccaagggtcaactcttcatctgggaagtatggccaatcctaagtcacagcattatataagagtgaaacaaaagcctgtgtgaaagtccctggtgtcctgactaacccacagtaggcgctgaatgaatagaaccttttaaaggtgttatcatcatcatcatttgcagcattgctggacttttttctcttcctagctcacctcctacaaatgtgttactggattgtgacaaatatatttttggacatttttagttgacaactgcaagtgatattgaatattgcaaattaattgacagtttaactgcttagaggatttctcttactttgggtaattggaaagtaggaaattaaaggaaaagcaaatatgatattatttgagtattatttatgaaa

SEQ ID NO: 369532 - DNA, 620 bp, Homo sapiens
gggctctccatagtctatctttgagggttcttgtgaagttactatgtgtggcatgaaggctgcttacatttttacatgcatttgatccctttaaaatggtccagaagaaagtggtatatgaaagtacattctgaaaccagaaacatggagcatgacacttcaagctacaggatctggagtcaggtgggtgttccccggtgctgctagccagctttgatcttaactctcccaagggtcaactcttcatctgggaagtatggccaatcctaagtcacagcattatataagagtgaaacaaaagcctgtgtgaaagtccctggtgtcctgactaacccacagtaggcgctgaaygaatagaaccttttaaaggtgttatcatcatcatcatttgcagcattgctggacttttttctcttcctagctcacctcctacaaatgtgttactggattgtgacaaatatatttttggacatttttagttgacaactgcaagtgatattgaatattgcaaattaattgacagtttaactgcttagaggatttctcttactttgggtaattggaaagtaggaaattaaaggaaaagcaaatatgatattatttgagtattatttatgaaa

SEQ ID NO: 369533 - DNA, 581 bp, Homo sapiens
attttgagtgttaagtcataaggttctggatttagctaaagcttctattttacttttagctgtttctgcaccacccaccccccccccagcccaccaccacatctttggctggggaatgaggggtgctacctatttagtgtgaggtctggtagaaattcaggttgcccactcagtctccatagagacttgagcaggtggaattctggctactgttggataagcggggagttctggctctcactaggcctccacagatgcttccctgacagagagggacaagagtgccttgctactgctttccatataaccttcactgaaaccatggaggggtgttgtcctcaccattactgggccataatggaagycctgactctactaggtatccttggatgccactcatgtctgaaagggtactttcagacatgaagtataaagggtacttcatgtctgccagatgagaatgaagtataggctccccacaaggtctgtggcatgggcttgtcaaggatagagtgtattattacctaaaacttctctttcatgctaagctgcctttttcttggttctttgactactagaga

SEQ ID NO: 369534 - DNA, 535 bp, Homo sapiens
aacatgggcccaatgaagccaagctctttactagggagtaacatgggtatcttttactccagttcccataacttccttatttccatctgagaccttgtcagcctgaccttcactgtccatatttccttctattattattattctatttcaatagttttggggaacaagtggtttttggttacatgaataagttctttggtggtgatttctgagattatggcatgcccatcacctgagcagtgtacacggtacctaatatgtagtctttcgtccctcactccctcccacctacccacccccatgcctagtccccaaagtccattctatcatttttatgcttttgcatcctcatagcttagctcccacttatacatgagaatatatgatatttgattttccattcctgagttacttcatttagaataatggcctctaactctgtctaagttgctgtaagggccatkatttcattctattttatggctgagttgtattccatggtgtatatataccacatttcctttgtccacttgtt

SEQ ID NO: 369535 - DNA, 406 bp, Homo sapiens
atttaattttaacaacaatcctaaaaaataggtactgttattaatcctgctttagaaatgatgagataggcttacagaggttaaacaacttgctcaaagcaaaataacaagtgaaaaagctgaaactcaaaagtaggtctttctatttctagagtctattattttactaggatttttttttttttggtacttgactataatattctgctcccaaaacttctcagttaattatagatatttatttcaattaaattattttagatgactcatttattyttaatgaaaccattcattaacaccaagtttcctcaacgtattctaagaattatattaattccaattagcttgttgtagcttcctatgtactgactacataaacccatgtagaaccaggtaaaatatatat

SEQ ID NO: 369536 - DNA, 584 bp, Homo sapiens
gaaatgaagtactgataaatgctaaagcatggatgaactctgtgaaaaaagccagtcaaaaatgaccatatgtattagtccattttcacgctgctgataaagacatacacacacctgagactgggcaatttacaaaagaaaggggtttattggacttacagttccacatggctggggaggcctcacaatcatggcagaaggtgaaaggcacgactcacatggtggcagacaagaaaagagagcttttgcaggaaaactcycccttataataaccatcagatttcatgagacttactcattctcacaagaacagcacgggaaagaccttcccccatgattcagttacttcccagtgggtcccttccacaacagattcaagatgagatttgggtgggacacagccaaaccatatcaccatgtcttctatgatacgatttacatgaaatgcccagaaaagaaaaatttagagacagaaaatagattggtggtcgccaagggttaaggggtgtgactactaatgggtacaaggtttctttgggggtgatgaaaatattctaaaattagattatggggatgggggcaca

SEQ ID NO: 369537 - DNA, 559 bp, Homo sapiens
atacttttggttcccttgaacactctgtgttcccttctaccactgggtgtctgagcaggctattgcctctgtcctagtgtcaccttggagaagtctacwccttcatgtgttccttcctcatggcagcatttcttgacttctgctgcataacaaatcacaaaagacatagagcattacaacaagacaaatttattatctcacagttcccatgaattgggactctggttaactgaggttaactgagttctctgcttagagtctcaccagactgaaaaaaagaggttgatatgtgcaaacttatctaaggctcaagatttctatttcaagctcattcaggttgttaatggaatttatttccttgtggttgtagggctaaggtgctcattttctttctggcttccatcaataggtaaatgaataaacaaatcatggtatatccataaagttgaatgtgattcagcaataaaagcactcttaatgcactcaataacatgagtgaaattaaagctaattattctgagtgacaaaagccaaacaaaaaggaatatatactgtatga

SEQ ID NO: 369538 - DNA, 609 bp, Homo sapiens
gtggactgtttataacatattcagaggtagaaggtaaaggttaagaacaaactattttgggatagtagaaagtatggtactaaatcttaaagcagtagctacttaaatcttgtcattttccaaatttagtccatgacctagaaaacttttaaattaattgtactgcaaagactccatctccaaataaagtcatatttgaggtactgggagttaggactccwccctgtcattttggagggacatgatttaacccataacacatgaatgacataaaaactaagatttagttatggttgttttttcacttgaaaggtaccagtaaaatttgtcaactggctatgagataacatcttttcttttggaactagatactgcattgttttaatggtttgagtggggaagtaacctgtaccttctgcaaacttactaatctctaactcaccattgactctgtacctaataaagtagcttcatgtggttcatgaaaaaaaaaaaaaaattaaataaacaatgtcaagagagtcttttgatttaattttctgcttgtttcacatataaatggcaaagaaatatctttattctatggttaacattttcatttgtgtttaa

SEQ ID NO: 369539 - DNA, 609 bp, Homo sapiens
gtggactgtttataacatattcagaggtagaaggtaaaggttaagaacaaactattttgggatagtagaaagtatggtactaaatcttaaagcagtagctacttaaatcttgtcattttccaaatttagtccatgacctagaaaacttttaaattaattgtactgcaaagactccatctccaaataaagtcatatttgaggtactgggagttaggactcctccctgtcattttggagggacatgatttaacccataacacatgaatgacataaaaactaagatttagttatggttgttttttcacttgaaaggtaccagtaaaatttgtcaactggctatgagataacatcttttcttttggaactagatactgcattgttttaatggtttgagtggggaagtaacctgtaccttctgcaaacttactaatctctaactcaccattgactctgtacctaataaagtagcttcatgtggttcatgaaaaaaaaaaaaaawttaaataaacaatgtcaagagagtcttttgatttaattttctgcttgtttcacatataaatggcaaagaaatatctttattctatggttaacattttcatttgtgtttaa

SEQ ID NO: 369540 - DNA, 631 bp, Homo sapiens
ctgggactacaagcacgcaccaccacacccagctaatttttgtatttttagtagagacgggatttcaccatgttggccaggatggtctcgatctcttgacctcatgatccgcctgcctcagcctcccaaagtgctgggattacaggcatgagccacctggccagccacatttttttcttaatcacaataatttcctcgggcaacacatgaatcatttataccttgataatgaatttgaggtcagtcacttgtattcagttttcaagtaagactttttaactttcttatttttatcactttttttcaatcacaagcatagaaagtgtaaaatcaggtatttctagaaattgttcttagagataattctgtccaaccctttagttttactgctaagaagttgatatctcgaaaagttaaatgattttcttaatgttacatawtgagtttctaaccaaagaaggctttttgactctgagttcaacagttactgaagggtggtaactcttcaaattaatactcacatatattatattgagccacacagtattgaacttccaactgttttttaacttaattttatgccaaggaagaagattccattggatttactaatagaaaattaattgcaaca

SEQ ID NO: 369541 - DNA, 441 bp, Homo sapiens
ccacttgaatgaatttgactattttagatatcacatataagtagaataaaacagcacagtattcgtttttctgtgactggcttatttcacttagcataatgttctcaagatttatccatatactggccaggagcagtggctcaatgccagaaatctcaacaatttaggagtctagggcaggaggattgcttgagcccaggagattgagaccagcctgggcaacawagtgagacttcatctctacaaaaatttttaaaaattagttgagcatggtagcacatgcctgtggtcccagctagttgggagtctaaagtgggaggactgcttgagtccaggaggtaggggctgctgtgagctgtgattgtgccactacgctccagcctgggcaacagagtgagattctgtcagaagaagaaggagaagaagatgaagaagaagaag

SEQ ID NO: 369542 - DNA, 578 bp, Homo sapiens
ctgattttttatattgcatgacaaaagtatcaagattcattttcttttccaattcatgtcatctgcaaataatgacgattttattacttccattccaaacgctataccttttattttttctcttgccatattgtacccatgaatgtttttgtagtgttttttaaaatttcaaaacatatgagggtttctaatctccttttaackttggtttctaattttgctgcactcttttcggagaacaagctgtatagcatccattcttaggaatttattaagccttgttttgtagccttgtacactatacatttttgcaaatgtcacatgtttgcttggtctccagacccattcattctacctgtagagaaagatatagagagatgttgctcatttaaggcatttgccgtatcttgcaggatagccccctaaccttgaaggtgctttcttttagctggtgccaaaattgtgaggtcagcaggctattctgctcttctggtgatccagctcctttttggagatgggcaagactagtgaattccagtggtgtgaacgcattgtcatactttctttgcagtagtatg

SEQ ID NO: 369543 - DNA, 566 bp, Homo sapiens
taaagctttaaggtagtagtttcatttttttatctctctagagattctgttgtttgcaagtttgtggttttaatcatctttgaggttaagattttgttcgtcttacttgctaaagtttgcaaccttttctctagttcaaaatctggtttctctttaataggagaaagtaaatgtctatggattaagcaaaattgtgatttaaattggtgaggttttgaagtttggttcaatttggcaaattagaattcttcttttgagtgaccaataattaacaaaakacctttattaggatgtggtaagtcctgaagaaaagggacactgttcctcccagccaaaggcaccttaggcaaccaaggacttgtgcaagtttcagagcttatcaatcgagacaagaaatggtcccacagggaattcccaaagaagaaaatacagggaaatttgcttaaacttgtgggcacatataagggactgatctcccagtgccttaagcacactgaattcctgtttttcattgagacacataaaagggaagaaccaacccaagggtgacacccttggggagctag

SEQ ID NO: 369544 - DNA, 470 bp, Homo sapiens
ccacactttgaatatgtctggtagattactccttgtttattgataaatatggcttatggagccaaaatggtcagaagtagagaaacctcaaaaaacatgtagcatatctgccagttgatgccatacttttgaatacctaagccctgatagttttccacttggtccttcccatttttcttcccagatgagactctcctcctgttctattataacctgaaatgcactgcaacttggggcaaactcagactgctgagaagggagaagagggaggagttaggggtttttccctagaccttatgtccaaacaaaggggcttgatgtccttgctgtcataaacagcatcctcattgataaagtaaattttttwaaaaaattgaaatccctacttatgcaactcaacgtgaggccagagtgcatgtcctgctgaggggaaagcaaagtggttacacaatgtgccctgtggaactgag

SEQ ID NO: 369545 - DNA, 547 bp, Homo sapiens
gttcttggagttatttctaaacagaactaacatcagaattgtctgamtcatcaaaattgtctattttagaacaatcaaatttatcaaatgaatcttcagccaaccactgttcgagaacagtcttaacatcacacattagaatgctatgttttccaggatttgatattttcagccattgagaattactatattttgtaaatggaaataccattactaaaaacagaattctataaatagaatgatgtcctttgtttccaaagtggatgtgctagagcaatgcgaaaataataataaaagtgagatatttcgtggcaaagttatctcggggtaaatgctgcagcagcaagcgctgctcagggcaaatgagaaaaacgttaattttatgggccgactttactggactgtgggatgctcagatagctggtaaaacattatttccagtgtgtctgtgaggttgtttctggaaaaaattagcatttgaattagtagagtgagtacagaagatcactctcccaaagcaggggacaccattcagcctgctcaggac

SEQ ID NO: 369546 - DNA, 568 bp, Homo sapiens
aatactagcaaactgaattcagtagcatattaaaaggattacatataatgactgttcccttcaaaacccaggttgaagtttaatttccaatgtggcagtattgagaagtaaggcctttaagaggtgattagatcatgagggttctgctctaatgaatggatgaatacattcttggaataatagatgtatgggatatcattagagggaaactgatggctttataagaaaaagaagagagaactgagctagcacattaacatattagcaagcttagctctctcaccstgtaatactctgcactgcctccagactctgtagggttcccaccagccagaagactctcaccagatgtgcccgcttgactttggacttctccacctcaataactgtaaaacataaattcctttttttataaattacccaatttcagctattttgttataagcaaaaaaacagactaagataatgccaagcaggatttattcttggaaagcaggaatgattcaacatataaaaatctatcaacataatacactgttaacagaataaaggatgaataacatatgat

SEQ ID NO: 369547 - DNA, 568 bp, Homo sapiens
aatactagcaaactgaattcagtagcatattaaaaggattacatataatgactgttcccttcaaaacccaggttgaagtttaatttccaatgtggcagtattgagaagtaaggcctttaagaggtgattagatcatgagggttctgctctaatgaatggatgaatacattcttggaataatagatgtatgggatatcattagagggaaactgatggctttataagaaaaagaagagagaactgagctagcacattaacatattagcaagcttagctctctcaccctgtaatactctgcactgcctccagactctgtagggttcccaccagccagaagactctcaccagatgtgcccgcttgactttggacttctccacctcaataactgtaaaacataaattcctttttttataaattacccaatttcagctattttgttataagcaaaaaaacagactaagataatgccaagcaggayttattcttggaaagcaggaatgattcaacatataaaaatctatcaacataatacactgttaacagaataaaggatgaataacatatgat

SEQ ID NO: 369548 - DNA, 594 bp, Homo sapiens
tccctgatgatgtggagaggctgtgagcttgactgagcgttactgttcacaagtgtatctttttacytaaggattaggaactgtgtgctgacttagcccaggtgagctttgattttgccccaggtcaacatcggaaaccacgtcttttataggaaaggaacaggaaaatccagtatgagatttcacatacatatttattctcctgataagactccaggttcctggtgcagttgctttcgcttccctgttaatgatttggtcgtgttacctctcctttgtgatgtaggtttttctgaaatgatgtaaataatggtctaaatcatcttccttactcagtcaataaatatttggctctagtctgtattattttctttttgctgtttaacatataactctttgttggttatttttttttctgagtgaatttcacaccacccctaagtgaaagctacatgaaggcatcaaacctagcttagtgttttcacatcattaattctaagtaacatttctgaagctacttgaaaaactaaaattttataaggtgagctactgaaaagtcattacatcaaggctttaatgtattgtcttggtaat

SEQ ID NO: 369549 - DNA, 504 bp, Homo sapiens
aacacaacatgtgcgtttatatccatagaaagcaaagatgatgcaattacagtggtaggttcaaatatgctttgttcataatttgacaaataagtcagtgtttctcaaacttatttttcatcactgctatccgatgagcttttgtaaacttttcccctcacttgctgcccacacagatgttatagacatataatatatctatcgatgtattatgtgcactgagtatcatgcttcatatgtgagaaagtaagggttttgcccccataaaccaatttttgtcccttcaagtcactattactcctgtctcgaatgcatgaaataaattaattagaaaaaaatgtataggaagtgtgaataacacaacccataagtctgtcagctgaagaatgacgagkttcctaagttggaaaggagaattttatttttcatcaagggttgtatctggcagggtggccattccacaggctgggaagccttggctctgtccagaagcctggaacaggc

SEQ ID NO: 369550 - DNA, 452 bp, Homo sapiens
ccctcccaggtctcacgtcccatgctctcctccccactctctgctcttgctgtcctggcctctgctcttctttgacacagcaaaagatacacttggtttggggattttgttcttgctgccccaggtcctcctagcttgctctaaattcccacagcgcacaatctgaaacccaggtacctgacttgtctgtccattcccgttctcctaccagaaggccagcaccatgaagatgatgacccagtccacctggygcatggctacctccctgatgcctagctgtgcacctgcacacattctagcctcagttggtgcttagcaagaaagtagcgacaatccatgtccagaaaataccccagacgctgagctccagtgtttactgcttctgtctaattttcatcagtgaatttcctagctcattttgttttcactggttggtaattaaaattggaata

SEQ ID NO: 369551 - DNA, 452 bp, Homo sapiens
ccctcccaggtctcacgtcccatgctctcctccccactctctgctcttgctgtcctggcctctgctcttctttgacacagcaaaagatacacttggtttggggattttgttcttgctgccccaggtcctcctagcttgctctaaattcccacagcgcacaatctgaaacccaggtacctgacttgtctgtccattcccgttctcctaccagaaggccagcaccatgaagatgatgacccagtccacctggtgcatggctacctccctgatgcctagctgtgcacctgcacacattctagcctcagttggtgcttagcaagaaagtagcgacaatccaygtccagaaaataccccagacgctgagctccagtgtttactgcttctgtctaattttcatcagtgaatttcctagctcattttgttttcactggttggtaattaaaattggaata

SEQ ID NO: 369552 - DNA, 559 bp, Homo sapiens
atgaccctgccattcccagaacactctgggcttgggaagccgggggagtttctgtgggaggcggagtctctctgccaaaagccctccagcaaagccaccttgcctctgctttctgttttctgagcatatttgcttcatctaacacatgggaagtttattttattgctgatttttagcgattatctatctagaaaaagtgaaggcatgactgttatttcctcttctcatttcttcattttagccaagtgactcattagcatgaaggagcttctgtggagagccccaagcccagctcgagcggcccccgcccgactccycactgggccacccactcaagaatcaagcggtggaggcatcgcaccccactcacctctgccttgctctgcaaccacacattttacatctgcgaggggtcttcaatccactccatcccagggcttcttgggctgtttacacatttgttttcacccaaaagaatgagccatcagtgcacctacagtgaatgcagagtgtcccccatggcttgagaatacagcatataacacaccatgaggaggtc

SEQ ID NO: 369553 - DNA, 605 bp, Homo sapiens
taatttcagcttcttcatatatggtatgattgattcaatgaaaaatttattcattcatttgttcattcagacattggcaaaggcacccttagtctctctgctaggggttggggtggtttgtggagaagaagaatcaatagacttgcttttgccctaagtcacattttgtccccatcactcctttccttccttcttttatttcttgatcatattctgtatgtcctaaatatcactagagacaaaaatatgagtcagaagtaattctgtcttcaggaatgtggcttccaggatggtgtttgcaaacagtgccctgtgatgtatcagtgttccttgatattaggtatctcttgaaaaactggcttcccagggcacttccccagatctagcgtctgccctaagtgcccgtgaggctcataaaggctccagtctagagtaaatactgaacttggttaaagccgctaatgtgagaccgggacagtgcgagccatggctccagtgyctgggtttctaggtaagcccatctccaggatcctagtgagaggaaaccaggcttaaacaatcgagagctgcccgctgcactctcactgaggactttccacccggat

SEQ ID NO: 369554 - DNA, 490 bp, Homo sapiens
gggcttctgcctgcatctttcaacttccctcggccagcccattcctaactgtgccttctccagtcctactcggaatggagagttgaaaatcccctggtcctaagagagggatcaacattaactctcactttctcaaatacacaggaacttctctgaccttttagcccttgaagctctgtaaatacccacccctccaaggggcaagaaagycagtgaatctgtgttttggtttcaggccctccatgcaaaaccagatgcatttgttaggactcctatgcaatagtttattagtttctataagaaggacaatatatatttatagctgtataatatgtttagacccacatgtatatacttatatatatgtacacatacacagacacacacacccccctacatcacagagatattctgggaattaatgaaataaataatagttcttaaaagcacttacttattgagacaatatgttatataaatatttgtaaaa

SEQ ID NO: 369555 - DNA, 490 bp, Homo sapiens
gggcttctgcctgcatctttcaacttccctcggccagcccattcctaactgtgccttctccagtcctactcggaatggagagttgaaaatcccctggtcctaagagagggatcaacattaactctcactttctcaaatacacaggaacttctctgaccttttagcccttgaagctctgtaaatacccacccctccaaggggcaagaaagcsagtgaatctgtgttttggtttcaggccctccatgcaaaaccagatgcatttgttaggactcctatgcaatagtttattagtttctataagaaggacaatatatatttatagctgtataatatgtttagacccacatgtatatacttatatatatgtacacatacacagacacacacacccccctacatcacagagatattctgggaattaatgaaataaataatagttcttaaaagcacttacttattgagacaatatgttatataaatatttgtaaaa

SEQ ID NO: 369556 - DNA, 500 bp, Homo sapiens
taaatgctgcgttctgatctttggtgacactgcctcatctcctggccagcaggctgacttcagtgagtgatgataggcggaaggccagagagctggctccagggacctcacaggctgagagcctcatcgatcacaaaaacccagccttccaaacccagtcacgggctgcactcggcccagccagcttcaggcctatctattctygggatgaatttaacagtcacttcaattaattgtaaacgtttatattaggaataaatgcaacttcgcaaaggaaaatcttaagtggcaaggcaaaaaattatattttagttccattttaaaaatttcagtacagttattctgcttatcatgttaataatttatagacatgtcagcttaaagacaatgaagataaactgtttctctttcccttaaagcattatctatagctgtaaggtatcttttagaattaccatttcattaaaattaacatcttaatattacattttataacaata

SEQ ID NO: 369557 - DNA, 500 bp, Homo sapiens
taaatgctgcgttctgatctttggtgacactgcctcatctcctggccagcaggctgacttcagtgagtgatgataggcggaaggccagagagctggctccagggacctcacaggctgagagcctcatcgatcacaaaaacccagccttccaaacccagtcacgggctgcactcggcccagccagcttcaggcctatctattcttgggatgaatttaacagtcacttcaattaattgtaaacgtttatattaggaataaatgcaacttcgcaaaggaaaatcttaagtggcaaggcaaaaaattatattttagttccattttaaaaatttcrgtacagttattctgcttatcatgttaataatttatagacatgtcagcttaaagacaatgaagataaactgtttctctttcccttaaagcattatctatagctgtaaggtatcttttagaattaccatttcattaaaattaacatcttaatattacattttataacaata

SEQ ID NO: 369558 - DNA, 584 bp, Homo sapiens
tatttgtatgcaaaatttaaaaagcaaaggagatgtgtatccttactttacatcatatacaaaaattaactcaaatacttcatagacctaaacataagagcaaaaactctaaaacttctataacatatttgaggagaaaagtccttgtgaccttggattggtcagagttcttagatagcatatcaaaagtctgagctataccatttctaacataaatacataaatcggacttttaaaatgtttaaaatgtgctgtttcaaagacgtttttagggaaaatgaaaaagaagcttcagactgggaaaaataattaagtcatatatgttattttaaaaaatcttgtgtttgcaaataaaaagtacttttacaacttgataatgagacatagaacaagacaacccaataaaaatataacgggaagaacatttgaagaaatgtgaaacaaaagagatatatatggtaaataagtgcaatgaataaccagtgattaatgytcaacctcattaatcaccagtttattcaaaatgaaattagttattttaagatctgataataatactaagcattgagtattgaagttgtgga

SEQ ID NO: 369559 - DNA, 588 bp, Homo sapiens
agagtggaagctggaggagaaatctccccgctggagggtgagcagagaaagcgtctttagagccctggtcacagaggctgcaggaccggctctcagcccagcacgcgtgggcgcttggggacccaaatcttctaaaaatgcttgagggcaggaacgatggctcctccttcattttcctctctgaatttgatgctatttctccaaatattacatgttccatttggtctaggtttctccatccttttaccccaatcctaacccccagaaaatagaggaggcttctaataggataggcgacttcttcaccaccctctgcccacggacttcaaggcagtccaagatccaaacccaaggcaatggaatgtggccattctcactgcatgtgtcatgtaacctttgtatgagacacagctgtttcaagtgttatcatgtatctgtacaaattatacaagatgggtagctcgacaacatagatgaaagtgaaacaaatagayttcaagctcgctttaagctctttcggaaactctatgtggcaattatcataataacgcttagcatcttcaaagctacttcaaaacagtagcgaat

SEQ ID NO: 369560 - DNA, 607 bp, Homo sapiens
ttattcatatcgttctgtatatatctgatatattgcttcaaactgctttatagtatcctatactgtgcccccaggatattttacatattctccatcatccatatgataaataggacatttacatgcaaatcatcacctaaattttaccagatcaaatgttttatatgtaaaagatttttcttactacaggtaagatagtatgattttcttggtagtatattttaatattgtttttatgctaaaaattccacatgcctaacttatttttcaggaaaagtgatatctaaagaaataaagacaatgaacaatgtcctgtgtgttacatatcttgataaataatagaccctatcagagtagagtagagttaattatcttcattcaagagaaagaacagcaagaaataatctgaaattattcattggttaaaatgtttagtctattattttaagtagtccttgatayacataaataaaatgacatttataaaacaatccttatatttaaaaagtacactgtattagtctgttctcacattgctgtaaagagctaattgagactgagtaatttattaaaaaaatgaggggtcagttaattggcacccagttcc

SEQ ID NO: 369561 - DNA, 568 bp, Homo sapiens
gtaggacaaataacctctgactgagaaccgtacttaaataagctaaaatatacagatcttgattacttgtttagttttgataaattcattttctcatgtaacccatctcctattaacactaagaacttttgttcaccataacatattctatagtgttgctttattccatttataatggaataaaaaataaaatccttcaaatatagctaatgaaatttttaaaaacctgtataaggaaagttaagaaacattacaaaagaaaaatcatataaataaatcaggaaggtatttaatgctcattgattcaaagakttaatttagttagcagtcaattcttcctaagtttatataaaagttcagtttcaatttcatcaattaaatcaatcacacctgagcagaacagaagtactttagggataacatatgaggagtcctgtggactttctccacagagaatcaagtataactggttgaaatttaaaaataaattaaacaaaaacatttaagaataatcactataaaatttataaagaaaatattattgatatcctaagagaagataaaatga

SEQ ID NO: 369562 - DNA, 568 bp, Homo sapiens
gtaggacaaataacctctgactgagaaccgtacttaaataagctaaaatatacagatcttgattacttgtttagttttgataaattcattttctcatgtaacccatctcctattaacactaagaacttttgttcaccataacatattctatagtgttgctttattccatttataatggaataaaaaataaaatccttcaaatatagctaatgaaatttttaaaaacctgtataaggaaagttaagaaacattacaaaagaaaaatcatataaataaatcaggaaggtatttaatgctcattgattcaaagagttaatttagttagcagtcaattcttcctaagtttatataaaagttcagtttcaatttcatcaattaaatcaatcacacctgagcagaacagaagtactttagggataacatatgaggagtcctgtggactttctycacagagaatcaagtataactggttgaaatttaaaaataaattaaacaaaaacatttaagaataatcactataaaatttataaagaaaatattattgatatcctaagagaagataaaatga

SEQ ID NO: 369563 - DNA, 589 bp, Homo sapiens
gattcaaagagttaatttagttagcagtcaattcttcctaagtttatataaaagttcagtttcaatttcatcaattaaatcaatcacacctgagcagaacagaagtactttagggataacatatgaggagtcctgtggactttctccacagagaatcaagtataactggttgaaatttaaaaataaattaaacaaaaacatttaagaataatcactataaaatttataaagaaaatattattgatatcctaagagaagataaaatgaaatcacataaagtattcaattcataccacagaaggcaagtaaagagaggaagataagaaaagaaccaaacagtgcactttagtaaggagtaaaatatggtagatattaatctaactatatcaacatcacttgatactggtctaaataaaacaattaaaagcagagaaagatagatgtaaacttgtcaagtaattattattacagcaatctaagaagttatataaagaattatatataatgtataccacactacacagacgtatttcagtttttcwaggctgtgtcaatacttgaaaatattataaaataatgtaatttacca

SEQ ID NO: 369564 - DNA, 589 bp, Homo sapiens
gattcaaagagttaatttagttagcagtcaattcttcctaagtttatataaaagttcagtttcaatttcatcaattaaatcaatcacacctgagcagaacagaagtactttagggataacatatgaggagtcctgtggactttctccacagagaatcaagtataactggttgaaatttaaaaataaattaaacaaaaacatttaagaataatcactataaaatttataaagaaaatattattgatatcctaagagaagataaaatgaaatcacataaagtattcaattcataccacagaaggcaagtaaagagaggaagataagaaaagaaccaaacagtgcactttagtaaggagtaaaatatggtagatattaatctaactatatcaacatcacttgatactggtctaaataaaacaattaaaagcagagaaagatagatgtaaacttgtcaagtaattattattacagcaatctaagaagttatataaagaattatatataatgtataccacactacacagacgtatttcagtttttctaggctgtgtcaatacttgawaatattataaaataatgtaatttacca

SEQ ID NO: 369565 - DNA, 595 bp, Homo sapiens
gtgcatcaagtagcaagagtaggaacaagagagagaggtaggagatgacaggctgctttaaacaaccagatctcacttgaacacaaacagtgagagagctcatttattaccacaaggacagcaccaagctattcatgagggatccacccccatgacccaacacctttcactagacccacctccaacactgaaggtcacmtttcaacatgagatttggaggggagaaaacatataaaccatatgaaacacttttgagaaaacaatttctatatatcagaacaagtaaaagtaaaaaaaaaaaagcagaaaaaggaataaagaatgtatcttatctaacttggttaagaacatttcaatcagtgtttaaaattaaaaattcccacagtcgctgaaaacctagcatattcaagactgctaaattctcaaattagcaatttaactatgggccttaaaatggatcttgccattttttatccataaagtgtatgtaggttgttagaatcttatctacaggacttagacctgaatcatattcatataaaacagaatttcttttgattgggaaagtaaagtcatactaaatggcttagcaata

SEQ ID NO: 369566 - DNA, 368 bp, Homo sapiens
aaaaaaaaaaaaaaaattatagtgacccactacagctattggaataatctttgtcaatctatatgtgattgattgaggttgagtttgaaaaatttcaggtagttcatggcacatgtatttcaacaccatttttccaagtcattggatacctaccktgcattttctgtattttcagcagtaatattggctcagccttgagagttaagaatgtaagttgatataatagaataacaattttaattatttaatatttttaaatacaacccataatacatttatcgaagcaaaattttaataaatatttttgaacatttttggctcttaaaaatgtcttttaagtgatctttttttaaattttaaattatttg

SEQ ID NO: 369567 - DNA, 598 bp, Homo sapiens
tattttatatctttattttgatgttgttatcacatatattattttgctggtttcctttagttcttgtctataatttcctttagcactttgagcagttttaaaacatttgatttaaagtctttgtatagaaagtccaatgtttgtgcgtcttcagggcctacttctgtgaattattttttcctttgagtgyccaatactttctgatttctttgtatggctttatgatttttggctgaaaattggacatttctaaattttaatggactaactctggcaatgaggtattctctttccccaggatttgctattttgattattctaggcttactttgttttggctaagatttccttgcattacaggggaatttttacctgacttttattgactcagcattcaattattgctctaagactttgactgttttacaaacttaagacagagttctcaatgtttctgatatgtttattatatttctgatgaaacacaggaattcagagcttcccactccactatttccctggtgccactccccaaagtgggcatttaaaaaatattcaatcagtccttcttcctagaaatgacgtatggatctttatt

SEQ ID NO: 369568 - DNA, 485 bp, Homo sapiens
gtgtgtgacaatgtgggaaaaactaaatgtagaaatgttatgtcagttgatgtggcattgaaggcatcaaaatggtaaatgcttcttctgaaaatgtgactttagttcttgtcagagggcctttgatgctgtgtaaagaaatcacctctcctgtagacaagtagagggattaaaatgtattagcaactggaagaaatgattaaatatgattaaatatacacttaaaagttaaccttgtaaatcttacatgttctcacaacaaaagtygataagtgtatgagatgatggatatgttaatttgttgacttagtcatttcacaatgcatacatatatagaaaaccacattgtatgctgtaaatatatataatttttatttttcaattgtaaaccttagtagagctaggaaaaatagtcttgtaggtaagagtcagaaggttagtcattagatagagagacacaatacagaatctgataatataattca

SEQ ID NO: 369569 - DNA, 628 bp, Homo sapiens
tctctttttaaatatttttttcagtagcttttggggtacaagtggtttttggttacatggatgaattgtakagtggtgaagtctgagattttagagcacctgtcaccaagtagtgtaatttgcacccaatatatatatttttgtccctttctctcccttctaccctttcccgtctgtgtctccatagtcccttttgcctttgtgtacacttaacttagctcccatttatgagtgagatcatacagcatttgattttcattcctgagttactttacttagaataatggcctccagctctgcccaagttgctgaaaaagacataatttcattcttttttatggctgagtagtattccatggtgtatgtataccacattttctttatttattcattggtcaatgggcacttaggttggttccatagtttttgcagttgtgaattgtgctgcaataatcctacacgttcaggcatctttttgatataatggcatcttattttgctttggataagtacccaataatgggattgctggatcaaatggtagatttacctgtagttctttaagaaatttctgtactttttttccatacaagttgtactaattcttattccaaccagcagtatataa

SEQ ID NO: 369570 - DNA, 596 bp, Homo sapiens
ccattttttgtttcattgttttattagtctgttctcacactactacgaaaaaaatacttgagactgggtaatttataaagaaaagaggtttaatttactcacagttccacatggctggggaggcctcaggaaacttacagtcatggcagaagacacctcttcacaggatagcaggagaragaagtaagcgcaagcagggaaaatgctagatgtttataaaatcacagaagttgtgagactcactcattattatgagaacagcatgggtgaaactatccccaggattcaattatctccacctggtcctgcacttgacacatgggtattattaaaattcaaggtgagatttgggtggggacacaaagccaaaccatatcaattgctcttttgtttttttggtgttttttttttttttttggtttgtttctttcaatttcattttttttgtgctctgatttttgctatttattttctgctgttaactttgggtttagtttcttattgtttctctagttccttgaggtgtgacattcagttgtcaatttgttgttttccagactttttgaggttggcatttagtgctacaaacttttctc

SEQ ID NO: 369571 - DNA, 596 bp, Homo sapiens
ccattttttgtttcattgttttattagtctgttctcacactactacgaaaaaaatacttgagactgggtaatttataaagaaaagaggtttaatttactcacagttccacatggctggggaggcctcaggaaacttacagtcatggcagaagacacctcttcacaggatagcaggagaaagaagtaagcgcaagcagggaaaatgctagatgtttataaaatcacagaasttgtgagactcactcattattatgagaacagcatgggtgaaactatccccaggattcaattatctccacctggtcctgcacttgacacatgggtattattaaaattcaaggtgagatttgggtggggacacaaagccaaaccatatcaattgctcttttgtttttttggtgttttttttttttttttggtttgtttctttcaatttcattttttttgtgctctgatttttgctatttattttctgctgttaactttgggtttagtttcttattgtttctctagttccttgaggtgtgacattcagttgtcaatttgttgttttccagactttttgaggttggcatttagtgctacaaacttttctc

SEQ ID NO: 369572 - DNA, 382 bp, Homo sapiens
gtctggtaggaacaaattccctcagcatttgtttgtctgaaaatgactatttctccttcatttatataacttgcttttgctggacacaaaattcttggttggcagttatcctgtttaaggaagctgaagacaggaccccaaccttttctagtttacmaggttactaataagaagtctactattagtctgataggttttcctataagactgatacttttgtctcattgctttcagaattatttccttaatgttgactttagatagccaaatggctatatgccttggtggaaatttttttggtgtgtgtgatgaatttaccaggagttctttgggcctctcatatttcagtatctaaatatctagcaagacccaagaaatttta

SEQ ID NO: 369573 - DNA, 585 bp, Homo sapiens
ttgcctctgactgaacattgtattgcagtcaacatttatagacctctgtcctcatttcattcttatctctatttatacgttattttcacaaagaggttttcaattttaaacctatccaaaataagcgccagtcaccatgacttttgtcctgccctaattttcttcataatacacttatcacttcttgcattatattacgtatgctatttgcctgaggctattmatctgaaataatttaataataattttggaagtagggcagatggactagataacaaatacaatcgcaccatagccagtgctacccttgaaaaaattaattgctattaatttcacacaataaaattgttaagatcataatatttttgcctatttcaataatcagaaagacaaaaacatcttagttttatacaaataataaaatcatagtataaaattgtactcctgtctttgtgctttctatatctgtgactttaaatttattttggtgactgtcaacacaaaggcagaatttatctttccttttacatttggatggcaaacacatagaatttacaaaatatctgaagactgtagcttatgtag

SEQ ID NO: 369574 - DNA, 585 bp, Homo sapiens
ttgcctctgactgaacattgtattgcagtcaacatttatagacctctgtcctcatttcattcttatctctatttatacgttattttcacaaagaggttttcaattttaaacctatccaaaataagcgccagtcaccatgacttttgtcctgccctaattttcttcataatacacttatcacttcttgcattatattacgtatgctatttgcctgaggctattaatctgaaataatttaataataattttggaagtagggcagatggactagataacaaatacratcgcaccatagccagtgctacccttgaaaaaattaattgctattaatttcacacaataaaattgttaagatcataatatttttgcctatttcaataatcagaaagacaaaaacatcttagttttatacaaataataaaatcatagtataaaattgtactcctgtctttgtgctttctatatctgtgactttaaatttattttggtgactgtcaacacaaaggcagaatttatctttccttttacatttggatggcaaacacatagaatttacaaaatatctgaagactgtagcttatgtag

SEQ ID NO: 369575 - DNA, 632 bp, Homo sapiens
aaaaagtgtacacatttacttccctccctgttctccaacaaatataatgagaaacagaaagaaatgtcctaggttaaaaaaaaaaatcagtgggacctttcctttattatttaaatgaatgtcttggaagcaatacagmatgtaatgtgggcttggttacttatgtataatgactagtaatatgaactctgcaaatatattgatccacacagattcatagagcacctagtcagctatcatatcgtcatctctttaaatcttgagaataagacctttagacaaaaaggcaaaataaacaaacaaaaaaagtgtgagtggaaacacgtaacatagagaatacatagcaaaactacagaaataatcattctattttttaaacagaatatagaatggaggacataatgctaggaaactgacaaatagtaaattaaaagaacgtatttttagtaatagggtgctacttaaaatagtaatagaatgtttcaaagataacgtaatgcagaacaagagagactgacaatatgagagaaaagatatgcgagcaaagataaaaaaaagttgcccccctttgaaaactggcacaagacagggatgaggtcatcaccactcctattcaatatagtgttggaagt

SEQ ID NO: 369576 - DNA, 606 bp, Homo sapiens
atgctactgtgtcggggttgtagccaattttcttaatgtaagtgctgacttccttaacaatttcctcatatctcttctggctgtagggtggctcagtggaatccattttgttaacaccaacaattagttgtttcacacccagtgtgtaagccagaagggcatgctctcgggtctgcccattcttagagataccagcttcaaattcaccaacaccagcagcaacaatcgggacagcacagtcagcctgagatgtccctgtaatcatgtttttgatgaagtctctgtgtcctggagcatcagtgatagtcacatagtacttgctggtctcaaatttccacaaggagatatcaatggtgataccacgttcacgctcagctttcagtttatccaagacccagccatacttraaagagccctttcccatctcagcagtctccttctcaaatttttcaatggttcttttgtcgatgctactgcatttatagatcagatggccagtagtggtggacttgcccgaatctacgtgtccaatgacgacaatgttgatatgagtcttttcctttcccattttggcttttaggggtagttttcatgacacctgtgttc

SEQ ID NO: 369577 - DNA, 587 bp, Homo sapiens
ttggcccttcccgttacaagtctttacaggtcagggaaccaacatggggattcttccagctgttgagcctatctctgtttgtttgtttttgagacagagtcttgctctgtcgcccaggctggagtgcaatggtgcaatctcggctcactgcaacctccgcctcccaggttcaaacgattttcctgcctcagcctcccgagtagctgggattacaggtgtctgccaccacgcccagctattttttkttgttgttgttgttgtatttttagtagaaacggggtttcaccatgttggccaggctggtcttgaactactgactttgtgatctgccctcctcggcctcccaaagtgctggtaatacaggtatgagccaccgtgcctggccaagtatatctcttttaattatgcattctggaactggggaaatagcacaggatgggtccagggactcaacgggtctaatgagagatgaacctgagctgaaactccattgatcactcgacctccattaagcctctactctgactggtaggccgagtaaagcttttggtttccccagattagtatcaggtcagagccactgtgta

SEQ ID NO: 369578 - DNA, 587 bp, Homo sapiens
ttggcccttcccgttacaagtctttacaggtcagggaaccaacatggggattcttccagctgttgagcctatctctgtttgtttgtttttgagacagagtcttgctctgtcgcccaggctggagtgcaatggtgcaatctcggctcactgcaacctccgcctcccaggttcaaacgattttcctgcctcagcctcccgagtagctgggattacaggtgtctgccaccacgcccagctattttttgttgttgttgttgttgtatttttagtagaaacggggtttcaccatgttggccaggctggtcttgaactactgactttgtgatctgccctcctcggcctcccaaagtgctggtaatacaggtatgagccaccgtgccyggccaagtatatctcttttaattatgcattctggaactggggaaatagcacaggatgggtccagggactcaacgggtctaatgagagatgaacctgagctgaaactccattgatcactcgacctccattaagcctctactctgactggtaggccgagtaaagcttttggtttccccagattagtatcaggtcagagccactgtgta

SEQ ID NO: 369579 - DNA, 634 bp, Homo sapiens
gctggctctgtaagagttgtatatcaaagtaccttttgctacaaggtgcatatagaagtctaagataagaaatgtaccctctatactttatttttcatgcccctatcatgtttggtgtgccttaaatcttacctttaaatgaagactctatggattgtttacaatgaagttttacactaggaccagatcgtccatacatgattggtcttctacataataatgttcaattctttcattttaaatctttctttagggtcatataaagattagttctttcagaaaagctattgctttggtacatgacttagtctaaccagttgggtaatgctgctttgaaaaatagtttgtccctctccccattccaaaaatgaatccattcagtcagaaaaaaagattatcctactatttgtagatgattgctaaggcttgaaataggaaaggggaaagaagggatagaaaagtttcaagtccagtagtgcagtgaatcctttgtgtttgagacttttttacacttatttytgaagttagtgaactttcattgtccctgtggcctcatatttatagagcttcttaactgttttgtacctcagattgtttttagatgtcattgaagattgagatgtacaaattatgt

SEQ ID NO: 369580 - DNA, 608 bp, Homo sapiens
gcctcccgtagccgctcgaggaaggcagaaggattttcttcctttctctgagttatggtggacatcattaaataattcatgggcttttccctaattctccttagtccttctagaacacaggtcaacagatgtttgtgactccagtccccatgatctgagtcaaggtcccattggggatccatactggggacggcttgctgactggtagggaatttgtccttttcttcggctgtcattctatcatttacttgactaagataccaggtatatccaaactcttgggaygcagctaaagctgcattcttttcattaaaggccagggtttgatctaatagcatgacttctctccaagtgaggtcaaaggtttgccctagaccctgtaggacatctatatatctatcaggatcatctgaaagcttctccaggtctgccttgatctgctttaaatcagagagggaaagggggacatgtacctgggttgggccaaattcccctccccctacagcttgaaggggacataactgatagcccaggggcttttgtggtcctttggagacttctttgcttatttccttctgggcaggggagattagaggaggcttatcatt

SEQ ID NO: 369581 - DNA, 629 bp, Homo sapiens
atagcataaaatccttaaacctctggagtaacgcagtgtgtgtgcatgtaataacagcaaattgttcagaaaggtcactttaaaaaaatttttggttgtattttagaagagaacaacacagtggggcctactggagggtagaggataggagaagggagaggatcaggaaaaataactaatgggtagtaggtttaatacctgggtgattaaataatatgcacaacaaacccccatgacacacaattatctatgtaacaatcctgcacatgtactcctggacttaaaagttaaaaaattttttttggtatgttygatatgaaaacttctgcaggacttatgtttcctagcaaatagaattgtaatctcataagccagagagaattaaagttggtacatatgtattttttttctgtaccatataatcaggtgatggagggaacattgttttattcttgcttttaaatattttttccatccattactgtttcttatgaatttcttaagaatgtgctcatatttatgtttacataaggcttaattgagaaactaattctgttagagtactaaaaaacagaaaaggctcatggtttcatggttcagaaaacccaagaaatgcctctttattatac

SEQ ID NO: 369582 - DNA, 651 bp, Homo sapiens
acattcactatctcactaaatcctgtgaaatagacaaaatggaggcttttattttacctagtgtataagctttaataacttgtctgagatcagagtttataagtagttgagttaaaacttatattaaaggcttttgactccaaattctgtactctaccttattaagctgcctcaaatttttattgatctattcaatcaatatttgtcgtgtgtggacrgatctgtgatgaaggaatagctgccaacagcaagactaaaggtggacaaactgacttacagccatctgcccaagagttgtattcttcatagtataacatttaattggtaagttgaataatcgattggatcagctcactagttaaaagaaactttttaaagagagtgacctcctaaatcagtcagggtttggtcagaaagtcagaaaattattctagatgttttagcaggaaggaatttaattcagggaattatgtgcctattaggaaacacgtaattatgtgcagttagaaggattgggggaagtataagtctcaaagagcctctgcagcctttgaggaaattattaaatgcctctggcagttcgagaacaggcagatcataggaactcacctggaagccactgcaaacctcacttacatcttccacaaatcc

SEQ ID NO: 369583 - DNA, 530 bp, Homo sapiens
aattaatggcctagatcactcaaatttcatgacacagtcggaagacgggaatcttggggtctgtagattacattttgaggtaaaactctataaccacaaattcaatgttgttctctacagtaaacatttcagggaagtcttggctgaaggcaaccttgaatggccagcattttaaactatatgttttaagtcatggcatggtttgtaagtaagaaccatgtacaaatgaygttctaaaggtcattagtctggaaaatatccagttgcatacctggtcatgttcagaaaaccaaaggaaaccgactgaactggagaacctgatagtaacagagtatcaggaagagcactataaacacccaggccccaggaagcctaatcatatctgaatcatacaggtaactatgtgaaacagaactacagattcaaaactattgcaatctaataagtttcctctttcattgctctttacctctttccaaaaattggtaataaaaaatttctgacctaatggcattaaagatttgctgatt

SEQ ID NO: 369584 - DNA, 564 bp, Homo sapiens
ctacttgagagagtcgtgtgatcatccctccagggagcatgagtgctctgtgagaggagccctgcttccctgcccagtaggctgtctcctgggatcttgagtctgcaaaatattcttggtgtcaagagcctccttagccctccatgtagcctgctcagaagggagtgtgatgcctcccattctgccccatgcctctgtaggttatgccttcccatctttttgtggggttaggtgcttaagaacagcttctcctatccctcctgtcccaaagcaaataacctcaggcaaagtaataactgagaatatacctgccttaatttagcttggactgtgatccatcttgaatttttagatattttgggtaaatttttggatgtgcttgagtttcaagtttttgcatatrtatatccaatgatttcagcatatttattgaaaatgcaattctttcttcactgaattgcctttgcacctttgtcagaaatcattgcctgttttgtgggtgtctatttctgaactctgtatctacccccttgatagtttatctatctggaccccaatcccaca

SEQ ID NO: 369585 - DNA, 588 bp, Homo sapiens
ggcacctgtaatcacagctactaggggggctgaggcaggagaatcatttgaacccgggaggcggaggttgcagtgagccgagatcacgccattgcactccagcctgggctacagggcgagactcagtctccaaaaaaacaaaacagaaaaagaattatgtggacaatgagactgagaaacacacaaataggaaaacagagaaargagaaatggaaggtgcaaatgcagtacacaactttataatctcaaaatataaacccaatcatatttttgataaaacatgaaggttcttagagcatcgtgtcttttcagaatgtttcaataatgtacagatttgaataccaggcaatgtaaatatcattagcaaaacattgaattttaggaaattccaggttttgattgatagttttggcattctaagatgaccacatcagggtccagtaagtcatttgatggcatgtttataatgttttctatttttaaaggccttttatgcaatttcttgggcaatgatcaaaacaccctgagtgtaggatgaggcccattcacattagcaaggttctgttagtccttttcagaagaggaaaa

SEQ ID NO: 369586 - DNA, 596 bp, Homo sapiens
tgtagttatgttcccagaccagcccccaaatgtctatttaattggcaacatagctgagtagtactacaagacctgaaatcatctacaatagtgcttttatggggaaatgcattgcagattccaactgaagatgccaggagatcatttttctgaccttggttccaggacaggccttgacccatgtatagttagaactgtcctcctgcctccacacacacacacatacatatattasactggctgtcttgaggtgcatgttccaaagttggggaaggggtggcacaagttcctgttgggagactggacagggatacagggcaaggtgtgctcctgccagagtcaggacaaagggtctggaagaaagcacataccagggatttaagtggggaagtggtactggtgggagactgaagggatccagagggcacaaactctcttggctgcagttgcagagaccagctggggctgtcttggcagtcacagcagtggcagcacaagctgtaatggccacattggctggggtcccatcataagcctgcagatatgttttggggtagtggcattttagttattaattgctgggtaacaaaccactc

SEQ ID NO: 369587 - DNA, 596 bp, Homo sapiens
tgtagttatgttcccagaccagcccccaaatgtctatttaattggcaacatagctgagtagtactacaagacctgaaatcatctacaatagtgcttttatggggaaatgcattgcagattccaactgaagatgccaggagatcatttttctgaccttggttccaggacaggccttgacccatgtatagttagaactgtcctcctgcctccacacacacacacatacatatattacactggctgtcttgaggtgcatgttccaaagttggggaaggggtggcacaagttcctgttgggagactggacagggatacagggcaaggtgtgctcctgccagagtcaggrcaaagggtctggaagaaagcacataccagggatttaagtggggaagtggtactggtgggagactgaagggatccagagggcacaaactctcttggctgcagttgcagagaccagctggggctgtcttggcagtcacagcagtggcagcacaagctgtaatggccacattggctggggtcccatcataagcctgcagatatgttttggggtagtggcattttagttattaattgctgggtaacaaaccactc

SEQ ID NO: 369588 - DNA, 503 bp, Homo sapiens
aatgattggttcaccagcagccatttgggatcacaaagtgactttaggttagaaatcagactcaaagatggtaggtatagagatagatggattagtaatgaccatggagctttgttccaaccctggactctagaaatagagatcaagatcaaggtggacatagagaggttctttttgtttaagccattattttggatttcctgttataatyaaccctatcttctgtacttggtcatacccatgaggatatatagcctgttgtgaattccattgctgtgaatattgcagcagaaaaaatggttaagaaccaatggtcaaggctgtggagaattttcaccgggactctctctcaatctctgtgttcatcagccctcttgtcaatccttaatggattgaggaagtattgttctgcttggactataatgatgctgttctctgtctcaagggcttcccatccatttcctaaagatctttcttatctgcactctttcatttgttttttt

SEQ ID NO: 369589 - DNA, 549 bp, Homo sapiens
gtatcttctctcccacttggggtcagtgtttaggcacatgagagaagatgaggaaccaggacaggaaatggcagcgtttccaccaaaggtcaaggggaacattaatgggctacattccagacccaaggctgacgatcttcttcaaaggagtcagtggtggaaacacagactcagagccactcccaaaaggtacgatgaggtcaggatcattgaagagaggcagtgcacagggggcgttcgggtgagcatctctaaagttacctttctggttggtctttgacatcaaagtgcrtaagtctgcctttcatgggcaggtagaaatgctgtgcaggtgaaaacaggcctctggcaagataagaacagaaatctttgagcttcaaattacagatctttatgtttcactgaaacttgtctttacaggggtgtcagtctccactgtgactgaccacaaaaccctgcaggaaagaggctgtgggttttcctgcgtggtccccagaccctaatatgcccatgtggctgcctaatacacatctctatttaaaatgttca

SEQ ID NO: 369590 - DNA, 577 bp, Homo sapiens
catgctctcttctttttctcattattcaatttgtagcaactctaaggaaacaacccaaactgtagtaaagtttctatgtgtaacaagtacattgtagttacaacctaaatatctgtcaataaagaagtatggatataaatttgttcaccctatgataagatattatgtagctgttaaatttcatgaatacttttaaaattaaaatttgataaatacacgtattttaaaaattcaattgtattcaaagtctcatagcaaacctcagcaacttcatgctccatccttcctccctcccagtttatsccacccccagaggcagacatttacaactctcctgagtctctactatcagaaacattcatatttctaaaccaagagtgccttctcttggtttgttaatctgaggcttaattcttgtcttcctattatgctaaacaaagatttagctctctttaatcttttttcccatgacatccccttaattctctgaataattatgtcacaattattcatttaagtaaaagataatgtttacattattactgtgtaaatattgtttgttagtaaaccaaataag

SEQ ID NO: 369591 - DNA, 584 bp, Homo sapiens
cacccaggctggagtgcagtggtgcaatcttagcttactgcagcctcaaactcctgggcttaagtgatcctcagctaagcctcctgagtaactgggacaacaagcrtacactcatgctggctaacttaaaaaaaattttacagaaacaaggtctcgctgtgttgcccaagctggtctcaaactcctggcctcaaggcatgctcctgcctcagcctcccaagtcactgggattagagatgcaagccaccatgcccagcttgagtatgacttacttttgtaatcaaaataaactaaatattttttaaaaatactctttaaagtagagaaaatattaagaggcaattaggagattatctcagttggaagtgtttttctctaggcatagcatgtacaattgaaatggatcttgtggattctatcaccaatggataagtagacacacataatgctaacattgtatgtttgctgtgtgtcaaacactttactcagtatttcatttaatggttataatgattccagaggtaggcattattttcttccccatttatagatgaggaaactaaggcgcagatgtaggaagtaca

SEQ ID NO: 369592 - DNA, 551 bp, Homo sapiens
aattctttaaaataattgtgcttatatctatacatatatttgtttagtgaagaatatgcataggctcttgaacaagttataaagtgaggacaagaatagaggtcagtagggcatctctctgagaactgtgataatatataccagaggtggctacacaactacctgattcggaatcctcatctctttttctttcctctgtacttttccataccaataaatagtctcccacccttggcacaggggagcactgggcttctgagtgcattcagaaaacaagcaacacttacacctgtttagcctcatgtttcctaacagctttagaagtacaatatggccctaggtctttgtttcagtacagtaggtggagggggcttcttgccagccagaaagcgttaaaagttcatggcagctgcctagaaaccactgcaatgtttcccataaragatgaataagctagtttagactcccatgtatttccaggaatgtaggagtgttcgatctattgttctttccattctattgtttcagagctctaattaaataatgccaca

SEQ ID NO: 369593 - DNA, 593 bp, Homo sapiens
tcaacccatctcacttcaggaaagatttaggcgcagagtgttaaggatgatattcttccgaggtttccctgccatccctatgaaaaagttaggcgacagttgattggaggcaggactagaggcatacagtgaggtgtgtcttcaaygtaaggccaaaggctagctgccacattttaaggcccttttcagggggaaggttcttaaaagggctgcctcagcacacaggcactggcatatgtcaccgtggcaggtagacacatattaaaacaaacctcacaaacacaattcaaaacacaccgagtctgtaaggactggttccttacatgagctcatgagttcatccccttgtcaagaagaatcgactctctaggtagaaggcaaaacacttgatcctctccagaaggccacgagaatttaacttctttccctttcagaactgataagatctcacatcaccacgtcagtctggctcacaggaggagtgagacctggctctgctaagaagctggtagttgttagtgggagcttgagacccacaaacaaagggattttcaactacctggctgtacttacatttggttttacttcaggct

SEQ ID NO: 369594 - DNA, 379 bp, Homo sapiens
ttttccacattttctcctctaatcagagagcagattacaaattgaccccatagccccttgtgctgcttgaagagtctgacctgagaatgagaaggaagggcgggcaaagtcatgcctccctgtcgcagtcaatcctttcttttgcaattctctcctcccctcccctctggtcatccctccatttcaacatttgtaggtccctgaagcaacttatagcagtgcgaatcaacaccttccaggagagtccttggtctttgtggcttactgaaatcagaayaccagaattcctgtgcccaggcacaggtaagtggagatggaagttattgtgggaattaagaggtcatttttggcctcaggtgctttcagagagaggtctgga

SEQ ID NO: 369595 - DNA, 535 bp, Homo sapiens
ggaccattattttacaggtgtgtaatgcttccacctcttgcatccttccctcttccaaaggctgtcatagcaacaaggcccatctctgcaggtgtcaggagaccttcacattaactttccttggacaagtaacatcagaacaaattctcctttgaacttaggtcagagaaatctctaaacctcatggaaagtatgaaatgcaaaccaactgtatgaattagtctttgagcccattatgatactgggaacttattcttttttaagaatttcaaattatttcagtttttttaaattttgtttttgagatagggtcttactatgttgctcacactgacctggaactcctggrctcaagcaatccttccacctcagcctcttgagtagctgggattacaggtgtatgccactacacccagctaaaattattttgtttctaattgacacataataattgtaactatttatgggatacagtgtgatgcttcaatacatacatacattgtgtaatgatcaaatcatagtatttagcatatcc

SEQ ID NO: 369596 - DNA, 519 bp, Homo sapiens
tatgagaacttaaagccagtgcccatctgctataggttagggtgagccaaatgctgaaagttaatccttcttgttccactctggaaaatacccagccatgcacacayacacgtgtgcacacgtgagcagtcacagacccccacaccctacaacagcacctcccaaaccacatggcccaagtagtaaaacatcaaggcttgaatcaccatactcaggccaataaaaacttaactttgcactctcatatagttgagcttgtgcttgcaaaattccctgcatgtgcctggctctgtgattgaaacactgtcatgcatttcagacaagggaataggtaatatttaaacattaatatacatctatgcctttctgacacatgcattgaatgtgtggagtatcagagatgaaaagtatacaatatacacacacatcatattgtataattgtataatttattaatttcatcacatttagtttaagaggcagagatcagctaatgcaacagttttcaatctttttcaa

SEQ ID NO: 369597 - DNA, 519 bp, Homo sapiens
tatgagaacttaaagccagtgcccatctgctataggttagggtgagccaaatgctgaaagttaatccttcttgttccactctggaaaatacccagccatgcacacacacacgtgtgcacacgtgagcagtcacagacccccacaccctacaacagcacctcccaaaccacatggcccaagtagtaaaacatcaaggcttgaatcaccatactcaggccaataaaaacttaactttgcactctcatatagttgagcttgtgcttgcaaaattccctgcatgtgcctggctctgtgattgaaacactgtcatgcatttcagacargggaataggtaatatttaaacattaatatacatctatgcctttctgacacatgcattgaatgtgtggagtatcagagatgaaaagtatacaatatacacacacatcatattgtataattgtataatttattaatttcatcacatttagtttaagaggcagagatcagctaatgcaacagttttcaatctttttcaa

SEQ ID NO: 369598 - DNA, 566 bp, Homo sapiens
catccattcagcaaatattttgtggttaygtactatgtgctatttagctatgtacaaaatgaataaagttcctcgccattgtgaaacttctatctcctaggcatgaaagctcaaatggaaatattaacaatggcaaatagtaatgaaaagtgctgtctattcagcaccccttatttcaaactattgtgctaatacagtttttatatgttatttcttatgttccaccagaagatacacttcataagtgaaggaacagtctttgtattcatcattctgtgtccaatgcctcacccatatttggtctcagtaaatatttgttgactaaataaatgatccctccataaattctgagtttggtattattatgcccatttaacaggtggtaaattgaggatcagagaggttaataatttggcccaaatcacacagcaaaaagagctaggatttaaacctagagtgttttccaatacaccaaaatattacttttgcatatatttgttggaataaagtgttttggagctcatgtcactctataataagttgggtctgtagggatgaattacagc

SEQ ID NO: 369599 - DNA, 566 bp, Homo sapiens
catccattcagcaaatattttgtggttatgtactatgtgctatttagctatgtacaaaatgaataaagttcctcgccattgtgaaacttctatctcctaggcatgaaagctcaaatggaaatattaacaatggcaaatagtaatgaaaagtgctgtctattcagcaccccttatttcaaastattgtgctaatacagtttttatatgttatttcttatgttccaccagaagatacacttcataagtgaaggaacagtctttgtattcatcattctgtgtccaatgcctcacccatatttggtctcagtaaatatttgttgactaaataaatgatccctccataaattctgagtttggtattattatgcccatttaacaggtggtaaattgaggatcagagaggttaataatttggcccaaatcacacagcaaaaagagctaggatttaaacctagagtgttttccaatacaccaaaatattacttttgcatatatttgttggaataaagtgttttggagctcatgtcactctataataagttgggtctgtagggatgaattacagc

SEQ ID NO: 369600 - DNA, 568 bp, Homo sapiens
ataaattattgtatattcacacaatgtaatactaaaacaatatggatgaatatcacaaacactattttggacaaaagaagctagaaacaaaaggtgtatactatatgattccaattatataaacttcaaaacaaaactcatctaaggttatagaaatcaatagagtagttatctttcagtaggcaatgctgccagtgtcttctttcttcctcctttggtagacggtttctcaggtgttttcactttttacaaatatattaagctgctcactttggaaataggtacttttctctattatgatatatgcataaatatcttactataaattgcttttaaaaagaacaaagtaaaaagatgaggtgcctagaaatcaaacatatatgtctttaagacaaaatattgaaggagagtgaggttgttaacagaggactagaaagaaagatgtaaagaataagaakaatggtaaagtcaaagatcaagaaatgtgatggtcaattcatttggaagaacacatctatagacatatctccaaaggaaaaaagattagaagattcagttctagatagta

SEQ ID NO: 369601 - DNA, 582 bp, Homo sapiens
ccaacatctcagtagagtgtcttacacatagaacctgctcaataaatgtttaattacttgcacaggagttttacagaagcagcttttgtttgaaagacaaacatgtagccaaggggggaggaagataactcctaaccgcatcttccacattcctggaccttgacctcaaactttaatatttaagctaattctacgatggacagaggatcatgttttgagaggctaaacaaaatgcagaatttgaatcactttagtttttttctcctctgagtaatagttatgttgcrggtaatcagtttcatgtttcagatatctgcttaaaatacatttaaatgcataagattaagataatgtgatttataaagaagaattataaacatttgatttctatagatacattctattatgaatgagcaatgaccatatttacatttaagtacatttaagtacaatgactcaatgctgtgagtctgaagaaaataggtaatggatacatagcattatatattctcttacataactctttaagcatttgaatataaacttgcaacatgtttccacacatgcaaaccttgagaaaat

SEQ ID NO: 369602 - DNA, 581 bp, Homo sapiens
tacatgtttacacagtatgtgttatctttttatgattctaattctaaaccagcgtgaaaaatcacttaaatcatcgaaattttaactttaaaataaaagctatttagacaactttcttttttaggcatggggcctcacgatgttgccccatagtacagtgactattcacaggtgttgttacagctcactacagtcttgaattccgaggttcaggcgatccccccacttcggcttcctgagtagctgggactataggtaggcttagacaatattaatgaattaatagtaatcctgttttgtgacataatagaaaatgtgaagtggtttccatttgcatgttactgaataattcttactatcatttgatagtggtaaaccatgaaataatttaattttttgcagatgtctttccaaagttcaaatgtaaagctacaccaaattgacaatatattttgtatgagctttggacagatggaatatcagagaatracatttccaggtttaaaaataatcaagagtccagcaacagatgactggataaacaaaatatggcatatagctaaaatgaaatattaatcagc

SEQ ID NO: 369603 - DNA, 552 bp, Homo sapiens
agtgtgcccataaagtaatgggatttaatcgttgctgtttcttctaaggttctataaaagcaactcaaagtggagcaatgttttgagtgaaggcaacataatttcagcagcctccccaggtgactactttacaggcagtattgaactgcagtaaagaccattaacattggagctggacatacctgggttgcttgatcttaatgatcatgtttcatcaactttcaatgagggcgataactcctacctcaaaactataggtattgtcaattacagtattgaagaaaaaacgttcataagatttgrtaaagtttaaaatgtccattactctataatgtcacctcatttttgttgttgaatctatctactttaatgtgatcatcataattggatctttaacatagtttaacatatcttaaaattcagcatattttatcagagttttattgttacagcaaacctgttattagaaaatgataatagcctaataagtcatagttaacaactatcaggtgattcctcttgtgaaatcaaactaaattgcatatattaatg

SEQ ID NO: 369604 - DNA, 523 bp, Homo sapiens
cagtaccagctggcaaatgaaaagatgcagtttatgtgtttcatttactctcrtaaattatagagagcaaagtccatcctatatataaaaaattcgttctcagcacatgtatactacttacttctgatgttttactgaactatggcagagattatatttttgttcaactttttttagaaattataatttttcatttttttagattatagatgtttttgaattacataatatttcaacttgagcatctaagagaattcaaacaaaatttccaaggaaaaaaagaaacaaaatctcattttgtgcttaaattatctatattcacaaaagaaagagtttgaactgaaaatctaaacatttttagaaattcagaaaggaattattttctaactgctaataattctcaaagaaacggttattattaaagtattattatataaaatacctttccatgtattcaaacatagttttaaagatttaatattcttgaacattttagttgtagacatgcaacatatagatacaa

SEQ ID NO: 369605 - DNA, 618 bp, Homo sapiens
ttcatgcttctaactaatggactgttaccaagtcctacagcagttagaaaggagggagggccccaaattaactctaggttcttaggatgattgaaattctgacagtaacaatattggacaaaataagaaagtcagaagagaacatttttttaaaaaaagaaaccacagtctttaagtctttattttagacatgatggcttaagagtagtattggagaataatttttcatcatagttatactgataaaacacataaggtgaatttgtgataactatttcattattttgagcaatgtggaaatctaatatggattccagttttcattatacttttggaattgaattatttaatttgttgctatagaagaaactatgattatcrgttattaatcaaccattctttcccatatagaatcaatgtgtgtgtgtgtatgtatagaaagtaaaacttacttttattctcaataaaaagtattgaaaatatttaaatattttaaaagtatttgcattcaaagtaaaagtttaatagtcataaatgttttaatttttaataattatgactgaaaataatcatagtatgtagtaaatatcataaaacatcacttctgatgatatagca

SEQ ID NO: 369606 - DNA, 618 bp, Homo sapiens
ttcatgcttctaactaatggactgttaccaagtcctacagcagttagaaaggagggagggccccaaattaactctaggttcttaggatgattgaaattctgacagtaacaatattggacaaaataagaaagtcagaagagaacatttttttaaaaaaagaaaccacagtctttaagtctttattttagacatgatggcttaagagtagtattggagaataatttttcatcatagttatactgataaaacacataaggtgaatttgtgataactatttcattattttgagcaatgtggaaatctaatatggattccagttttcattatacttttggaattgaattatttaatttgttgctatagaagaaactatgattatcggttattaatcaaccattctttccsatatagaatcaatgtgtgtgtgtgtatgtatagaaagtaaaacttacttttattctcaataaaaagtattgaaaatatttaaatattttaaaagtatttgcattcaaagtaaaagtttaatagtcataaatgttttaatttttaataattatgactgaaaataatcatagtatgtagtaaatatcataaaacatcacttctgatgatatagca

SEQ ID NO: 369607 - DNA, 618 bp, Homo sapiens
ttcatgcttctaactaatggactgttaccaagtcctacagcagttagaaaggagggagggccccaaattaactctaggttcttaggatgattgaaattctgacagtaacaatattggacaaaataagaaagtcagaagagaacatttttttaaaaaaagaaaccacagtctttaagtctttattttagacatgatggcttaagagtagtattggagaataatttttcatcatagttatactgataaaacacataaggtgaatttgtgataactatttcattattttgagcaatgtggaaatctaatatggattccagttttcattatacttttggaattgaattatttaatttgttgctatagaagaaactatgattatcggttattaatcaaccattctttcccatatagaatcaatgtgtgtgwgtgtatgtatagaaagtaaaacttacttttattctcaataaaaagtattgaaaatatttaaatattttaaaagtatttgcattcaaagtaaaagtttaatagtcataaatgttttaatttttaataattatgactgaaaataatcatagtatgtagtaaatatcataaaacatcacttctgatgatatagca

SEQ ID NO: 369608 - DNA, 490 bp, Homo sapiens
gctttgtggtgctggaagtgtatacaatttgggggacaccatttaggaaatttactagttcaaaattagatataaaagtgaatatgtaattagagtataaaaaataaaaacaaattacagagtacaaaaaaatcacaaaaacaatcgacaaaatatttttattaaataactacctcytatattgctggtcacatactttggtacctgcgacatgacaggctctctgctacggccttggaatagctcaggttcacctttgcttcctacaatcttttcagaggtctttttcaccttgagagtctatcacgtaacagacaccaagacacatttgtagaataaaagtcatctaagaaataaattaaaattttaaaaatgatttctgctcttctacgcaccctcacacttcataaattcatgagttcatcaaagccaaaaagaataaggaatataaccaaagcattgcaaattggattaataagtgacattttat

SEQ ID NO: 369609 - DNA, 308 bp, Homo sapiens
aggaacacagaaagttagggatttgcacagtgtgtgtcataaactatgaggacatcttgascagactatggatgatttgcatatggtattattagaaaatgaagttgagatgatgagtagggtcaggaatatagaacaccttacatgctgggctgaagacctactaaacagtattaatgagaataccaggctttcaggcttgacaatatttaccttctacaacttaatatggagaaaagaatgtagctacaataccgattaagagagtccaggagtgaaataatgtgagtagagatagaagaaatgga

SEQ ID NO: 369610 - DNA, 526 bp, Homo sapiens
ggaatatagaacaccttacatgctgggctgaagacctactaaacagtattaatgagaataccaggctttcaggcttgacaatatttaccttctacaacttaatatggagaaaagaatgtagctacaataccgattaagagagtccaggagtgaaataatgtgagtagagatagaagaaatggaaattgacataattaataaatttggacccagacacatgatctttttaatagagatgaatttcctgtggtttcatattaaactagtggagtggtgagttataaggtaatggacaattgctcaattttgcttttttcctacccattcccaattccctctggttctggaaagtaacacactgatttttatcctggcaactattcatgtccttccttctttcagtccatrtggttcaggccatgttgattttacccctggatgtagagtcttggattagtcgtctccaccacataataatggagacaagccagtgagacatagtcttggaactttggttaaaattagg

SEQ ID NO: 369611 - DNA, 539 bp, Homo sapiens
gggcagcaattttaattaattagcaatttagagcctctcatgctaaaagctaccttaatgataaaaagagaaatgatatgggaaggcaaaagaatttgaaacattcagcctgaaacaacagatatattaccaacagtgagcttttaagcaggaacctatcttttactcagccattacatgctagctattaatattttatggttataaaaattgtaaatcagtgaaaatcaacttaatattttgagttcatgaagagctttttggcttctgaagaaaatcattttcrctggactctaacatcatttgctcttgagtgaaaacaacaatcttctatttatttgtataatataggtcatggctcagaaaacactaccccaaagcatttttggaggcctcagaagtaagaaaggcattctgaccttcccatttttctgtgtgagatctgaccataaattctgtacccaccttgcctgaaagtaagtcataagaccctcatcccagacaggtcctgtcctgcagctggggagaaggaatgctac

SEQ ID NO: 369612 - DNA, 597 bp, Homo sapiens
acattttgcctaaaataacagtatctttgtgtgtgcagtttytattatctttcattctattttttgttgtttggggagagctgaaattttacaagattataaaacatcagctttgacaattgtaagagtgattcgcttcttacctatcaagtccatctatttttggaacaaaataagtaagacaaataagaatcagctaccttcacaatctaagagtccatattacaaacacatgaaattttcacaaggatttgaacaaaggccctcataaatttttgccaaaaataaaataataaagtgagttataagaatttgcccgatgtaatcttttttcttgactttaacattgaattaataatagtttatatgatattgcctataaattatataacataagcagtagatgttgagcaagtcatttctatttaaacctaattatgggggaaataatattatgatgacaacacttcaatactgtctctacttacacttaataaattgccttgttttgctttgcatttttaggtatcgtctatgttatttatttttctataactagtattggatgatatgcctgttgaaggtaaacatttaaga

SEQ ID NO: 369613 - DNA, 636 bp, Homo sapiens
gggattaggaagatttttgtctatatatctatttatctctcccttcacctattcagctttccagctgtctaacatctatctttatatgtatatttgagatatttataataaaagtccctttgtaagatttcaaatttccttctaaaagtgcagaatctataagaggtcatactttaataaaaattacctttggtgaagtcaaaacttaaatccatattgcagactttggatagccagaattctacatgaagccacagaaaattagagggcacatgtagaaacaatgtagaaaaaaatttggagtatgttaataatgaaattattctaaccttgcattttttttcaggtcccgaataaagcaagtcttcgagaacactaaaatttctaccgcrtgctgccttaagcatcacccttactgagaaatggtgatatctcttctatatcaacaggagtggtggtgaactgtaatttctaaaaggcaaaattgcattgtaaaattgctaaatgttgcaaataaggattttagagaagctatttggtcacagtagaatggagatttctgttaacgttcaatggaaggttcacattagaggtcatctcagagagatcaaggtaatattcttttagaaacttgct

SEQ ID NO: 369614 - DNA, 657 bp, Homo sapiens
ccctgaagggccaaaggagttttgtttttttttttttttttttgagacggagtctcgctctgtcgcccaggctggagtgcagtggcgggatctcggctcactgcaagctccgcctcccgggttcacgccattctcctgcctcagcctcccaagtagctgggactacaggcrcccaccactacgcccggctaattttttgtatttttagtagagacggggtttcaccgttttagccaggatggtctcgatctcctgacctcgtgatccgcccgcctcggcctcccaaagtgctgggattacaggcatgagccaccgcgcccggccaggagttttgagcaaaagaaaaaactgaaggcatcaaccttccagttttcaaaatgtattacaaagctacagtaatcgaaacagtatggtattggcataaaaacagacatgtagaccaatggaacagagcagaaaagccagaaataaacccatgcatatattgatttttgacaagggtaacaaaaatacacattgaggagagagcagtctccaataagtggtgttgaaaaaactgtttatccacatgtaaaagaatgaaattgaatccttatcttacaccatacacaaaaataaactaaaaatggattagagatttaaatgtaagacccaaaa

SEQ ID NO: 369615 - DNA, 657 bp, Homo sapiens
ccctgaagggccaaaggagttttgtttttttttttttttttttgagacggagtctcgctctgtcgcccaggctggagtgcagtggcgggatctcggctcactgcaagctccgcctcccgggttcacgccattctcctgcctcagcctcccaagtagctgggactacaggcacccaccactacgcccggctaattttttgtatttttagtagagacggggtttcaccgttttagccaggatggtctcgatctcctgacctcgtgatccgcccrcctcggcctcccaaagtgctgggattacaggcatgagccaccgcgcccggccaggagttttgagcaaaagaaaaaactgaaggcatcaaccttccagttttcaaaatgtattacaaagctacagtaatcgaaacagtatggtattggcataaaaacagacatgtagaccaatggaacagagcagaaaagccagaaataaacccatgcatatattgatttttgacaagggtaacaaaaatacacattgaggagagagcagtctccaataagtggtgttgaaaaaactgtttatccacatgtaaaagaatgaaattgaatccttatcttacaccatacacaaaaataaactaaaaatggattagagatttaaatgtaagacccaaaa

SEQ ID NO: 369616 - DNA, 657 bp, Homo sapiens
ccctgaagggccaaaggagttttgtttttttttttttttttttgagacggagtctcgctctgtcgcccaggctggagtgcagtggcgggatctcggctcactgcaagctccgcctcccgggttcacgccattctcctgcctcagcctcccaagtagctgggactacaggcacccaccactacgcccggctaattttttgtatttttagtagagacggggtttcaccgttttagccaggatggtctcgatctcctgacctcgtgatccgcccgcctcggcctcccaaagtgctgggattacaggcatgagccaccgcgcccrgccaggagttttgagcaaaagaaaaaactgaaggcatcaaccttccagttttcaaaatgtattacaaagctacagtaatcgaaacagtatggtattggcataaaaacagacatgtagaccaatggaacagagcagaaaagccagaaataaacccatgcatatattgatttttgacaagggtaacaaaaatacacattgaggagagagcagtctccaataagtggtgttgaaaaaactgtttatccacatgtaaaagaatgaaattgaatccttatcttacaccatacacaaaaataaactaaaaatggattagagatttaaatgtaagacccaaaa

SEQ ID NO: 369617 - DNA, 645 bp, Homo sapiens
aaatcacttagcatctttggctgacctcagctccagatgccggtggaagctggggcttgattttgctttgcttcagggacagcgatgatacattttattacagtgttgattctgaggtcccatcaggcttctggtgtcctcaacatccagggaggccagacaagctgaaaaaatctttacacaatggcagggagcagccagaggaaggaaasagcaaggccatccaaagcaacacagagctcttcgcaggtcagaacgtgcacccaggagcagtggctgaaccttgcgtgggagtgaggtttagaggcaagagctcagggagttctacccaacctagcagatgaggacaccaaaaaaaaggcaatcaggactggagaagggcatttcctcagttattaaaaaataacaatgctcatgtctctttctcttaacaaagatgctggacatttaaaccaactcagctctctcagccccacaaatacactttttaaaacttggtctgtcttttctagttgccacagccgaagccctgggctgcctccacctccgaccttatgcacaggagcagctgttgagtcacttttactgtgctttcttgagaaggaagggagttcccaggggtctggtgatatccacctgcagggg

SEQ ID NO: 369618 - DNA, 583 bp, Homo sapiens
tgttacacatttatcatcatcattctggaaaaatagaaataatttttcattaaacatgcactttcattaactagctcattgctgctgaatgtgtttaatgaaaagatgtcaaataaataaaaattttaatttttacaaaataatgtatttgggagyggcagtagcaaaagcattcagatgctctgagtcattttattctgcctctatttcctgcactccaagtctgtgctttcccacatttgccactaaccttgctgattgtagcatgatgatacaatgtatctttcaggcttcagcaagtattgtggcaaaatttgctagcaaatcaacagatggcaggggcagctgatttaaaaatgttctcattagtacttgagagaaaaggacttagctacttgtagctcctttggcctaagcatttttatcagcaacgccctgcatgctgtcctcgtaagcaaggtcatgccaaactcatgcgctgttagacaagatcatgcccttagctggaactatgaaaaagagcactactgaactcattttgcctttttttggtgcaactggcaataaagatactttgctaaaa

SEQ ID NO: 369619 - DNA, 577 bp, Homo sapiens
gccaatcactttttcaaagtgactgccctatattttgcattcccaccagcaaagtgtgagagatacagttcataaatagatatttatttaataaattttatctttcaaaaatatttatcaaagatggatactctgaatggaggttaaaagtcagaaagtgtgaagagatttggcctaaaacatgtatgtatttcaatataaaaattagaattgaggggytccttctttaggaatttaggaatcagcacctgttaagaatattctctcagttaaaaatgctatgattgtacagaagagtaaactaaaggcatcagtaacttcaaatttgttagctatgaaattcaactttgtggaatattacagctaattgtggaaaatattataaaaaataagaccttattaaaaacatactctatgggccgggcaaggtggctcatgcctgtaatcccagcactttgggaggccaaggtgggcgaatcacctgaggtcgggagtttgagaccagcctgaccaacatggagaaaccacgtctctactaaaaatacaaaattagccagatggggtggcgcatgcttgt

SEQ ID NO: 369620 - DNA, 572 bp, Homo sapiens
ggtaatgggacttggtggtcttctccctgtctcacccacactggaacagctctgcaagccttgtgtcttcagggtcgaaatagctgccacaggataatggtacttgtgctagaaggtgttgcttcttagcatatggctggtaagcagaagacaaagaattttcgaggacacagttaagctgcccacagacactgtctgcatctttgcacagtaatcacattagaaagatgcaagaagcacacaatgaaaatacaatgaatgtaggcacagcttggcgacctatttatcccttgtggtggcaatttaatgaaacagacatttgggaattttccatttaactggtaggagcaaaatctgtccgtgktagggtgacttgagtttggggatgtttgaagcccagcatctgcttgggcagctaatgggagataaggcgaaaaggccagaggagccgacatcatgcaagctcatccacatggtctcccattttctgacttcttggtcttctcctccatttgcatgaatggctctgagaacattcttgagtgggaaaactggctctgaaaacattacgg

SEQ ID NO: 369621 - DNA, 533 bp, Homo sapiens
tacagacattcctggcagttctatagaagctttccattgtatgagttgtgcaattacaacaggagatgatttgagacggaacccaaagacagcagtaaagaaagaccttatgtctgaaaaaacaagaagaaaagaggtattgggtaatttaaacacaagaagcttcagttccatatttatatggtgtaacaaaaagcttagacacattgaaatggaataaagtaggccaactactgcccttaggtatgcgtgctctgctgccgttaactttctagaaatcctgtttwcttcactcaggcaaatgcaaggtgaattgcttgggtctgaactggagcacactggcagagagtcagcaaccagaccctggtgcttgacctagatggcttctcagtcatcatcacgctcagcagctgtggcaatctcagtccagcgtggtccctcacccctcaacgggaccaaaacaactgaactgaaacagacccgacacttggcgctgtcatactcataggcttggaaattccttatcgtcagct

SEQ ID NO: 369622 - DNA, 582 bp, Homo sapiens
ggatttccactgttgctattttttccttgatagccatctctggtaggattatttaacattgcccatgcctttgttcattttaattgaccttttacaattgcccctttgtgtgttccataggtttcatgctggggctctaattgacatagttcctctgttctcatacatagaactacaccaacccctccccaagaaagacaaccacaagtcccatccaagtgctgatgtcagttctaagtccagaatctcagcaggatacacagtgcatcctatatcaggtcaagacatggctcctcttagcccacattaagaactacaaagggaggttgtccacactcaatgaacaataatggaaccacaagttaacaacagtaaacaatcctatttaaaaattgatgagagaaacacagaagttaatggttcctgtcaattgtgcggtaatgtttgacagtctcattgcaaacaccgttattctggagatggaagtgttactatttgttcattagctctggatcctgatctctgggagaacttttcttgttcctttttttctctcattcytaaatccatcttctggaaaga

SEQ ID NO: 369623 - DNA, 600 bp, Homo sapiens
actactctgtttgactagatcagatgtgggttttgtggaatgtatctattttgagagttatatagctttgtcaggtcactttctgcttacaaaatgtttgtacctcaagttttgcatgcttgtttaggccagggatatagttctgatgtttgtcccctccaaatctcatgttgaaatgtgattcccaatgttggaggtggaacctgatgggaggtgattggatcatgaagatggatctctcatgatgggtatagcaccatcttctcggtgataagtgagttctcactgagttcacatgagatctgattgttttagagaacctgggatctcctcattctctctcttttgctccttctctcactgtgtgacatgctgctcctcttcatctcctatcataattgcaagcttcccgaggccctcaccagaagcrgatgatggcaccacacttcttgaacagccagcaaaactgtgagtgaaaataaacataaaactaaaatttctttatacattttccagcctcaggtgttttttaataacaatacaagaagggccaactatagaaaattaatactgaggagtggggcattgctataaagatac

SEQ ID NO: 369624 - DNA, 575 bp, Homo sapiens
ggaacaatgtggcttagatgttgtcctcttcaaaactcattttaaaatgtgattcacattattggaggtggagcctggtgggaggtgatttgatcatgggggtggatccctcatgaatggtttagcatcattcctttggtgataaatgagttatcgctaagttagttcgcatgagatctggttgtttaaaagagctagttcacaattcatatggcaacataattcctgtgaaaacttagactatttgtctgttttctgtaaatagagtktacacaattcctttctaggctatcacagaaaactacatcagacagaatgtaacagaaaagaataattttattcaaaacaattgcaatagagttgagactactgcagtagaggagagaggttgaactcaagtttgaatacagcaaggacagctggggatttatagccaagtatcagagtgagggggtcagtggatagaaattactaagaggaactaatgagataccagtgttggggaagaggacattgattagatattaagggtaagggcatttgtgctaacctggcctaggattcttgctaaaact

SEQ ID NO: 369625 - DNA, 534 bp, Homo sapiens
tcagtttgtctaacactgcaagggctccacaatctgggctctctctgttctcgctcatctgtgcttgcagactggccagtgctttctgcccatctgtctttcttgcaatacctttctgaatcccagaaataacctgtacacactactgctttgccattttacaatatggatctgcattgttttagcttctgaratcagtcctcttggcacactctttcactgaatcgatgccatatgttttgggtttttatttcagtaggacttcaccaactttgcacagtatttattattattctaatcacatgatcctctgctgtggtaacagataaatcctcaagttgcactgatttaataacatgagacttgatgtcctgcttacacaacattcactgggaaaaacagtgagatggtgaggtggaaagagtgtgtgggggtcacctgttgagttggaatctactaatttgtaggtgcacatgtggaaaaagtagccacagcaggagaaaagagatctggagttctgtgcaacagcccttg

SEQ ID NO: 369626 - DNA, 569 bp, Homo sapiens
tattttaacatcccatgtgttatttggggtctagagataatcagtttgtctaacactgcaagggctccacaatctgggctctctctgttctcgctcatctgtgcttgcagactggccagtgctttctgcccatctgtctttcttgcaatacctttctgaatcccagaaataacctgtacacactactgctttgccattttacaatatggatctgcattgttttagcttctgagatcagtcctcttgscacactctttcactgaatcgatgccatatgttttgggtttttatttcagtaggacttcaccaactttgcacagtatttattattattctaatcacatgatcctctgctgtggtaacagataaatcctcaagttgcactgatttaataacatgagacttgatgtcctgcttacacaacattcactgggaaaaacagtgagatggtgaggtggaaagagtgtgtgggggtcacctgttgagttggaatctactaatttgtaggtgcacatgtggaaaaagtagccacagcaggagaaaagagatctggagttctgtgcaacagc

SEQ ID NO: 369627 - DNA, 569 bp, Homo sapiens
tattttaacatcccatgtgttatttggggtctagagataatcagtttgtctaacactgcaagggctccacaatctgggctctctctgttctcgctcatctgtgcttgcagactggccagtgctttctgcccatctgtctttcttgcaatacctttctgaatcccagaaataacctgtacacactactgctttgccattttacaatatggatctgcattgttttagcttctgagatcagtcctcttggcacactctttcactgaatcgatgccatatgttttgggtttttatttcagtaggacttcaccaactttgcacagtatttattattattctaatcacatgatcctctgctgtggtaacagataaatcctcaagttscactgatttaataacatgagacttgatgtcctgcttacacaacattcactgggaaaaacagtgagatggtgaggtggaaagagtgtgtgggggtcacctgttgagttggaatctactaatttgtaggtgcacatgtggaaaaagtagccacagcaggagaaaagagatctggagttctgtgcaacagc

SEQ ID NO: 369628 - DNA, 569 bp, Homo sapiens
tattttaacatcccatgtgttatttggggtctagagataatcagtttgtctaacactgcaagggctccacaatctgggctctctctgttctcgctcatctgtgcttgcagactggccagtgctttctgcccatctgtctttcttgcaatacctttctgaatcccagaaataacctgtacacactactgctttgccattttacaatatggatctgcattgttttagcttctgagatcagtcctcttggcacactctttcactgaatcgatgccatatgttttgggtttttatttcagtaggacttcaccaactttgcacagtatttattattattctaatcacatgatcctctgctgtggtaacagataaatcctcaagttgcactgatttaataacatgagacttgatgtcctgcttacacaacattcactgggaaaaacagtgagatggtgaggtggaaagagtgtgtgggggtcacctgttgagttggartctactaatttgtaggtgcacatgtggaaaaagtagccacagcaggagaaaagagatctggagttctgtgcaacagc

SEQ ID NO: 369629 - DNA, 599 bp, Homo sapiens
attcaaattcaagcatttctatacaatgcattccactttaggcatacatgcttatagccaagccaaaatcaaactgtgctcttggtatgagggctaaggctcaagtcaaactgctrtttgcctctctgggtattctctaacctggacatcccacagatggatctctgctgggtcagagagcactcaccaaatgttcatgggattcctttgcaaattgttattaatctgtactgtttctcctctgattggacataaatctatggcaggagcttaggtttttcattccagccttgaaggatgtctagttcttcctgagtttgtattgaggtagaattccactttttgcataacccttttggtttctgaatgaagctttgatgtaggagaattcaaagccctgcaatggaaagtgccaagttatcatgagactggactttctgcatttcatattgctgtttcacaaaaatttcatgatactaaggaaaaacaaatagcaaatccttggggcattatatctgtgtggacatgataatgaattacattctaatgtaagcttttagctgtggactaactaaaaaaaagcctagccccatctgatt

SEQ ID NO: 369630 - DNA, 599 bp, Homo sapiens
attcaaattcaagcatttctatacaatgcattccactttaggcatacatgcttatagccaagccaaaatcaaactgtgctcttggtatgagggctaaggctcaagtcaaactgctgtttgcctctctgggtattctctaacctggacatcccacagatggatctctgctgggtcagagagcactcaccaaatgttcatgggattcctttgcaaattgttattaatctgtactgtttctcctctgattggacataaatctatggcaggagcttaggtttttcattccagccttgaaggatgtctagttcttcctgagtttgtattgaggtagaattccactttttgcataacccttttggtttctgaatgaagctttgatgtaggagaattcaaagccctgcaatggaaagtgccaagttatcatgagactggactttctgcatttcatattgctgtttcacaaaaatttcatgatactaaggaaaaacaaatagcaaatccttggggcattatatctgtgtggacatgataatgaattacattctaawgtaagcttttagctgtggactaactaaaaaaaagcctagccccatctgatt

SEQ ID NO: 369631 - DNA, 426 bp, Homo sapiens
actctgtctccgaggctggagtgcagtggcatgagcctagctcactgcagccttgaactcctcagctcaagtaatacccccacctcagcctgcttggtagctaggactataagctgattaataatgataaatctgctaatataatggaatgctatatacaagtttatagtaacggagttcattattatactataaactgctatgtaacatttcactacattaacagcctccaaaaaatttaccttttcccatatacacagatatttttagttgtttccaaattttcactgttaaaaagatgcaaataatctatctcctaatacatgtttccacaaaatatataaacaaattakaaagaagtagaaataaaaattgctgggttacatggtccacacattaaaattctactctagacatagtcaaatt

SEQ ID NO: 369632 - DNA, 539 bp, Homo sapiens
ctaccttggtcttacctcccctattcagcttcaaatgccacctactctgggtgctgcttctataactaacatgctccacatgaaaaaccaatataggctaaagacattaattgttcatgtagaaaaccccaaaatgaactagaaaagaaaaaagggaacagaggtccacttagcagatgttcagtagcagagatataaagaayaggtacaaaggacccattataagtgtggttgtcccatgaatgggaatagatattttattccctacccatgtcctttcttctttttttaaaagggcaattaaaactagaataacaagcaaagatatctatccaatatgatttcttttctgcaccgatctttaagaaaatcattaaagatcatattctgagtccagatcttttttagaggccagatataagctgaatctcaacctactctcagtatgctccttcagacacagcaagctgcacagggcagccaagacgtcttttccctcaagaactaggaggcaagagacactgatgagaagaacaggc

SEQ ID NO: 369633 - DNA, 616 bp, Homo sapiens
tgagtccacttatataaagctctagaaaatacgaagcaatctagagtgacagaaagctgatcaatggttgcctgagcagggaggggtggataggagaaattacaaaagggtatgaggaaacatttgtatgtgatgtataggttcactatcataattgaggtgagggtttaagggttgtgtacatatgtcamtatttatcaaattgtaccttttaaaatgtgcagcttattgtatgtcaattttacctccatgaagctgtttaaacaacaaaaaaaaaccctagagtaagaggagaacttttacagaaaggcaaagagccctctctccatagagaaaaaaaaaaatctgagctaacactcaaatcctctatgtacatactattcaatttaactaagagtctgtcatcactggagggtagagctctttaaatgcctatgaaggtattggctttagaccctcccaataaatatttatttggggaactgctaatactaaaaaatgacaatgtgatgttctactaagcttttcctctacaaagtaattgactcatacagaaaaaaaaaaaaacaaaacagcttgtgttgaaatagtctgttgtaatggatcccacacaagg

SEQ ID NO: 369634 - DNA, 624 bp, Homo sapiens
ttgtcctaactgtaagagctaaaatttatatttacatagaaaaaaataggctttaaaaaagtaccaaggcctggatacaaactaaatacagaggccaaggtgagaagatcacttgaagccaggaattttatactggcttgggcaacatagtgagaccccatctctaccacaaaaaaaaaaaaaaagaagaagaagctgggtgtggtagcatgtgcctatagtcctagctactcaggaggctgaaataggaggattgcttgagttaagggttccagtctacagagagctataagcgtgccactgcactctagcctgggtaacacagtaagaccctgtctctaaaaataataagaccmaaattcatgtggaaaataagtttaaatcatactagtaattacaaaaataaaagcaaagttactctttttgtctaacaaattgtcaaattttaaaaaatgataacaccaggattgatgagatttgataaaaactctggagagcaatttggcaggatgtcacacattttaaaatggtatgtatctttaaaaatgcaagatcaaaatttcacccatcctatgtgaaaattttaaaaatttaaaaatatatagcagttggcaaattcataac

SEQ ID NO: 369635 - DNA, 588 bp, Homo sapiens
ttttgtttttttgggacaggtcttgctctgttgcccacgttggagtgcagtggcacgatcatagctcactgcagcactcaacccatctcaaacctcctaggcttaagtgatcctccctcctcaccctctcaagtaggtgggactataggtacgtggcacctcacctggctaatttattgtttgtactttttgtagagatggggtttcaccatgttgcccaggcttgtcttgaactcctgagctcaggtgatccacttgcctcagcctcccaaagtgctgggattacaggcatgagccactgcccccagttgtgtgcatagtgatttaacaaatggtgccrtttctcagtaaaatgataaagaaccagctctagttgcagaatgcctgggttagaatccagaaattacttgtaatttctgggactttgggcaagttattaagttagtgcaaaagtgattgtggtttttgccatacttttaatggcagaaaccacagttacctttgcactaacctaacagcaacttctctgcctcagttttcctcgtctgttaaatgggagtaataaagtttactccaacccctcacagg

SEQ ID NO: 369636 - DNA, 548 bp, Homo sapiens
aagttgcctgtttcagatgtcttgagacaactttttgcactctttgacagggtatgttaaaatttaatctttcacatttttactctgtcagtcctacagtgagtaaatcaatatggtaggcaatttgaaaaacttgataggtcagtgttagaagaatcaaggctgagcctatggtttaattgcatgattttgtttttttctccttaatagtaatattaataattgtgtgtgtgtattgtaacatttattatactgtcatatataataaaatatcatatcatatcatatcatatatatatctattattttagtgtaatatgatataatgtatgtatctattattttaaataccrggtcagaaataaatattgtgaccatataaccacatttgtggtatggaactggaagagtttatatcattggcaggaattttaaaatttatatcaaaactcatacattgatgacatgggtgtttagaattttattctgaaggttttagacttccacaaacctgtatgaagaccaaatagatttttattttcaagtga

SEQ ID NO: 369637 - DNA, 548 bp, Homo sapiens
aagttgcctgtttcagatgtcttgagacaactttttgcactctttgacagggtatgttaaaatttaatctttcacatttttactctgtcagtcctacagtgagtaaatcaatatggtaggcaatttgaaaaacttgataggtcagtgttagaagaatcaaggctgagcctatggtttaattgcatgattttgtttttttctccttaatagtaatattaataattgtgtgtgtgtattgtaacatttattatactgtcatatataataaaatatcatatcatatcatatcatatatatatctattattttagtgtaatatgatataatgtatgtatctattattttaaataccaggtcagaaataaatattgtgaccatataaccacatttgtggtatggaactggaagagtttatatcattggcaggaattttaamatttatatcaaaactcatacattgatgacatgggtgtttagaattttattctgaaggttttagacttccacaaacctgtatgaagaccaaatagatttttattttcaagtga

SEQ ID NO: 369638 - DNA, 621 bp, Homo sapiens
atcacaaattatagatcaccatagcagatataataataataaaattttttgaaatattaggagaattatcaacacgtgacatgaagacatgaagtgagcacgtactgttggaaaaatggcactgatagacttgctcatacagggttgttacaaatcttcaaattgttacaaaaaatacattgtctgtgaagtgcagtaaagcaaagaacaataacatgagatatgcctgtatgtagaattctgagttgactgttcttttcttttaacagtttaataatgtcttactttaagtggcctccatggttttgcagccttactagttgttcttcaagttttgactttcctcaccaatcctcctcttatggtattttgtccagaggtagttgcttattgtattttgttcaaagttgccagttatagtcgagaatgataggctggctaaagattscatccatcttggtgtgtagcaacagttccagttttatatttactattgggaaaaaaagtagtttgtaaagaaaacatggtttgatgaccgaaataaccagggcttttttcttttttcccagagcacactaaattcttctaatgacttattctgtgatctcatagatgaactat

SEQ ID NO: 369639 - DNA, 621 bp, Homo sapiens
atcacaaattatagatcaccatagcagatataataataataaaattttttgaaatattaggagaattatcaacacgtgacatgaagacatgaagtgagcacgtactgttggaaaaatggcactgatagacttgctcatacagggttgttacaaatcttcaaattgttacaaaaaatacattgtctgtgaagtgcagtaaagcaaagaacaataacatgagatatgcctgtatgtagaattctgagttgactgttcttttcttttaacagtttaataatgtcttactttaagtggcctccatggttttgcagccttactagttgttcttcaagttttgactttcctcaccaatcctcctcttatggtattttgtccagaggtagttgcttattgtattttgttcaaagttgccagttatagtcgagaatgataggctggctaaagattccatccatcttggtgtgtagcaacagttccagttttatatttactattgggaaaaaaagtagtttgtaaagaaaacatggtttgatgaccraaataaccagggcttttttcttttttcccagagcacactaaattcttctaatgacttattctgtgatctcatagatgaactat

SEQ ID NO: 369640 - DNA, 561 bp, Homo sapiens
ttccccttggaattctgtttggaaagcaacatacttaataggttgcagtcaccacacaatatgtcaaagtgggaataagggtaagtgagcatgtctttaaaagttgtagaaccagacccagataaagaaagattaaattaaattaacatatagcataaaaaggtataggcaccagaaggaaactaaatacaagaatgatgttgctgtcacaaatctagattcacagaattgtagagctaaacagacctttgggtatcaaattgcccatcttcttcattttgcagaagattgccagctcaagagaggaagttacatgcccaaggccacacagctggttaattgcaggactgagactagaattcctagtttggtattcttttttactacaaactgtcactatttttaaaaaataattctcttgaggcatattttacatatcctaattcacccaagtatacaattcartaattttttttttgtaaatttaccaagttgtgcagtcatcaactttcaagcagttttagaacattcccatcaccccagtatgattttttatgtcat

SEQ ID NO: 369641 - DNA, 586 bp, Homo sapiens
gattccattttattgatctccctttatctctcatcactcctagcaatagagtctcatctcattgtactattcrccatctcttgaatacctcatatcctttagctcttctgtgtttttgctagactgtccttttatatcccttatctatttggagaactctgagactcagcctgtagtcaggcctacacatgatctcttctataggtaaatgttctcctttcctttgcctcagtagaattcattgatccctttttgtgtgcctatacttgtttgatatcataggacagtgtactagctgcgtgaccttggataactagcttaacttttctgaatttttcttaccttatctaaaatacatttgtatctttcagaggaattcaatgaaacctaaatactaaaacatatatatacaaatataatagattagtattgatagtagaaatgtgaacacagacttcatattataattataccagtttcctgtagttctacttgatttttgagcacagccatcctgctttattcacctttgtaacctaagtactgagcccaagtcctgatacataataaatcagattgaatcatt

SEQ ID NO: 369642 - DNA, 586 bp, Homo sapiens
gattccattttattgatctccctttatctctcatcactcctagcaatagagtctcatctcattgtactattcaccatctcttgaatacctcatatcctttagctcttctgtgtttttgctagactgtccttttatatcccttatctatttggagaactctgagactcagcctgtagtcaggcctacacatgatctcttctataggtaaatgttctcctttcctttgcctcagtagaaytcattgatccctttttgtgtgcctatacttgtttgatatcataggacagtgtactagctgcgtgaccttggataactagcttaacttttctgaatttttcttaccttatctaaaatacatttgtatctttcagaggaattcaatgaaacctaaatactaaaacatatatatacaaatataatagattagtattgatagtagaaatgtgaacacagacttcatattataattataccagtttcctgtagttctacttgatttttgagcacagccatcctgctttattcacctttgtaacctaagtactgagcccaagtcctgatacataataaatcagattgaatcatt

SEQ ID NO: 369643 - DNA, 560 bp, Homo sapiens
aatagccaaaagggcaacccaagtattcaccaatgggataatggaaaaacaaaatgagtatattaatgcaatacaatattattcatcattagaaaggaagggaattctgacacatgatacaacatggatgaatcttgaagaaattatgctcattgaaataagcaagtcacaaaagaacaaatactgtatgattccacttatataaggcatgcagagtagtcaaatcmtagagctagaaaatagagagatggttaccaggggtgggggaaggggagaatgggagttattctttaatgggtacagtttcagttttgccagatgaaaaaagttctgaagatagctggtggtgatggtttcacaatgcaaatatacttaatgccactgaactctatacttaaaaatggttaaaatagtatattttatggcatgtgtattttatcacaattttaaaacatttaacatttttataatgaaaaaggaataaatgaaagagtctgtactgtctgatttaatttatttaaggtgcaaaaataaatctatggtgttagatgtcaggacag

SEQ ID NO: 369644 - DNA, 578 bp, Homo sapiens
aagttctgaagatagctggtggtgatggtttcacaatgcaaatatacttaatgccactgaactctatacttaaaaatggttaaaatagtatattttatggcatgtgtattttatcacaattttaaaacatttaacatttttataatgaaaaaggaataaatgaaagagtctgtactgtctgatttaatttatttaaggtgcaaaaataaatctatggtgttagatgtcaggacagtggttatccttggaagacggaagtaactagaaagaagtatgaagaggcctctgagatgtgtgcagtctgtgaaattctttgagctatccatttgtgatttatatgatacattttttacatraatgttacatttcaaaaaagattttagcaatgtcgatcacagacaccacagcagccctatggaatcagaatctctgggagtggaaattcaggaccttgcattttaaaaatctcccttctaaatttttcttaagactactggattttgagaatctttgctaaaggaagaggattaaatattcttccaatgcccaagatttcttcaattctattctaacaataa

SEQ ID NO: 369645 - DNA, 578 bp, Homo sapiens
aagttctgaagatagctggtggtgatggtttcacaatgcaaatatacttaatgccactgaactctatacttaaaaatggttaaaatagtatattttatggcatgtgtattttatcacaattttaaaacatttaacatttttataatgaaaaaggaataaatgaaagagtctgtactgtctgatttaatttatttaaggtgcaaaaataaatctatggtgttagatgtcaggacagtggttatccttggaagacggaagtaactagaaagaagtatgaagaggcctctgagatgtgtgcagtctgtgaaattctttgagctatccatttgtgatttatatgatacattttttacatgaatgttacayttcaaaaaagattttagcaatgtcgatcacagacaccacagcagccctatggaatcagaatctctgggagtggaaattcaggaccttgcattttaaaaatctcccttctaaatttttcttaagactactggattttgagaatctttgctaaaggaagaggattaaatattcttccaatgcccaagatttcttcaattctattctaacaataa

SEQ ID NO: 369646 - DNA, 453 bp, Homo sapiens
caggccgcaggcttccagctaaatgaacaactttaccaaatgattgtccgccggtatgctaatgaagatggagatatggattttaacaatttcatcagctgcttggtccgcctggatgccatgtttcgtgccttcaagtctctggatagagatagagatggcctgattcaagtgtctatcaaagartggctgcagttgaccatgtattcctgaagtgggaactgagaagtcaagatcctccctggaggacaggactgaaaaccttgccaagctgtacacagttgctgataccctgtgcaacagctctcatttcctggcaagctctttcacaaccctacatatttctgatcatgtgctgccttttactgctgaattaaaacagatatttcacgaaaaatgttctgagtggtttgtatatcagctttttgagatttggatttatatggacttgca

SEQ ID NO: 369647 - DNA, 556 bp, Homo sapiens
aatgtaaaccaatatagagaacayatattgctgactattgcaattattctcagccctggctgcaatttggaatcactgggagagctctttaggaatactaatacttgagtctccaaatatgttaaataagactttttagaggtggggcccagagatgaatatgtttaaagctccccaagtgattctaatgatcagccaaggttgacagccttgattgctttgaagtagggccacctcacagtatttttcaagcctgtctcagccaaaactaaggccatgcaggagagtcagtgttgccagcattcaggagaaggaagatagaaataccaagaaaatgccacccaaaagctggggtagttgtgcctttcttgcgtacagaccttggtttggctttataattttgataataggctaatatagcagagcaaacagaatccaggattccggtgccagtagacacagctagagaggctacatttgcaagtgctcggttcctctgtctgctatttaattggtctctacccattctgcttctctgatttttaatgcattgtct

SEQ ID NO: 369648 - DNA, 590 bp, Homo sapiens
ttctctgaaacatctggagtgatgaaatgtagatattgactttggcgctggttaccatggtgtatacatttgtcaaaacacatcaaactaagctgggtgtggtggcacacgcctgtagttacagctcctttggaggatgaagtggaaggatctcttgagacaaggagttcaagcctgtagtgcgcttatggtcatgcctatggatagccactgcactccggcctgggcaagagagtaagagcatatctttaaaaaaaccaaagaccaaaaaacaaatcaaaccgtacatttaaaatggatgcatttggttgaatgtaaatgtaatcaacacaaataaagctgattaaagaaaaggaaaaacaaaaaacaaaacaaaacaaaaacagctctctgacagactggtaatcakacaaaagaaagtcagatgacctgaatgtttgtttcaggaataaaccttgttcctttagggaaatcttgaaacctctgtttctaccttctctggtgagaaaacgagattaaattattactccttttagtttccgccctgcagtaagataaagtaatatggtgaaaatgattcttaacttttt

SEQ ID NO: 369649 - DNA, 502 bp, Homo sapiens
ctcattctgtatgtcagtgatattttcagtggtactttttctaataaaatttgttttggcattgtggcgtcaggtgaacaccatcataaatgtcccaagttcctgcccctcatgtcttcctgtcttgtcacatatattttcacagcaatacagggatctaaattgggagcagatgaataaaattcatgtccctggttcccacagagcttgatgaaagttcaaattttgaagaccatttrcttacaagtgcaaaacaagagggaagaatacattcccaaaatgtgtgttctgttctgagagtaaaggggcttcatctaatcagtatgtttaaatatgatactcccttttagttctctcaagtaaaagagaaacttcatttctctccttgtcttgctaagctatgtatattggctcttgttgtacagccacgtagtttccttgcttttgtccagcaagagagctgcagaccttctctgtttctgttttctactcatctcttcct

SEQ ID NO: 369650 - DNA, 605 bp, Homo sapiens
tttggggattgtacgtgtaattatcagtttagttgagcaaatggtcatttttggtttaccaatgaaagacctgatataaaatttggcccttaatcacagtaattacgatttgaaagaagctgtgagatttttgtctagcctagaccttggtttggggaaggggaagggaagaaaggagggcttaaaactataattagctttttttttttttcagtaagacaagaattatgctttacattggttattttttaaccctcctttttaaatgtgttttatgttttggaagtatttttgcatactttttatttagtagtatccttttacatataggattcttttacatacttttatttggatagcacttcacagttaatttcccatcttttatctcatttcaccttcacagtgacacttagagttagaatattagtcaagattcttcatttgcaagcaataagatagactgrctgactgacgccaaagtggaattatttgtaaggccagggagtagactcaagggaaaactcacagccaggaagcttcagaggtcctggctgcaggaacagccttacaacctccctggccactgcagttaaaatgagcaa

SEQ ID NO: 369651 - DNA, 581 bp, Homo sapiens
taatattgatgaccacagtaataatagtagtaatggcataatagtcatagctaattattgaggacttatatgctaggcactcttctaaacattttatatatattaacccatttaatctttatagcaagcctatctaatcggtattcttaattattcttgttttactaagatacaaagactttaagtaacttatctaagacaatttagctaaagaacatcagagccacaattcaaaaaccaaaacagtttgrctttggagcctgcactattgactctacactttagtgatctctgctttcagtgtggccaggcaaaactgaacaagtaaaccaagtaggttgcaactatagtaaaggaacatggactgaggcaccaacaataatagtagctaaacgatttattgatgtttactattagtgacctatgtaacttttcacattccttgtctcatgccatcttgttagcaactcctgtgagttagggtctatcatggagaaagaccttgtggcaaagtggcaggtctatccatcagtaactgtcttttctcttgatggctcaagtccacccatcaaaacaagttg

SEQ ID NO: 369652 - DNA, 520 bp, Homo sapiens
tcagattcataggctagaagaaagctcaaagaaaatggatggaaaggttgggaaggctaaaataaattcctggtatagctaatttctataaaaacaagtgtttttcagtaaatagattcaatctgcaacaaaatgagacattggtttgctaatttcttactgtatcatactgcaatggtttgatctttacaaattgcatttccttttcatccacatccagctacatttgtaggcctcaccttacctatccacccctgctgtgatatttttggactaagaagtaaccacctactctcaatctgaaagtttcttggtgaagaaaaacaaaacacagaaatcytaaaagagaagtgccatcactttcccaatggcagttggactcactgtttaagtaatatgtaaatggaaaccgaaactgtggggatgctgcctttaaaactgcccaagagtgcccctttccccatcactagcccacaatgcctgcatcatgcacattatgaagaagtatggcaaatggaga

SEQ ID NO: 369653 - DNA, 523 bp, Homo sapiens
atctttacaaattgcatttccttttcatccacatccagctacatttgtaggcctcaccttacctatccacccctgctgtgatatttttggactaagaagtaaccacctactctcaatctgaaagtttcttggtgaagaaaaacaaaacacagaaatcctaaaagagaagtgccatcactttcccaatggcagttggactcactgtttaagtaatatgtaaatggaaaccraaactgtggggatgctgcctttaaaactgcccaagagtgcccctttccccatcactagcccacaatgcctgcatcatgcacattatgaagaagtatggcaaatggagaacagctgtgggaagatataaacataatccacaaatggctcagaagagaaggtaccagacaattggtcctgtgatatgttctacggtgccgattctcagaggacatttttagagaatgattttgctttctagcttgcgctcactcataccacccataaatatacccaaactttgtcttcattcatt

SEQ ID NO: 369654 - DNA, 520 bp, Homo sapiens
tcagattcataggctagaagaaagctcaaagaaaatggatggaaaggttgggaaggctaaaataaattcctggtatagctaatttctataaaaacaagtgtttttcagtaaatagattcaatctgcaacaaaatgagacattggtttgctaatttcttactgtatcatactgcaatggtttgatctttacaaattgcatttccttttcatccacatccagctacatttgtaggcctcaccttacctatccacccctgctgtgatatttttggactaagaagtaaccacctactctcaatctgaaagtttcttggtgaagaaaaacaaaacacagaaatcctaaaagagaagtgccatcactttcccaatggcagttggactcactgtttaagtaatatgtaaatggaaaccgaaactgtggggatgctgcctttaaaactgcccaagagtgcccctttccccatcactagcccacaatgcytgcatcatgcacattatgaagaagtatggcaaatggaga

SEQ ID NO: 369655 - DNA, 398 bp, Homo sapiens
gtctgttacttttataaaggaaaaaaatattttgaaaagatgaaatctactcacctttaaaagacatgaacctgttaacttcatgtaaaattaccttcacgttaagttatggttaaaattaccatactccatgtaatctataataataatatcaaatttttcctgtaataaaagtagtttaaacccaattttaataattataaaatcttcagcagatttctcagtaagttttagcaaactatttctaattatgaactactatggaatattgagttggattttttaatagatyccaaatgaaaatcaaactcatattgagagctgaatccagttgggcttctgtgtcgggtggggacttggagaacttttctggctagctagaggattgtaaatgcacc

SEQ ID NO: 369656 - DNA, 582 bp, Homo sapiens
catgttctttaggtaaacaagaagcctgtttctcagctaactgctgcaagagggatggacttccctccctttgaatatgatcttgraggtcttgatacatactgagaagggtgtggaagtgattagagaaatagaggctacaggaggaagtgggaggaagcaagaggaatgttcatgaaaagccttcatatacttataaaaacagcagcccttggattccagagggtgacatttatttaccctgttgacatcaagaggaatctccagaggacttgggccctgggataagggctcacaaatggcaaaggaagaatatcttctcctcccaaaggagtgggtgctaactcaaaaaatccagatgggggtcttcaaagggtcccagagtgaggccctattcagtcagacaaactgcttcaaaagccacaggagaacttagccctgatgtgtaacaggaaccaaaagcatatggtaagtcataaggagctggcagagctgggcttctgatgagtgtctgtcccagcaatattccagcagacaggtgaagggttggaggtcatctgagctggtagggtaaaaacagca

SEQ ID NO: 369657 - DNA, 631 bp, Homo sapiens
ctgtggcacaaccttggcctcagaccaaatccagtcagttcagataatatgatggaatttagatttttttatagtacactagttattgtgaaaaaaggaataagttgattcatattggaatggatctattagcggatgttggggataagtgagaagctgtaacttagctttcctttgtaactcaagggaaaaaaaatatatggtttgattcaaactttagaaaacaagcttgatattttttccagttttgagttctggctcactttgctaaactatsccatttgacaggacaagaaagcctgcctgttctgaggaaggcaatttatactcatcagcagttgtcaacaggatggtgagcacctagcatgtagtaagcactcaatccacccccaccccacactgcccccatccagactgcattaagagccattgtttaactatgccagggatcaatcagagtgcattccttcattgcatttcttcttggccatcgtttggaagtggtttggaaaatgagtacacatcctgccaatctccttggtcctacctctatctccctccacacatctgtaaaatgggtatcctagaatatccgaaggacaactcaggcaagatctctactgagctcagg

SEQ ID NO: 369658 - DNA, 511 bp, Homo sapiens
tctcactctcttattttattttatttattttrtagaggcagcatctcgctatgttgcccaggctgttcttgatctcctgcactgaagcaatcctcctgcatcagcctgctgaagtgctgggattacaggcatgagccactgtgcctggcctctctcactctcattctctcagtttctttctgtctctgtttgtctctcacctgtgcacttgcatgcacagtcatgcacacacagagagatacacatacatgagtttggtctgaactgaccctcacaaaatttcagtggcagtatatagatgaagtagtatcccaattttgcagatgaggaaactgagtcccagggaaggtaagggacatgacagtaagtcagtggataaacacagggactagaacctatcggtgctcttttctctgcattacaggctcacttagaagaagaacagctgaagcacagtgaaggtgtggaatgggaatggggaagggttaggctagaaggcaagtgcctggat

SEQ ID NO: 369659 - DNA, 511 bp, Homo sapiens
tctcactctcttattttattttatttattttgtagaggcagcatctcgctatgttgcccaggctgttcttgatctcctgcactgaagcaatcctccygcatcagcctgctgaagtgctgggattacaggcatgagccactgtgcctggcctctctcactctcattctctcagtttctttctgtctctgtttgtctctcacctgtgcacttgcatgcacagtcatgcacacacagagagatacacatacatgagtttggtctgaactgaccctcacaaaatttcagtggcagtatatagatgaagtagtatcccaattttgcagatgaggaaactgagtcccagggaaggtaagggacatgacagtaagtcagtggataaacacagggactagaacctatcggtgctcttttctctgcattacaggctcacttagaagaagaacagctgaagcacagtgaaggtgtggaatgggaatggggaagggttaggctagaaggcaagtgcctggat

SEQ ID NO: 369660 - DNA, 511 bp, Homo sapiens
tctcactctcttattttattttatttattttgtagaggcagcatctcgctatgttgcccaggctgttcttgatctcctgcactgaagcaatcctcctgcatcagcctgctgaagtgctgggattacaggcatgagccactgtgcctggcctctctcactctcattctctcagtttctttctgtctctgtttgtctctcacctgtgcacttgcatgcacagtcatgcacacacagagagrtacacatacatgagtttggtctgaactgaccctcacaaaatttcagtggcagtatatagatgaagtagtatcccaattttgcagatgaggaaactgagtcccagggaaggtaagggacatgacagtaagtcagtggataaacacagggactagaacctatcggtgctcttttctctgcattacaggctcacttagaagaagaacagctgaagcacagtgaaggtgtggaatgggaatggggaagggttaggctagaaggcaagtgcctggat

SEQ ID NO: 369661 - DNA, 564 bp, Homo sapiens
ggaagaacgcctcaagtgagcatgcacacaagttcattaaaagcactgtgcatgtggtccctcccaagtgctggcaggccagactgcccaggccagaggaagaatcaggggagaaaagatgcgaccccctggaagcatgccaatgtataaaaccccaagtcaaaggtcaaaccacgcacttgaatctctcaagttgcctgtgtggccctcttacaagtgtactttatttcctattgttcttgctctaacaccctttaataaactttcacttctgctttaaaacttgccttggtctcttactttgctttatgcccctcagttgaattctttcttctgaggaggcaagaattgaggttgctgcaggcycgtacagattcactgctgctaacataatcaaacatgcctgacccttgccttcccgtcatggcccgaactagtttttcagatttacttgggaatctccttggccaagaggcaggggggctccatttagtagtttggtaggcttagaattttatttttggtttacactccaaacaccaggtttgcctgatgtttgtacag

SEQ ID NO: 369662 - DNA, 560 bp, Homo sapiens
ttctagggaatgagaggaagaaggaatgggtagttactgctgatggatatgggacttctttttcaggtgatgaaaatattctggaattagacagtagtgataactgtaaaaccttgtgaatataccaaaaaycactgacttatacactttaaaatgatgaattttatggcatgtgtattacacgttaatataatcaatataatgcaatcaaattaaaaatctgaataaaaactaatttttaaaatgtcttaaccaggatttcccgggcaagatggctgaataggaacagctcctgtatgcagctcccagcaagaccaacgcagaaggtgggtgatttctgcatttctaactggggtacacagttcatctcatacagactggttacactgtgggtgcagcccacagagggcaagcagaagcagggtagggcattgccttacccaggaagagcaaagtgtcagggaactccctcccctggcatttccttccaagaaaaagatgtgagggaaagtttcctttgcctccaaggaaagatgtaagggaccttgcagtgaggggtg

SEQ ID NO: 369663 - DNA, 560 bp, Homo sapiens
ttctagggaatgagaggaagaaggaatgggtagttactgctgatggatatgggacttctttttcaggtgatgaaaatattctggaattagacagtagtgataactgtaaaaccttgtgaatataccaaaaaccactgacttatacactttaaaatgatgaattttatggcatgtgtattacacgttaatataatcaatataatgcaatcaaattaaaaatctgaataaaaactaatttttaaaatgtcttaaccaggatttcccgggcaagatggctgaataggaacagctcctgtatgcagctcccagcaagaccaacgcagaaggtgggtgatttctgcatttctaactgrggtacacagttcatctcatacagactggttacactgtgggtgcagcccacagagggcaagcagaagcagggtagggcattgccttacccaggaagagcaaagtgtcagggaactccctcccctggcatttccttccaagaaaaagatgtgagggaaagtttcctttgcctccaaggaaagatgtaagggaccttgcagtgaggggtg

SEQ ID NO: 369664 - DNA, 431 bp, Homo sapiens
tttcaggttcttaaaatatcaatgagattcatatgagaaaagagggtgagggcaatccagggccagtagcagaatgagtaaaagcttgcagtagcaaatgtgcaagttgcatctgtgagcaaatgtccraatttcatgaaattcaggattccctatataaagatagaaaataaattttatctatttgtgtaaatccaattattgtggcattttatgccatctttggagtctaaatcttatccagtaataatcatgggtccatataggcttttgagccaaagactagcatgtaaaaccggccttgcaggaagatagatggagtagcagtaggtagaagacacaggagccatagaagactgagagaagtagcactctgccatagttttcaacacatatgatgattaattttgaaactacagtagttaatgcat

SEQ ID NO: 369665 - DNA, 605 bp, Homo sapiens
caatggaaatttaaaaattctwtgaactgaataccaatagtgacacaacctatcaaaacttctgggatactgcaaaagcaatgctaaaaggaaagttaagcatttaatgcctacatcaaaaagtctgaaagagcatagacagtccaagatcacaccccatggaactagagaaacaaggacaaaccaaatccaaacccagcagaagaaaagaaataaccaagatcagatcagaactaaataaaattgaaacaaaaaaaacacaaaagataaataaaacaaaaatttggttttttgtaaagataaacaaaatttgtatacttttagtgagattaaccaagaaaagaagagagaagatccaaataagctcaattaaaaatggaacaggatatactaatattacaaccaataccacagaaatacaaaacatcatttaaggctactatgaacaccttatctacacagactggaaaacctagagaagaaggataaatttttggaaatacccaaccatcgtagattaaaccaagaagaaacagcaactttgaacagaccagtaacaagtagcaagattgaaacagtaataataaaattgccaacaaaaaaag

SEQ ID NO: 369666 - DNA, 605 bp, Homo sapiens
caatggaaatttaaaaattctatgaactgaataccaatagtgacacaacctatcaaaacttctgggatactgcaaaagcaatgctaaaaggaaagttaagcatttaatgcctacatcaaaaagtctgaaagagcatagacagtccragatcacaccccatggaactagagaaacaaggacaaaccaaatccaaacccagcagaagaaaagaaataaccaagatcagatcagaactaaataaaattgaaacaaaaaaaacacaaaagataaataaaacaaaaatttggttttttgtaaagataaacaaaatttgtatacttttagtgagattaaccaagaaaagaagagagaagatccaaataagctcaattaaaaatggaacaggatatactaatattacaaccaataccacagaaatacaaaacatcatttaaggctactatgaacaccttatctacacagactggaaaacctagagaagaaggataaatttttggaaatacccaaccatcgtagattaaaccaagaagaaacagcaactttgaacagaccagtaacaagtagcaagattgaaacagtaataataaaattgccaacaaaaaaag

SEQ ID NO: 369667 - DNA, 627 bp, Homo sapiens
aaaactgtaaaacactgctgaaagaaatcatagatgacacaaacaaatgggaacacctcccatgcacatgggtgggaagaatcaatactgtgaaaatgaccatagtgcccaaagcaatccacagatttaatgcaattcccatcaaaatgctatcatcattttccacagaactagaaaaacaatcctaaaattcatatggaaccaaaaaagagcctggatagccaaagcaatactaagcaaaaagaacaaatttggagacatcacattaccygacttaaaattatactgcaaggctatagttaccaaaacagcatggtgctcgaataaaaataggcacttagactagaaaactcagaaacaaagccaaatacttacagccaactggtcttcgacaaagcatacaaaaatgtaaattaagaaaggacatcttattcaataaatggtgctgggaaaactggcaagctacatgtagaagaatgaaactggatcctcatctcttaccttatacaaaaatcaactccaggtagatcgaagacttacatctcagacctgaaactataaaaattctagaaaataacatcgtaaaaactcttctagaaattggcttaggcaaagaattcacgacga

SEQ ID NO: 369668 - DNA, 534 bp, Homo sapiens
ttggcttaggcaaagaattcacgacgaagacccaaaagcaaatgcaacaaaaatagaaataaataaataagacctaactaaatttaaaagcttctgcacagcaaaagaaataatcagcagagtaaacagacaacccacagagtgggagaaaatatttgcaaactatgcatccaacaaaggactaatatctggaatcctcaaggaattcaaacaaatcagcaataaaagaaaaatttaaaaaggaaacaaatagtccatcgaaaagtaggcaagggacatgaacggacattctcaaaagaagatatataaagaaccgacaaacatatgaaaaaatgcccaacatcaataatcatcaggaaaatgcagattaaaaccacaataaaataccaccttactcctgcaagaatggccataattaaaaactcagaaaccagagatattggtgtggatgtaatgaaaagggaacacttacactkctggtgggaataactagtacaaccagtatggcaaacagtatggagatttcttaaagaa

SEQ ID NO: 369669 - DNA, 618 bp, Homo sapiens
tccctgtgttgcccaggctggtcttgaactcctgggttcaagcgatcctcccgcctcagcgtccctaagcattgggattccagcatgaattaccatgcccaggcttaagataccttttcttataaaccctcagttgcattcatttttaaatggttcttcattgattgattcattcattagtacattcattcattctttcatccatccatttgttcatttattcattcattctttcatcattcttaaattcattagcacattcatcatttatccattcctttgtgtgtacatcattcatttgctcatccattcatccatccattcgctcatccattcatccatccattcattattcatttgctcatttgtttctccattcattcctccatttatccattcacccatacatccatccagcacrtttatcaaaaccaccccacttgccagacacaggacacagcaaacacctccaaggaggccacttcctatcagcaaaattctcaacacgagattttgagttggcaccctaggggccataccgactcatactgggtttgtgaaagctgaaattattggtccacatttaaaaactgggagattttccatgaaaatatggat

SEQ ID NO: 369670 - DNA, 618 bp, Homo sapiens
tccctgtgttgcccaggctggtcttgaactcctgggttcaagcgatcctcccgcctcagcgtccctaagcattgggattccagcatgaattaccatgcccaggcttaagataccttttcttataaaccctcagttgcattcatttttaaatggttcttcattgattgattcattcattagtacattcattcattctttcatccatccatttgttcatttattcattcattctttcatcattcttaaattcattagcacattcatcatttatccattcctttgtgtgtacatcattcatttgctcatccattcatccatccattcgctcatccattcatccatccattcattattcatttgctcatttgtttctccattcattcctccatttatccattcacccatacatccatccagcacgtttatcaaaaccaccccacttgccagacacaggacacagcaaacacctccaaggaggccacttcctatcagcaaaattctcaacacgagattttragttggcaccctaggggccataccgactcatactgggtttgtgaaagctgaaattattggtccacatttaaaaactgggagattttccatgaaaatatggat

SEQ ID NO: 369671 - DNA, 545 bp, Homo sapiens
gctgaggggggtctagtaaccagtgaagatgtgtcaagatggttcagagtgtgtgctctgggccrccacattgcacacctggggcatatggtcatggggcaggggcacattccactcggctgcagttggccaggcccagtggctgtgacctgcttacagggacgcctctcctttctgcaaagacccttcccctcatgtccatcaccttctcaaccccagtggcagctcctcatgaccctgcccagcatttctggccctagttcctgaaactctcaaagatgtgtccagatctgcaggtctccaaagggcttggccaaaagaaataagacccttgggaccttgggggacaggggggatgttccacagatcgagagagagagagagagagagagagagagagagagagaaaccacagcaggtagaaggtccccagcccccactcctgctggagccacactgaaaacctggcttaatcaccaaccagcagatgaccttgggcaagccaccttggtaaactggagacaaccacacttcctacctcaaag

SEQ ID NO: 369672 - DNA, 545 bp, Homo sapiens
gctgaggggggtctagtaaccagtgaagatgtgtcaagatggttcagagtgtgtgctctgggccgccacattgcacacctggggcatatggtcatggggcaggrgcacattccactcggctgcagttggccaggcccagtggctgtgacctgcttacagggacgcctctcctttctgcaaagacccttcccctcatgtccatcaccttctcaaccccagtggcagctcctcatgaccctgcccagcatttctggccctagttcctgaaactctcaaagatgtgtccagatctgcaggtctccaaagggcttggccaaaagaaataagacccttgggaccttgggggacaggggggatgttccacagatcgagagagagagagagagagagagagagagagagagagaaaccacagcaggtagaaggtccccagcccccactcctgctggagccacactgaaaacctggcttaatcaccaaccagcagatgaccttgggcaagccaccttggtaaactggagacaaccacacttcctacctcaaag

SEQ ID NO: 369673 - DNA, 497 bp, Homo sapiens
ggctgtgacctgcttacagggacgcctctcctttctgcaaagacccttcccctcatgtccatcaccttctcaaccccagtggcagctcctcatgaccctgcccagcatttctggccctagttcctgaaaytctcaaagatgtgtccagatctgcaggtctccaaagggcttggccaaaagaaataagacccttgggaccttgggggacaggggggatgttccacagatcgagagagagagagagagagagagagagagagagagagaaaccacagcaggtagaaggtccccagcccccactcctgctggagccacactgaaaacctggcttaatcaccaaccagcagatgaccttgggcaagccaccttggtaaactggagacaaccacacttcctacctcaaagggccatccaaaggcataaatgaattaatacatcttagcgtgatgctaagtggtaccttacgattattggatataaatcttctagtacaacct

SEQ ID NO: 369674 - DNA, 497 bp, Homo sapiens
ggctgtgacctgcttacagggacgcctctcctttctgcaaagacccttcccctcatgtccatcaccttctcaaccccagtggcagctcctcatgaccctgcccagcatttctggccctagttcctgaaactctcaaagatgtgtccagatctgcaggtctccaaagggcttggccaaaagaaataagacccttgggaccttgggggwcaggggggatgttccacagatcgagagagagagagagagagagagagagagagagagagaaaccacagcaggtagaaggtccccagcccccactcctgctggagccacactgaaaacctggcttaatcaccaaccagcagatgaccttgggcaagccaccttggtaaactggagacaaccacacttcctacctcaaagggccatccaaaggcataaatgaattaatacatcttagcgtgatgctaagtggtaccttacgattattggatataaatcttctagtacaacct

SEQ ID NO: 369675 - DNA, 546 bp, Homo sapiens
agacaaccacacttcctacctcaaagggccatccaaaggcataaatgaattaatacatcttagcrtgatgctaagtggtaccttacgattattggatataaatcttctagtacaacctcaagagctgaaatcatgactaggttcacgtgccagccattgagaaagtccttcctgatcactcagcctgaagacacattccccacgacaggcatacccttcactggtaagggagagggaaatgaatattaattgaacacctactaagtgctggaccccatgctaggcactgtcacttctgttagttgaatttcatactcactttgtcccacgttccctttttctatacattcctgtctctcgtttttctctgtggtctggaattataattgcagacaatttctagatttttaaaaatcactttcatgagatgttttattcaacccaatacatccaaaatattaccatttcaacatggaatcaatatcaaggtggattcaaaagatattttatactctttcttttgtactaagtattcccagccggacg

SEQ ID NO: 369676 - DNA, 544 bp, Homo sapiens
tttttaatttccttcaagaactttttctttgcactcacaaattagctgttttgtgcaagaagcctagtgtttggtgtatcttagctttcaayatactttcctcactaaacttaaacatttctagtttttgatttaaagtaagagacatactactcttcacttgaacacttagaagccattgtaaggttattaatgaacctaatttcaatattgtgtccttagggaatagggaagctggaggagaggtggacagatgggggaatgaccagttttgatgaaagagtcagaacacacacacacttatggattggttagtcttagtcttatcatagtgtggtttaaggtgcccccaaaaaattacaagagtaatatcaaagatcactggtcacagatcatcagtacaggtataattacagtaaaaaagcttgaaatattgcaggaattattggcatgggacacagagacacaaagtgagcatatgtatttgaaaaaataggaccaagagacttgttagacacagggttgctacaaaccttcaatttgt

SEQ ID NO: 369677 - DNA, 544 bp, Homo sapiens
tttttaatttccttcaagaactttttctttgcactcacaaattagctgttttgtgcaagaagcctagtgtttggtgtatcttagctttcaacatactttcctcactaaacttaaacatttctagtttttgatttaaagtaagagacatactactcttcacttgaacacttagaagccattgtaaggttattaatgaacctaatttcaatattgtgtccttagggaatagggaagctggaggagaggtggacagatgggggaatgaccagttttgatgaaagagtcagaacacacacacacttatggattggttagtcttagtcttatcatagtgtggtttaaggtgcccccaaaaaattacaagagtaatatcaaagatcactggtcacagatcatcagtacaggtayaattacagtaaaaaagcttgaaatattgcaggaattattggcatgggacacagagacacaaagtgagcatatgtatttgaaaaaataggaccaagagacttgttagacacagggttgctacaaaccttcaatttgt

SEQ ID NO: 369678 - DNA, 548 bp, Homo sapiens
tgacacataaaattaaccatcacattgtatgaatataatgtatctgctatatgtttatacttattttcrcaatcttttctccctggttttctgaaactttacaaaaagatagaccagaggagaaaccataccctcgagtaggccctgctttctgggcaatttccttgtctgtgcccagagcactttactcaggtgacctcccttcccagggggttcaccttcatccctccctttgttgctcagaagtctgtggggagtttcagacaccaactgatttaagcataaagtaactaccaaatctacacaatcatatcgagtgcctcatctagcatttccacgtagatgggaaactatgggccagttttctgactggtatcatccctgcctttctgagccagaagcggacactacaccagtttccctcagttttatagtcattggaaattccctcaaattatggaagaccttaaccatctgttctagttttcagaggtgttttgtctttattaattgattaatgattggattaatcaattgttgtcaagaac

SEQ ID NO: 369679 - DNA, 548 bp, Homo sapiens
tgacacataaaattaaccatcacattgtatgaatataatgtatctgctatatgtttatacttattttcacaatcttttctccctggttttctgaaactttacaaaaagatagaccagaggagaaaccataccctcgagtaggccctgctttctgggcaatttccttgtctgtgcccagagcactttactcaggtgacctcccttcccagggggttcaccttcatccctccctttgttgctcagaagtctgtggggagtttcagacaccaacygatttaagcataaagtaactaccaaatctacacaatcatatcgagtgcctcatctagcatttccacgtagatgggaaactatgggccagttttctgactggtatcatccctgcctttctgagccagaagcggacactacaccagtttccctcagttttatagtcattggaaattccctcaaattatggaagaccttaaccatctgttctagttttcagaggtgttttgtctttattaattgattaatgattggattaatcaattgttgtcaagaac

SEQ ID NO: 369680 - DNA, 477 bp, Homo sapiens
agcacatgcaaaagtttgcttgtgttctttggacattgtttccctagaaggctggctacttctgaattatcaatggtactcttcctgctatatttttccggaaaaaaaatgtctggctagaaaattttaagtcaatacaaaagacacatttctctactaccacattggaaaaaatattgtgtttggcaaaggggagacatctgaatgccatcaataaataccgtcatctttggtctcagtaactagaactgagaaaaatatctgtgccatgaagtcctgtctgtttcctaattcagatgggttatttatccccttggctctctcctatagcatttcaatttattggctgagtcaaacatcttttttgtccttattccagcatcagtagaatatcttattattttactctttttagttggacagactggcaagatttagagtgattttaayaaaaattgagggcagatgcagcactca

SEQ ID NO: 369681 - DNA, 550 bp, Homo sapiens
cataaagataactatcttttatttcatgtgaagaatgtgaaggtaggatttgcgagatgttaatctttataataagccaatggttgattgaaaagttagaagaaaatgggacagcaggtatggaaaagcagtttatgactgatgagaaggaagaagaggaagagaagaagaagaagaaggagaaggaggaggaggaggagggagaggaggaagaggtatggggtgggaagaaagaaccrccaccacagtaatgccctggtttgtaggctgctttaacatttataaaatgctctcatcactagaatatacacttcttaaagatagaaatttgtcttaactatctttgattcctcagttcttaacataatgcctgactaatggtaataactcaataagtattagtttcatgactacactaaagaagagttgagtgactaaatttactattttatttaatttttactataattctatgagcttggatttattatcttggtttaatatatgaagatttcaagacatatacagagtaaataacttatgcaagatc

SEQ ID NO: 369682 - DNA, 503 bp, Homo sapiens
cagaacgtctgaaaagttagaacaactttggagacttcattttgcagaagaggaaatggagtcctatggtaaagtttctctctctctctctctctctctctctctctgtagctattgggcatctgaagccctcttacaaatgggaaattcctcagctcatgagtctcagtaggaagcaaagcttgattttcactctagatgctgaaaacctcaaactttcaccttctcagcctcccttgcagctaagtatgggcacatgaccaaggctgcactaatctgaagtacctattccaaattctgaattgggagcttgagatgtaaaraggtagggagattcccttctgatggtgggcagtggcagtcgtgatttcaggagctccaggcttgatgctgcaatgcagtattcttgctcagttctggcaacagcaatggtgtcctccctgactggttttgttgtgtggtttgcttacagtcctagttgcttccaggacctcatgttcctg

SEQ ID NO: 369683 - DNA, 609 bp, Homo sapiens
ggcagactcatgatttacatggacacacgtgaaggttgcctacttttgacacgtgttgttccttggtctccagagctgacttgcgtgatcattgctgaaggggtgggcaaggaggggtccttgctctacaggagccatccacagataggtggcacctccaagggaagataaagagggttgtatttttcttacagaatcccccaaattttaatttgaaataatgttttttaatttgaaataatgtggggattttttgcccttgagtatggcacttggcatgttgatagtaccggaatgtattctctcatccccaatattgccttgtttttcccyagccacctctttccttaagacatgaatttcatacaacaaaaaagtcattgctagttaaagtattttccaaattttacatgatgataacccctactcatgacatcatgatggatatctattaagttatgacatataacatcgaattaaaagcatggcctctggatccagacaacccgggttcaaatcctggccctaccccttgctagtctgcactgtgactttggacttcatctctcagtgcctgttttctcatctgtgacatctacttcatataac

SEQ ID NO: 369684 - DNA, 483 bp, Homo sapiens
agaatgtaaaatataagatggtgtaaatcattgaatgaaagagaatcgttttcatctgattggaaacttagtactaaatctctcaactgagatgagttccagtagtgctctcgcagatttgaatgattctgacctgattgctgcttccttcaaatggctgagccatgagtcctcactactgcctgataggttctcatctctttcttttttcaggaagttcgatattttagatttttagcacacagagcaactccacaggtcgtcttctgttttcttcttctttttttgttttttgagataggatcttgctctgttgcccaggctggagtgcagtgacacagtcatagttggctgcagcctcatcctccttggstcaagtgaccctcccacctcagcctcctgagtagctgggactacagatatgtgccaccatgcccagctaattttttattttttgtagagacagcgtctccttatatcgcc

SEQ ID NO: 369685 - DNA, 597 bp, Homo sapiens
  misc_feature (1)...(597): n = A,T,C or G
gactaattagccagtgccagagctctacacgagtcagactattctgattgccactttgcctctgctgtccattacggtcgctacacccaccttgcctttgatggttgagtgctaccacttggtccctgacacctcgggatccaattattcccantgtatttaaattttgtaattgagtgactkcagttcccgctgttgcatctgacatacagagaagagcaattacaaggctcttcagagatgcaggtgctgccctcacgaatctatttgcaaggcattggtcaagggtatatcttctggacccttccagctgggatgagtacatctaaagtgactaatccactccaccatcccaatctctctaagccttttgatcccttcctctacattaaaccaagggagatcaggcatttccagcttgttcacagtgggccatcttttagtccgaatgtccgctaaccaagcaaataaacctttaactccctgagctgcaacattaaatatagagttcctatttagtgggcccaaatcaataaattcagcctgatcctactctatgttcctttcaccattatcccacacccttaatagccattc

SEQ ID NO: 369686 - DNA, 575 bp, Homo sapiens
tttactttgactctatggctgtcattgcatgtgagatgggtctcttgaagacagcatacagttgtgtcttcctcttgcttctacatccarcttgccaccctgtgccttttagttggggcatttagcccatttacattcaaggttaatattgatatgtgtgaatttggttctgtccttatattgtaagttgattactatgcagacttgattgtgtttttgctttatagtgtcagtgatctacatacttaagtgtgtttttgtggtccctgataatggtctttcttttccatatttagcactcttttaaggacctctcataaggcaagtctgatggtaatgaattcccttagcatttacttgtctgaaaaggatcttgcttctcctttacttatgaagcttagtttttctggatatgaaattctttgttggaatttcttttctttcagaatgctgaatataggcccgaatctcttctggcttataggatttctgctgaagggttcaatgttagcctaatgcagttccctttgtaggtgacctgccccttttctctggctgcttttaacagtttttct

SEQ ID NO: 369687 - DNA, 587 bp, Homo sapiens
gtctccttgctttgaatctgagcactgtttgtaatttgctagaccaatagagtgtggtggaagtgttactaaataacttcttctgagataggtcataaaaatgccatatgcttctgttttgttcttttgtggtgacagctcttggaacccaaccaccacactgtaaggaagcccaagcatcctgtgaagaggcccacattagaagcacttgcttgccatgctgcaggtagatctttcaatccccagtagagattccttacctgatacttcatgagacagagatgaaatatcctkgtcatatcctgcccaaatcatagattcttgagtaaaatgaatgatcattttttgttttaaggtagtaaattttgaggtggcttatttttaagcaattaaataatggaagctcaattatatcaagatatcacaccactctgttttagcttccactgttgctgctcagaagtaatctgtcagtctaaattatgtccctctactctttatctttgtgcttctcttaaggttatactttgtctttcttgtttttcagtttctttctgttgtatataggtgtcaatttattttaattt

SEQ ID NO: 369688 - DNA, 519 bp, Homo sapiens
acatttgtcttatttcatgtcacagggaaaaaagaaatggcttatattgactgactaccatcaatgtgccagagaggtcttcttatctcatcttagaggtgagagaacaagtcaacccgctggtaaatgggccaatcagaaatgaaatcaggtatagagtaccaccatatttatgttctttccactatgttgctccatatactcattatatatgtatgaagaattgtttttytacagtatcaaaccagaagcaggtcaatgatttcctggacacacacacacacacacacacacacacatgcctaatatgaaatctgttgttttttttttttgaaggagaaaacctgcctaagcatctaaggcagaagggtctgactgtcatgtgtatctgctaagaggctttctttgggtatttttaatacacctacacagtatttttaagggcaaagcacctaggttgccattgtttggtcagttccagaatcttagcatctcaggacaggccactcttaacattta

SEQ ID NO: 369689 - DNA, 573 bp, Homo sapiens
cctaggttgccattgtttggtcagttccagaatcttagcatctcaggacaggccactcttaacatttatattacccacagacctgtcccagaaatttggatttagtcctttgggattctgagaaaatcgatggggaaagtttccaattatgtttggaatttttttccattgttttcagatacaacctaaatatctcataggtttccagaacagtttatgtaattttctggtgtgttgtttgtctttgtttttggcatcacccgagcttgagagatgagctgaagtttaaaaccatggaagcaagcaacctcatctccagtcaactcgatctttctcatctgggaaccagcatcccctcggccaccaggcctgggatggaagtgaaatcattaccgctgtctttgatgatcaggaaaaggaacttcattagctactttctgtcctcatacatctwtggggcacagggttcagaatttattgcagctgtagcacagaagttagggagtatgaaaggaagctaggaaatatgatttcatttccctatccatttctcattgaaaggatgatggattt

SEQ ID NO: 369690 - DNA, 480 bp, Homo sapiens
gcaactctacaattttctgtgctatccagaacagcaattcagagggaatgagctgaaatagccactttttttkgtttgagagagaggtggtaggtgcttatcacacgcttacataaatgataatttaacataaggtgaagagcctatgggagaactacatgggctggtgatacttgaaagttaaaacacttagattagaatctacgtcataagcatgctattattttgatgtctgtttcaaaaattttgtatagtttcctttaaaaatttagtctaagttccagtgacctaatatataaaaaactctatgtgtgtgtatgtatacacacatatatacatatatggtatatatacacacgtacacataaaaggttatatataaaaggatatatgtaaagatccttttatatatttgcatatcgatatccttttagatctattttcttctctgtgtctgactatatatatatgcttatatgt

SEQ ID NO: 369691 - DNA, 480 bp, Homo sapiens
gcaactctacaattttctgtgctatccagaacagcaattcagagggaatgagctgaaatagccactttttttggtttgagagagaggtggtaggtgcttatcacacgcttacataaatgataatttaacataaggtgaagagcctatgggagaactacatgggctggtgatacttgaaagttaaaacacttagattagaatctacgtcataagcatgctattattttgatgtctgtttcaaaaattttgtatagtttcctttaaaaatttagtctaagttccagtgacctaatatataaaaaactctrtgtgtgtgtatgtatacacacatatatacatatatggtatatatacacacgtacacataaaaggttatatataaaaggatatatgtaaagatccttttatatatttgcatatcgatatccttttagatctattttcttctctgtgtctgactatatatatatgcttatatgt

SEQ ID NO: 369692 - DNA, 572 bp, Homo sapiens
cattcattcatttctttatgtcatagactcatggatgcttattgtattctcttgataaaaataatctatcattaacttgctcaracttgggacattgggagctctttcatgttggctcctgtgagctttggacatgcccccattcttttttgagcacttccttactttctggcaccactagatgctctaggcttatcttaagttttccctgtcccgtcctgggattcaactaattctacaaggaggtctggtttcttctactgtaaaatggcatttagaaacagatatctgggctgtaggtttgttcattattattgggaagtcattgagtctagaccccatcagtttgattcatgcgttcaccaacaccatgctgtcttgattaacgtggcttcacagtaagtcttgaaattatgtagtgtgagggttctatctttgttattttatcaaaattgctttggctattgaggtttctttgcttttaaatatgagttttagaatcagcttgtcattatccacaaaacaacttactaagatttttattaggtttgcactgaacctatacataaatt

SEQ ID NO: 369693 - DNA, 592 bp, Homo sapiens
tcatattttctaatactttcctttattacaaataacattgggctaaaataatgttcagaagtcaagatttgttcatgttttgcctgctttggccttccattgactcaattrttaatattctccccttagaaggctgcttgaagcagatgagaatgggaatgacagaagacttggtggggttgcaagggtgtcttgttgcccatcaagagatcttatcaatgcctgttcctgaaattagctccaactgcatattgtctcctaaatatttgggcactgagggatcgtaacttcttgaacaaagcatcaaagtgtgtattctaccttattgattttaggaagccaattggcaacttaaaaaatgccaaaggaaatatggggtttaattaatttcttcattggaagtatttcttctttggatattatattcatgtttctaacagttttttaaataatattctttgcttattttgtttcctctttgcggctcatgccacagcatttctagttcaattttttcttctattttttcctgactttctcgaacaagttctaacatcacgtgcctcttaaaaatgcacatactgcaaaaaag

SEQ ID NO: 369694 - DNA, 586 bp, Homo sapiens
  misc_feature (1)...(586): n = A,T,C or G
ctggtgaaatccaaataaaatagttnggttacagtaatatcttagtccattttctgttgcttattacagaataccttaaactgcattacttgcaaggaaaaagaatttatttcttactacagaggctgagaagtctaaggtggagaggccatatctgatgtgggccttcttactggtggggactctctgcagggtcccaaggtgtcacaggacatgacatggtgagggggacgtgcatgttagctcaggtctctcttcctcttcttgcaaaactaccagtcccatgctggtagtaasccataagcccactaattcattcattcatacatggattaatccattcatgagggcagagtcctcatgactcaatcacttcttaaaggccccacctctcaatactaccatatggaggattaagtttcaacggtgagttttagaggagataaatattcaaatcatagcaagtaaatagaccaaggtcaatttcctagatgtgatcactagaccacaattatgtcacatgttaataggagaaactgggtaaatagtacatgagaaagttctgccactgttctgtagatataaa

SEQ ID NO: 369695 - DNA, 586 bp, Homo sapiens
  misc_feature (1)...(586): n = A,T,C or G
ctggtgaaatccaaataaaatagttnggttacagtaatatcttagtccattttctgttgcttattacagaataccttaaactgcattacttgcaaggaaaaagaatttatttcttactacagaggctgagaagtctaaggtggagaggccatatctgatgtgggccttcttactggtggggactctctgcagggtcccaaggtgtcacaggacatgacatggtgagggggacgtgcatgttagctcaggtctctcttcctcttcttgcaaaactaccagtcccatgctggtagtaagccataagcccactaattcattcattcatacatggattaatccattcatgagggcagagtcctcatgactcaatcacttcttaaaggccccacctctcaatactaccatatggaggattaagtttcaacggtgagttttagargagataaatattcaaatcatagcaagtaaatagaccaaggtcaatttcctagatgtgatcactagaccacaattatgtcacatgttaataggagaaactgggtaaatagtacatgagaaagttctgccactgttctgtagatataaa

SEQ ID NO: 369696 - DNA, 586 bp, Homo sapiens
  misc_feature (1)...(586): n = A,T,C or G
ctggtgaaatccaaataaaatagttnggttacagtaatatcttagtccattttctgttgcttattacagaataccttaaactgcattacttgcaaggaaaaagaatttatttcttactacagaggctgagaagtctaaggtggagaggccatatctgatgtgggccttcttactggtggggactctctgcagggtcccaaggtgtcacaggacatgacatggtgagggggacgtgcatgttagctcaggtctctcttcctcttcttgcaaaactaccagtcccatgctggtagtaagccataagcccactaattcattcattcatacatggattaatccattcatgagggcagagtcctcatgactcaatcacttcttaaaggccccacctctcaatactaccatatggaggattaagtttcaacggtgagttttagaggagataaayattcaaatcatagcaagtaaatagaccaaggtcaatttcctagatgtgatcactagaccacaattatgtcacatgttaataggagaaactgggtaaatagtacatgagaaagttctgccactgttctgtagatataaa

SEQ ID NO: 369697 - DNA, 498 bp, Homo sapiens
aacatggggagtttaattgcagagaaggaagttagaggaatctttgaataaagtgtctatatcactttggaaaatttttgattgcttgggaagataaggctggcagatgtgggatctatatttaaagaaatggataaaattgcatgctatgagaattgaatggggaaagggctcaagggagttggagagctcttaaaactcaaattctgagcatttagccccaacacagaggraaattgagagaaagcaaagttgtattcccaggacagaaaaaagctttaagaattgtgccaatgagactaaaaccctaaagaccgtaacagtggctttctaaattctcttcggaagaaaatgatcattgattcattgtttgagcacacctagtataattgcgttatattactagatggcagttaaatcaagaccctcaatggcaattttttgttgttttatttgcattttaaacatagggaaaccccagtggtagatgaggactga

SEQ ID NO: 369698 - DNA, 365 bp, Homo sapiens
ataaaattgcatgctatgagaattgaatggggaaagggctcaagggagttggagagctcttaaaactcaaattctgagcatttagccccaacacagaggaaaattgagagaaagcaaagttgtattcccaggayagaaaaaagctttaagaattgtgccaatgagactaaaaccctaaagaccgtaacagtggctttctaaattctcttcggaagaaaatgatcattgattcattgtttgagcacacctagtataattgcgttatattactagatggcagttaaatcaagaccctcaatggcaattttttgttgttttatttgcattttaaacatagggaaaccccagtggtagatgaggactga

SEQ ID NO: 369699 - DNA, 365 bp, Homo sapiens
ataaaattgcatgctatgagaattgaatggggaaagggctcaagggagttggagagctcttaaaactcaaattctgagcatttagccccaacacagaggaaaattgagagaaagcaaagttgtattcccaggacagaaaaaagckttaagaattgtgccaatgagactaaaaccctaaagaccgtaacagtggctttctaaattctcttcggaagaaaatgatcattgattcattgtttgagcacacctagtataattgcgttatattactagatggcagttaaatcaagaccctcaatggcaattttttgttgttttatttgcattttaaacatagggaaaccccagtggtagatgaggactga

SEQ ID NO: 369700 - DNA, 607 bp, Homo sapiens
gtcatgaaattctctagaggtgaggtactagttaataataacaggatactttgtttccctttcaaggatatgcagttggaagcaaaatatccagaaagcgtatttcctggtggggattggtgagatgttttggaaaatgggagctacttgatctgcttggaatctgcctctgtaagggaccactcaatgggcaagtcctctagttccctaactccagaaaactgaagtcctgcagtaaggaaagaatgagtcttcttcactctgctgggatttgttaatgtaggaagtttaataaggttaaagggccagaattttataactttgtgaatagtaactaatttccaaagaactatatttttaattgaacagaatccaaggtgtcctgtgaaggtaacatttttagaaatagatagcaatatgatatctttctaaggagagggaaaatattacttgattcagtttgcacataaaaccaacgagttagggaacaaggggaatgttagtatcataaaattgactmtggtaggagaatttatactttgtaaataggaaacactacagttaggactttttaaacagatagttgtcaaatatttaccagtataac

SEQ ID NO: 369701 - DNA, 575 bp, Homo sapiens
ttaacttatttagaacaaaggagtttatctaatagagagaatatttaacaaagctaatcacctatataacggcggatctcaatgtgtggtccccaaaccagcaatatcagagttctctggaaacttcctagaaagccaattctccggccccattaaaatcagaaaatccagagatggggctcatcaatctgttttaagaaaccctccaggtaattctgatgcattctaaaatttgagaagctctggtctctaaaaggtggctggcgaagtggatttgaaaataaatacctttacaatgtgtttgtttaggtagtgactaagtaactttgcagtggatccactttttctgtgaggactaacttgaatgattttccgatttacctgtatcaatggtaggtcctgttactcttatgtacaagatgaggaaacaaggttaggtgccttgcacaaggctcccctgagctgactcagtgtggacgtggctattcatacccaggaacatctgaggctaagcmatggtcactcttccctggattgtagggttctgagaaggagttggagacttcttcgtaaag

SEQ ID NO: 369702 - DNA, 574 bp, Homo sapiens
ttaatgaaccactagtagatgggatgggagcagacactatcaataagcttgcatggtttaggcttgctttctttgcttctgccatcaccaagctagaaatagggttcaggtattcactgtgtccagaatgaggtatgtggtttagatccaaacctacctatgcctggaaccagatcaggtgaagttgctgagcccagcaagccaattccagccaaatcatcaacctgtacactcatgagtgataaaaataaatgcttattattgtaatgcactgagattttgtggcttttgttacccaacattattacagtaacaactgactgatactatatgtctaagtaaagctttagtggtaatctctgggtagtagaatgaagaatgacttttattatcttctttacagttaattgaatgattttaaaactattacccactactttttcaatttttaacakgtctttagataaagcaaataattactgttacattaatgttttgtgtttgtattatatacagaattatcttaaaatcaccattgatttggaactttgaaattatagattattcaacactt

SEQ ID NO: 369703 - DNA, 572 bp, Homo sapiens
  misc_feature (1)...(572): n = A,T,C or G
ctttattacaaataacattgggctaaaataatgttcagaagtcaagatttgttcatgttttgcctgctttggccttccattgactcaattgttaatattctccccttagaaggctgcttgaagcagatgagaatgggaatgacagaagacttggtggggttgcaagggtgtcttgttgcccatcaagagatcttatcaatgcctgttcctgaaattagctccaactgcatattgtctcctaaatatttgggcactgagggatcgtaacttcttgaacmaagcatcaaagtgtgtattctaccttattgattttaggaagccaattggcaacttaaaaaatgccaaaggaaatatggggtttaattaatttcttcattggaagtatttcttctttggatattatattcatgtttctaacagttttttaaataatattctttgcttattttgtttcctctttgcggctcatgccacagcatttctagttcattttttcttctattttttcctgactttctcgaacaagttctaacatcacgtgcctcttaaaaatgcacatnnnnnnnnnnnnn

SEQ ID NO: 369704 - DNA, 549 bp, Homo sapiens
  misc_feature (1)...(549): n = A,T,C or G
caccaaatccatggtcaatagatgaagttagggagatgagaagcttaaagtggtggtgagggaatatggaatgatttaaataaaaattatttttcaccttgggtggcagaatcagagtacatctgtaagcataaatcttaccattgtctkgttcacaagcagagtttctcaatcgtgtccttaccantggaaaactctttactgtagggcctctccgtgtgcattgtaggatgttgagcagcatcactgccctctacctaccagatggtagttgcatccccaatctagttatgacaaccaaaagtgttcccagacattgcaaatgccccctgcgcggcaaaaccaccctcaggtgagaaccacaatcttggatgtgttaagggtagaagtccacataattgatttgcccatagatggagctctgttcaacaaaggggtttttagaaagggtaaagcaagtttaacaaagggaataacagttcatcaccacttaaatcaattgtaaattacccctaggttttgcccccttctgaatcagcaggaaattga

SEQ ID NO: 369705 - DNA, 580 bp, Homo sapiens
ttacaaacttctcaaatgctgagatttggaaagtcctcagacaattctactgtctgccaatttgtctttcagactacctgtcctcaagaatagcaacatctacsagttatgacatttttgagtaaagatgaaagttacataaagcccatgaatacaaattcattcttgataaaagtagacttgcatcaaacctcacggaaaagcaagtgtcataaagtcataaatatgcatcaaacctcacggaaatgcaaagtgtcataaagtcataaatgtgccaatattagagtttcacatagagaataatgcaagcagtaaaattcatcagcatcattaaaattcatctgcttatgtgccactcttaaggatgacctcatttgtgacctcaagatagagaaccctggccatcaaactctgaaaacacccttgttgaagtagttaggtttgagaaatgtaagatctcgtgcaagattacagttggagagcaaagacatgaatgcactcaagttatttatcaatatactttacaaccaaatacagacaccaaaataagtgattattctattggtgttttatcatcctt

SEQ ID NO: 369706 - DNA, 574 bp, Homo sapiens
ttagtgttaaaaatttgccacctcatcttctcttttcattcctttctatccatgtcctgactcaatattttattgtttataaccttatggtgtatgtgtatgtaacagggtgctgaatatgacttttcctggcctcagcagagactcctaggcacatttttaggcactatccattccaagttcttgattagtscctctcaaattttaaagtgtataagaatcacctggggatttggtacaatgcaatgtttgtgtatctaacaagctcccaggtaaagccattgcccttggtccaaagactacactttgaatagcaagagtctaaagcagccatgagtcctagccaagaaactgtgaaacagctttgcaggtgtggcccttttatttccctctagcttgcaaaacagaagacagaattccttgggtttttgaaaagtccagtcataaggaccttctctgcagacagtgctctgatttgctgttttccctttcctggaagccagtcgaagaaggttttaagagaactccatggaaaggctggctgtataccttagaatttagaagacaagaggat

SEQ ID NO: 369707 - DNA, 602 bp, Homo sapiens
ttttagagacaataagtatttcaaggtgaggtcttataatgattataagttgctatcaaaccattcagaagaaaaaaaaggagatcaaactagagagatatagaaaacacagcaaaatattaacagttggtgaatctaaggaaagagaatacaggtgcttcatgagactattcattctgcttttttgaaggtttgaaagttttgtaaataaaaagttggagaacacgatccctaagactgtgtctcttttctggaatgccacatgcagaactcatctcacagatcagcaattgtcttctgagtgtccaccaggtgcagtcgtcttcttgagacatgttttatgttttccttaattctattttgtctttcccagaatggtgacttggctttgcacacactcagcactttggaagtactgctataatttttaaagtaaattctattttaaataartgctgcttgctagatgagtcaccttggacaatttacttcacatttgagagtgtatcatctccccagttcctgacactcctatttgtgaaaacttcatctccaagtttctcctcttgggtggttggtttctgaagatgcccagagctcat

SEQ ID NO: 369708 - DNA, 565 bp, Homo sapiens
acgtggacattgagagaataacatatcaaattaatgtgtcattgatctcaaaaaaagggaaaatagattcttttgtcaactttaaatctctggcagaaataaacttttgaataatattaaagtttggtccctccacggatttaaagaaaacacatttctccacttaacatttcagagacaacctaactgaaatatacaaggaggggtggactccaacratgggtgtggtcccattttaatctgttaaaacaacaaaggctttagcatcatctgatctattatctctgcaataacactgaggtcccacagataactgaaatattccataaatattaaatgttccacacaaaaattttccatattcccaggcaacaaatcagtggtcatacacaaagaaagtactatagatttctataatattaacacatttatttagaatattttactaatcccttaaattttttgaaaagtaacacctgggtgaatggactttgtctcttgttcctgcttcttcccactcaccctctgttataaaaaatagtcaaaaggtaggaagggtggggag

SEQ ID NO: 369709 - DNA, 543 bp, Homo sapiens
actgctgctgtttcaaaggaaagtcagtgctgtgaaaattgacctggaaaaaagctgtaccatgccctcctggcaggaatccttaaaattgatgactgcagggaactttttacagaacttacaggttggtagttcagtggtgatgggctaagagggaactcattcttcactggtgtatgagtccttttcgtagaataagtttctaaaaaaagaacttactctacatacatgattttttcagagtaaaactttgtctcaaatataaaacattataagcattagagtttttcctgacagattttagttgtattaaagcatcatcagtgttatgtatacttcaataaaagttaaaaaaatcattttaagaagacaataagtatgtatttatattatattcacatgaatacaaatatttgtattttgcatttctcagtaattttttagtattaatttacagcttttttaattttatgagatagaacttaacatgaataaatrcacaaattttaaatgtataacttgatgaatatttacatatgtata

SEQ ID NO: 369710 - DNA, 556 bp, Homo sapiens
cgtagccataacagcactgagggtaattatattaccctggaagcttggtggaatcaagtctaatgcctgatctactccttagattataaatctcccacccttctctatgctctggatcaaaagggaaaaagctagactaacaatgaacagtaagtggggatgaattaatcacttggttgcatcactttaaaagccagcaacataattaaggttgtaaagaaagaggttaaaaattaagatttttaaaaacctttttaakttgaaacaacagcacaacaaaaacaaaaccaaaccctaaacctatttcttattttaggtacaatatgccattcaaagcccagattcaaaaatgggtgcagtacctttccaactcaacagacatcatcgagagctggatgacggtgcaaaacctgtggatttatttagaagctgtctttgtgggaggagacattgccaagcagctgcccaaggttttgtaatcttctttatgatttcatcagatttttcagagaaagctctcagagcgattacccccttaaataatgcaataatattc

SEQ ID NO: 369711 - DNA, 621 bp, Homo sapiens
ataatacatacatagcacataatggacaccaagggtctttgatgagacaacaggatggtcagtcaagatggctgtcagtgctggaacatagccattctgagtttctttgttagtggtgttggtagtgatgacagcatcttgtgtactagcatttttgttatgtttttcaaatcatgtcctcccatttttatctcatttaatctttgaagtaacttgcaaggtaggcagggtgggtttatttatttatttatttatttagacaaagtattgctctgtcktccaggctggagtgcaatggcatgatcatggctcactgcagccttgaattcctggggttaagtgatcattccacctcagcctcccaagtagctgggactacagacatgcaccaccatgcctggctaattttttgtagagacaagttttcaccatattgcccaggctggtctcgaactcctgagctcaagtgatacacctgcctcggcctcccaaaggttgggattacaggtgtgagccaaggcaccctagtgccttacctatctttgttctcactttagagcattcaagtcaaatgcctaaagagatcacagaggaaaagtacctgagtttctaagtaaccag

SEQ ID NO: 369712 - DNA, 621 bp, Homo sapiens
ataatacatacatagcacataatggacaccaagggtctttgatgagacaacaggatggtcagtcaagatggctgtcagtgctggaacatagccattctgagtttctttgttagtggtgttggtagtgatgacagcatcttgtgtactagcatttttgttatgtttttcaaatcatgtcctcccatttttatctcatttaatctttgaagtaacttgcaaggtaggcagggtgggtttatttatttatttatttatttagacaaagtattgctctgtcgtccaggctggagtgcaatggcatgatcatggctcactgcagccttgaattccyggggttaagtgatcattccacctcagcctcccaagtagctgggactacagacatgcaccaccatgcctggctaattttttgtagagacaagttttcaccatattgcccaggctggtctcgaactcctgagctcaagtgatacacctgcctcggcctcccaaaggttgggattacaggtgtgagccaaggcaccctagtgccttacctatctttgttctcactttagagcattcaagtcaaatgcctaaagagatcacagaggaaaagtacctgagtttctaagtaaccag

SEQ ID NO: 369713 - DNA, 621 bp, Homo sapiens
ataatacatacatagcacataatggacaccaagggtctttgatgagacaacaggatggtcagtcaagatggctgtcagtgctggaacatagccattctgagtttctttgttagtggtgttggtagtgatgacagcatcttgtgtactagcatttttgttatgtttttcaaatcatgtcctcccatttttatctcatttaatctttgaagtaacttgcaaggtaggcagggtgggtttatttatttatttatttatttagacaaagtattgctctgtcgtccaggctggagtgcaatggcatgatcatggctcactgcagccttgaattcctggggttaagtgatcattccacctcagcctcccaagtagctgggactacagacatgcaccaccatgcctggctaattttttgtagagacaagttttcaccatattgcccaggctggtctcgaactcctgagctcaagtgatacacctgcctcggcctcccaaaggttgggattacaggtgtgagcyaaggcaccctagtgccttacctatctttgttctcactttagagcattcaagtcaaatgcctaaagagatcacagaggaaaagtacctgagtttctaagtaaccag

SEQ ID NO: 369714 - DNA, 556 bp, Homo sapiens
cgtagccataacagcactgagggtaattatattaccctggaagcttggtggaatcaagtctaatgcctgatctactccttagattataaatctcccacccttctctatgctctggatcaaaagggaaaaagctagactaacaatgaacagtaagtggggatgaattaatcacttggttgcatcactttaaaagccagcaacataattaaggttgtaaagaaagaggttaaaaattaagatttttaaaaacctttttaagttgaaacaacagcacaacaaaaacaaaamcaaaccctaaacctatttcttattttaggtacaatatgccattcaaagcccagattcaaaaatgggtgcagtacctttccaactcaacagacatcatcgagagctggatgacggtgcaaaacctgtggatttatttagaagctgtctttgtgggaggagacattgccaagcagctgcccaaggttttgtaatcttctttatgatttcatcagatttttcagagaaagctctcagagcgattacccccttaaataatgcaataatattc

SEQ ID NO: 369715 - DNA, 628 bp, Homo sapiens
tttttcagtaatattgatgttatatgaaaactatttttatgttgtcttataagtcaaagaagtaattatgttaattgtattaagattcaatcttttttaaagtaatggaaaataaagtaaaaaataaatgaaatcataaaaaatacagtccaaattattcctttgacttcagtgacaatgcagtgtctttgactataatctcacttcttgggtgattataaatataaaatatcaatttgaaattttattgatttaaggagagctgttgacgttaggaagattacacacaggaagggataggatatcccaaacagaataggaagttgatgttggaaaccatctaaggaatgtggggctgaaacagaggctgaatctcttcagtggggatgagtcatgacttcataggtttgttgattcktcttgtgaaaggagactctgaacagtaattgatcatgcaagggaaagacaaatctttgactccaaaaattcatcagctgttctgtgtcctagggatacagaggcaatgagggaccttattatcacacataatcgggtctcatgaatgttcagttgtatatctgctagaccttcaggtttgtttgcttcagaaacacgtgtaaaccttaga

SEQ ID NO: 369716 - DNA, 628 bp, Homo sapiens
tttttcagtaatattgatgttatatgaaaactatttttatgttgtcttataagtcaaagaagtaattatgttaattgtattaagattcaatcttttttaaagtaatggaaaataaagtaaaaaataaatgaaatcataaaaaatacagtccaaattattcctttgacttcagtgacaatgcagtgtctttgactataatctcacttcttgggtgattataaatataaaatatcaatttgaaattttattgatttaaggagagctgttgacgttaggaagattacacacaggaagggataggatatcccaaacagaataggaagttgatgttggaaaccatctaaggaatgtggggctgaaacagaggctgaatctcttcagtggggatgagtcatgacttcataggtttgttgattcgtcttgtgaaaggagactctgaacagtaattgatcatgcaagggaaagacaaatckttgactccaaaaattcatcagctgttctgtgtcctagggatacagaggcaatgagggaccttattatcacacataatcgggtctcatgaatgttcagttgtatatctgctagaccttcaggtttgtttgcttcagaaacacgtgtaaaccttaga

SEQ ID NO: 369717 - DNA, 643 bp, Homo sapiens
ctacccttcccagcctctagtatcctctgttctacttttcacttctatgagatcaacattttttttttagcttacatatgtgagtgagaatatgtagtgttttactttctgttcctagcttatttcacttagcataatgacctccagttccatccatggtgctgtgaatgacaggattttattcttttttattgctgaatagtattccattgtgtatgtataccacattttcttcatccattcatctgttgttgggcacctaggttaattccatatcttgtcaattgtgcatagtgctgcagtaaacatggggatgcagacatgccttcgatacactgatttcctttcctttgaataaatgcccagtrgtgggattgatggatcatgtggtagttctatttgtttcagtgtgtgtatccatgtgtgtacttttttgaggaacttccatactgttctccatagtggttgttctagtttacattcccacacacagtgtttaacagttcccttttctctgcatcttcatcagcatttgttattttttgactttttgataatcgccaacccagctggggtgagatgatatgtcatttggttttgatttgcatttccccgaccattaatgatgttgagaattttttca

SEQ ID NO: 369718 - DNA, 575 bp, Homo sapiens
gattgctcacacattcagttgttctgaagtggacaacaaaaacatttttaaggtgtcatttttgttacattgctgtcagagttacgtgggttacatgagctttggtaaatcatcagtaaaaagataagggtcagtaccaaatggaaatgtttgttgtggttagcttagggtataaccacaggcataagtgayacagcatggaacccttggggtgtgttcaaggtagatgtaagtaatatactgatttatagaagagaatccttcaaacatctagtactactaacatttctagataaagtgtgtattgaatattagcttgtgctaatattgggcaattcttaatattgaaaattgatgctcatttagtgaccctctgccatgtcctctatcctgttttgtgtgctttacacgcatacattgtgacacaggtttaattattcttattttactaatttggaattagagacctagacaaatgaaatggcttgtctcagaccttgtccaggggaagctaggacagaatccagcatctgcctggttccaaagttatattactgatgattaaatgagttttt

SEQ ID NO: 369719 - DNA, 557 bp, Homo sapiens
tccttcattctccagagggagtgttaaaaacttatggagtaactacctccaagtccacttaggtactgtggaatcatgaaaacaaccagattcaatgatttattgagaaaagaaaaatgagtttcacagttcggggcactgagatcacctttcctttcagtttttcttctcagtttcattacttttatcctgcccaactgaattgtgaaatggttgccttatttaaggacastgtggaaagaaatgtttgagtagtctctttcttatctttttccatagaaagctatatttgcttcaatgctgaaatttaagtaactcttttttgtaactttatcttcatccgatccctttagcttctccgatccctggacttaccacagccatggcctcatacctgttctccttacatttcttcttgtatactctagtctactctgcacacactagaagaaatgcaaatatggtgccattcattggcttttcaagtcctgcagtatctgcccatggcccttatagtgcccaggtcctaaacaaggtttagaaggcctgttggataa

SEQ ID NO: 369720 - DNA, 563 bp, Homo sapiens
caacaggtcaggcgcggtggctcacacctgtaatcccagcactttgggaggctgaggcaggtggatcacgaggtcaggrgttcaagaccagtctggccaacatggtgaaaccgcatttctgctaaaaatgcaaaaattagccaggcatggtggtggcacctgtaatgccagctacttgggaggctgaggcaggagaatcgcttgaacttggaaagtggagcttgcagtgaactgagatcgtgccactgcacccagcctaggtgccagggtgagactccatctcaaaaaaaaaatactcaacaaagggaggttggcacaggtgtgcaggttatttgttcattttctcccccattgaaaggctgaatctgttgcattgggaccacatattgggatgaacaagttctgcagagctgtgtgaagagcagtgtatgaaaatgcagcactccacagtggggtgttggctttctttaaaggctggcaggctgtgcagaaacctggcttgccacacctgaattaactcttacatcagttattatgggtgtcctcctgtccctagccagtga

SEQ ID NO: 369721 - DNA, 525 bp, Homo sapiens
atgtgcatcacatgcaccgtggggagtccatgaaatgttatctgtagaatggcttgggcagtctatggcctgtagtcactgctaaatgaaaggcagcaaatataatgatacttattattattcaggtcatcctgaatgttgaaaataaaaaggaaaacttccarttgtatgagagggtcattaaatgtaattggaatgagatggctgatgtggggcaagcttttgtgattatggttccaggggaaattgagatatatgacttttcttatgaaaagaggcagtgctccactttttttcccctcagaagtaactaggcttagttaaaaatatttttctttcatttaacctcttctaatactgaggatggattttaagttaatttgcagatttttaaaagcatgtttaaaaacatgctaagtatatcttgaaaatgattggaaatgactaggcagtgcttctctagatttgataactgtaaatgtgaactatcaaaagtttctgagtgacaattgcaaaataatgttt

SEQ ID NO: 369722 - DNA, 551 bp, Homo sapiens
aaggaactaaaatagaatagttataaggctgtctcaggggtctgggcaagccatgatgctgtcatgagtggcagcagtgagaatggagaatrgagagtggaaatggaaaagatcatcaggaagttggagcttcagggcttggtgcatcctggtttctggcttgggaaactatctagatggtgctgcttcttatcaagacaaggaaccccaggggagttgaccacagatgtgggtgtagtgcagggagaaagcataattagcacatgaaaagtgaacatgaagaaataaacagaggtgatttggagaggtgaaacagaatttcaggattaaccaagataaggttagaaccaggagaccagtttgggaagttaggttgggctgaaaatcatttgacgttaatttctaggtgtaggagcaagaagtcaggcactgataagcagaacatgctgctgacctgtctcattgagggaggcccatagatacctgctaggatgaaggctgaaagttactaagcattgggtttggagattcaaatatttaagctgttgtta

SEQ ID NO: 369723 - DNA, 551 bp, Homo sapiens
aaggaactaaaatagaatagttataaggctgtctcaggggtctgggcaagccatgatgctgtcatgagtggcagcagtgagaatggagaatagagagtggaaatggaaaagatcatcaggaagttggagcttcagggcttggtgcatcctggtttctggcttgggaaactatctagatggtgctgcttcttatcaagacaaggaaccccaggggagttgaccacagatgtgggtgtagtgcagggagaaagcataattagcacatgaaaagtgaacatgaagarataaacagaggtgatttggagaggtgaaacagaatttcaggattaaccaagataaggttagaaccaggagaccagtttgggaagttaggttgggctgaaaatcatttgacgttaatttctaggtgtaggagcaagaagtcaggcactgataagcagaacatgctgctgacctgtctcattgagggaggcccatagatacctgctaggatgaaggctgaaagttactaagcattgggtttggagattcaaatatttaagctgttgtta

SEQ ID NO: 369724 - DNA, 606 bp, Homo sapiens
cacagttctgcctttgtcttagaagtttgagaaaaggccagtgatttaaaatttaaagtcccataaaaatgtaaatataactggaggtaagatttgaaaaaaaaaaaaaacaaaaargagtgtagctcttaatacaaaaagtcactgatgaaaggaaggaaattaataaaaagaacaaaagaccttaaaaaaaagattttaaaactcaagtaggatatacatgcagagcacagatcaagagtatttcagagctatgttaaagtttattatgaaatacagttatcaatatgcaagtacttcataaaatgctctgtaaggtattaacaatgggaaataacaatttcaggtgacagatactataatatgccaaattaagatgatttacatatgaagctctttttgttaagttcctatttcagtcatctcttcttttgtagacaaaggtcttattgatccctcctttgttaatttctcattgtcccattcttttaaatcttatcacaccaacacaaaccaagattacatggagggcagagaaactttcctttctttatcctcagttgctagcaaatatcccaaccttcatgcattaatctatttgttcat

SEQ ID NO: 369725 - DNA, 606 bp, Homo sapiens
cacagttctgcctttgtcttagaagtttgagaaaaggccagtgatttaaaatttaaagtcccataaaaatgtaaatataactggaggtaagatttgaaaaaaaaaaaaaacaaaaaggagtgtagctcttaatacaaaaagtcactgatgaaaggaaggaaattaataaaaagaacaaaagaccttaaaaaaaagattttaaaactcaagtaggatatacatgcagagcacagatcaagagtatttcagagctatgttaaagtttattatgaaatacagttatcaatatgcaagtacttcataaaatgctctgtaaggtattaacaatgggaaataacaatttcaggtgacagatactataatatgccaaattaagatgatttacatatgaagctctttttgttaagttcctatttcagtcatctcttcttttgtagacaaaggtyttattgatccctcctttgttaatttctcattgtcccattcttttaaatcttatcacaccaacacaaaccaagattacatggagggcagagaaactttcctttctttatcctcagttgctagcaaatatcccaaccttcatgcattaatctatttgttcat

SEQ ID NO: 369726 - DNA, 490 bp, Homo sapiens
atgaagagaaagcactttaaattcttagggcttaaggagatgatatggtttggctgtatccccaaccaaatctcatcttgaattgtagctcccataattccctcatgtcctgggagggacccagtgggaggtaattgaatcatgggggagggtctttcctatgctgttctcctgatagcaaataagtctcatgacawctgatgattttataaaaggggagttcccctgcacatgctttcttgcctaccaccatgtaagatgtgcctttgcttctcctttgccttccaccatgattgtgaggcctcctcagccacgtggaactctgagtccattaaaccactttcttttataaactacccagtcttgcgtatgtcttcattagtaacatgagaacagactgacacagaaggtgtgtttacacagtctctacatattttgttagtttaaagcaaaccaaccaacctactgaggacaaccagaaagccaagta

SEQ ID NO: 369727 - DNA, 490 bp, Homo sapiens
atgaagagaaagcactttaaattcttagggcttaaggagatgatatggtttggctgtatccccaaccaaatctcatcttgaattgtagctcccataattccctcatgtcctgggagggacccagtgggaggtaattgaatcatgggggagggtctttcctatgctgttctcctgatagcaaataagtctcatgacatctgatgattttataaaaggggagttcccctgcacatgctttcttgcctaccaccatgtaagatgtgcctttgcttctcctttgccttccaccatgattgtgaggcctcctcagccaygtggaactctgagtccattaaaccactttcttttataaactacccagtcttgcgtatgtcttcattagtaacatgagaacagactgacacagaaggtgtgtttacacagtctctacatattttgttagtttaaagcaaaccaaccaacctactgaggacaaccagaaagccaagta

SEQ ID NO: 369728 - DNA, 565 bp, Homo sapiens
ctgacaaagtacaaaattttaccacataaggaactgagaaggaaacagagtttatatgtaggatcccacccatttggaattgcctggggggtcaaatatgaggctttccaatcatcatccaatcacaaatgcacaagctcagaatgaacagcaagtaactaagttgaaatctacaacataaactcaaacctattcatataaatataacaaaatgcaaagatctaaaactttttatgcaataaagagtaggcaagcaatataaaatgccagacttgaagagaaacaggaacatgacacatatcccatatgcagtccacagaacccagcatgtagctaacattgaatttcaggcagctactataaatatgtttagaaaaaaatgaagaaaaaataatgattgaaaatatagaatatgtcrgcggagacatgaaaacatgcaagtaaataaaccagatcattcttgatctgcaccagctctggatgataaccagtatccagactgtacacagaggtttgcatggtagtcattcagatctttacaaacatcagagtttcttgtttgtgt

SEQ ID NO: 369729 - DNA, 565 bp, Homo sapiens
ctgacaaagtacaaaattttaccacataaggaactgagaaggaaacagagtttatatgtaggatcccacccatttggaattgcctggggggtcaaatatgaggctttccaatcatcatccaatcacaaatgcacaagctcagaatgaacagcaagtaactaagttgaaatctacaacataaactcaaacctattcatataaatataacaaaatgcaaagatctaaaactttttatgcaataaagagtaggcaagcaatataaaatgccagacttgaagagaaacaggaacatgacacatatcccatatgcagtccacagaacccagcatgtagctaacattgaatttcaggcagctactataaatatgtttagaaaaaaatgaagaaaaaataatgattgaaaatatagaatatgtcggcggagacatgaaaacatgcaagtaaataaaccagatcattcttgatctgcaccagctctggatgataaccagtatccagactgtacacagaggtttgcatggtagtcattcagatctttasaaacatcagagtttcttgtttgtgt

SEQ ID NO: 369730 - DNA, 563 bp, Homo sapiens
attgcatatttaattgttatgtacaataaattgtatatttaatatatttattgtacattttaaaatatacaataaactgtttacaatagacaataaattattgtatatttacaatagacaataaattattgtatttttacaatatacaatagttgccctattgtgccacygaacactagattttattctttctacctctatttttgtacccattaactatgtcctctttgctgtcccctctccactacccttcccaccctctgataagcatcattctactctcctttccttgagttcaatatttttagcttccacatatttaatgagaacatgcaaaattatatctttatgtgcctgatttattttacttaatgtaatatcttccagttctatccatcgtcttaccccggttcaaatagtttttatttttaatcaaaaagacaggcaataacaactgctgacaaggatgtatagtaaggggaaccctcgtacactgttggtgagaatgtaaattactagagccattatagaacagtgtgaaggtttctcagaaaaactaaaaa

SEQ ID NO: 369731 - DNA, 590 bp, Homo sapiens
gaacctacctggataattcagtgtcatctctccatttcaagattattaacttaatcacatctgaaagtccatttttctgtataagctaattcatttacaagttcctggattaagayaaggatatcactgagaggccattactcagcctaccacaccagatacatttgaagtaaaaataaaatttgagaattttaccagagaacgaatgaataaaatctagctattctttgatactctggtgttttgtaaaactcacatgtagttctacctacttctccaatggtgtcaaagttttgatttaagacaaactttccatgaaatttaaacatctccaaaatgcaaatgaaaaaaaaaatgtggatgaattactccagatcaatttcataattttctctgggcaaaatagttttttgtgccattcaaatctatgtttggacataaagagttgggttgaatattctttaacaactacctaaaaaattcactcttcttttcctgttattcagaaaatatttaggatcacttattcatttccccaaaacatgtaatacattccatgtttattgtgaggactacttatttcacttatt

SEQ ID NO: 369732 - DNA, 531 bp, Homo sapiens
agagactatcacagaaaataatcactcttttctaggatatgtatgtgcaaagtttatttaatcatcccatagatttttttttttaaatacagctttagcatttgagaagagttgtgagtgaaatggtgttaagggtttgaagaataagagtatacagagtcctatttcagtattgaattggaaatgctgacattactcctcaggctattctcacatattctattgctatctcctgggaaaagaggagtggctacagtcactttcaccctgtcaaagaggacactacgtctgagtctctctggctgttgctcactagaatcagagcccattctttcactgcgtgaaagacaaaaaatagatacgaagacaatggctattccactaaagtaatttaaaaattcattctgaaagttaggtttrtgcattttcaaatatatttctcaaatatttctgcacgctattttaaaaagaaaaagttttagattcagattggtatttgtctgatgatatgattcagcaatgctgaggtgt

SEQ ID NO: 369733 - DNA, 594 bp, Homo sapiens
ctaggtcggggaagttctgttggataatatcctgaagtgtgttttccagcttggttccattctccctctctctttcaggtacacttacctgttgtaggttcagtctttttacataatcccatatttctcagaggttttgttcattcctttcattcttttttctgtaatcttgtttgcatgccttatttcagcaagatagtcttcacattcttacattctttcttctgcttaatcgatttggctattgatacttgtgaatgcttcaaaaagttctcrtgctatgtttttcagctccatcgggtcatttatgttgctctctaaatgggctattctagttagcagcttttctaacattttatcaaggttcctaacttctttgcattgggttcgaacatgctcctttacctcagcaaagttcgttatttcctaccttctaaagcctacttctgtcaattcatccatctcatcctctgtccagttctgtgcccttgctggagaggttttgcgatcatttggaggagaagaggcactctctcattttgggttttcatcattttttcgttgattctttctcaccttcatgagtttgcgtag

SEQ ID NO: 369734 - DNA, 594 bp, Homo sapiens
ctaggtcggggaagttctgttggataatatcctgaagtgtgttttccagcttggttccattctccctctctctttcaggtacacttacctgttgtaggttcagtctttttacataatcccatatttctcagaggttttgttcattcctttcattcttttttctgtaatcttgtttgcatgccttatttcagcaagatagtcttcacattcttacattctttcttctgcttaatcgatttggctattgatacttgtgaatgcttcaaaaagttctcatgctatgtttttcagctccatcgggtcatttatgttgctctctaaatgggctattctagttagcagcytttctaacattttatcaaggttcctaacttctttgcattgggttcgaacatgctcctttacctcagcaaagttcgttatttcctaccttctaaagcctacttctgtcaattcatccatctcatcctctgtccagttctgtgcccttgctggagaggttttgcgatcatttggaggagaagaggcactctctcattttgggttttcatcattttttcgttgattctttctcaccttcatgagtttgcgtag

SEQ ID NO: 369735 - DNA, 594 bp, Homo sapiens
ctaggtcggggaagttctgttggataatatcctgaagtgtgttttccagcttggttccattctccctctctctttcaggtacacttacctgttgtaggttcagtctttttacataatcccatatttctcagaggttttgttcattcctttcattcttttttctgtaatcttgtttgcatgccttatttcagcaagatagtcttcacattcttacattctttcttctgcttaatcgatttggctattgatacttgtgaatgcttcaaaaagttctcatgctatgtttttcagctccatcgggtcatttatgttgctctctaaatgggctattctagttagcagcttttctaacattttatcaaggttcctaacttctttgcattgggttcgaacatgctcctttacctcagcaaagttcgttatttcctaccttctaaagcctacttctgtcaattcatccatctcatcctctgtccagttctgtgcccttgctggagaggttttgcratcatttggaggagaagaggcactctctcattttgggttttcatcattttttcgttgattctttctcaccttcatgagtttgcgtag

SEQ ID NO: 369736 - DNA, 438 bp, Homo sapiens
atacatatatgtatcaaaatgaataactatactattataatatttcatgatgatggaattatatatatatttatattatatatatttattatattatatataattatcttatatatatataactatcttataaagctattttctgtcstggtataatacccaatataggatgtggtatcacatttagtcgtcacacacctttcatctaaaacagttacttaatgtttgtctttcaaaattttgattttttaaaatcacagtccattctcttttaacactctcctccattttgttttgcctaatatattatgaatcaattatttttacaaatgtgattcaatattattctcagtgcataatatcaaaatgtgactttgttttatctttagtgatgttaaaagagttacttatatttaagtttgaattctctaggttaat

SEQ ID NO: 369737 - DNA, 438 bp, Homo sapiens
atacatatatgtatcaaaatgaataactatactattataatatttcatgatgatggaattatatatatatttatattatatatatttattatattatatataattatcttatatatatataactatcttataaagctattttctgtcgtggtataatacccaatataggatgtggtatcacatttagtcgtcacacacctttcatctaaaacagttacttaatgtttgtctttcaaaattttgattttttaaaatcacagtccattctcttttaacactctcctccattttgttttgcctaatatattatgaatcaattatttttacaaatgtgattcaatattattctcaktgcataatatcaaaatgtgactttgttttatctttagtgatgttaaaagagttacttatatttaagtttgaattctctaggttaat

SEQ ID NO: 369738 - DNA, 462 bp, Homo sapiens
cttgaataaaggtcctgcaatctgatagcaaatatataaatacagacttccccaatcctttcccagagcacttaaagccatttatgtgaggaataggaaattctcacatatatgaagggtgttgattacaagttttgttttatcacaggcaccagaggattggaaatgccattacacactcccccacctccacaaacatcccacatatgagtttcttacagagtytaggagacaagtaataccctgtttcaaatgggtccagtggataaataggcacatctaagtttcatgttcctggtcactgtatgctctgaattaaagtctattctggtcatgcctaacaaatcataaaagcaaacttcaagcttttcatactgtttccaagtagcctaactgagtcccagaacaaactcaagaaaatttataaggatacaaaaatatacataacccagcaaggtaaaa

SEQ ID NO: 369739 - DNA, 636 bp, Homo sapiens
gttattgaaaaacttaaataaatgtaatctttgtgactgccaaatcttaaaacattactattatataatctgtattttatcattttgtaactggtaaaagctttatctttcttaccaaattgtgagctcctaaattttagttggtagaatagggagtttgattaaaggaagacatatttgacacaggtaaagtaatttctgcactaaattaatatgaaaatgcctgcaaaataggtatgtcatgtgtgaagtatttgaataagagtagaaactacaataaaatattttwatatggtatcttgaaatcatgaggagtgtagaatttgagtaaaaatgtgagttttgcaagacaaaggtggtgtttatggcttaggaaatttagttctaaatttctaaagttctaaaattctactctattcaaagcatcaaaccatcaacaaaattctagccttatcagagatgaaaatatacaatccattgcttagagttagcgaggataggtggagaaattaaaataaatttaattccatgtcgtggagtggggagaggggggagggatagcattagaagatatacctaatgtaaatgacaagttaatgggtgcagcacaccaacatggcacatccatgcatatgt

SEQ ID NO: 369740 - DNA, 565 bp, Homo sapiens
aaattaaaagaaggcttgataaaccatgtaacagtaaaaattactgcatcattctttattccttctaaaaagaaaacatttttctagatacccaacatttcctatgaccaaggagggtgactagaagtcattgctcagtaaaytctagatcccatccaatttttgtatgtaactgtgtatcacatggaacagtaggactccttaatgtactggcttccagatatcgttatataatactgttcttctatattccccaaattggtgccacctatttttctttccaactgcaaacagttgcactaagagaaaaatataaattttctttcagtctgtagtactgttatacctggaaggttaaagaccaatgatacagtccacaatctccagtgtccattccttaatcagctagatccaccataaatttcctacaaaatttctcattttgcctaagtctcaaacatttctcacccctaccccatgatcaatgacttctaaaaacatcaaattacatatatcttacaaattaggaagttctttgtaggtgatgaaactgttatgttacagc

SEQ ID NO: 369741 - DNA, 565 bp, Homo sapiens
aaattaaaagaaggcttgataaaccatgtaacagtaaaaattactgcatcattctttattccttctaaaaagaaaacatttttctagatacccaacatttcctatgaccaaggagggtgactagaagtcattgctcagtaaactctagatcccatccaatttttgtatgtaactgtgtatcacatggaacagtaggactccttaatgtactggcttccagatatcgttatataatactgttcttctatattccccaaattggtgccacctatttttctttccaactgcaaacagttgcactaagagaaaaatataaattttctttcagtctgtagtactgttatacctggaaggttaaagaccaatgatacagtccacaatctccagtgtccattccttaatyagctagatccaccataaatttcctacaaaatttctcattttgcctaagtctcaaacatttctcacccctaccccatgatcaatgacttctaaaaacatcaaattacatatatcttacaaattaggaagttctttgtaggtgatgaaactgttatgttacagc

SEQ ID NO: 369742 - DNA, 565 bp, Homo sapiens
aaattaaaagaaggcttgataaaccatgtaacagtaaaaattactgcatcattctttattccttctaaaaagaaaacatttttctagatacccaacatttcctatgaccaaggagggtgactagaagtcattgctcagtaaactctagatcccatccaatttttgtatgtaactgtgtatcacatggaacagtaggactccttaatgtactggcttccagatatcgttatataatactgttcttctatattccccaaattggtgccacctatttttctttccaactgcaaacagttgcactaagagaaaaatataaattttctttcagtctgtagtactgttatacctggaaggttaaagaccaatgatacagtccacaatctccagtgtccattccttaatcagctagatccaccataaatttcctacaaaatttctcattttgcctaagtctcaaacatttctcacccctaccccatgawcaatgacttctaaaaacatcaaattacatatatcttacaaattaggaagttctttgtaggtgatgaaactgttatgttacagc

SEQ ID NO: 369743 - DNA, 565 bp, Homo sapiens
aaattaaaagaaggcttgataaaccatgtaacagtaaaaattactgcatcattctttattccttctaaaaagaaaacatttttctagatacccaacatttcctatgaccaaggagggtgactagaagtcattgctcagtaaactctagatcccatccaatttttgtatgtaactgtgtatcacatggaacagtaggactccttaatgtactggcttccagatatcgttatataatactgttcttctatattccccaaattggtgccacctatttttctttccaactgcaaacagttgcactaagagaaaaatataaattttctttcagtctgtagtactgttatacctggaaggttaaagaccaatgatacagtccacaatctccagtgtccattccttaatcagctagatccaccataaatttcctacaaaatttctcattttgcctaagtctcaaacatttctcacccctaccccatgatcaatgacttctaaaaacatcaaattacatatatcttacaaattasgaagttctttgtaggtgatgaaactgttatgttacagc

SEQ ID NO: 369744 - DNA, 561 bp, Homo sapiens
catcgttagttttgtggtttggggtttttacaaaaaaacgcagttttttaaatcacctattccctcttctttaagtttgtttttaaaagagaactaaaaaagctaatgaactaaaaaagttttttttttwaaaaaaaagaactagaaatgctaaagaactaagagttaaaagaaactttcatttcggcaaattacaattatatttcttcttcaatgtttacctggatattaaaaaagcacttaccattaactatataaccttctctatagagtgtctcagtgttatggaaagtaaagtttcaattcaaagtctgcccaaaatataaaatgtcaacccaagccttatttaaacacttacttatgcatgacaatgtgtcctctcatataaaaaatatgtcacttctcaacctaaaaagttaatttaaactcatttaacatcacttttattagtgttaaaaatgtcttaaaacagcaacttatgtgtattagtctgttctcatgttcctaataaaatacatgcatgagatttggtaatttataaaggaaagtggtttaactgac

SEQ ID NO: 369745 - DNA, 561 bp, Homo sapiens
catcgttagttttgtggtttggggtttttacaaaaaaacgcagttttttaaatcacctattccctcttctttaagtttgtttttaaaagagaactaaaaaagctaatgaactaaaaaagttttttttttawaaaaaaagaactagaaatgctaaagaactaagagttaaaagaaactttcatttcggcaaattacaattatatttcttcttcaatgtttacctggatattaaaaaagcacttaccattaactatataaccttctctatagagtgtctcagtgttatggaaagtaaagtttcaattcaaagtctgcccaaaatataaaatgtcaacccaagccttatttaaacacttacttatgcatgacaatgtgtcctctcatataaaaaatatgtcacttctcaacctaaaaagttaatttaaactcatttaacatcacttttattagtgttaaaaatgtcttaaaacagcaacttatgtgtattagtctgttctcatgttcctaataaaatacatgcatgagatttggtaatttataaaggaaagtggtttaactgac

SEQ ID NO: 369746 - DNA, 561 bp, Homo sapiens
catcgttagttttgtggtttggggtttttacaaaaaaacgcagttttttaaatcacctattccctcttctttaagtttgtttttaaaagagaactaaaaaagctaatgaactaaaaaagttttttttttaaaaaaaaagaactagaaatgctaaagaactaagagttaaaagaaactttcatttcggcaaattacaattatatttcttcttcaatgtttacctggatattaaaaaagcacttaccattaactatataaccttctctatagagtgtctcagtgttatggaaagtaaagtttcaattcaaagtctgcccaaaatataaaatgtcaacccaagccttatttaaacacttacttatgcatgacaatgtgtcctctcatataaaaaatatgtcacttctcaacctaaaaagttaatttaaactcatttaacatcacttttattagtgttaaaaatgtcttaaaacagcaacttatgtgtattagtctgttctcatgttcytaataaaatacatgcatgagatttggtaatttataaaggaaagtggtttaactgac

SEQ ID NO: 369747 - DNA, 573 bp, Homo sapiens
atcatgccaaacgaaattaatctgttgcagttatgtgcatcatagatagcaacagacagtagcataggtagtaatgaaacagtattcttcttcttgctagaaattttgtacaatgaatatcagacactgaaagtaaggatggggattaaataaatgatcgtgaacataaataagtattatatctgaacagagctaagtaaacatgtctgactccgaatatttaaccctgaaatgagaaaatgccaygcatgagggtgtagagagtacttgatctatgctaacaagattagaattgagaaataattttaattttacaatacatatataatttaatttttgtattttgtaaacagaattttagtaacttcagcagcacacacatacattttatgtgtacatgagatacatgtatgaagcattactcaatttactacttattcaaaattggatacaaagttctctggaagcatttgaagggatttgcattatgcacaaggagaagatagatggtctaaagccagtctaaccacattcttctttgaacagaaaagtgccacagtaatttatataatc

SEQ ID NO: 369748 - DNA, 634 bp, Homo sapiens
gctttttgtactgggttacttccaaattaaaccaaataatgacagttttgcaaatgagatcttccagggacctaacaggcaagcaacataatagcagtcctattgtrtgtaattgaaccttgttttgacacctcccatggttgccagcacaaggattttcaccatgtttgcagattgctgattttcaagcctactacagaaacagtctgtggaatgaaaatagggtaagctaaaataccacaaatctcacagttcttaccaagattctgcaatttctcttgaggaaattctccctctattataaaaaatctttgattaaatttaatagctctgaaaacattgtttctgacaattttgctggttttcacattgattttattgatcacagaattctagagcttcttacttcaccattttcactgacatcaccatctggtccagtatacttaccaagtaaaacacagaatttcaaaaatacccacccaaaggaatgcacaataactttgacatgaaagatttgagcttcgattatttatattagagttgtagaatattcttagactcgacaattcatcaccttgtggagagcatggatatgggctattgtcacgaatgtttttctgtcttgaaataa

SEQ ID NO: 369749 - DNA, 634 bp, Homo sapiens
gctttttgtactgggttacttccaaattaaaccaaataatgacagttttgcaaatgagatcttccagggacctaacaggcaagcaacataatagcagtcctattgtgtgtaattgaaccttgttttgacacctcccatggttgccagcacaaggattttcaccatgtttgcagatkgctgattttcaagcctactacagaaacagtctgtggaatgaaaatagggtaagctaaaataccacaaatctcacagttcttaccaagattctgcaatttctcttgaggaaattctccctctattataaaaaatctttgattaaatttaatagctctgaaaacattgtttctgacaattttgctggttttcacattgattttattgatcacagaattctagagcttcttacttcaccattttcactgacatcaccatctggtccagtatacttaccaagtaaaacacagaatttcaaaaatacccacccaaaggaatgcacaataactttgacatgaaagatttgagcttcgattatttatattagagttgtagaatattcttagactcgacaattcatcaccttgtggagagcatggatatgggctattgtcacgaatgtttttctgtcttgaaataa

SEQ ID NO: 369750 - DNA, 593 bp, Homo sapiens
gaaatatttgtaattgtagtttaaacaaattcagagacatttagtaatttactcatagtccagatactgaacaaaactaggctttcatattccaattttgtttcaaccttagtactaactctctgacttataatcttgacttgtaagaataaccatctggggtcattcctttatttgctatttcattctttggtcctrtcaccactactctaacttcagcttattattttctctgtccatttaattctgaggtttcattataattatttccctggtgaacatacgtatgtgcctttcatctttatggtgatatctgccatttctatagttgtctgcatattttttaattgaagttttctggagaactagacctccacacataaagtccttctgaaaaatctgtcagtataagtcttgccctattcacccagttattggcagttaatagagactggccaaacataatgttcgtgcacatacagggttttattaagggatgggaacaatggaggaaatagagcactcacatggggattggcatgaatgcagggaaaaagggaatctttcaaacttttagagttttcaggaggtta

SEQ ID NO: 369751 - DNA, 604 bp, Homo sapiens
aattccaataaataagagtgggattactaggttatatggtaaacatatgatgaaacacatttttgtattgtaagtatatgactgtgtgttaagtatataattatatgtaaacccatttgttttcttaagtggttgcacaattttgtgtgtccaccastattatataaaaatcccagatgctctgaatccagaccagcactgtgtatttttacttcttagctgtcgtttttgttgaatccccaactgagaagtgtgtgaagtttcactgtacttgtaaatgcacaaaacacaatcacacataactcaaagttttatcctccttcgaaatgtaaactcatagggagatgactctctacttccctccggaggtcacaaatttaacttttatcagtgtatcccataactttcatgacaattgtccctaatgcagtatgtaagcacctgtttctgaaggaaaaacaagttttgttatcctttggacaaaagtaaatgttctaaaaggaggcaattagttgtaagcctaaaaatgatgacatgtgagtaaagaaatgcttctgggaaaacaaatgcaaatatcgtctatctttataagatttacatttca

SEQ ID NO: 369752 - DNA, 565 bp, Homo sapiens
caaactaggcatagttgaaccatcgctctacataataaaagccatataaaacaaacccacagycaacatcatgctaaagggggttaaagctagaagcctttcccttaagaactagaataaaataaagatgtccactttcaccactcctattcgacatagtactggaaatcctagccagagcaatcaggcaagaaaaatatataaaagtcatcaacatgggaaaagaagttaaatttttcctctttgcagatgatatatctagaaaatcctaaagactccatcagaatactcttagacctgataagtaaattcagatctggtaaattcagcaaatacttcatatacaaattattgtatttttcaagatacaaaagtaacataaaagagctgcagcatttctaaacactgacaatgaaagaagcaagaaaaaaaatcaagaaggcaattccacttacaactgctaccaaaaaaacaaaaaatacctagtaataaatttaaccaagaaggtaaaatacttctacaaggacaactacaaacaccaaagaaaaaagttgaataggacaca

SEQ ID NO: 369753 - DNA, 565 bp, Homo sapiens
caaactaggcatagttgaaccatcgctctacataataaaagccatataaaacaaacccacagccaacatcatgctaaagggggttaaagctagawgcctttcccttaagaactagaataaaataaagatgtccactttcaccactcctattcgacatagtactggaaatcctagccagagcaatcaggcaagaaaaatatataaaagtcatcaacatgggaaaagaagttaaatttttcctctttgcagatgatatatctagaaaatcctaaagactccatcagaatactcttagacctgataagtaaattcagatctggtaaattcagcaaatacttcatatacaaattattgtatttttcaagatacaaaagtaacataaaagagctgcagcatttctaaacactgacaatgaaagaagcaagaaaaaaaatcaagaaggcaattccacttacaactgctaccaaaaaaacaaaaaatacctagtaataaatttaaccaagaaggtaaaatacttctacaaggacaactacaaacaccaaagaaaaaagttgaataggacaca

SEQ ID NO: 369754 - DNA, 619 bp, Homo sapiens
ttaacattttgaacagtttttgaaaactaagaaatataatgatgttcattggtttttcttattgtcacaggaaaaagtaatggagagaaatgattgaaaccattgaaaccatcatygcaaaattataactgagacggttacagagatctgacttaaccaactccatcttgcttctaccctctaagctgtccttcattcccgggcataggccaaactaactttgggaggaacttagtttatagtttatagtttaaaataaagatgataacagccctttcccaaaacaaacttcctctgcgtaaggactagactgcctttgtaggactaataagttagctaaaatattggaagttatggtttaggagtcttgcatcgtggggctacaagattctgaccctccccaaattgctcctggggataacatcactattgtaaaacctacaataagttcttgagatattttgtaccctgtacttgatggatcaactggcaccacccagactgataaactggctcatctgatcttgtggtccccatccaggaactgacttagcattagaggacagcttcaactcccaatgatttcatcatccaccaaaccaatcagcatttccgattc

SEQ ID NO: 369755 - DNA, 619 bp, Homo sapiens
ttaacattttgaacagtttttgaaaactaagaaatataatgatgttcattggtttttcttattgtcacaggaaaaagtaatggagagaaatgattgaaaccattgaaaccatcatcgcaaaattataactgagacrgttacagagatctgacttaaccaactccatcttgcttctaccctctaagctgtccttcattcccgggcataggccaaactaactttgggaggaacttagtttatagtttatagtttaaaataaagatgataacagccctttcccaaaacaaacttcctctgcgtaaggactagactgcctttgtaggactaataagttagctaaaatattggaagttatggtttaggagtcttgcatcgtggggctacaagattctgaccctccccaaattgctcctggggataacatcactattgtaaaacctacaataagttcttgagatattttgtaccctgtacttgatggatcaactggcaccacccagactgataaactggctcatctgatcttgtggtccccatccaggaactgacttagcattagaggacagcttcaactcccaatgatttcatcatccaccaaaccaatcagcatttccgattc

SEQ ID NO: 369756 - DNA, 532 bp, Homo sapiens
aatcttgtacttctaagccttcagatctgtgagaacataaatttcttttgtttaagacatctagtctgtgtcatattgtctacacataattttaatttatttgtggttagacaaaatctactttcttggcaattttcaagtataaaatacattgttattaactataattactatgtttatagaatcaatctcttgagcttattgtttctaagtgaaattttgtatacttcaaccatctcccactcttctttctcaaccccttggtaactaccattctaccctgtttctatgaatttgtctttttttagattccacatataaatgagattatgtagtattgtgccttgcttatttcacttagcataatgtccttcagattcatctatcttattgcagatgacagaatttcctttattttaaagactgaatggtactgtattgtgtgtatttaccacattttctgtattcattcatgctrtgaaagaatgaatattaatgacacataagtcaattccaactgagcttggcaact

SEQ ID NO: 369757 - DNA, 659 bp, Homo sapiens
cacatttcatcttttacccgcatagaaaatgaaggccaattctagggccaactaagtcttctgccacaatgcaactgagaatggattatcagtggcactgttcctaaagtcacaaggcacacagtatgtgtccttagaaaagcctgctggtttgttcaactaactgtccacggtttttcccccccccccttttcttattccactaatggtggagtccactggttcccttaataacctctagccttccagaaggtgtttccttatagctaaggtaaatgtctggaccagtggttctcaaatactttggtttcaagaccccttcatcctcttaaaacttattgaagactccaagaagctttttttcatgtgggttttacctgtcggtatttgacatattaraaattaaaacttcgaagggagaacaacagatgagagacacagagccctggcagggtggactcctagtcccacaccttcttagccttttgcttccacattacctgaaccagtcaacacccctttcacaacagctaatccggttgggtttctgccactagcaaatgaaaggggactgaacaatacatccacaaaacagagaattagcctaagacaataaataataaaggattaacttgagtataacagaatgctgtttcctc

SEQ ID NO: 369758 - DNA, 342 bp, Homo sapiens
gtcgctttaatatcttatttgtttctccatggtgtgcagaaaaaaagaaaagttaacctcggaaagtattttccttttttcttagaatktatttattgttaaatgtcagattcaggaggtacatgtgcaggtttgttacatgggtatattgcatggtgctcaggtttaagcttctaatgatcccatcacccaaatagtgaacacagtacccaaaaggtagtttttcaacccttactcctctccacctctcccctgttttggaatcctcaatgtttatttttcccttctttgtattcatgtgtacacaatgtttagctcccagttacaagagagaacatgtgg

SEQ ID NO: 369759 - DNA, 549 bp, Homo sapiens
caggcagtatagagagacacacaggttagctgacagacatttcagatctacctcaggctcaagatgccacacctgctgttacttgtccagggagtcagccctcgagatgccccctgtggggagacctcagagggtggggagaccagagggaagaacgggaggagggggaagaagatgtcatgtactgaactgagaacactcagggaaataaaggatctatttttttcaatttgttctcagcaaacatttgtcatttaatttcttcctaattacacaattacgtaattatgtagtattagtaaaataaagcctaaagacgtttgagtaaagaattacttaagtaaataatgtctgactgaagtaattatttccagggttttcttttttaaaggagaatgggatagaattagttcaggcattgttgcagggctgcgtgggggttkggggtgccgcacagctgggggcagctacgaggctccgttgcccactggggtccagcttcttggcagcttcctttctctgtggctgaggctctgatggcaagttcca

SEQ ID NO: 369760 - DNA, 236 bp, Homo sapiens
aacactgtagtagggttgtcattctcttatgaaaattgatgagcctaactaggacctacacctgatgagagggccacctccttggctctgagctgagctggaagagtttgcggggtgtttgattggcctgccaagcccccaagccatgagtgtctgtccyacagggtggagtgattgctctgggaatggagaaccttgaatcttgccatttctacagtgagaggttttgtctatag

SEQ ID NO: 369761 - DNA, 236 bp, Homo sapiens
aacactgtagtagggttgtcattctcttatgaaaattgatgagcctaactaggacctacacctgatgagagggccacctccttggctctgagctgagctggaagagtttgcggggtgtttgattggcctgccaagcccccaagccatgagtgtctgtcctacagggtggagtgattgctctgggaatggagaaccttgaatcttgccatttcyacagtgagaggttttgtctatag

SEQ ID NO: 369762 - DNA, 564 bp, Homo sapiens
ctaaattgggaaagagtgctggtggctggattaaagtccgctaagcagtcagttgttccaactttaggtaccacatctccccaagaaggtggacgaacagtgtgggtttccatttccagcttccctcggctaaatcctacttgacctgcagaacatggctccccactgagtcccacaagsccccccaagccctctccttctgcagcattattctaggctgtccacagagtacagtacactcaagtgtagtgatttgtgtacttacccaccttcccagcgggctgctcactctttgaggggtgaggttgtgtcttatctgcctttaaaccctcagctcccaggtacatagttggctctcagtcaaagctcgttgagtgacttaatggcgaaatgacagcggttctgccttgcacccacggagcatgtgttgaagctggtatactattatagcatttcactctcagagctctaaactgcatctttgcttttgttgtgttttgtttctttttttagagatagagtctcattctgtcacctaggttggagtgcagtggtgccttcata

SEQ ID NO: 369763 - DNA, 564 bp, Homo sapiens
ctaaattgggaaagagtgctggtggctggattaaagtccgctaagcagtcagttgttccaactttaggtaccacatctccccaagaaggtggacgaacagtgtgggtttccatttccagcttccctcggctaaatcctacttgacctgcagaacatggctccccactgagtcccacaagcccccccaagccctctccttctgcagcattattctaggctgtccacagagtacagtacactcaagtgtagtgatttgtgtacttacccaccttcccagcgggctgctcactctttgaggggtgaggttgtgtcttatctgcctttaaaccctcagctcccaggtacatagttgrctctcagtcaaagctcgttgagtgacttaatggcgaaatgacagcggttctgccttgcacccacggagcatgtgttgaagctggtatactattatagcatttcactctcagagctctaaactgcatctttgcttttgttgtgttttgtttctttttttagagatagagtctcattctgtcacctaggttggagtgcagtggtgccttcata

SEQ ID NO: 369764 - DNA, 647 bp, Homo sapiens
gaggggggccagtgacgttcacgacagagtggcctccagtrcccagggagcactgctgggggctggcgaacagatcattttccctccctaccccttcctcctttagctgtcagcacagtttagatattcacacaaatcttaagccccctctggatttattgaaattcagttctgaaggtgctgcaggctccaaggggcttctctagtcttgtggacattattcagaggcttggaccttcctctttacccaacctctgcctgctgcctccctccagtccctcaatgcacacttagaagctggtgctcaggccagttttatgaagtgcactaatcagccatgaatatggagctcccaaaataagagatcctggacagtcatccctctctatagacttggcttctggtgtccagattcagaggccaagctgggcacagctgtcagctgagtcacaggcagggctgcctcaatcataaattgcactgagttcccagtttttccctgcaagaacacatcgctctatttttcagtgggtcttttatcccctaccaatctccctgggcccctcattgacagtttcttgccatctgggatccagatcaacaagggtcattctttcaggaaccagagacctgcctttttcttgccc

SEQ ID NO: 369765 - DNA, 606 bp, Homo sapiens
tgaaaaaggagtttggttgccttgatgtgctcctgtcatttcaaggggctcaataaaaatttagtttcggtattcgctcaatgcgacttccacaaagaggtcttatgttgcaaaccagatttctcttttcatctggtcaccaccagggaaattgtgtatttgaaactcaaacaatatttgggcaaaaagagtttctcattatacgcggtggggaagggcaatgggaggaaagtgcagggaaatgattgagtgacatttctatttgccgggttgacttctccaccagcggcagccgtggtatggggctgctggagaacttcagcttcctggtgtggactggaaatgcaaggaccctggaaaaaataatgtggaggagaaaaatgggatgggctagaaacagatttgaagagtcagtgtgacctcaagctgacattactgttgacaatgagaataagatagacaaagagttttgtgttttgcacaagttytttttagtgggaggactgttaagttttagtctttcaaggctgaagggaacgcagaggtcatttgcatcccctttttttggtaggtaaatcctctctctaacgtgctaacactgggcaa

SEQ ID NO: 369766 - DNA, 606 bp, Homo sapiens
tgaaaaaggagtttggttgccttgatgtgctcctgtcatttcaaggggctcaataaaaatttagtttcggtattcgctcaatgcgacttccacaaagaggtcttatgttgcaaaccagatttctcttttcatctggtcaccaccagggaaattgtgtatttgaaactcaaacaatatttgggcaaaaagagtttctcattatacgcggtggggaagggcaatgggaggaaagtgcagggaaatgattgagtgacatttctatttgccgggttgacttctccaccagcggcagccgtggtatggggctgctggagaacttcagcttcctggtgtggactggaaatgcaaggaccctggaaaaaataatgtggaggagaaaaatgggatgggctagaaacagatttgaagagtcagtgtgacctcaagctgacattactgttgacaatgagaataagatagacaaagagttttgtgttttgcacaagttttytttagtgggaggactgttaagttttagtctttcaaggctgaagggaacgcagaggtcatttgcatcccctttttttggtaggtaaatcctctctctaacgtgctaacactgggcaa

SEQ ID NO: 369767 - DNA, 606 bp, Homo sapiens
tgaaaaaggagtttggttgccttgatgtgctcctgtcatttcaaggggctcaataaaaatttagtttcggtattcgctcaatgcgacttccacaaagaggtcttatgttgcaaaccagatttctcttttcatctggtcaccaccagggaaattgtgtatttgaaactcaaacaatatttgggcaaaaagagtttctcattatacgcggtggggaagggcaatgggaggaaagtgcagggaaatgattgagtgacatttctatttgccgggttgacttctccaccagcggcagccgtggtatggggctgctggagaacttcagcttcctggtgtggactggaaatgcaaggaccctggaaaaaataatgtggaggagaaaaatgggatgggctagaaacagatttgaagagtcagtgtgacctcaagctgacattactgttgacaatgagaataagatagacaaagagttttgtgttttgcacaagttttttttagtgggaggactgttaagttytagtctttcaaggctgaagggaacgcagaggtcatttgcatcccctttttttggtaggtaaatcctctctctaacgtgctaacactgggcaa

SEQ ID NO: 369768 - DNA, 606 bp, Homo sapiens
tgaaaaaggagtttggttgccttgatgtgctcctgtcatttcaaggggctcaataaaaatttagtttcggtattcgctcaatgcgacttccacaaagaggtcttatgttgcaaaccagatttctcttttcatctggtcaccaccagggaaattgtgtatttgaaactcaaacaatatttgggcaaaaagagtttctcattatacgcggtggggaagggcaatgggaggaaagtgcagggaaatgattgagtgacatttctatttgccgggttgacttctccaccagcggcagccgtggtatggggctgctggagaacttcagcttcctggtgtggactggaaatgcaaggaccctggaaaaaataatgtggaggagaaaaatgggatgggctagaaacagatttgaagagtcagtgtgacctcaagctgacattactgttgacaatgagaataagatagacaaagagttttgtgttttgcacaagttttttttagtgggaggactgttaagttttagtctttcaaggctgaagggaaygcagaggtcatttgcatcccctttttttggtaggtaaatcctctctctaacgtgctaacactgggcaa

SEQ ID NO: 369769 - DNA, 596 bp, Homo sapiens
taagcccaagagtatttatagaaatacaaaaatacccagcagtcaacaagataaaattcacaatgtttggcattcaacaacaaaaataaattactggccataaaaggaagcaagaaaatataactcataatgaggagataagccaagtaattgaaaataacccagaattgacacagatgctagagttagcagacaaggacatggaaccaccagttattatggctgtactctatataagtcaaaaagtaactagagatatttctatgaaaaaagcttaaagaaaacttctagagaagaaaakgacaatgtttaacataaaaacacactagttggaaatagcagattagagatggcaaaagaaaagatcagtaaactataaagacagagcaacaaaaactattcaaaatgaaacacacaggaaaaaaagaattaaaaataaaacagcagtgagctatgggataccttcaagcagcttaatatttttaaaactagaatacccagacagagagacagagacagagacagagacagagagggaggagtggtgagaaaaaaatgttataataaatatttacagaacaaaatgactgaaatgt

SEQ ID NO: 369770 - DNA, 529 bp, Homo sapiens
ctttgctgttttgcagcctctgctggtgatacccagatgaacggcatctggagtggacctccagcaaactgcagcagacctgcagaagagaggcctgttagaagaaaaactaaaaarcagaatgcaacaacatcaaaatcaacaaaagggacccccacacagaaaccccattcaaatgtcatcagattcaaagatgaaaggtaggtaaatccacaaaaatgaaaaaaaaaaaaaggtgcaaaaatgctgaaaattccaaaaaccagaatgcctcttctccaaatggtcacaactcctctccagcaagggcacaaaactggacagagaatgagactgatgaatttgcagaagtaggctccaggaggtgggtaataacaaactcctctgagctaaagaagcatgttctaacccaatggaaggaagctaagaaccttgatataaggttacaggaactgctcactagaataaccagtttagagaggaacataaatgacctgatggagttgaaaaacacagcatgataacttca

SEQ ID NO: 369771 - DNA, 541 bp, Homo sapiens
agcctccctggttccagcaggggaaaagcacagcctgcagctatagaaatgagtgccacccttcacccacccagggagcttagcacgttaagtagttgtgcatcccagttctggctgctgcctctcccccaatgagctcaaacgacttagacagctggcagccacagccggtgcttgttgcccctacccctgggagttcagtaggctcaagcaaattccagctgagaggctgtaagtatctgtgcattctagggttggtatgctaggctccagtggtgtgggttcacgagtggggtcttccaatccatgggttacccagtaaagcacagtttccctggctaggtagcaagctcactcactgcctctcttggcttgggggagagggttcccctttcccatgtggctytcacatgggccgctgcaccacactgctcttccttctctctctcagtcatgccagccttctagtcaattttgatgagagaacatggatacctttgttgccggtgaaggattcacacgcttattatggttttttttc

SEQ ID NO: 369772 - DNA, 587 bp, Homo sapiens
ctatgagcaactggatgccaccaagttggataacttacataaaatagacaaatttgaggaaacgcaaaacctaccaagatgaaacttcaaagaaatagaaaatctggatagacctataactagtaaggagttaaataagtaactaagaaatcttccctcagagaaggtcgagaaggcaaatgaaacactcaagaggcatttaaggaaactaacacaagaaactcatctcccatggcctactcttttgcccatggccctgttgagaatccaagattcttctcacaaaatagggctcactccataygaaatgctgtatggaccaccttttctcacaaatgacctcctacttgatcaggaaatggccaacttggtcaaagatataactcatttggcataatatcaacaaaaccttaaaaacctacctgaaggatgtcacagagaaaagagaacagagttgtttcaaccaggagatctagtgttggtcaaatctctcccctctacctccccatctatggactctttgtgggaaggaccatacttggtaatcctctctactcccactgcagttaaggtggcaggagtggaat

SEQ ID NO: 369773 - DNA, 503 bp, Homo sapiens
tagtgcccagccctcacacttcatagcttttacctccagaaaataatcaccactattattttagcgccagtttgaagagtgacagggaaggaccctgacagggttggcttggaccagcactcacttctaaaataaatcactagggaccctgaagttaggttatgggaacatatgaaaatttaaaattccctataagcacatgagtgcctggaaaagaaagtttcaaggagaagaggataggctggtaccatgagaagggaaggctgttggacagacacaacagactttarccacacagtcttcaccctcctgcttctttttgtatgcatctaaaacatctgaaatgagagtaattatcaaacacattccgacaattatctaattactttatgcttatagcacctccacaaggggcaggataagtatttccatccctttttatacatcatgaaataatttcaatcagcatatggaattgaaccaagagccaagtctaccaagca

SEQ ID NO: 369774 - DNA, 587 bp, Homo sapiens
ctatgagcaactggatgccaccaagttggataacttacataaaatagacaaatttgaggaaacgcaaaacctaccaagatgaaacttcaaagaaatagaaaatctggatagacctataactagtaaggagttaaataagtaactaagaaatcttccctcagagaaggtcgagaaggcaaatgaaacactcaagaggcatttaaggaaactaacacaagaaactcatctcccatggcctactcttttgcccatggccctgttgagaatccaagattcttctcacaaaatagggctcactccatacgaaatgctgtatggaccaccttttctcacaaatgacctcctacttgatcaggaaatggccaacttggtcaaagatataactcatttggcataatatcaacaaaaccttaaaaacctacctgaaggatgtcacagagaaaagagaacagagttgtttcaaccaggagatctagtgttggtsaaatctctcccctctacctccccatctatggactctttgtgggaaggaccatacttggtaatcctctctactcccactgcagttaaggtggcaggagtggaat

SEQ ID NO: 369775 - DNA, 567 bp, Homo sapiens
ccaagaggggttcattcagtcagtcagggaacttaggattttatttttgtttcacagaaggtagtgacattggaaaatagggagggtacacatctaagtaatgtcagaaacattagatgggacaaggagagagaaaaatagggcatggtgaataaccggatctgcaaagtaagagggaatgatgagttaggatgtgcagattggtgacagtgacattcatcttgttaggaaagagttcctacaataactaacttggtgagctttttgaaaatgtcatttcctgggcttcaccctagaggctgaggtggagtggggcctctgaatctrtattttaaaatcaccccagtggagtccactgcataattctgagcccatactttcattccttatgtcccaggcattgttctaggtgcaggagatgctgtggtgaatgaaagtccctgtcttttacagcctttaagtaggagagacagaaaataaagcaaatatatacaataatgtttaggttccaatacattctatgaagaaaacacaggataaggggatggagattgttggaaggtgaga

SEQ ID NO: 369776 - DNA, 469 bp, Homo sapiens
actgtagctcctgccaggatgaaaatcctaatcacatcaaccttctttctatcttccttccttttgacagcaatttactcctacctctaactcagactagataaaatgatctcattttccagagtaccctctttaccttcctatttgctctttgcctatgtatccctcctgcttccttggatacctcacacaatcacccctccccttccactagctcctaattacctctacaagtctctcaacttaactcgctctctgttaaaccagtccaatccttccctggcaaatgactgttggctttgtatctctatcaacttctgcctacattgccactcccattcctgcaaaaaactgggtctttaccaacttaacctatcaccctcattakgaaggaaaaagaccctttctgacttctaaatatgcaatcattagctgacttccccatatctgatggaccaagaatacccta

SEQ ID NO: 369777 - DNA, 610 bp, Homo sapiens
gcagccaggtagaaggaaacaaagttcttggatgatcgtgtagggtaaggtagtactgtctgacctatgatgactggctgcctaactttggattgttaaatgaggaaatatataaacctataacttgttcaaactcctatgctttgaggtctttgttatagcttcttaggcctttcgttaactaaaataaaaacaaagcataagtattccaaacaatcacccaccattcagagcctttgaaattctagatactagcattacttaagctctattgcttgcaaagaatagctacatccactcaggttagcactagtactggaggaaatttcataaggctatctctggacataagaatagcagtaatcttgaccatatgaccagatgccactgagactggaaaaagtttgtagtctgcagaattctggtgacctggcagataggctaacaactgaccccttagaagcaggcatccattcaaggcaaccccgtatccccagcccacamcatcagcatgactcagctactctccccatggctgattccccctggtctttccacttctttcttcttttttttatgtaattctgattctctcatatcgcagagttca

SEQ ID NO: 369778 - DNA, 557 bp, Homo sapiens
aagcagggtgtattcccttccggaaactctaggggagaatgcatttcctttccttttttagcttctagagacctcccacattcttttgctcatggcctgctcttctgtcttcaaastctgcaacatctggccatgtccttctcatactgctatctgtctggttctctcttttgcctcccttttctgcttttaaatacccttggttttacatttggcccactcaaataatccaggataatctccctattttgaggtaaaccaataagcaaacttaattccaccctctcccttaattcctttttgccgtgtaataatgtaacatgcaggttggaggaattagatgtgaacatcttcagaaggccattattctgcctaccacaaggagactacagatgaaagtttgctggcctaccgtgataactttctcctatattttcttataggacaaacattttgtatattttgtttatggtattaagaattgaagctcctttttagcccatatggatatcaagttgttctagcacccttaaaacagaaacaaaagcaaaagacta

SEQ ID NO: 369779 - DNA, 557 bp, Homo sapiens
aagcagggtgtattcccttccggaaactctaggggagaatgcatttcctttccttttttagcttctagagacctcccacattcttttgctcatggcctgctcttctgtcttcaaactctgcaacatctggccatgtccttctcatactgctatctgtctggttctctcttttgcctcccttttctgcttttaaatacccttggttttacatttggcccactcaaataatccaggataatctccctattttgaggtaaaccaataagcaaacttaattccaccctctcccttaattcctttttgccgtgtaataatgtaacatgcaggttggaggaattagatgtgaacatcttcagaaggccattattctgcctaccacaaggagactacagatgaaagtttgctggcctaccrtgataactttctcctatattttcttataggacaaacattttgtatattttgtttatggtattaagaattgaagctcctttttagcccatatggatatcaagttgttctagcacccttaaaacagaaacaaaagcaaaagacta

SEQ ID NO: 369780 - DNA, 538 bp, Homo sapiens
atcagtgatctttgggccaactttatgaagccaaactaaagtgcgacttgaattttttaaggtggagggacagaaaaaatatttttaaaataatggttgaaaagtttccaaagttgataaaaactataagctcacccaggaagctaaatgaaccacaaacgcaagaaaatgaaccacacaaacacaagaaacagaggtaratatacaccaagggatagcatataattgctcaaagtcagtgatataagaaaatctcaaaagcatctagagaaaagaagacataatacatacagagtgtggtgtgcacaacaatttcttcctaaagatatccatgtcctaacccttggaacctataaatgttaggtttcatggcaagaaagaatcaagggagaagagaaagttaagtttgctaatcagctaaatttaagacagagaggttatttgggttgatttgagcgagcccaatgtaatcacaagagttcttagaagtggaagagggaggcaaaagagaggaccagagatggcagtgtgagaagga

SEQ ID NO: 369781 - DNA, 538 bp, Homo sapiens
atcagtgatctttgggccaactttatgaagccaaactaaagtgcgacttgaattttttaaggtggagggacagaaaaaatatttttaaaataatggttgaaaagtttccaaagttgataaaaactataagctcacccaggaagctaaatgaaccacaaacgcaagaaaatgaaccacacaaacacaagaaacagaggtaaatatacaccaagggatagcatataattgctcaaagtcagtgatataagaaaatctcaaaagcatctagagaaaagaagacataatacatacagagtgtggtgtgcacaacaatttcttcctaaagatatccatgtcctaacccttggaacctataaatgttaggtttcatggcaagaaagaatcaagggagaagagaaagttaagtttgctaatcagctaaatttaagacagagaggttatttgggttgatttgagygagcccaatgtaatcacaagagttcttagaagtggaagagggaggcaaaagagaggaccagagatggcagtgtgagaagga

SEQ ID NO: 369782 - DNA, 503 bp, Homo sapiens
cttgcaggccatgagagacagccaaaaaactgtgagtgcccaaagcataaaaatgtgacaggggaatcattcacccccgaacacatacccacactggggaacccgaaggtccaggtcactggagaaggatttgaccttacctggagctgagacaaatttagagagtcaaacaaaatacaggggtagaagaagcagcaggaagaggcttgtgggctctcttggtccccagggaagccatttctgattttgtctcacagaggtccttgagaagggctgccaaaggatctgtgaaaagaccagaggragaaggaaacttccagctaaactttgtaacaatttcacccaaacacaaagtttcctgaacagaacttggggtagggggtgcattgggagtgcagacacagcacagaagccactgtaggctgggaggtgtgaaacctgaagccctgcttgttttctcagctaggaggctggttgtctggggcaagttctcagccctattc

SEQ ID NO: 369783 - DNA, 623 bp, Homo sapiens
ttctattatacagtaaggagtatrcagtgaacaataatgtattgtgtatttcaaaatagcaacaagagagaattttgaatgttctcattacaaaaaaaggttgaatgatgaatatactaattaccctgatttgatcactatataatgtatacatgtatcaaaacatcacactgtacccaataaatatatacaattgtcatttgtcaattaaaattttttaaaactacaaaacacttctgaaagaaattaaaggagatgtaaataaatggaaaaacatcccatgttcatgaattggaagacaatagcatgaagatgtcaatactacccaaagtgctttacagatttaattcaatcactatcaaggtcccaatgacattttttgaagaaatagaaaaactcattctaaaatttatagatttccaaaggactctgaatagccaaaacaatcccaaaaaagaacaacaaagctggaggactcacatttcctgatgtcaaatcttaccacaaatctacagtaatcaaaagtgtggtactagtatacagacatatagaccaatggaatagaatagagagtccagaaataaacattgaatagtgccaagaccattcaatgggaaaaggaa

SEQ ID NO: 369784 - DNA, 623 bp, Homo sapiens
ttctattatacagtaaggagtatgcagtgaacaataatgtattgtgtatttcaaaatagcaacaagagagaattttgaatgttctcattacaaaaaaaggttgaatgatgaatatactaattaccctgatttgatcactatataatgtatacatgtatcaaaacatcacactgtacccaataaatatatacaattgtyatttgtcaattaaaattttttaaaactacaaaacacttctgaaagaaattaaaggagatgtaaataaatggaaaaacatcccatgttcatgaattggaagacaatagcatgaagatgtcaatactacccaaagtgctttacagatttaattcaatcactatcaaggtcccaatgacattttttgaagaaatagaaaaactcattctaaaatttatagatttccaaaggactctgaatagccaaaacaatcccaaaaaagaacaacaaagctggaggactcacatttcctgatgtcaaatcttaccacaaatctacagtaatcaaaagtgtggtactagtatacagacatatagaccaatggaatagaatagagagtccagaaataaacattgaatagtgccaagaccattcaatgggaaaaggaa

SEQ ID NO: 369785 - DNA, 623 bp, Homo sapiens
ttctattatacagtaaggagtatgcagtgaacaataatgtattgtgtatttcaaaatagcaacaagagagaattttgaatgttctcattacaaaaaaaggttgaatgatgaatatactaattaccctgatttgatcactatataatgtatacatgtatcaaaacatcacactgtacccaataaatatatacaattgtcatttgtcaattaaaattttttaaaactacaaaacacttctgaaagaaattaaaggagatgtaaataaatggaaaaacatcccatgttcatgaattggaagacaatagcatgaagatgtcaatactacccaaagtgctttacagatttaattcaatcactatcaaggtcccaatgacattttttgaagaaatagaaaaactcattctaaaatttatagatttccaaaggactctgaatagccaaaacaatcccaaaaaagaacaayaaagctggaggactcacatttcctgatgtcaaatcttaccacaaatctacagtaatcaaaagtgtggtactagtatacagacatatagaccaatggaatagaatagagagtccagaaataaacattgaatagtgccaagaccattcaatgggaaaaggaa

SEQ ID NO: 369786 - DNA, 526 bp, Homo sapiens
ttaaagagggatgttttatattgactgcaaactacagatgactactcagccatgatccatcagtgccacctgccatggacacaggggaggcaagtaactgtgctaacaycacaaatctgtcatctttgacttaaaagaatatattcctctcaggtttccccatgtatgaaaattgatcatcatagcattagagaaaatgagaagaaatcccaaagcagagggaagttgtttacttctttcatgccatgctttctctgttataatgcacaggggtcatgaagacaaaataagacaccatccagaatttggaaaggaggtaaagctgccttgcagaattattatcatcatcatcattattattattattattattattattattattactattgagatggagtttcgctgtgttgcccaggctggagtgcagtagcgcaatcttggctcaccacagcctctgcatcctagcttgaagcaattctcctgcctcagcctcctgagtagctgggactacaggcaggtgcca

SEQ ID NO: 369787 - DNA, 580 bp, Homo sapiens
agcatttgaaacaattgacaattccatccttgagacctccttgctggttttctatctgtaagtcgggatactccctttcttcttcctttgtggagtcctctttctcttccaagacctatgtggtggagtttcttacacccttttctcttcttacccctggacctctcatcctgtcccttttattcacttcccatcaatctactgataatttccaaatccctaatcctagcttgggtctgcccttcaaattagcattaatattttcaactgtatatttgacgtctccattgttgccaatccaagcttatcatgtgcaaaatagaacytataactcacccaagaaaccaagaaaacacctgcttttcttcctatgttttctctttcagcaaatgtactcataaaaattgtttacctgaatgaacaatacagaggccacacctaagaatacccatttaagtcccagagttagctctttattccaaaaaaagcatctgcatcagcaagggtggaggagaaggagcttagcaacagcacatgtgacagagactttgggaattgtgtgacaagaggctgaggatga

SEQ ID NO: 369788 - DNA, 358 bp, Homo sapiens
aaatacattcaatgaatgagtgaacaacaataatagcagtcatgttttattgcataccagctatgtgatagacaccatgctgggcgctctctctctctctttctctctstgtgtgtgtgtgtgtgtgtgtatgtgtgtaatccctaatcctaaatacaactatgcaaggttagtcttgttatcctaattatacagttaaggaagtcaagggttacaagctaagtaacctggctggggtcactgttaaatgcatagctagaatttgtacccaggtctacctaatgccttatgccagtgtatttactgagctatatttatataagttgcccttttctcttccaccccacctcccagatag

SEQ ID NO: 369789 - DNA, 358 bp, Homo sapiens
aaatacattcaatgaatgagtgaacaacaataatagcagtcatgttttattgcataccagctatgtgatagacaccatgctgggcgctctctctctctctttctctctgtgtgtgtgtgtgtgtgtgtgtatgtgtgtaatccctaatcctaaatacaactatgcaaggttagtcttgttatcctaattatacagttaaggaagtcmagggttacaagctaagtaacctggctggggtcactgttaaatgcatagctagaatttgtacccaggtctacctaatgccttatgccagtgtatttactgagctatatttatataagttgcccttttctcttccaccccacctcccagatag

SEQ ID NO: 369790 - DNA, 596 bp, Homo sapiens
tgtacacagcaatccattctcatctctgacaaacttgtaggacaaaaagagaaaagattcgttcagatttccaatgctgggttggagaatatgtctgggtgacaatctatgactggtttaagtttgcacaaagagaaggagacataaggaagctcagatcatgaaaacccaactttctggatagaaaaaaaaaagcctaggttttttttttttttaattagagagacaacaagaagaataagggaaaatgggaagaayagagtgaaattaaagcaaatcttggattcagattccattaaacaggaagtttccttaaaaaaaatcaaatgcttatagcaatgctgagaatttcataggtacttcatgggatctaacaagtgaagatttttctaaattgctttgtggagactaagtgctttaaattatgtattattaacttaacagacactttacatcatgagttagccaaacattcatgtttcaattgacaagggaaagaaagtgaagagatgcttgctgaaggcacaagtttgaatacagaaagctggaatataaaaaactattgacttccaatagttttcatttatcagattact

SEQ ID NO: 369791 - DNA, 601 bp, Homo sapiens
caccagtgcccaaatttgatcttgtggtatatctgaaacactggttgtagtcttcttttgcatggaatttctcagatgctgctgtaattaaccagagaaaagaataggtgttggggtctacaggggcctcttttcaagggaggcagactctgacacccagcaagggaaggctggcattcacttttgttcagaggcagcagaamaccaaacaagatgatgagtttgtgactcaacggaaaattattttattttctggtcttaatagaagagtaagtgcaggctgagggaaaagaaacccaatttcttggtcaagggaaggtgaataaaagaaattcactggtaatagaaaacccaggtggtcagtcaggtgaccgcatctgcagtgctttccaacactttattcaggactcaaatacctgtgtgtatgagttcaaggagttcaggaagatttcctggcacagtaaatttagtgttgtttatactatttgcaggcaaattccatttctggaaattgctctgccagcctgcatttctcctcttgaaatggcataaggtgtcactaaaattccctttctcaaaacaccatgcaatagactcactg

SEQ ID NO: 369792 - DNA, 568 bp, Homo sapiens
accagccattatggaaaccaaaattaaaacctgttagaaaggctaaaataaataaaakaaaataaaaggctaacattaaatgctagctaaggtatggagaaactggatctctcatacagtaggaatgtaatggtgcagccactctgaaaaagttgggcagtttcttaaaaccctaagcatgcaactgctatatgattgagtgattgctgtcctgggcatttatcccagagaaatgaaaacttactttcacaaaacattgtgaatttctttaagcaattgtttatagaatctttattcataatatcctgaaactgacaataacccatatatccttcaatgggtgaattgttcaacaaactatggtacattgatgccacaaaatatttctcaggaataaaaagaactatgaaaagaacatgaaacacactattaaaatacaacttgaggctgggcgcggtggcttatgcctgtaatcccagcactttgggaggccgaggcaggtggatcacctgaggtcaggagtttgagaccagcctggacaatatggcaaaactccgtctctactaaa

SEQ ID NO: 369793 - DNA, 568 bp, Homo sapiens
accagccattatggaaaccaaaattaaaacctgttagaaaggctaaaataaataaaataaaataaaaggctaacattaaatgctagctaaggtatggagaaactggatctctcatacagtaggaatgtaatggtgcagccactctgaaaaagttgggcagtttcttaaaaccctaagcatgcaactgctatatgattgagtgattgctgtcctgggcatttatcccagagaaatgaaaacttacyttcacaaaacattgtgaatttctttaagcaattgtttatagaatctttattcataatatcctgaaactgacaataacccatatatccttcaatgggtgaattgttcaacaaactatggtacattgatgccacaaaatatttctcaggaataaaaagaactatgaaaagaacatgaaacacactattaaaatacaacttgaggctgggcgcggtggcttatgcctgtaatcccagcactttgggaggccgaggcaggtggatcacctgaggtcaggagtttgagaccagcctggacaatatggcaaaactccgtctctactaaa

SEQ ID NO: 369794 - DNA, 568 bp, Homo sapiens
accagccattatggaaaccaaaattaaaacctgttagaaaggctaaaataaataaaataaaataaaaggctaacattaaatgctagctaaggtatggagaaactggatctctcatacagtaggaatgtaatggtgcagccactctgaaaaagttgggcagtttcttaaaaccctaagcatgcaactgctatatgattgagtgattgctgtcctgggcatttatcccagagaaatgaaaacttactttcacaaaacattgtgaatttctttaagcaattgtttatagaatctttattcataatatcctgaaactgacaataacccatatatccttcaatgggtgaattgttcaacaaactatggtacattgatgccacaaaatatttctcaggaataaaaagaactatgaaaagaacatgaaacacactattaaaatacaacttgaggcygggcgcggtggcttatgcctgtaatcccagcactttgggaggccgaggcaggtggatcacctgaggtcaggagtttgagaccagcctggacaatatggcaaaactccgtctctactaaa

SEQ ID NO: 369795 - DNA, 432 bp, Homo sapiens
tttcctgcaacactcatccttgggagagaccttgagatgtgtttagctgacattaggaagccacagctttgggagtggctagcttctgtttctgtcctggcaaactatttctaggataaagatktagagagtcgtggaagttgcttcacaaaatgaatggaagttttgttggtttggtcacttctgatgtctttctagtcccatttggttgctgtccattgtcctcaggctgtcttctctctcttgaaaacctgctgttagcaaaggacttgataagttcattcacactgaagtgcaactgactgataacaggttagatgaagagtttgcatggtaacctattcaaaacctgaagctgagcaatgaagctgtaatgctgatatttcatgatatagatggcaagtgtgagagttaagtgtttggccgagcaaa

SEQ ID NO: 369796 - DNA, 528 bp, Homo sapiens
tttagcagcatgaatgaactttaaagcaagcaattaccttcacagacatcaatgggcagctgtcatgcatcaactgccccactagataatggtgtgagtgatccctacaaaaataggatcagcctaagtcttccaggatttttctcccaaaggatctaataactctgcttcaccctcatttgccagacttcctcccttgggtctcatggcttcctctaaaccatcccattggctgctctttccttccccactcattactcatgtcatttttaaaactaactgaagagagttaccatcccacactatgggatccagtctgtctctcctaayggagctgaggttctaggcaagcctcatcctgtcccttcttctcctcctccctttcttcccacttcctctaccttttcctccctttctgtcccattctccttcgcactcctctgtcccatacaccaaattcctacacaacttgtgtagctctctgagaaccatttgtaaagaattcactgaagttggcagttagggcaa

SEQ ID NO: 369797 - DNA, 575 bp, Homo sapiens
gagacaggaaagtaacctcacactcaactgtggggaacagcagaggtgtatgttctgtggccaccctccgaggagaaaggactgacttcagtcctctgcagcaatcggcatggcaaccagaaatccccaacgacccacttgcaaactttaacatgtagtgaatcacctaaggcagcttctgattccacaggtctggagcggagtggatgattctcagcccacactgggaacaaggaggccctctccttctctccctgaagctctgactcaggctggcctttgtccagtaaagtgaaagagaagcagaaacttcactgaagcctayaggattttttttttaatgcaaacattaagggcacagtggctcacgcttttaatcccagcattttgggaaaccaagacgggaggattacctgaggccaggagttcgagaccagcctgaataacatagcaagacctaatctctacaaaaaagaaagagagagagagcggatcacctgagcccagggggtccaggctgcagggagctatgatcacaccactgcactccagcctaggcaacaaagcaagaccct

SEQ ID NO: 369798 - DNA, 427 bp, Homo sapiens
gcctatgaaaaataaaactattatgaacgttggcacacaaatatttgtatgggtgtatatttcttttgaataaatattcaggagtgcaatggctggatcatatgctagagaaatgcttcactttttcaagaagctgctaaagtttttttccaaaatggttgcactatattatatttccacycgcaatgtttgagagttccagttcccccatattctccccaaaacttgctattgtcagtctttttaattttaataattctcataggtaaatagttgtatctcattatagctttaatttgtatcaccttgagttttaggagttctttatatgttctggatacaaatgtttatcagacatgtgctctgcaaagattttcacccagtccgtagttcgttttttcattcttttagctgtatcttttgatgg

SEQ ID NO: 369799 - DNA, 618 bp, Homo sapiens
ttgctattgtcagtctttttaattttaataattctcataggtaaatagttgtatctcattatagctttaatttgtatcaccttgagttttaggagttctttatatgttctggatacaaatgtttatcagacatgtgctctgcaaagattttcacccagtccgtagttcgttttttcattcttttagcygtatcttttgatgggcagacatttttcattttgattaagtccaacttatcaattttttaatggatagtgcatgtggtgtcatatctaagaaattttttgcataatccaagatcaaaaaaattttctctcatgttttcttctaaaagttttattcttttagattttacatttaggtctataatctttgagttaatcttgtatatagtgtgaggtatgaaccaaagttcatttttagggggagacaggtttcttcttattttatagtttcatgcttataccttaggcttgatacttgggacccctccttgatggttaatagttacactgattacagctggttacacactggttatgcactgattacagctgctctggccaatactttgctgagtagagcttagccttaggaccaaacttcatgatgatggtt

SEQ ID NO: 369800 - DNA, 496 bp, Homo sapiens
ccttggctgcaatccaggaagccttcctagaccatggcacatcagatgacagacagtggatggatgagagagagagatggatccctgaccattgtggagctactgtacctaagcgtactatctaccctgggggctccttttatggaaagaaagaaaatgcatctatcttgaataagacgtaactatttggcattggacgggattttgctctgtgatgcaggctggagtgcagtggcgcgatcacggctcactgcagcctcgacctcctgcctcaagcaatcctcctgcctcagccttccaagtaattgggactgcaggtgcatgccactacactcagctgattctttttattttttgcagagatgagttagatataccagggcttgtctctaactcctgggstcaagcaatcctcctgcctcagcctcccaaagtgcagggattacaggcatgagccaccgtgcatggcccctattttcggttttctgtcacactc

SEQ ID NO: 369801 - DNA, 510 bp, Homo sapiens
ggggtggtgtttgctgcatttagcagctttcagtatacttcttttccattttcttggttggtgacaagaccaaaataccactctgcagccccttcaccacatttctttataaagtctgtaacatggaagtttgaatgttagtattaataacaccttagttgcttctgaaacttgttatagtaataaaactgtaaaatgttatgagcataactccatctcatttttccttctctgattaagttgtcacctgtgcgcagaagccctgtgtamtgtggctcactagaaacagggaaatttggagatactttccttagaaggggctgctctggtttgcatatggtttgtctggccctgcaagtctcctgttgaaatttgagccctgttgttaaaggcctggtgggacctggtgggaagtgtttgggtcacaggggtggatcccttatgaatggcttggtgtcattctctagggaatgatttctccctcttagttcccaagagaactggttgttg

SEQ ID NO: 369802 - DNA, 626 bp, Homo sapiens
gctacccccatctcagattcatctctactccaggtgctcaaacgcttgaacacctgttaagtcagccagttgtgtgaaatcagcatacgtctgcaatgaggagaaaaatggcatgagaaatgtgtgggaaacctgctcctctgtgcttttgtatcatgtgtccacccctgggaaccttccctcagctgggaaaaaagaggaaggccaacccaaagtcttggcttgatcatttatttagctaggtgacttttctcagactgagtttcctattattagaaataacgagctgagaggtagaatgtgatgaagatcaaaggagatgacatatgggaaagtgtctgaataactctgaacattcatcygtacaacacattggattggaagtggaggtgacagcagcactttctgagaagctgcagtagagtctgtctacttcatggtagtcattatgctcagactaaagaacagagaaatcctgtaccagctctccagtttttcaatgaagatcaatcagttttgtcacactgtcttctgcattactggccccacttgctgatacaatgtctatcctccagccaagtatgcagaaagactagaaatgaataaatgaacaccctgtaacaagc

SEQ ID NO: 369803 - DNA, 626 bp, Homo sapiens
gctacccccatctcagattcatctctactccaggtgctcaaacgcttgaacacctgttaagtcagccagttgtgtgaaatcagcatacgtctgcaatgaggagaaaaatggcatgagaaatgtgtgggaaacctgctcctctgtgcttttgtatcatgtgtccacccctgggaaccttccctcagctgggaaaaaagaggaaggccaacccaaagtcttggcttgatcatttatttagctaggtgacttttctcagactgagtttcctattattagaaataacgagctgagaggtagaatgtgatgaagatcaaaggagatgacatatgggaaagtgtctgaataactctgaacattcatccgtacaacacattggattggaagtggaggtgacagcagcactttctgagaagctgcagtagagtctgtctacttcatggtastcattatgctcagactaaagaacagagaaatcctgtaccagctctccagtttttcaatgaagatcaatcagttttgtcacactgtcttctgcattactggccccacttgctgatacaatgtctatcctccagccaagtatgcagaaagactagaaatgaataaatgaacaccctgtaacaagc

SEQ ID NO: 369804 - DNA, 648 bp, Homo sapiens
ttcatccgtacaacacattggattggaagtggaggtgacagcagcactttctgagaagctgcagtagagtctgtctacttcatggtagtcattatgctcagactaaagaacagagaaatcctgtaccagctctccagtttttcaatgaagatcaatcagttttgtcacactgtcttctgcattactggccccacttgctgatacaatgtctatcytccagccaagtatgcagaaagactagaaatgaataaatgaacaccctgtaacaagcctgcttgttttcttgacctcttccaaaatgacataagccagtgtgattttggattccatcaggaatacaaaataatccctatgactctgttttttatatcaaactgataaatgattttacccacgacagaaccaggattttgaaagtcagcaaattaaataagcatgcagacattatggtgttgctccacagtcagtagggcatgagtttacaaagtgttctttcctgcagtaaaaagacggccacaaagtctttgatgctccttttatggaaaagtaaagtttatgttttcatcctttgaactggggcaggctctgtgattgctttgccccagggttaagaaattggaaacttccacttcctctcttggacattct

SEQ ID NO: 369805 - DNA, 648 bp, Homo sapiens
ttcatccgtacaacacattggattggaagtggaggtgacagcagcactttctgagaagctgcagtagagtctgtctacttcatggtagtcattatgctcagactaaagaacagagaaatcctgtaccagctctccagtttttcaatgaagatcaatcagttttgtcacactgtcttctgcattactggccccacttgctgatacaatgtctatcctccagccaagtatgcagaaagactagaaatgaataaatgaacaccctgtaacaagcctgcttgttttcttgacctcttccaaaatgacataagccagtgtgattttggattccatcaggaatacaaaataatccctatgactctgttttttatatcaaactgataaatgattttacccacracagaaccaggattttgaaagtcagcaaattaaataagcatgcagacattatggtgttgctccacagtcagtagggcatgagtttacaaagtgttctttcctgcagtaaaaagacggccacaaagtctttgatgctccttttatggaaaagtaaagtttatgttttcatcctttgaactggggcaggctctgtgattgctttgccccagggttaagaaattggaaacttccacttcctctcttggacattct

SEQ ID NO: 369806 - DNA, 648 bp, Homo sapiens
ttcatccgtacaacacattggattggaagtggaggtgacagcagcactttctgagaagctgcagtagagtctgtctacttcatggtagtcattatgctcagactaaagaacagagaaatcctgtaccagctctccagtttttcaatgaagatcaatcagttttgtcacactgtcttctgcattactggccccacttgctgatacaatgtctatcctccagccaagtatgcagaaagactagaaatgaataaatgaacaccctgtaacaagcctgcttgttttcttgacctcttccaaaatgacataagccagtgtgattttggattccatcaggaatacaaaataatccctatgactctgttttttatatcaaactgataaatgattttacccacgacagaaccaggattttgaaagtcagcaaattaaataagcatgcagacattatggtgttgctccacagtcagtagggcatgagtttwcaaagtgttctttcctgcagtaaaaagacggccacaaagtctttgatgctccttttatggaaaagtaaagtttatgttttcatcctttgaactggggcaggctctgtgattgctttgccccagggttaagaaattggaaacttccacttcctctcttggacattct

SEQ ID NO: 369807 - DNA, 549 bp, Homo sapiens
tcatacaatcaaaacagcaacaacacgtaaggcattttatttgacattactcaaaattctactgatcctatcacatttaatacgtctttttccatcagcctctggagataggaagataaaagtaacagtgagatgaaatgtagccattacattagaaatatgaacttgcagggtgcttaacgctatttcaaataccactttaaaacaaaaaataaggtyacacattccatatccgtttaaagtagactatgtaatatgttatttgtaaggtctttaatagattataaaacactttttaagtatcatttcaattaaaatttgactttattttagctgttttttctttaaaaatttttttaaatgaaattttagccttgcaatttttctcctataaaatgggctgttttttacttgctcatcaatacaatatttcttttctcatttttagttctttgtaggttgaaccttgctgtggaagcccgagagcttttaacaaaagagcttgggggaagataggtcagagttcaaattcctatgtctgccttttat

SEQ ID NO: 369808 - DNA, 571 bp, Homo sapiens
ctttgcgaactctctgttgagaggccagtgtgcagggaaagaccattacctcttacatcaggcaaaccagagttccaccccagccccattgctcaccaccagtggaactctagataaattactgaaactccataagcctccatgtgttcactcacaaaatggaatctttagtagccttaaaacgacctcattttgtcagctcccaccctgcctatcgagagggcaacctctaactctggattccataagggagaaagaaagaaagacactatgcttgtcaatgacatttttaatttggggctctcaacaaaatttcaaggtagggggacaaatcttcctaatcttttttagttgcaaaataaacattytgctcatcagttgcttctttgcaaagtggtggctgcttggacaattagcataacccatctcattgtagattccttaagtagagtagcagcatgtttgtagatgactttcaacaacaggctctgatcctgtcatttttcccgcaactcctagctatatgatttaattggggaaaaatctaccatcaaaaaatcttagaaaaagg

SEQ ID NO: 369809 - DNA, 604 bp, Homo sapiens
acaaaccttcaatttatcaaaatgcagtacctgtgaagcaaaattaagcaaagtgtaataaaatgaaacaggtcttaaaaaatcagtaatgtttatatatgctaatagtgaactatgtgaaaaagaaatcaagaaatcaatcccatttacaatagctacaaaaaaatacctaggaataaatctaaccaaaaaagtgaaagacctctataatgaaaactrtaacatattaattttaaaaattggaaaggacatgaataaatggaaagctatttcatgtccatgaaagagttaatattgttaaaatgtccacactatccaaagtgatatacagattcaatgtgatcctatcaaaattccagtgacactctacagaaatagaaatagcaattctaaaatttttatggaactgcaaaaggccctgactagctaaagcaacctgaacaaaaagaacaaagccagaggcatcacactattgatttcaaaatatactacaaacctatataccatgtaaccaaaacagcatggtactggcatgtagactaatagaacaaaatagtgagcccagaagtaaatccatgcatttacagtcaactggatttttaca

SEQ ID NO: 369810 - DNA, 604 bp, Homo sapiens
acaaaccttcaatttatcaaaatgcagtacctgtgaagcaaaattaagcaaagtgtaataaaatgaaacaggtcttaaaaaatcagtaatgtttatatatgctaatagtgaactatgtgaaaaagaaatcaagaaatcaatcccatttacaatagctacaaaaaaatacctaggaataaatctaaccaaaaaagtgaaagacctctataatgaaaactgtaacatattaattttaaaaattggaaaggacatgaataaatggaaagctatttcatgtccatgaaagagttaatattgttaaaatgtccacactatccaaagtgatatacagattcaatgtgatcctatcaaaattccagtgacactctacagaaatagaaatagcaattctaaaatttttatggaactgcaaaaggccctgactagctaaagcaacctgaacaaaaagaacaaagccagaggcatcacactattgatttcaaaatatactacaaacctatataccatgtaaccaaaacagcatggtaytggcatgtagactaatagaacaaaatagtgagcccagaagtaaatccatgcatttacagtcaactggatttttaca

SEQ ID NO: 369811 - DNA, 550 bp, Homo sapiens
catgcccagttaacatcttaacatcagcatggtacatttgtcacagttaacaaaccaataatgatacattattactaactagggtctatactttattcagatttccttagcttttatttaatgtctgttttctactccaagacctcatccaagactccacaatacatttagtaatcatgtcttctcaggcgcctctgggttgtaacactttttcagactttccctgtttttgatgaccttgacagttttgagaaatgctggtcgatatattgttataatggaatttttctgatgtgtttctcatgattagactaggggcatgaggttttggaaggatgactacagagggaaattggcattttttattgaatcatttcaagggtccatcatatcaacatcatttgtgactgttsatgctgatcctgattgcctcactgaagtagtatttgtcaggtttgcccagtgtgaagttattcttggttctcttctttctgtactgttctctttagcaggaggtctctgtgaatctcacacttaacaagtggtgact

SEQ ID NO: 369812 - DNA, 475 bp, Homo sapiens
atgtagacagctttttgtgctgtctacatatgtatgwtgctggtttaacatgatacattactgcatgagagttttcatacattctaacacaaaaagaaatacaatgttaatcttatacttttcttgccaaagtgctgaaagaaaacattgctttatgtttgtgtttttttatagggatatatttattagctctagtttctttcatatggatatataattaaaagtatattattaaattattattattaattatatatatatacagacacaccaataatgaaccagtttataaaagaaagaaatcccatttgtaatagctacaaaaataccaaggaatgaatttaaccaaggagatttaaaaatctctacaacaaatactataaaacactaatgaaataaatgtaagaggacacacataaaataaaaagacaatctatgttcatgaattggaagaactgatactgtcaatatgacc

SEQ ID NO: 369813 - DNA, 475 bp, Homo sapiens
atgtagacagctttttgtgctgtctacatatgtatgatgctggtttaacatgatacattactgcatgagagttttcatacattctaacacaaaaagaaatacaatgttaatcttatacttttcttgccaaagtgctgaaagaaaacattgctttatgtttgtgtttttttatagggatatatttattagctctagtttctttcatatggatatataattaaaagtatattattaaattattattattaattatatatatatacagacacaccaataaygaaccagtttataaaagaaagaaatcccatttgtaatagctacaaaaataccaaggaatgaatttaaccaaggagatttaaaaatctctacaacaaatactataaaacactaatgaaataaatgtaagaggacacacataaaataaaaagacaatctatgttcatgaattggaagaactgatactgtcaatatgacc

SEQ ID NO: 369814 - DNA, 475 bp, Homo sapiens
atgtagacagctttttgtgctgtctacatatgtatgatgctggtttaacatgatacattactgcatgagagttttcatacattctaacacaaaaagaaatacaatgttaatcttatacttttcttgccaaagtgctgaaagaaaacattgctttatgtttgtgtttttttatagggatatatttattagctctagtttctttcatatggatatataattaaaagtatattattaaattattattattaattatatatatatacagacacaccaataatgaacyagtttataaaagaaagaaatcccatttgtaatagctacaaaaataccaaggaatgaatttaaccaaggagatttaaaaatctctacaacaaatactataaaacactaatgaaataaatgtaagaggacacacataaaataaaaagacaatctatgttcatgaattggaagaactgatactgtcaatatgacc

SEQ ID NO: 369815 - DNA, 475 bp, Homo sapiens
atgtagacagctttttgtgctgtctacatatgtatgatgctggtttaacatgatacattactgcatgagagttttcatacattctaacacaaaaagaaatacaatgttaatcttatacttttcttgccaaagtgctgaaagaaaacattgctttatgtttgtgtttttttatagggatatatttattagctctagtttctttcatatggatatataattaaaagtatattattaaattattattattaattatatatatatacagacacaccaataatgaaccagtttataaaagaaagaaatcccatttgtaatagctacaaaaataccaaggaatgaatttaaccaaggagatttaaaaatctctacaacaaatactataaaacactaatgaaataaatgtaagaggacacacataaaataaaaagacawtctatgttcatgaattggaagaactgatactgtcaatatgacc

SEQ ID NO: 369816 - DNA, 532 bp, Homo sapiens
aacatctaacattcttctcaactggctgctttttggactcaaaaattgagtttatagtttgttctasccattaacctttgcttttctattgtttacatagaaataccctttattaaatatctggttgctcaaatcatatagaggcctgacattggtagaagaccatcttcaacaccactgcctgaactgagacacagctttaactgtttaactggactgacctattctgagactgagagactgagtcaatggcttataagataatccattgacctaatttctggactgtgaaaattcttaaggaagtttcagaatggagaatgttggtgctaagaatgaaggtctcagaagtagcctcagaagcaatagtttctctctgacactctcatacccttctgtctctgactctcattctccctcaaagctagccatagacagtagaaggtggatcttagaaacgcaactaattcaaggtgggtcatagaaaccagaaacccttttctctaaagccagacacaaaacctaaaacgat

SEQ ID NO: 369817 - DNA, 532 bp, Homo sapiens
aacatctaacattcttctcaactggctgctttttggactcaaaaattgagtttatagtttgttctacccattaacctttgcttttctattgtttacatagaaataccctttattaaatatctggttgctcaaatcatatagaggcctgacattggtagaagaccatcttcaacaccactgcctgaactgagacacagctttaactgtttaactggactgacctattctgagactgagagactgagtcaatggcttataagataatccattgacctaatttctggactgtgaaaattcttaaggaagtttcagaatggagaatgttggtgctaagaatgaaggtctcagaagtagcctcagaagcaatagtttctctctgacactctcatacccttctgtctctgactctcattctccctcaaagctagccatagacagtagaaggtggatcttagaaackcaactaattcaaggtgggtcatagaaaccagaaacccttttctctaaagccagacacaaaacctaaaacgat

SEQ ID NO: 369818 - DNA, 619 bp, Homo sapiens
gggaacatggatggagctggaggctattatccttagcaaattaactcaggaacagaaaatcaaatgccacatgttctcatttgtaagtgggaactaaatgataagaacctatgaacacgaaggaaacaacagacacagggccctacctacttaagrgaggagagtgggacgaggtagaggaggagaaaaaaataactattgggtactgggcttgataccagggtgataacataatctgcacaacaaatcaccatgaaacatgtttacctacgtaacaaaccttcacatgtacctccaaacctaaaataaaagttaaacaaattttttaactaaatataaattaaaatgcaatttatcaatatgtgtaggttgaaataaaaacagtgcttagagaaaaatgtatagcattaaactcatatacagtttgaatatcacttatcaaaaatgcttgacaccataacagtttcagacttgggatttttttggattttggagtgtttgcattatatttactggttgagcatatctgatccaaaatctgaaatccaaaatcatcaagtgatcattacatttaagcaccatgttggccccaaaaaagcttcagatattgtatttttga

SEQ ID NO: 369819 - DNA, 619 bp, Homo sapiens
gggaacatggatggagctggaggctattatccttagcaaattaactcaggaacagaaaatcaaatgccacatgttctcatttgtaagtgggaactaaatgataagaacctatgaacacgaaggaaacaacagacacagggccctacctacttaagagaggagagtgggacgaggtagaggaggagaaaaaaataactattgggtactgggcttgataccagggtgataacataatctgcacaacaaatcaccatgaaacatgtttacctacrtaacaaaccttcacatgtacctccaaacctaaaataaaagttaaacaaattttttaactaaatataaattaaaatgcaatttatcaatatgtgtaggttgaaataaaaacagtgcttagagaaaaatgtatagcattaaactcatatacagtttgaatatcacttatcaaaaatgcttgacaccataacagtttcagacttgggatttttttggattttggagtgtttgcattatatttactggttgagcatatctgatccaaaatctgaaatccaaaatcatcaagtgatcattacatttaagcaccatgttggccccaaaaaagcttcagatattgtatttttga

SEQ ID NO: 369820 - DNA, 619 bp, Homo sapiens
gggaacatggatggagctggaggctattatccttagcaaattaactcaggaacagaaaatcaaatgccacatgttctcatttgtaagtgggaactaaatgataagaacctatgaacacgaaggaaacaacagacacagggccctacctacttaagagaggagagtgggacgaggtagaggaggagaaaaaaataactattgggtactgggcttgataccagggtgataacataatctgcacaacaaatcaccatgaaacatgtttacctacgtaacaaaccttcacatgtaccyccaaacctaaaataaaagttaaacaaattttttaactaaatataaattaaaatgcaatttatcaatatgtgtaggttgaaataaaaacagtgcttagagaaaaatgtatagcattaaactcatatacagtttgaatatcacttatcaaaaatgcttgacaccataacagtttcagacttgggatttttttggattttggagtgtttgcattatatttactggttgagcatatctgatccaaaatctgaaatccaaaatcatcaagtgatcattacatttaagcaccatgttggccccaaaaaagcttcagatattgtatttttga

SEQ ID NO: 369821 - DNA, 619 bp, Homo sapiens
gggaacatggatggagctggaggctattatccttagcaaattaactcaggaacagaaaatcaaatgccacatgttctcatttgtaagtgggaactaaatgataagaacctatgaacacgaaggaaacaacagacacagggccctacctacttaagagaggagagtgggacgaggtagaggaggagaaaaaaataactattgggtactgggcttgataccagggtgataacataatctgcacaacaaatcaccatgaaacatgtttacctacgtaacaaaccttcacatgtacctccaaacctaaaataaaagttaaacaaattttttaactaaatataaattaaaatgcaatttatcaatatgtgtaggttgaaataaaaacagtgcttagagaaaaatgtatagcattaaactcatatacagtttgaatatcacttatcaaaaatgcttgacaccataacagtttcagacttgggatttttttggattttggagtgtttgcattatatttactggttgagcatatctgatccaaaatctgaaatccaaaatcatcaagtgatcattacatttaagcacsatgttggccccaaaaaagcttcagatattgtatttttga

SEQ ID NO: 369822 - DNA, 519 bp, Homo sapiens
ttgtaccccaaaatatattaaaataaaatgaaaattaacaaaacaaattgtaccaggcaaacaataaaaaaaagcaaatataaacaaacatttatatatttataagtgaaatttgtcagtttcaagaatcttttcagttatttaaaatctaaaagtcatgttatgttacattaagtagtagataatcataaaatatctgaggaactattttgtttgtttgtttttggtttccacagaaattcatcttaataaatatttaattactgaaatcatgtagmggtctgacttgtctggaagctcatctacaacaacacttcctgaaatgagacataactgttaactgtttaattggactggcctatttggagattaagaggcagagacaatggcttatgagacaacccaccaacccaatttctagacttcgaatctttttgtggaagtttcagattggagaacattgaggctcataaaacaatacccccgaattaagatctcagaagcataggttttctctgt

SEQ ID NO: 369823 - DNA, 519 bp, Homo sapiens
ttgtaccccaaaatatattaaaataaaatgaaaattaacaaaacaaattgtaccaggcaaacaataaaaaaaagcaaatataaacaaacatttatatatttataagtgaaatttgtcagtttcaagaatcttttcagttatttaaaatctaaaagtcatgttatgttacattaagtagtagataatcataaaatatctgaggaactattttgtttgtttgtttttggtttccacagaaattcatcttaataaatatttaattactgaaatcatgtagcggtctgacttgtctggaagctcatctacaacaacacttcctgaaatgagacataactgttaacygtttaattggactggcctatttggagattaagaggcagagacaatggcttatgagacaacccaccaacccaatttctagacttcgaatctttttgtggaagtttcagattggagaacattgaggctcataaaacaatacccccgaattaagatctcagaagcataggttttctctgt

SEQ ID NO: 369824 - DNA, 519 bp, Homo sapiens
ttgtaccccaaaatatattaaaataaaatgaaaattaacaaaacaaattgtaccaggcaaacaataaaaaaaagcaaatataaacaaacatttatatatttataagtgaaatttgtcagtttcaagaatcttttcagttatttaaaatctaaaagtcatgttatgttacattaagtagtagataatcataaaatatctgaggaactattttgtttgtttgtttttggtttccacagaaattcatcttaataaatatttaattactgaaatcatgtagcggtctgacttgtctggaagctcatctacaacaacacttcctgaaatgagacataactgttaactgtttaattggactggcctatttggrgattaagaggcagagacaatggcttatgagacaacccaccaacccaatttctagacttcgaatctttttgtggaagtttcagattggagaacattgaggctcataaaacaatacccccgaattaagatctcagaagcataggttttctctgt

SEQ ID NO: 369825 - DNA, 519 bp, Homo sapiens
ttgtaccccaaaatatattaaaataaaatgaaaattaacaaaacaaattgtaccaggcaaacaataaaaaaaagcaaatataaacaaacatttatatatttataagtgaaatttgtcagtttcaagaatcttttcagttatttaaaatctaaaagtcatgttatgttacattaagtagtagataatcataaaatatctgaggaactattttgtttgtttgtttttggtttccacagaaattcatcttaataaatatttaattactgaaatcatgtagcggtctgacttgtctggaagctcatctacaacaacacttcctgaaatgagacataactgttaactgtttaattggactggcctatttggagattaagaggcagagacaatggcttatgagacaacccaccaacccaatttctagacttcgaatctttttgtggaagtttcagattggagaacattgaggctcataaaacaatacccccraattaagatctcagaagcataggttttctctgt

SEQ ID NO: 369826 - DNA, 539 bp, Homo sapiens
ttcttcccttagagtgggcttcctgtacatgcagtacccttcttacccttrggaggtgagtacacgcagtatttttaggaagttgtatgcgtgctcatctgagactttcttcccttttctggtggagcgtcctcggaaggtcatactctgccattttgtctcttaatgcacatgcccaggaagttgcatctctctggcacctacaattaacactttagtgcaacaggtgtggaccataaaaaaaatgacctctccctgacaccggctgtcaatttatcacttttacaatgtgataattgctgaacaattacccaacattcctaatgggtggagaaagagccctctcctggaccactcctcctaactgccataaagaacttatctgacctactttgtttgatagtaggtcataagacccccttttaaaagagggtccttacctatatccagagggaagaaatgctgcacagagaggctaggacaaatacgaacagacgggctttgctgtttcccgactcagtctattagcattagctatt

SEQ ID NO: 369827 - DNA, 539 bp, Homo sapiens
ttcttcccttagagtgggcttcctgtacatgcagtacccttcttacccttaggaggtgagtacacgcagtatttttaggaagttgtatgcgtgctcatctgagactttcttcccttttctggtggagygtcctcggaaggtcatactctgccattttgtctcttaatgcacatgcccaggaagttgcatctctctggcacctacaattaacactttagtgcaacaggtgtggaccataaaaaaaatgacctctccctgacaccggctgtcaatttatcacttttacaatgtgataattgctgaacaattacccaacattcctaatgggtggagaaagagccctctcctggaccactcctcctaactgccataaagaacttatctgacctactttgtttgatagtaggtcataagacccccttttaaaagagggtccttacctatatccagagggaagaaatgctgcacagagaggctaggacaaatacgaacagacgggctttgctgtttcccgactcagtctattagcattagctatt

SEQ ID NO: 369828 - DNA, 539 bp, Homo sapiens
ttcttcccttagagtgggcttcctgtacatgcagtacccttcttacccttaggaggtgagtacacgcagtatttttaggaagttgtatgcgtgctcatctgagactttcttcccttttctggtggagcgtcctcggaaggtcatactctgccattttgtctcttaatgcacatgcccaggaagttgcatctctctggcacctacaattaacactttagtgcaacaggtgtggaccataaaaaaaatgacctctccctgacaccggctgtcaatttatcacttttacaatgtgataattgctgaacaattacccaacattcctaatgggtggagaaagagccctctcctggaccactcctcctaactgccataaagaacttatctgacctactttgtttgatagtaggtcataagacccccttttaaaagagggtccttacctatatccagarggaagaaatgctgcacagagaggctaggacaaatacgaacagacgggctttgctgtttcccgactcagtctattagcattagctatt

SEQ ID NO: 369829 - DNA, 598 bp, Homo sapiens
ttcaactgacctgtggcaagagagcaaagtcaattaaatggagaaagaatagtattttcaacaaatggtgctggaatatttggtctaacatatgcaaaaaaaatatgaatctaaacacaaattttacatgtttctctccacacacacacaaaactcaaaatggatcatagatctaaatatgaaatacaaaactatagaactcggatatgatgacagcacaaaatctaggtgattggttttgacagtgaatgtttagatacatcttcaatgtgcattgctaattgaaaggaactggtctggaagagctacatataatataatttcacttttttcacatcctggaaaaattwaaattagataataaaaagatcagtgtttgccagggttttaggggggaggagggagggatgaataaatctatcatggtagatttttagggcattaaaactgtctttatgaaactataatagtagatacatatcactgtatatgagaatttgttcaaatccatagtgtgtacaacaccaagagtgaactctaatgggaattacggactttagttaataacaacatattaatattaactcgtcaaatgtaa

SEQ ID NO: 369830 - DNA, 579 bp, Homo sapiens
gttttcaaccccggttgcgtaccagaaatacttgtggagaattttaaagtacagatatcgcatgctcaactgtagattttcctattcagaatatcctgctttagagtctcagtctgaaagttttgcaagttctctaggtgtagtgggtgctgacatctatgtggcagatctaggaattcattccctaarctgtcaggaatgttgattgtcaatggctcacagcttagacactctcaaaaaatcaccctctttgaaagtaaactacctctcccaagattgtacttctgtcctggaggtagcttacttccagtgattattgcatagcttacaaatactccaccctttgcttcacctggaaactctgaaagatcatttcagctccagaattccctgtatacaaaacagggagttgtagtggttgcattgctattgaacttctgccactgccaaccctgcttccttcactattacaggtgttaatcacaagaacacttttcaataaacctgcatgcaaatcttaaatatatattttatatatggatgtagagctctggttctgagacaagatggcctagactt

SEQ ID NO: 369831 - DNA, 619 bp, Homo sapiens
ttggtatacagaacatttacaataaagttaactatatattaaactaattattaaatratacatatttcaaatgtaaaacacataacaccttaatgtggaagctgaaatttcttcttttgtaatttcctatctaaatgaacttcaccccatgtatgattttaatggaatgagttaccctctggattctccttttcattcctacattttttggtgttaaatttaatcattctgtaaaagttaacattatttttatatgtatgtttggacccctgggttatcataaaatatgatattcacattttataactttttgcaaatcaaacacatattttcattccttttatacaaggttatttgcattttctttcttcttttttttttttgagacagggcttcactcttttgcctaggctggactatagtggcatggtcttggctcactgctacctccacctcccaggctcaagcaatcctcccacctcagcctaataggtagctgggactacaggcatgcacaaccaaccacacctggataatttttgtagttcttttgtagagacaaggttttactatattgttaaagctggccgtggactcctggactcaagcaattaacctg

SEQ ID NO: 369832 - DNA, 619 bp, Homo sapiens
ttggtatacagaacatttacaataaagttaactatatattaaactaattattaaatgatacatatttcaaatgtaaaacacataacaccttaatgtggaagctgaaatttcttcttttgtaatttcctatctaaatgaacttcaccccatgtatgattttaatggaatgagttaccctctggattctccttttcattcctacatttkttggtgttaaatttaatcattctgtaaaagttaacattatttttatatgtatgtttggacccctgggttatcataaaatatgatattcacattttataactttttgcaaatcaaacacatattttcattccttttatacaaggttatttgcattttctttcttcttttttttttttgagacagggcttcactcttttgcctaggctggactatagtggcatggtcttggctcactgctacctccacctcccaggctcaagcaatcctcccacctcagcctaataggtagctgggactacaggcatgcacaaccaaccacacctggataatttttgtagttcttttgtagagacaaggttttactatattgttaaagctggccgtggactcctggactcaagcaattaacctg

SEQ ID NO: 369833 - DNA, 596 bp, Homo sapiens
ataaaatatccagtccagtcttatgttgagtagaagtggtgagagtgggcatctttgtcttgttccagttctcaaggggaatgttcccagcatttgcccattcagtatgatgatgactatgtgtttgccatagaaagcttttttgttgtatgtttcctcaataccttgcttgttgaggattttaagatgaacagatgttaaattttatcaaaacccttttctgcatctattgagataattgtgttagttttgtttttagttccttttatgtaatgaattaaatttattgattttcctatgttgaaacaatctttcaccctagggataaagcctacttgataatgatggattagctcttcgatgtgctactaaatttggtttgctcatactttgttgaggrtttttccatctctgtttatcaaatatattagtctaaagctttctttttgtgtatttatcaggttttgatattagagtgatgctggcctcctagaatgtgttaggtaggagtccctcctcctcaatattttagattagtgtcagtaggaatggtaccagcctttctttatacttgtagaaattaagctgtgaatcca

SEQ ID NO: 369834 - DNA, 498 bp, Homo sapiens
gtccacaggccccaatgcaagtccaaaatccagtgggacaggcaaatcttaaaactccaaaatgatcttctttgactcaatgtctcacatccaggtcacactaaggcaagaggttggctcccacagccttgggcagctctgcccctgtggctttgcagggcacatctcccctcccagctgctttcacaagctggcattgagtgtctttggcttttccaggcacacagtgcaagctgtcggtggatctaccattctgcaatctagaggatgatggccatcttctccagtaggtagtgtcccagtgaggactctatgtcggggctccaacccctacatttttcttccacactgccctaacagaggttctccatgagggctctgctcctcaagtaaacttctgcctagatatccaggcatttcsatacatcctctgaaatctaggtgggggttcccaaaccttaattcttgtcttctgtgcactcacaggcccaacaccaa

SEQ ID NO: 369835 - DNA, 579 bp, Homo sapiens
gctttctcctatccaccaatatttttatgctttattctggagggcttaggtccataatccatcatcatatgctaatttggcctaaggctgcattctttactgtttcttctatcccttaaaattcttccatcctgcctttccttttcttaaagcygccttctcttttctagaagactgtagtcagaaatcgttctagaaaatattttctgtttttgttaatgaagatatccttaattgtagataacattaatgtaaataacagatagtatagatagctcttataacacaatcacataaatttaagactttaggaaggatcttaaaataaaaaattatcctgatgatttcaagtaccaaaccaggacagcgaaggggctggttttgctttgaagactattttaccattcttcaaaagacaggattaaaataaatgcctacttcacttttgtcaaatatttacctagaagcttcatacatagacatgttagcaattatgttattcccattctgaatctaagatatatcttatcataaggtgcgtttttaaatcaataattatataataacatataaattcaa

SEQ ID NO: 369836 - DNA, 656 bp, Homo sapiens
catgaactagccggaaatgaaaaataagcttcaaatttttctttcaaagatgagaaactggcagtttgatgaaaattgtttgcatagattagataggtataaaatcaggcttccagatattaacttgcaacatagtctgtatataatccattttatttctgctcattttcgcataattgaaagcaattcactaattaacaatgttcttgatccaaagaatcttaaaagatcattaatacattaatgattaatacattttttactaaaatgttagaaatcacctgaacaaactagatgcataattttatactaatttattaaaatataagttaaattttctaaaacaaaaatttgtagaacttaagatgaccccaaacttccataaatcaacaataatcaagtttaatctttcagcttgaattttgagattaaaaaacaatatacctagtgcctrtctcatcatgttacatgtaaacaaaatacttataaacccaagctctgtcacttttgtgcaacgttgaactatgcgcccagttgacagataatatggactccccatgcctcaccgaggtgctccaagttaaacagaattaggtggccatggctgggtgagggaatggtcacccactctgtgttctctgaaagatgtaaaagtg

SEQ ID NO: 369837 - DNA, 560 bp, Homo sapiens
tattttataacagacagcgtattacatgtcacactatatgaatgaccttgtgcttctctctcaaagtggaaagtctatatagcagttattacttggtgaagtccctggaattgcttgcctctatccacagtttgccagagacctttgaatttctagggttttttcaccatattttaaatgtatctcagggaattaggctgttgtgtgtcagtattaggtttagccacagcacactggattactagaacacctatttcagccyctgctgcctagaaattccaaatgaaaaattccttaaacctactttatttctcctagtacattttcatggtgatctagagacttagcattccttgtattagccaggcttctataaaatattattcttggccaggtgtggtcactcacacctgtaattccagcactttgggaggctgaagcaggtggacaccttgagcccatgagtttgagaccagactgggtaacatggagaaaatccatctctacaacaaaaaaacaaaaattaagagttaatttgtttatattacattagttttaat

SEQ ID NO: 369838 - DNA, 605 bp, Homo sapiens
accatttattgatgagattatcttttcccctatgtatattcttggcatctttgtcaaaaatgaattcactgtgggtgtataaatttgtttctgtgttctctattctgttccattggtctatgtgtctgtttttatatcagtaccaagttgttttggttactatagctctgtagtaccatttgaagtcaggtaatgtaattcctccagttttgtcctttttgcttaggacagctttggctatactgggtcttttgtggttccacataaattttaacattttttctaattctgtgaagaatgtcattggtattttgataggcattgcattgaatctgcagattgctttggtaatatgtatattttaataatattggttttttagttcattagtatagatgattttttacttttttgtttcctcttcaatttctttcatcatggatttatggtttttgttaaaaagacctttcacttattttrttaatttctaggtatttaattttatgtgtggctattgcaaatgaaattacttttttattcttttttcacattgttcactgttggcatatagaaatggtactgatttttgtgtgttgattatgtgc

SEQ ID NO: 369839 - DNA, 606 bp, Homo sapiens
gccctgcaacttgactgaatttgtttatcagttctaatagttttcttgtggagctgttcagttttttcaaatataagatcatatcattagcaggcagggataatgtgacttattcttttccagtttgratgccctttatttctttctcttttctgattgctctaggtaggaacttcagcactatgttgaataacagtgttgacaatgggcatctttgtcatgttccacatcttacaggaaaggatttcactttttcctcattcagtatgatactagctgtgggtctgtcatatatggcatttattatgttgagatatgtcccttctacacacggttttttagggtttttaatcatgaagagatatgaaattttatcaaatgttttttaacatcaattgaaataatcatatggattttgtccttcattctgtttctatgatgtattacactgattgatttgcccctgttggaccatccttgcatcccaggattaaatcccacttgatcataatgaatgatatttctaatgtattgctgaatttggtttgctagtgttttgttgaggacatttacatcaacattcatcagagatattggcctgtagtt

SEQ ID NO: 369840 - DNA, 606 bp, Homo sapiens
gccctgcaacttgactgaatttgtttatcagttctaatagttttcttgtggagctgttcagttttttcaaatataagatcatatcattagcaggcagggataatgtgacttattcttttccagtttgaatgccctttatttctttctcttttctgattgctctaggtaggaactycagcactatgttgaataacagtgttgacaatgggcatctttgtcatgttccacatcttacaggaaaggatttcactttttcctcattcagtatgatactagctgtgggtctgtcatatatggcatttattatgttgagatatgtcccttctacacacggttttttagggtttttaatcatgaagagatatgaaattttatcaaatgttttttaacatcaattgaaataatcatatggattttgtccttcattctgtttctatgatgtattacactgattgatttgcccctgttggaccatccttgcatcccaggattaaatcccacttgatcataatgaatgatatttctaatgtattgctgaatttggtttgctagtgttttgttgaggacatttacatcaacattcatcagagatattggcctgtagtt

SEQ ID NO: 369841 - DNA, 606 bp, Homo sapiens
gccctgcaacttgactgaatttgtttatcagttctaatagttttcttgtggagctgttcagttttttcaaatataagatcatatcattagcaggcagggataatgtgacttattcttttccagtttgaatgccctttatttctttctcttttctgattgctctaggtaggaacttcagcactatgttgaataacagtgttgacaatgggcatctttgtcatgttccacatcttacaggaaaggatttcactttttcctcattcagtatgatactagctgtgggtctgtcatatatggcatttattatgttgagatatgtcccttctacacacrgttttttagggtttttaatcatgaagagatatgaaattttatcaaatgttttttaacatcaattgaaataatcatatggattttgtccttcattctgtttctatgatgtattacactgattgatttgcccctgttggaccatccttgcatcccaggattaaatcccacttgatcataatgaatgatatttctaatgtattgctgaatttggtttgctagtgttttgttgaggacatttacatcaacattcatcagagatattggcctgtagtt

SEQ ID NO: 369842 - DNA, 606 bp, Homo sapiens
gccctgcaacttgactgaatttgtttatcagttctaatagttttcttgtggagctgttcagttttttcaaatataagatcatatcattagcaggcagggataatgtgacttattcttttccagtttgaatgccctttatttctttctcttttctgattgctctaggtaggaacttcagcactatgttgaataacagtgttgacaatgggcatctttgtcatgttccacatcttacaggaaaggatttcactttttcctcattcagtatgatactagctgtgggtctgtcatatatggcatttattatgttgagatatgtcccttctacacacggttttttagggtttttaatcatgaagagatatgaaattttatcaaatgttttttaacatcaattgaaataatcatatggattttgtccttcattctgtttctatgatgtattacactgattgatttgcccctgttggaccatccttgcatcccaggattaaatcccacttgatcataatgaatgatatttctaatgtattgctgaatttkgtttgctagtgttttgttgaggacatttacatcaacattcatcagagatattggcctgtagtt

SEQ ID NO: 369843 - DNA, 249 bp, Homo sapiens
ttctaatgtattgctgaatttggtttgctagtgttttgttgaggayatttacatcaacattcatcagagatattggcctgtagtttatttttctgatgtgtctttgtctggttttggtatcagagaaatactggcctcatagaatatgtttggaagtattcccttcttctctatttttcagaacagtttggacaggattggttttagttcttctttaaatgtttggtaaaattcatcagtgaagccatt

SEQ ID NO: 369844 - DNA, 517 bp, Homo sapiens
acttttcaaaaaaccaactttttgtttcattgatcttttctattttttattttaatttcacttatttctgctctgatctttattatttcttttctcctactaatttgggatttggtttgctctggcttttctatttatttaaggwgtgtcattagaatatttacttggaatttttcctccttttgatgtagacactttacctataaactcccctctttggtattgtttttactgtatcccttatcccatatgttgtgttttcattattatttgtttcaagaaacttttcaatttccttcttaatttcttcattgaatcactggtcattcaggagcatattgcttaattttcattacttgtataatttcaaaaattcctcttgttattaatatctagttttattgtggtcaaagaagatacttaatgttacttcaatatttatgaatgtattaagacttgttttgtggcttaagatatggtctatcttagaattatacatgtgctgaggagaagaatg

SEQ ID NO: 369845 - DNA, 517 bp, Homo sapiens
acttttcaaaaaaccaactttttgtttcattgatcttttctattttttattttaatttcacttatttctgctctgatctttattatttcttttctcctactaatttgggatttggtttgctctggcttttctatttatttaaggagtgtcattagaatatttacttggaatttttcctccttttgatgtagacactttacctataaactcccctctttggtattgtttttactgtatcccttatcccatatgttgtgttttcattattatttgtttcaagaaacttttcaatttccttcttaatttcttcattgaatyactggtcattcaggagcatattgcttaattttcattacttgtataatttcaaaaattcctcttgttattaatatctagttttattgtggtcaaagaagatacttaatgttacttcaatatttatgaatgtattaagacttgttttgtggcttaagatatggtctatcttagaattatacatgtgctgaggagaagaatg

SEQ ID NO: 369846 - DNA, 583 bp, Homo sapiens
atgggtctttttttaaatttattcagccactctatgtcttttgattggagagtttagtccatttacatttaatgttattattaataagaaagaacttactcctrccattttgttatttgtttctggatgttttgtggtcttctcttcctttcttcttttattcatgtcttcctctagtaaagatattaatgatattctctggtgatatgattgactttcttgctttttattttttgtgtatctattgtaggtttttttggttggaggttacaaggaggcttgccaacactatcttataacccattattttaacctgataaaaacttaacattatttgcataaacaaacaaacagaaagctaataaaacattaccttaactttgttgccctgatttttatctttttgatgtttttatttataccttattgtaatgactatgtcttgaaaaggtgctgtagttattatttttgattggttcattgttcagtctttctagttagcctaagagtagtttacacaccacagttacagacttgtaatatgctatacttgtttgtgtacctactattaccaggaagtttt

SEQ ID NO: 369847 - DNA, 583 bp, Homo sapiens
atgggtctttttttaaatttattcagccactctatgtcttttgattggagagtttagtccatttacatttaatgttattattaataagaaagaacttactcctaccattttgttatttgtttctggatgttttgtggtcttctcttcctttcttcttttattcatgtcttcctctagtaaagatattaatgatattctctggtgatatgattgactttcttgctttttatttttygtgtatctattgtaggtttttttggttggaggttacaaggaggcttgccaacactatcttataacccattattttaacctgataaaaacttaacattatttgcataaacaaacaaacagaaagctaataaaacattaccttaactttgttgccctgatttttatctttttgatgtttttatttataccttattgtaatgactatgtcttgaaaaggtgctgtagttattatttttgattggttcattgttcagtctttctagttagcctaagagtagtttacacaccacagttacagacttgtaatatgctatacttgtttgtgtacctactattaccaggaagtttt

SEQ ID NO: 369848 - DNA, 583 bp, Homo sapiens
atgggtctttttttaaatttattcagccactctatgtcttttgattggagagtttagtccatttacatttaatgttattattaataagaaagaacttactcctaccattttgttatttgtttctggatgttttgtggtcttctcttcctttcttcttttattcatgtcttcctctagtaaagatattaatgatattctctggtgatatgattgactttcttgctttttattttttgtgtatctattgtaggtttttttggttggaggttacaaggaggcttgccaacactatcttataacccattattttaacctgataaaaacttaacattatttgcataaacaaacaawcagaaagctaataaaacattaccttaactttgttgccctgatttttatctttttgatgtttttatttataccttattgtaatgactatgtcttgaaaaggtgctgtagttattatttttgattggttcattgttcagtctttctagttagcctaagagtagtttacacaccacagttacagacttgtaatatgctatacttgtttgtgtacctactattaccaggaagtttt

SEQ ID NO: 369849 - DNA, 583 bp, Homo sapiens
atgggtctttttttaaatttattcagccactctatgtcttttgattggagagtttagtccatttacatttaatgttattattaataagaaagaacttactcctaccattttgttatttgtttctggatgttttgtggtcttctcttcctttcttcttttattcatgtcttcctctagtaaagatattaatgatattctctggtgatatgattgactttcttgctttttattttttgtgtatctattgtaggtttttttggttggaggttacaaggaggcttgccaacactatcttataacccattattttaacctgataaaaacttaacattatttgcataaacaaacaaacagaragctaataaaacattaccttaactttgttgccctgatttttatctttttgatgtttttatttataccttattgtaatgactatgtcttgaaaaggtgctgtagttattatttttgattggttcattgttcagtctttctagttagcctaagagtagtttacacaccacagttacagacttgtaatatgctatacttgtttgtgtacctactattaccaggaagtttt

SEQ ID NO: 369850 - DNA, 434 bp, Homo sapiens
ccccattattcattatggaagggaatggagaaaaatatgaaatttctccatgcacatattataatggcaaaaacatttttttaaatgacatactaagtgttgatgaagagatagagcaactggagctctcacatattgttggtaggaaagcaagattatatagctacttgagaaaactgttaagtacctagttagaatgttaattatacacttaaaatgttacctggtaatcttactgctaggtwttttcctgtgtgaaataagatcttaaatacacacacacacacacacacacacacacacacacacacactgtaaaagaatttttacaactgctatatttataatttccagaaaacagaaagaacaaatttccttgtaatgggttaataaagaagcaggctacagtacaactatctatataacataatact

SEQ ID NO: 369851 - DNA, 434 bp, Homo sapiens
ccccattattcattatggaagggaatggagaaaaatatgaaatttctccatgcacatattataatggcaaaaacatttttttaaatgacatactaagtgttgatgaagagatagagcaactggagctctcacatattgttggtaggaaagcaagattatatagctacttgagaaaactgttaagtacctagttagaatgttaattatacacttaaaatgttacctggtaatcttactgctaggttttttcctgtgtgaaataagatcttaaatacacacacacacacacacacacacacacacacayacacactgtaaaagaatttttacaactgctatatttataatttccagaaaacagaaagaacaaatttccttgtaatgggttaataaagaagcaggctacagtacaactatctatataacataatact

SEQ ID NO: 369852 - DNA, 632 bp, Homo sapiens
aaagtcttagtttcttcatttataaaatgacagtaataatgcctacattcttatctcacagggttcttgtgatagtcaaataaacttaaaacgcatgtgtgttgaacacattataaatcatagttctatgaaagtatagagtattgctgtttttttctgacagccatatatatctgcttttaaaaatgccaatagttttattatttctggttaacaagataagttagcaaacatatattgaaccccagttaaatgagttgcatggtgctaagtacctagaagggtttcccagcttccatgttctgagtaacagagcctttggacaggtcctggggtagccagaaatgtggccaggaacaacatcaggcatttactcaagtgtgctgtgcaaattctagtattttctgtgcacgcaatgatgtgagaatttgggaggccctgccaaaatgattaaaaaccaaaagcacatatattccctgttcctttgaaggttataatctagtagagcagcagattgratacttaaaatgacataaaaattattactgagcatgatattgggtttataaagctaaagtactacttagataccactttactgggagagattaaaattggtggaataaattgaa

SEQ ID NO: 369853 - DNA, 611 bp, Homo sapiens
gaatatttgaactagatattactaacaagtataatgatattgaaacagtgtgtttctggtactgaaggtacagatgggacataatggagattcctaaaatggttttgtgtgtgctcatgttataaatatcatttcaaattaktaaagaaagtctggattattcagagaatagcctgacaactggataatcatacaggacaaaaaaaaattagttccctatctctcactgtatcaagtaaatgcagattatcatatcttggaaattaaaatatacaaactggcaaataattaggtaacattgtagtaaggaaagcttttataagcagatcatgtttacagaaaaacacattatgaaagaataatttattttatcataaaatgggaaatgacacaaaggattatcaggagtatgtttagttcacacatcttagtttttccagatcatcgaagagaattctataattgtcatacaaatttccctcctccacttctgccaactggcacttctgccgtttgccaaatgaaccaatctcttagccactcctggtgttaggcatattccctctcacacaattcttgatatttatcttaaacacttttcacttgcatga

SEQ ID NO: 369854 - DNA, 500 bp, Homo sapiens
cttacaattacatgaaataatgattcagtttattctctgtggagtcttaggattgatgaaattcagaatatgtcaggtagcatgctgtgtgtgctaaggatacctggactctcttcttataaatctccgattctaaacatccactgaaggttcttgaataatgtcattttgttacatgctgttttgtatagtgatgagaaaaaaaatggattcctggctggagccactgtctgtgtggtgtttgcatgttctttccatgtccacatgggttttytctggctactttggtttccttctgtatcccaaagatgtgcatgtgcacattagatgaattggcatattaaattgtccccatctgggcaagcgcatgtgtgtgattgtgtgccctgtgatgggatgtcatcctgtccagagttagttctttcctggtactctgagctgctggggtaggcactggacacccaagaccctgaactggaatgattgggtaaatagttatc

SEQ ID NO: 369855 - DNA, 579 bp, Homo sapiens
catgagttctatgtcagttataagctagagcccctttgcctggtataattaagatggcttgctcttgcgattacaaaggctaaaagaagtagaataaatggacatcaggaagggaaaaagagaaagaaagagtatagccaaataataggwatatttctatgtctacatttttgctaaattctgtgctttgcatcagaagcatttttgccatttagttagtgttcctaattataaagctaatgggtgaaacattcatttatttattcaacagatacatcttgagtgcctactgtatactaggatttgccatcagtactgaatagaacaggcagaatttccataaggttttattaaagggaaaactagcttaattaactattcccacattgctagacatttaggttgttttccattttcctctttgaaatatagatctttcccttgttttgtattattttcttaggatagactaccagaaatggaatagttttccaaagatgtgagcattttctggggggtggggtggggtggggaaactatcaatttatatttaaaaatgttagtgtttccacatcaaaa

SEQ ID NO: 369856 - DNA, 579 bp, Homo sapiens
catgagttctatgtcagttataagctagagcccctttgcctggtataattaagatggcttgctcttgcgattacaaaggctaaaagaagtagaataaatggacatcaggaagggaaaaagagaaagaaagagtatagccaaataataggtatatttctatgtctacatttttgctaaattctgtgctttgcatcagaagcatttttgccatttagttagtgttcctaattataaagctaatgggtgaaacattcatttatttattcaacagatacatcttgagtgcctactgtatactaggatttgccatcagtactgaatagaacaggcagaatttccataaggttttattaaagggaaaactagcttaattaactattcccacattgctagacatttaggttgttttccattttcctctttgaaatatagatctttccctygttttgtattattttcttaggatagactaccagaaatggaatagttttccaaagatgtgagcattttctggggggtggggtggggtggggaaactatcaatttatatttaaaaatgttagtgtttccacatcaaaa

SEQ ID NO: 369857 - DNA, 633 bp, Homo sapiens
aacatgcacatatatgtctgcatcagacattcttcataaatgcttctgatgtgagtatcyctgtctgatataaccatcaccaaacccttttggacattctttctagccattcccatggggtaggtgcacacacatatcagttacctctttcagccaaaagctaaaaatgaatttaaaagccagttaatgcagcagctttaattttttaaactacagaataaaatcaataagtcagttaggacattagaaaagggctgcaaacagtacatcagttttaacacaaaagcaaaaacaaaacaaaagccaatgaaaaggtactaaatatcaaagagatattgatcacagtttcgtggtacttcctctttaacatggtaaattattcagtttcattcttgattaaagagaggaaagagattaagtattaaataattcctaatatacatttttttacttccataacattggttctaaaatgaactaagatacatttgtgggtggaatttcagtgttatcagcattatgagagaaagaaaataaaagcaaatttcagcaggaaaaagtgcctgcacaaatataccatgtaaaacagtaccagagatatatagactaacctatctctgatataaataaaat

SEQ ID NO: 369858 - DNA, 606 bp, Homo sapiens
agtgaaataattagaattatattgtatgaaaaattttaaattattttgttaaatgcttataatgtgggaaaaaattttagagtaaaaattttctataaaatatatattaattatgcaatagaataactatgcaaaaatataaaaaaggctttttacttccatgtttatgcttttctgtatttcctacaattattgtattgaaaattattatatttatgatttaaggaaaagtattctttttaaaaatatgactctgatctctcctttgatcttaamttttactatctgtgcaatactctgcacagttactctttaggaaaagatttctagtgtgctacaaaagattacacataataccttaaaagatggttggaatatttcagccactgttttatttatttttatttttacttttacttaaagcaatattattatagttggagttatcttctcttttatcctctcctgattacagaaccccttcctttcacctttcactttaactggttggtagcctccaggtttttcccacactttctgtttgcacagggctctgtgccctattgcttatgttaaaaaaaaattaaaaagaaagaaagaaaaaaa

SEQ ID NO: 369859 - DNA, 534 bp, Homo sapiens
ataataccttaaaagatggttggaatatttcagccactgttttatttatttttatttttacttttacttaaagcaatattattatagttggagttatcttctcttttatcctctcctgattacagaaccccttcctttcacctttcactttaactggttggtagcctccaggtttttcccacactttctgtttgcacagggctctgtgccctattgcttatgttaaaaaaaaattaaaaagaaagaaagaaaaaaacctgggttttgaaaaaagcaaatattataagaacaaaggcatgaaagatggattttattttagtacaggctattgttcaatcataatgactttcttttgtcacataaacacacatggcagataaaacatgctgagagagcctcyctctctcttaaaaatgtctatgtaacagcaaaatgtaaaactaaagttgagataatcatctgaaagtttccttctatgaacatgctataaaggataaaattaggagcagagtactaattattcagaatattgtc

SEQ ID NO: 369860 - DNA, 602 bp, Homo sapiens
caaatttatcatgaaagatgaaagtaatttattaaaagtccttggtaaaggctcatttgagatctttaattatagcgttaagtaaaattataattttgtcttatttatgccttaacagtttcacaagggcatcttgatatataagtccttaattrttaaaaaaactgtatcatgatgtacttggcttaacacaaaatgagataaaacatactggaaagtaaataaggaataaagtctttaggatgactatttagagtatttttatttctgttctatgaaaatatcaatacatagttgatcttcctttcttattttacagcatgagaaatactacgatttaatgtatttttaaattaggcaatattgcttttagacaccattatttattaacaagcattaatcactataaagtgaaatcacatataatttggataatgcaatcctattaacctggtttactcagggcaattccatgaaaaggaaaacaaagagattcttaggtttcttcatgaatatctcaatatattgacttttctcacaatccgttcaataagaattcacagcacacgcgctatgaatacatccacacacgtgtgtgtgtg

SEQ ID NO: 369861 - DNA, 602 bp, Homo sapiens
caaatttatcatgaaagatgaaagtaatttattaaaagtccttggtaaaggctcatttgagatctttaattatagcgttaagtaaaattataattttgtcttatttatgccttaacagtttcacaagggcatcttgatatataagtccttaattgttaaaaaaactgtatcatgatgtacttggcttaacacaaaatgagataaaacatactggaaagtaaataaggaataaagtctttaggatgactatttagagtatttttatttctgttctatgaaaatatcaatacatagttgatcttcctttcttattttacagcatgagaaatactacgatttaatgtatttttaaattaggcaatattgcttttagacaccattatttattaacaagcattaatcactataaagtgaaatcacatataatttggataatgcaaycctattaacctggtttactcagggcaattccatgaaaaggaaaacaaagagattcttaggtttcttcatgaatatctcaatatattgacttttctcacaatccgttcaataagaattcacagcacacgcgctatgaatacatccacacacgtgtgtgtgtg

SEQ ID NO: 369862 - DNA, 556 bp, Homo sapiens
aatcaacttgcagatttgaatacttgatttacatatataaatatcatcatgcactgacaattcacaatcttcctttggaaaatgtaactccttcataagtcattctcaggtggatattcatttaactctacacacgcacacatttgtgtcgtggtgacattcaggaaatcttttcttaatcactaaaaaatattgctaagctatgtgttttctcccctagtagtcttacagatcttatgtgactctagatataaactcttcaaatctctgaaaaggaaatttagcaaattaattctatattataggttccttttccatattttttaatatatttttaatttttcacaaaatacatrttcttcattagtttatactaaggtcttttaaaatctgagtattcatacgctacttgtaaatgaacatagaagtagttttcattatggcactgaagatacagaatagaatatcaaggtccttattcaagtcctagaatataaatttatttagcgaaataaatttttggcagagaaacaaatgtgatgctggtatgtattat

SEQ ID NO: 369863 - DNA, 454 bp, Homo sapiens
ctattttaggactctgaaatgtaaatagtagtaagtacattggtgaagaagaccaaaataagagatacctttaaaatggcaataaatttaccttattttttcctttctagtatctatcaggctgagctcaacataatctgaaacatgaagtggacactactggcacagacagagagttctaaatcaaactctctaattttggtgtaaggaatgrggaaagatcctttaatgctcagagatggtgggaaaagttctctgtatttttgtttatttttttcctcttttccctcattctctcaaatgtaagaagtggtgacgttgacagtggtgcaaacctgtagtagcctaaaattttattaaaaatagacctttttctattatcagcattatttaaatggagcaaatttccttttttgttattgttccttctctgtcattttaagacatggcacag

SEQ ID NO: 369864 - DNA, 454 bp, Homo sapiens
ctattttaggactctgaaatgtaaatagtagtaagtacattggtgaagaagaccaaaataagagatacctttaaaatggcaataaatttaccttattttttcctttctagtatctatcaggctgagctcaacataatctgaaacatgaagtggacactactggcacagacagagagttctaaatcaaactctctaattttggtgtaaggaatgaggaaagatcctttaatgctcagagatggtgggaaaagttctctgtatttttgtttatttttttcctcttttccctcattctctcraatgtaagaagtggtgacgttgacagtggtgcaaacctgtagtagcctaaaattttattaaaaatagacctttttctattatcagcattatttaaatggagcaaatttccttttttgttattgttccttctctgtcattttaagacatggcacag

SEQ ID NO: 369865 - DNA, 454 bp, Homo sapiens
ctattttaggactctgaaatgtaaatagtagtaagtacattggtgaagaagaccaaaataagagatacctttaaaatggcaataaatttaccttattttttcctttctagtatctatcaggctgagctcaacataatctgaaacatgaagtggacactactggcacagacagagagttctaaatcaaactctctaattttggtgtaaggaatgaggaaagatcctttaatgctcagagatggtgggaaaagttctctgtatttttgtttatttttttcctcttttccctcattctctcaaatgtaagaagtggtgacgttgacagtggtgcaaacctgtagtagcctaaaattttattaaaaataracctttttctattatcagcattatttaaatggagcaaatttccttttttgttattgttccttctctgtcattttaagacatggcacag

SEQ ID NO: 369866 - DNA, 647 bp, Homo sapiens
tggaatattcaactctttcacctcatcagttgcttgttttcccttttccctaaaatctgagggacatggtccgacacacaccctggtaaatgctagagtcacatactcaattctagatacagcttggctgagtgggaactcacagaagctgacctcagtagtagagagttactgtccaggggagtgagggactggttaataagggattgtcatatgacatcaccctgctattttagtttctactgtctgcttgcttcctcattttaattaggcaaaagtaatgagccttttgttctgcagaattgctctaaaaacttcttcaacagaagtccttcyggcaaagtaacatatgttaattatacatattccaaattcaacgagctatcactagaaatggggagaaactgagattttatctcctattaagtattcagtccctatttcctatcacccatagtaatacataggaaatcctggaggcctttcatagtaaaaatcctatactgaaataatcatgttgagaataggaaaaatgaaatctaaatctctttattcccatgtaatctttaatactgtttgaggattgcattgtgagttaggtacaggtgacattaacatcctctagatttctgttttcatgaacccca

SEQ ID NO: 369867 - DNA, 459 bp, Homo sapiens
attccaaacttacacactagattcagttaaaacagcctagaaaacttattaagtgctatctaaaggctcaagacagagaatttgaatttcactgtccttttcttttctctcattttgttacacagtgtttagctaaggcacatgaccctttaaaccaytataaacagtgaagtctcacagttattttaaattatttttcctcctttattcatttatagcccaaggattacaatgtttttaatgatacattgccattctgatttatgtcactgtgtgctttggacttaaactatgtgattccatgcattttactttgtactcttttgactgctgttatgaagaagtaatgttctcaggaagtctctcattgtagctcagagccaatcattacagttgaaagcatccaaggtttcaaatgataatgtcaaaagtgaattacagctttcaaaataaagtatt

SEQ ID NO: 369868 - DNA, 548 bp, Homo sapiens
gatatgccacagtatgtttgtccattctcaagttgatggatatttaggttgtattatcagtttttggctcttataaatgaagggtgttatggcttggctctgtgtcgccactcaaatatcatgttgatttgaaatccctaatgttgggggacagacttggtgggaggtgattggatcatgggggcagacttcccccttcctgttctcataatagtgagtgagtttccatgagatctggtagtttaaagtgtgtagttcttctccctttgctctctctctttctcccactctgccatttgaagaaggtgcttgcttccccttcaccttcggccatgactataagtttcctgaggcctcccmaaccatgctttctgtacagtctgtggaaccatgagtcaattaaatccccttttttcataaattacccagtctcgggtagttttttataacagtctgaaaatggactaatacagaaaatcggtaccagagaagtggggcattgctataaagatacccgaaaatgtggcagctactttggaactgggtaa

SEQ ID NO: 369869 - DNA, 563 bp, Homo sapiens
gtgaatataacaatatttaattcattttattttgggggctagcaatttatttattttcaacttttattttagatacgggggtagatgtgcaggtttgttacatgggaatatttcatgatgctgaggcttggggtatggatcccatcaagcaggtagtgagtacaataccagataggtagtttttcaactcattccccacttttaccttctaccctgtagcagtctgcagtgtctgttgttcccttatttgcatccatgtgtgctcagtgtttagttcccacttgtaagtgagaacataccatatttggttttctgtwccttcattagtccacttaaaattatgacctccacctgcatccatgtttctccaaagaatacgatttcattctttttttatggttgtgtagtattccatggtgcatttgtaccacattttctttatccaatctacaattgatgggcacgagttgattccatgttctttgctattataaatagtgtggcaatgaacatatgagtgcatgtgtctttttggaagaatgatttatttttctttgggtata

SEQ ID NO: 369870 - DNA, 563 bp, Homo sapiens
gtgaatataacaatatttaattcattttattttgggggctagcaatttatttattttcaacttttattttagatacgggggtagatgtgcaggtttgttacatgggaatatttcatgatgctgaggcttggggtatggatcccatcaagcaggtagtgagtacaataccagataggtagtttttcaactcattccccacttttaccttctaccctgtagcagtctgcagtgtctgttgttcccttatttgcatccatgtgtgctcagtgtttagttcccacttgtaagtgagaacataccatatttggttttctgtaccttcattagtccacttaaaattatgacctccacctgcatccatgtttctccaaagaataygatttcattctttttttatggttgtgtagtattccatggtgcatttgtaccacattttctttatccaatctacaattgatgggcacgagttgattccatgttctttgctattataaatagtgtggcaatgaacatatgagtgcatgtgtctttttggaagaatgatttatttttctttgggtata

SEQ ID NO: 369871 - DNA, 523 bp, Homo sapiens
acttttacttatccccttacactcaatagaagatcatgaaacattcttcatgaagaaaataaaagctattagatatgatgttctttatctttccaccttacaaatatagctgaatttgcaccttttttctcttttctgaacaaaatgagagtgtctgtaccctggattccttctctactattttaactgagtcctccttttgttaatcaccctctcttaagctcttcaacttctattcctctactatatccstatttccttcttattattatcaacacatatattagtgcacttcatttttcaaaaattttctgttaaatgcccatcaatgatagactggataaagaaaatgtggcacatgtacaccatggaatactatgcacccattaaaaaaaatgagatcatgtcctttgcagggacatggatggagatggaagctgttatcctcagcaaactaacacaggaaaagaaaatcatataccacatattctcacttataagtaggagctgagtaatgaaaaca

SEQ ID NO: 369872 - DNA, 577 bp, Homo sapiens
atatgaacacacggggaggggagaacaacacacactggggcctgtcagagggtggggggtaggaggatggaagcatcaggaagaatagttaatgcaagctgggcttaatacatgggtgatgggatgacatgggtagcaaatcaccatggcacacgtttacctatgtaacaaacctgcaattcctgcacatgtaccctggaacttaaaataaaagttggaaatgtaaaaaaaaattgctgttgatcacttcccagtgatctacctttcttctcaccttgaaaaccagttttccaaataaaaccaagtaaarcattcagtatcttctcctcatcattttgtatttcatttatcgctcactctaatgtgggttccacccctaacactacatgcaactgttctgctcttgctaaaaatgaaaattatctctatgttgcctaacccatagatgattttctttcctcaccctatgtgagttctatattagtttcttgggacttccgtaactaattaccacaaactgagtggctcataatgacagaaatgaattctctcacagttcaagagggtaaaagtctga

SEQ ID NO: 369873 - DNA, 600 bp, Homo sapiens
ttcagacactgataaatgtctgctggggagcaaaatatgtcccctcacctcgagtcacaggtccaaggataatttcaatggttctacaatgagcatgtaaccaaactctgactcttctcattcttcctatctctgttctgtgtattgctgtgatgcctggaactgctacagccatcttgcttcagcttgaataaaaaggtagttaacaaagataatggaagaaaagtagaaagaacccaagaccttgatgatcttgttaagtggattctttgttgtaggaattgtcctgaatgtcctgatacatgaaataatatatttcttgtctaatacagtttgttttgaggtttttacaaattgcagcacagagatgtttagctggtacaagaagaaacaggcatgtgccccattctgagattaagagagtagggtacaattaaggaacttcaagtaattcagtatggctggtgtatgaaaacttaaatgactacatgaagaaagatcaagyatatgacagcgattaaagatgaaaatactgtatgcaatgataagtagtcgttgggagatactgaaggtttaagtaggatcagaattggtttttaa

SEQ ID NO: 369874 - DNA, 590 bp, Homo sapiens
aatgatagctgttctaacagatgtgaggtgatggttcgtggttttgatctgcattacactgatgattagtgatgttgagcattgtttttcatttgcctgttggtaattgcatgtctgcctttgcccattttcaatagggttatttgctttcttgttgttgagttgtttgagcttttacatattttagatactaggctttcatcacatgtagaatttgcaaatgttttctccaaatctgtgggctgcctctttactctgttggttgtttcctttggcttacagaaacttctggtttagtgtaatctcatttgtctattttgatttttctacctgtgcttttgaggtcatctccaaaaaattattgcctaaagcaaagatttttaatacttcgagcaatgagacttaatggaggtttttcccttttcttttagtagttttacagcttcagaatttttaagtttrcagttcatttttagttgatttctgtatatgatatgagatgatagtctaattttatttctctgcatgtgaatattgagttctcccagcaccgtttattgaagaaactttcccttctccactgtgtgtcc

SEQ ID NO: 369875 - DNA, 605 bp, Homo sapiens
atacgtaacaaaagaggaagacacataagctatgctgacattcagaatatacagtaattgcccagggagatgcactatgcctgtagctgattaatcataagctttgaatatcayttagttatttcatatacaccacccaaaaaagtatcactaatgctttaaatgatactcatgtagcaactgtcattgcctaacaaatgaaacagacagatgtgaacagtgataacaaagatgtatatcttttttctaaatcaaatagcaccttcttagagataatagtttagcaagaaaaaagaagtgcgaatgaacagattttttacacatttaacacaatgggaaaagaactgtatgtatgcatgtctgatttttgtgatttgactcaaattaaaatcactatggggtcaggaattaaaaggagcccagttcacagtagtatggattagcaattctaaaattgctatctgtggatcttaggattgagcatatgagtgagtaatgctgagaaaaatgaaagccacattactgccagttggagaatggaattagaaatataaaaagaaaaagataagaataacctctgttataataaatttaaatggaagtaa

SEQ ID NO: 369876 - DNA, 580 bp, Homo sapiens
cttcgtgattgatgttggtttaaagtctgttttatctgatttaataatggtgacttgctctttgtttgttttccatttgcatggtagatctttctccacccctttactctttgcctatgggctgtcattacatgtgagatgtatcycttgaatacagcatacagttggatcttgtctttttatccaacttttcactatgccttttaagtggggtgtttagaccacttacattcagggttattattggtacataacatttttatcctgtcattatgttaatagctggttgttttgtagatttgattgtgtaattgctttatattgcctgtggccatgtctgtaagttgattttttggtagctagtgtcaatccttcattttcatggttagcactgccttaaggacctcttatgaggctggtctggtggtaataaatttccttggtgattgcttgtttgagaagtatcttatttctttttcatatatgaaatttagtgttgtgagatatgaaattcttggttggaatttcttttctttgaggatgctgtaaatagccccccaacatcttctagttttatggt

SEQ ID NO: 369877 - DNA, 483 bp, Homo sapiens
accttggtttcatgaacttatttccattttttaattagtgaatgtayttatttcaatagtttttggaaaacaggtggtttttggttatatggataatatctttagtggggaggggtgatttctgagactttggtccaattatcttttaaacactagttctgcctccactctgaaaattcttactagcctcccaggttccagcgattctcgtgcctcagcctcctgagtagctgggattataggcatctgccaccatgcccagctaatttttgtattttcagtagagatggggcttcgcaatgttggccaggctactctcaaactcccaaccccaggtgatccacccatctcggcttcccaaagtgctgggattacaggcctgagccacagcacctggcctaaccaacatatcttgatctctgaaatcattaattcataattccattatctcatttattttcttcacttcctccattgtttgct

SEQ ID NO: 369878 - DNA, 483 bp, Homo sapiens
accttggtttcatgaacttatttccattttttaattagtgaatgtatttatttcaatagtttttggaaaacaggtggtttttggttatatggataatatctttagtggggaggggtgatttctgagactttggtccaattatcttttaaacactagttctgcctccactctgaaaattcttactagcctcccaggttccagcgattctcgtgcctcagcctcctgagtagctgggattataggyatctgccaccatgcccagctaatttttgtattttcagtagagatggggcttcgcaatgttggccaggctactctcaaactcccaaccccaggtgatccacccatctcggcttcccaaagtgctgggattacaggcctgagccacagcacctggcctaaccaacatatcttgatctctgaaatcattaattcataattccattatctcatttattttcttcacttcctccattgtttgct

SEQ ID NO: 369879 - DNA, 612 bp, Homo sapiens
tcttgagatgtcagtattctgtcttctaagggaatgaactatttttgcatgcatattcttagtaagaaagggtaaaacggaagaaacatttatgagaaccaatacaaaatggataaacaataagaatttctatggaaaattggagttttaccaaatttctttttattttagctttaccawttgagaagagaaaaataatattttgacacacagtaggtacttcagttacaatctgacagaatcaattgctagtctttgttgaagtaatgaaaacaacgttttgatttgaaactcttctggtaagaatgtaaatagctgtgtttcatgttccttcacaggagctttatttttgaaaacaatatcaaagtgtatctttcctttaaaaattagagagtttataatggatttgtgttcatataatttttattgtatttcagaaagcagaacatattctcattaaaacagcagggggaaaataaagaaatctcgatttaattaagatgaagttaaagttgataaattggagatgcatatgaactcttcaatgcaaacttctacgttcaggggtccgtaagatgatgataacatcttcttaggcaggaagttttaata

SEQ ID NO: 369880 - DNA, 454 bp, Homo sapiens
aaaattattttacatatattctcaaaaaatgcatgaaatttaaaaggctatgaatcctgctattgaaaatagcctaagactagaaacaatacactaaaagagaattagtaaaataaattattgtacagttatttaacagaatactacagaagcattaacaaaatgagaggattcctaatgtattgactgagaattttcccaagaaatrttgttaagtaaattaagtgattcagagaatgatgtacattgtatactatcatctgggtaaaactattgcaaatttttccgggaggggtggaattaaataacttggatatcagccccaataaagtgtctaatatatacattcaatatattcttattgaatgagtcaataaacccaataccaaagtaagactgtcaaaaggcaatgtagaaaacataggattgattaaataaatgagaaatacaggca

SEQ ID NO: 369881 - DNA, 454 bp, Homo sapiens
aaaattattttacatatattctcaaaaaatgcatgaaatttaaaaggctatgaatcctgctattgaaaatagcctaagactagaaacaatacactaaaagagaattagtaaaataaattattgtacagttatttaacagaatactacagaagcattaacaaaatgagaggattcctaatgtattgactgagaattttcccaagaaatattgttaagtaaattaagtgattcagagaatgatgtacattgtatactatcatctgggtaaaactattgcaaatttttccgggaggggtggaattaaatracttggatatcagccccaataaagtgtctaatatatacattcaatatattcttattgaatgagtcaataaacccaataccaaagtaagactgtcaaaaggcaatgtagaaaacataggattgattaaataaatgagaaatacaggca

SEQ ID NO: 369882 - DNA, 523 bp, Homo sapiens
aagattggtattaggtcttctttacacgtttggtaaaattcagggttcaatctcgacaggttgtatgtatctaggaatttatccattactctaggttttccaatttattgccatgtagttgctcatagtagtctctaatgatgctttgaatttctgtggtatcagttatgatacctcctccttcatctctgattttacatatgttaatcttctctctttttttcttagtctggttaaagttttttctattttgtttacactttcataaaagcaacattctgttttgttgatatttgtgttgtttttctttcactttcatttattatyatcattattatgtctgctctaattttcttttcttcaaataattttgtgtttggtttgctcttgcttttctagttttctaagatgcatcttcagattgtgtatttgaaatttttctacttttttatgtagttacttattgttataacctttcctcattgcgttatttccactgtatctcaaaggtttgagtacattg

SEQ ID NO: 369883 - DNA, 514 bp, Homo sapiens
ttccactcaagatatgagtagtttacacatcataagtacagtattataatattctgtgtttggctgtgtacttgctactactagggagtcttgttccattcagatgatttcttgttgcacattagcatccttttctttcagattgaacaactccctttagcacttcttgtagaacaggtctgggatgaaggaaatccttcagcttttgtttgtccaaaaaagtcttcatttctccttcatgattgaaggatatttttgctggatatcctattctagaataaaagcattttttgtttgttttgttygtttgtttgtttttccttcagcattttaaatatgtcacgccactctctcctggctggtaaggtttccattgagaagtttgctgcctgataattatttgagttcctttgtattttgtttcttttctcttgctgcttttaggatcctttctttatccatgacctcttggagtctgattaccaaatttcttgaggtagtcttatttgggtta

SEQ ID NO: 369884 - DNA, 541 bp, Homo sapiens
atgatctaagtctttggtcacttcagctgtatctgccttaggagtagcccaagtccagcaattctgtgactctcactgactcagagatactgctttgctggtcttgggtaagatctgggagaattccctggattaccaggcagactctgattctctttccttactttcctccaaacaaacagagtctctatcttcatggtgagctacctggagctggggttggagtgatacaagtgcccccttggccaccaccactggtactgctctgggtcaaacctgaaggaacaacagcactaggtctcaccctaagcctgtggtgcctggctaccatcaatgttctctcaagkcccaaggactcttcattcagcaggtggtgaatccagccaggcatgtatccttctttgcaagctacttgcagctatgggcaggtccagaaatgccatctaggggtcagggcctggagtcaggaaccttaggaatctacttggtgctctattctatggcagcagattgggcacccaagccacaagtcaaagagctt

SEQ ID NO: 369885 - DNA, 557 bp, Homo sapiens
acagactacaggaaggtaggttgactagaaaattagcattaactctgcttacaaattgcaggttttaatagctctagtcwcagtcacagaaataaccaaagagaatcaaattaaggagctggagcaatccaaaaggctcaaaggaaaggaagaaatggtaatttctaacatttatgcagcagtctgcactttataaagggctttcatatttattatccactgcaatctccgtaagccatgtgcaggggggttattatccctgctccataggtgaagaaactaaagtccagagtgccagagacaggatttgaagccaaatgtgctggctccaactccacattcctctactacataaataagcaaactttgtctgtaaaaggtgatacagatagtaaatattttaggttttaccaggcatagggtcttggttagaactattcaactgtgccattgtaggaagaaagcagccacagacaagatgtaaagaaaaaggcatagctgtgtttcaataaaactttatttacaaaaacagaccgagggacagatttggcccacac

SEQ ID NO: 369886 - DNA, 572 bp, Homo sapiens
gtgaccaggttgtgagccagtggagggcaggactcctgaatgacttgcttcttcatgccagagtcacagactggcagcatctgacccagagaccttttttttttcctgctaacattttgaagtctggaaatttcacataaaaagctggactcttgatttctctctaaataaaaagtgctacaaatgtaagccacattttttacatgttaccaatcagatagatctgaatggctaatggacgctttcaaaagggtgtgtactccccagtttgccccagtctccactcttccctacagtctttgcaaccctgaagctatgggtcacataaagtttagggtcttatgtcccgtccactcatttattttactggctgtccccgagaagtgtatttatttctgacttctgtattaaccctttcatttcttgtgtcctccttctccctcccatcaaggtgcctgatctataatatacactcaataagtgaattgaattgaaaataccctattctgctatagaagcagaggagcaggaaygtggaagaaaaagcacaggcctaaaaatgaggagaactt

SEQ ID NO: 369887 - DNA, 599 bp, Homo sapiens
tgctaaattacagaaggattcttttacacttatttttctagctcagcctccactggatttaaaaattaagcacttaaagccaccattagtggtaatgtggttccagtttaagtggctgagatacactrgggatggatgaccccaagataggagtgtagggtcctgtcagatcaccagggtgatgaccaaggtaacctgactcagtaactctccccagagataacaagtgttgtctacttgttatagtgtatatccttccaaagataatctatgcacagatttgcaaatacatgcacaaatattttatataaataggaatatattatacataccatctgtacaacttggttgctttttttcacttaaaaatgtgtcttggagacctttccagaccaatcacattttatttcatagattcactatagtttgtttagccaatcctctagttaagtttccactcattgttataatcagtgctgaactgaccaaccttgtatacccttttacatgggccagtttcgtatgtgcaaatatatttataggataaattcttataaatagaattgctaggtcaaagaacatggaaaatggagataaaa

SEQ ID NO: 369888 - DNA, 589 bp, Homo sapiens
tacaacttggttgctttttttcacttaaaaatgtgtcttggagacctttccagaccaatcacattttatttcatagattcactatagtttgtttagccaatcctctagttaagtttccactcattgttataatcagtgctgaactgaccaaccttgtatacccttttacatgggccagtttcgtatgtgcaaatatatttataggataaattcttataaatagaattgctaggtcaaagaacatggaaaatggagataaaaatagcgtctattttcttgagttgttttgaagattacatgagtgtttgcatctaaaatcataccaaaatcctcaataaaatggctgctgcttctgaaggcactgtgttgggccttggagggagaggggctgggggagggcagaaattcataaatataggtcaacccacagtccctccttcaaacacttaaagtccagtaagggtaatkcttgatcacagggcaaattagcaaatgctctcttgagcatatacacaaagttctaacaaacacaaagaataaatcaataaatttctagtggaaaagttttcacaaaaatatggagtttatg

SEQ ID NO: 369889 - DNA, 589 bp, Homo sapiens
tacaacttggttgctttttttcacttaaaaatgtgtcttggagacctttccagaccaatcacattttatttcatagattcactatagtttgtttagccaatcctctagttaagtttccactcattgttataatcagtgctgaactgaccaaccttgtatacccttttacatgggccagtttcgtatgtgcaaatatatttataggataaattcttataaatagaattgctaggtcaaagaacatggaaaatggagataaaaatagcgtctattttcttgagttgttttgaagattacatgagtgtttgcatctaaaatcataccaaaatcctcaataaaatggctgctgcttctgaaggcactgtgttgggccttggagggagaggggctgggggagggcagaaattcataaatataggtcaacccacagtccctccttcaaacacttaaagtccagtaagggtaattcttgatcacagggcaaattagcaaatgctctcttgagcatatacacaragttctaacaaacacaaagaataaatcaataaatttctagtggaaaagttttcacaaaaatatggagtttatg

SEQ ID NO: 369890 - DNA, 577 bp, Homo sapiens
accaccacatctgtttttactgataactgtttcttcctggggaatagagactgacaactcacatttcacaatttggcttaaaaaaccttatgagtacctagtggcttagctgaatctcaatggtgtcactagaaaagtttgccaaggaaacctgtacattgcaagtttctttgaaatgttcagaaagattgtcatacctgccctgatgttctgtggatgtttcctaaagcatctttcctcattggggctgtggagtggcacctggtacaagaccatattatccagctagggcatgatcccaggcctggcatcacatctgcatgttagaaatagtaagtcaccaaatggwgaaacttttcatgaacaagaacacatacagattttataaaccagaaactcattctcaatatggtaacttggttcattttataaaattcttaggtcagccccagtgacctgctattcaagtaaatctgagagccatcttttgattccttcgtctccaatctcctcccagttcctgccatatcaaatcagtcatcaaacccaatcatttctactttacaatcttgcatcg

SEQ ID NO: 369891 - DNA, 613 bp, Homo sapiens
tttgtttggttcagggttctgcaacctgtacaagaagtatgacgccagcatctgcttctggtgagggcctcaggaagtttccactcaaggcagaaggcgaaggggaactggtgtgtgcagatcacatgatgagagtggaagcaagagagaggaggtgccaggttcttttcaacaatcagttctggaggaactaactgcatgagaactcacttattaccgtggggactgcaacaaaccattcatgagggatccacccccatgacccaaacacctcccaccaggccccacctccaagattgaggatcaagtttcaacatgagattttaggaggacaaatatctaaaccatatcagctggaccagctcagcatgtcacagcaacagcaagaaggtcaatgtgctgagacttgagtgagcaagggataggagatgagaggaggctggaggccaggatatgcagagwccgataagcctgggaaagacatttaaggtttattctgtttgtaatgagaagccattcgaaggtcttgagcaaggaaatggcatgacctggtttacattttgaaaagattgcttgaactgagccatagaaaatagctctggtgggccagggc

SEQ ID NO: 369892 - DNA, 543 bp, Homo sapiens
caggaatctccagattcaattatgtccctgggcttggtcaaccactgcaggagtcttagggagccttgtacaaatgctagagttactcatttaccaacattaaaccctagggtagaagatgcaccaaagcaggactccttcttccatggaatgtgctgatttcagacgagatggcagccaatgtagaaaatgctggaatttttccttggaactggattgtgatgagaggtgcttgccatgaacataaactactatcttttctttgacccttcctttccagtttttgaagataaagcaggaaataatcttctctgaagatactcaataaaaattccaaaaaaaaamagaaacacgtgcttccacttcactgataaaaatttactgcagtttggcacctgggtctagttaagcaggcagatgagctgattgatgcattcaccccaatagccaggtgtgcccatctccttgaggaagcccactctatttttggtaccatgacgggccactgagagagcacaagaaccatgagatctcctagaaatg

SEQ ID NO: 369893 - DNA, 560 bp, Homo sapiens
cttttttgttgtctttttgtctggttttagtattacagtagtactggccttgtagaatgagtgaggaagaactcccacctcttcaattttttggaatagtttgagaagaattgatattagttctttgtaagtttgatagaattcagcagtaaagccatctagtcatgagattgggagattttattactaattcaatcttgttactggttcttggtctgttcaggttttctatttcttcctggctcactctttggaggttgtatatgttcagcaatttatctatttcctctaagtttttcaatttgttaccrtatagttgctcataatagtctctaaagaccctttgagtttctgtgctatcagttgtaatgtcacctttttcatttctgactttatttatttgagccttctctctttttttcttggttagtctagctggtggtttaaatttttttcccaaaaagccaacttttcatttcagtgattttttttttaccgctttttatctctatgtcttttatttcttctctaatctttattatttgtttcctcctaccagt

SEQ ID NO: 369894 - DNA, 560 bp, Homo sapiens
cttttttgttgtctttttgtctggttttagtattacagtagtactggccttgtagaatgagtgaggaagaactcccacctcttcaattttttggaatagtttgagaagaattgatattagttctttgtaagtttgatagaattcagcagtaaagccatctagtcatgagattgggagattttattactaattcaatcttgttactggttcttggtctgttcaggttttctatttcttcctggctcactctttggaggttgtatatgttcagcaatttatctatttcctctaagtttttcaatttgttaccatatagttgctcataatagtctctaaagaccctttgagtttctgtgctatcagttgtaatgtcacctttttcatttctgactttatttatttgagccttctctctttttttcttggttagtctagctrgtggtttaaatttttttcccaaaaagccaacttttcatttcagtgattttttttttaccgctttttatctctatgtcttttatttcttctctaatctttattatttgtttcctcctaccagt

SEQ ID NO: 369895 - DNA, 560 bp, Homo sapiens
cttttttgttgtctttttgtctggttttagtattacagtagtactggccttgtagaatgagtgaggaagaactcccacctcttcaattttttggaatagtttgagaagaattgatattagttctttgtaagtttgatagaattcagcagtaaagccatctagtcatgagattgggagattttattactaattcaatcttgttactggttcttggtctgttcaggttttctatttcttcctggctcactctttggaggttgtatatgttcagcaatttatctatttcctctaagtttttcaatttgttaccatatagttgctcataatagtctctaaagaccctttgagtttctgtgctatcagttgtaatgtcacctttttcatttctgactttatttatttgagccttctctctttttttcttggttagtctagctggtggtttaaatttttttcccaaaaagccaacttttcatttcagtgattttttttttaccgctttttatctctatgtcttttatttcttctctratctttattatttgtttcctcctaccagt

SEQ ID NO: 369896 - DNA, 614 bp, Homo sapiens
gctggtctaagctctggcctcaagcagtcctcctgccttggcctcccaaagtgctgggattacagacaggagccactgtacctggcttaacttgttttttcaatgagactttgggacaacatactgagtttgggggttgtgtgagtcagacagattagcactatgctgtaatcataaataacacctaaatctcacctgtttaaatcagtaaagagttattttttcttttgctgcaatttcatccccgctttggcaggggaatctttttcacgtctcatgcagatrtggaggctgacagggacctcactctctgttactggtctccatggcaggaagaaggaagggaatgtgataaattgtatgtggaatttttgtttgtttcattttgctttgctattattcaactttcttgaggtataattgaagtatcataaactgcatatatttaaaatgtaccttttgatgcattttgagatatgcatgtacctttgatatcctcaccatgatgaagagaataaacattttcataacccccaaaaggttccttgtttcacatgcctctctccactcctgtcttcatgcaaccagggacctgctatctgtcaatgtaggtt

SEQ ID NO: 369897 - DNA, 618 bp, Homo sapiens
ttcaaaatagctctaagatttcgaatgttccctatacaaagacatgacaaatgtctgagtgatggatatcctaattgctctgatttggtcattacacattgtatgcatgtatcaaaatatcacatgcatcccataaatacatacaattattatctattaataaaaattatttttaaaaattaacatttttttwaaaagtttaatttctccctaaaccccaagaggcatttccaggtggaggttgccttcctttggcagagattctaattgttgaaactcttagtcacagagacttatagctcaaaggcatcatattaggattgtggggccctacaagtactagcacttttctatatctggctcttcccaatccagataatatcatctggcatttatgagcatgagtagtacaggcatgggaaacatcaatccaaatttacgttctgtggtggaaactacaacagcagtagagggaatcatcccaaaggatcctccgcacaaggtcacaagccctgcccaaaccttgtcagatgaatttggtagcccctgtgcctcacaggacagggtaagatgatgaccaaggttcttgtgtccaacagagccatgcaagtttgagtc

SEQ ID NO: 369898 - DNA, 485 bp, Homo sapiens
tattgctgacaccatctatttcatctttggaggctccctgattccctgctacagccattttgcctttttgctcakgtctggggcttgctgccccattgtcatgaaaacattccttcttccttttgcccaaaggagagtaagaaacaaccatagtatcactcagatagcttgtttcagtgttacctcttgtcactcagcctatatcattcatttacaggtaggacaatcagagatccttattcctccttcctctgtcatccaccacttgggtacaagcaatgacaactatatcgcaggatgtctttttacctcccctaacctgtcccatgagccccttatctcttctctcctagaaagccatgtctctatctgcatctcatccttactgccaaaagctgtccatgatctgagattttaacttatttgcaagctagcaagtaagcctgccacagtttcagaaaagtagcagaagacatgagactcct

SEQ ID NO: 369899 - DNA, 583 bp, Homo sapiens
ccgggtcctgcgtaaagcagcctggctacgttytggtaaagcagctgtgctgtgttgcggaatccctttctcctctggtccatttgaactctccaaagcccacaggctggaaaggctgagttgtccaaacagcaaagagggggagctccctcccatctcaggtaggcactaccctgttgctggtggctggttggaattccatgccagttggtctttttttgtgaggtgccatggaagtggggcctgcagactgacgctgcttggccccctggattcagcccccttcctaggggtatgtacagactttttgccatgcctgagttgcagtcacctttgctggggatcctggggctgcagtatataaagcttctgggtctctgtgcatgcctgagcagctactcttccaagactccacacagctctgtgtgtcagacccaaggccctggtggagtgggttcatgaggggacctcctggtccatggttgcagagatttatgggagaagtgtggtttccttgagttgcacattcactcaccacttcccttggctgggggtgggggtttccctggctccgcatcacttc

SEQ ID NO: 369900 - DNA, 583 bp, Homo sapiens
gcctgcagaactgtgagccaattaaacttattttcttataaattacccagtctcaggtatttatttaaagcagtgcaagaactgcctaatacatgagcgcagartgtggggtggagaataggcagtgccaggcccttgttctcctgtaggaccctcttgacattcccattactgttggctttgccacctcttcttggcatttgatgacccagttgattgactgtttagtatcccattttctctgccttcaaagaaagaccaggatgaggaccactgctgttgatgtaacttagcctctgttctttccactataggtgctgttatcactcccttctttcccactccaagtcagaaatcctgaaagccaggaaaggattccttgctaaacataaacacagctttccaagtcaaactctgatggcttgacttcagccagcacatttggttattgggcttcaacttccagtttgctcagggctgccgtgggtccttaactgagagattctggtggaatctcatgccaactggaggctctgccattttcagagttgatcctaggtcagcaaaacatttcaagtacaca

SEQ ID NO: 369901 - DNA, 623 bp, Homo sapiens
tctataatttatataaatttagcggtacagtcagggataaagtacaacataatacgtaatattcatgacattaaaaattacttcagccaaaatattgtattatcacttgcaaagatcattttgatacagacacataccatttcaaaggaactaaagagttgaacattctattatcaaaagccaattaataagtcactgtttaatatgacaaaaataattatcatatccatatacataataatcatctgtgagatgagagtcatcaaagtgcttaggaaatgagctattgctccatctcagtgattatatctctataccaatgattgtattgtatatctctataccaatgattatattggtatagagaatggatgggacgtatacagcaaaaatcagagccatcaactgggttgcaggcatcttaacaaatataaaatatagaaaataaattatgtaagattattagtaaaagtagcttatttcatttaatatggcaatgtatatatttatgaacagatttgtcatcttataaaacaaaattttattrtactccatacatgaacaattactaagtaaaattaatcaatgtatctgttaagaaccctctttgagaataagtacag

SEQ ID NO: 369902 - DNA, 553 bp, Homo sapiens
agctggggcataaagtcagcagcagcaattgtacaagatgctgtcaagacttagagggtgcattgcaggaagtgtctcattctggtctcatgttccctaaacacacacgctgagagcagacagtctatcatcttgggtcctgtctcactcctcttctactggctgtgtacagacmgcctgtgactcctatctcttggataggagactcctggatatcttcccagaaagaccagtgggattcttttatttcttttctagcatacttaataaaaccaagtctctctgaacttagtgggtagtaacagtcccttaaaaaagttgtcactcctgttctcaggctcccctataacacaaataatcatgattgagtttgggggaggtccttttaaaaatatttatgtatacacatggtcacaccacttagttttcttgcaccaagataaggagaggaagatggaaagcatcttataggttggtgcaaaagtaatcatgggttttgccattaaaagtaataacaaaaatcacaattacttttgctccaacctgataatat

SEQ ID NO: 369903 - DNA, 553 bp, Homo sapiens
agctggggcataaagtcagcagcagcaattgtacaagatgctgtcaagacttagagggtgcattgcaggaagtgtctcattctggtctcatgttccctaaacacacacgctgagagcagacagtctatcatcttgggtcctgtctcactcctcttctactggctgtgtacagaccgcctgtgactcctatctcttggataggagactcctggatatcttcccagaaagaccagtgggattcttttatttcttttctagcatacttaataaaaccaagtctctctgaacttagtgggtagtaacagtcccttaaaaaagttgtcaytcctgttctcaggctcccctataacacaaataatcatgattgagtttgggggaggtccttttaaaaatatttatgtatacacatggtcacaccacttagttttcttgcaccaagataaggagaggaagatggaaagcatcttataggttggtgcaaaagtaatcatgggttttgccattaaaagtaataacaaaaatcacaattacttttgctccaacctgataatat

SEQ ID NO: 369904 - DNA, 553 bp, Homo sapiens
agctggggcataaagtcagcagcagcaattgtacaagatgctgtcaagacttagagggtgcattgcaggaagtgtctcattctggtctcatgttccctaaacacacacgctgagagcagacagtctatcatcttgggtcctgtctcactcctcttctactggctgtgtacagaccgcctgtgactcctatctcttggataggagactcctggatatcttcccagaaagaccagtgggattcttttatttcttttctagcatacttaataaaaccaagtctctctgaacttagtgggtagtaacagtcccttaaaaaagttgtcactcctgttctyaggctcccctataacacaaataatcatgattgagtttgggggaggtccttttaaaaatatttatgtatacacatggtcacaccacttagttttcttgcaccaagataaggagaggaagatggaaagcatcttataggttggtgcaaaagtaatcatgggttttgccattaaaagtaataacaaaaatcacaattacttttgctccaacctgataatat

SEQ ID NO: 369905 - DNA, 598 bp, Homo sapiens
ttacccatgttcatgcacatgtgtgcatgtacacacatacaccctgatgggagcactgcatayctccaggcttttctctttggcacagatgcatcattcgactccgaaacccgaaacaaatcccaagattattaaaagtgaatatgtcaaggaagacactgattttattcagcaagtgatttttccacctctttagttactgactcattatactctcctcgcatatcactaatagttatggaacctttaataactgcctgacaaagttctaactaattcacatatgtgatatctcctacattttacttgaagttactgaccaaatagatgctgactgataacatagtttttcaggaaggaagttaacttagggaaaatggagaaattcatccttctttaaaattcacagactagtgatatattttatgagccactgtagttagtggtatgatatgcttcaatgtccattgaattgagctgtacatgtaattctgttactgataaaatgaaagttccaaagaatgaagcctaatttgcctttataaattagatttaccattattcctactataaagtcataatcacttgctttctggta

SEQ ID NO: 369906 - DNA, 549 bp, Homo sapiens
gccattaagaagcctgaacaaaagttataatgagatattctataggcttcattctcagctcacaatctaaggaagttagcaacaaatcatttacatgttttgtgagtataaaacaaatcttatctatttggaaatttaaaactcactcttagattgtccttataccaaagaagaaaagtaaatgtatgccttctctagaaagctatgaataggtgggtacctcatagcaaaaccatgaaaggaggcaatatctggtgtggaagrgaaatttataaccataaataccttcagtattatttttaaaatactataaaatcatattcatcatattaacatggtagaggcataagaatgtataaatatagaagggaacttaatagataatccagaaatggtatgcacaagattttttgtttgtttttttttcttttttaatttttaagttctgggatacatgtgcagaacgtgcaggtttgttacataggtatacatgtgccatggtggtttgctgcacctgtcaacccatcatctgggttttaaggccggcat

SEQ ID NO: 369907 - DNA, 647 bp, Homo sapiens
tagaggcataagaatgtataaatatagaagggaacttaatagataatccagaaatggtatgcacaagattttttgtttgtttttttttcttttttaatttttaagttctgggatacatgtgcagaacgtgcaggtttgttacataggtatacatgtgccatggtggtttgctgcacctgtcaacccatcatctgggttttaaggccggcatgcattaggtatttgtcctaatgctctccctccccttgccccccatcccccaacaggccctggcatgtgatgttcccctccctgtgtccatgtgttctcattgtttgaatcccacttatgaatgaraacatgtggtgttttgttttctgttcctgtgttagtttgctgagaatgatggcttctagcttcatccatgtccctgcaaaggacatgaactcattcttttttatggctgcatagtattccatggtgtatatgtgccatattttctttatccagtctatcattgatgggcatttgggttggttccaagtctttgctattgtaaatagaggcacaatatttttatcaataaaaagacgctattttaattcagttcgaaacagttaaaaaggtttaatccggcacatatgaagggacctctatattatattaca

SEQ ID NO: 369908 - DNA, 622 bp, Homo sapiens
aagacagagcaagggaaaagcatagcatggcatcaataatccagcataaggcctcagggaaagttmcccaaagaaaggtagggaagaaagaatgttccaggtggagcctatggcagaatccagaaagcaggcaggagacaggagagataaatggggtcacatgatgaagggccttgtaagacgcattgaagagtttggatctcatctggaagacaatgtggaccctctgaagcatttaacccagtgaaggacacaatcacgtttttgttctaagaaaagaactcggactgcaaattggggaatgatagttacaggggagaactggagactgaaagagcaatgaggttggtgaaatagggaagtatcaattgcaatgaaaaaaaactggaaagagctgggtgtgctggctcatgcctgtaatcacaaccacttggtcaggccaggcaggaggatcacttgaggcttggagctggagaccagcctgagcaatataaccagacacatttctaaaaatatttaaaaacatcagctgggcatggtggcacagacctatagttctagctacttgagaggctgaggcaggattgcttgaacccaggaggataaagctgaaggtgagctt

SEQ ID NO: 369909 - DNA, 622 bp, Homo sapiens
aagacagagcaagggaaaagcatagcatggcatcaataatccagcataaggcctcagggaaagttccccaaagaaaggtagggaagaaagaatgttccaggtggagcctatggcagaatccagaaagcaggcaggagacaggagagataaatggggtcacatgatgaagggccttgtaagacgcattgaagagtttggatctcatctggaagacaatgtggaccctctgaagcatttaacccagtgaaggacacaatcacgtttttgttctaagaaaagaactcggactgcaaattggrgaatgatagttacaggggagaactggagactgaaagagcaatgaggttggtgaaatagggaagtatcaattgcaatgaaaaaaaactggaaagagctgggtgtgctggctcatgcctgtaatcacaaccacttggtcaggccaggcaggaggatcacttgaggcttggagctggagaccagcctgagcaatataaccagacacatttctaaaaatatttaaaaacatcagctgggcatggtggcacagacctatagttctagctacttgagaggctgaggcaggattgcttgaacccaggaggataaagctgaaggtgagctt

SEQ ID NO: 369910 - DNA, 536 bp, Homo sapiens
gacatttgttcaatgtgaccacaactactaaactattagtcaatcaaatgtataaatgacaaagcctatgatctttcccctgtagtacatggatctggaataacactgcgaatttgccttttctataaaaccaagcgctgagaactaaatataaacaaaatacacaattctcacctgagccaaataacaacagagaatttgtatgtatcctaattatgctttcattaatttatacgtgttttatttttccctatgtcctcattaaaaatagacaaactagayggtaggaagtttgcataatatagtagaaatatgtataagccctcaggatctacaacaaaacaaaaatgaaatgtgtgtttttatgttgcatcagaatatcctgctttccctgactgctttacccaacctgccacttacaataggctcaaagaatttcaattatttaaaggatctagtctccaccaactatgccaatctttttccaggcaaaatgaaaactaggaaatgctatgatgttattttcttgggttaaa

SEQ ID NO: 369911 - DNA, 605 bp, Homo sapiens
gaggatcacttgagcctaggagttaaggacggcctgggcaacatagtgagagaccccatattaaaaaaaaaaaaattaaaaaatcaaaagccccaaaaarttataaaatcctttttcttgaccagcacacttgacatttccctttggcaggcatcccacatcccacgtcgggattcacaaggtacgagatggttccaggaaccaagatgcaaactaagaaaccagttggcctaacgaagtgtcgaggcttgctggtcacagagctctccttctctctcccgtcagcacacttgtctggcagctggcccaagagtgtccaggttctggtagtgcccactggcagcgtttggcaggtgtgacagcagaggagtcggaaaaatagcaaatctggcctcccctcccgcaggaggaacacggcgggactcagggtgctggctctgtagaagaacatgccctctgcaggccatcccacctctggtcctctttttatcctgggcaaagaagtgtcttaatcccagcctgtctgagcaccgccctttcttctacactcacactctccttcacagccccagggcacgtcattttgtcctacacaatgccattat

SEQ ID NO: 369912 - DNA, 462 bp, Homo sapiens
aaacctgcacttgtaaccttgaacttaaaattattaaatgttaaataatctaaaattattcaataattaataaagtttatatatcacctcaatgttaatatagaattattatctaattattcatctaaccagagatgattacaaggcataaaatgagaaaaagttgaagagaggtttcaaaaatatctcgtataaccatctccccagttcaggagacctgttcttccagcctcaaccgaaagccatgaaggtgcctgcaatagtggagggccctctgccaggagagaatgtgctccagtaacagagcacactgtttcctgaaggagcccctccactgttgaggtttctgttataagctctattgggtacaaaatggcrtctcaaaatttgctgcccccaaaatgggcactcattttatgcgtgctttgtgcttaaaatacagtaaatcatttaatgctcaaa

SEQ ID NO: 369913 - DNA, 381 bp, Homo sapiens
taatcaagaaactttttactcactggaatctttccaattgcaaatccataatgatatggtggtcataggatgccaactactcttgctcaatacttgagctctgcaaactcactaatctctggrttgaactaggaaaactaggaagtcagtatgtgtttgcttctatagacatacagcaaagatatttcatctttagttccagaccactgcaataaagcaagtcacacaatttttttggattcccagtgcatataaaagttacctttacactatactgtagtctaagtgtgcagtagcactatgtaaaaacaaatgtgcataccttaatttaagaatactttattgctagaaaataacaatcatctgagccttcagatgcag

SEQ ID NO: 369914 - DNA, 381 bp, Homo sapiens
taatcaagaaactttttactcactggaatctttccaattgcaaatccataatgatatggtggtcataggatgccaactactcttgctcaatacttgagctctgcaaactcactaatctctggattgaactaggaaaactaggaagtcagtatgtgtttgcttctatagacatacakcaaagatatttcatctttagttccagaccactgcaataaagcaagtcacacaatttttttggattcccagtgcatataaaagttacctttacactatactgtagtctaagtgtgcagtagcactatgtaaaaacaaatgtgcataccttaatttaagaatactttattgctagaaaataacaatcatctgagccttcagatgcag

SEQ ID NO: 369915 - DNA, 538 bp, Homo sapiens
tatggtagctatatagccttccaaaagacttgaaagtagaaattactccttgatccctgggctgcagaatgaatgttgtgttatcagacatgtagacaacattcatctccttgcccatcttcgtcagagctattgggtgaccaggtacattgtcaatgagcagtaatattttgaaaggaatctttctttctgagcagtaggtctcaacagcaggcttaaaatattcagtaagccatgctgtattcagcagtactatcatcccagctttgttccatttatagagcacaggcagagttgatttagcataattcttaagggtcccacaatttttatgatggtagatgtgtattggcttcaacttaaaatcaccagcctcatcagcacctaacagagtcagcatgtcctatgaaactttgaagctaagcattgaattatctcctttctagctatgaaagtgtgtgggggtctgacccacagaccctaactcagtgatgratgagagacatacgctgacatagatattttgcctgtcagtttg

SEQ ID NO: 369916 - DNA, 538 bp, Homo sapiens
tatggtagctatatagccttccaaaagacttgaaagtagaaattactccttgatccctgggctgcagaatgaatgttgtgttatcagacatgtagacaacattcatctccttgcccatcttcgtcagagctattgggtgaccaggtacattgtcaatgagcagtaatattttgaaaggaatctttctttctgagcagtaggtctcaacagcaggcttaaaatattcagtaagccatgctgtattcagcagtactatcatcccagctttgttccatttatagagcacaggcagagttgatttagcataattcttaagggtcccacaatttttatgatggtagatgtgtattggcttcaacttaaaatcaccagcctcatcagcacctaacagagtcagcatgtcctatgaaactttgaagctaagcattgaattatctcctttctagctatgaaagtgtgtgggggtctgacccacagaccctaactcagtgatggatgagagacataygctgacatagatattttgcctgtcagtttg

SEQ ID NO: 369917 - DNA, 269 bp, Homo sapiens
tgaaaccgcttactattgccataaacagctgtacattaacctaataatgtcacactggacactataacccacatcctatagcttaaaaacatacagccaatcaygtgtatatctatgtaacaaacctgcatgttctgcacatgtatcccagaatttaaagtatatttaaaaaaaaagaaaatgacatttaaaataccacaccaaaaaaaaaaagaatagccaatcactgatcaatgttatttctgcaaaccaaagagaattcctgacaa

SEQ ID NO: 369918 - DNA, 438 bp, Homo sapiens
atgatgatgatgatgatgatgatgatagtaatcgctgccacttattgagaggcccataagccaagtactttgcagacatgatgacactaccttgggacacaaatcttagcattctcktttttaagatgaagacaatgaggtttgggcaactgtgtcacgtattgggcccagagtcacaagttagtagcagaaccagtttttaaatcttgtctgtctgccactaaagtctggcgtgctcaaacatccccccttggaagcttctctcacactgtgtgtatgtgactgtatcaggacaacagttcaaaaccagccctggtatggactaggaggtaaggatgactgaatgctaatagaaataaacatttgcgagtcaggcttctcctttgttctccttttgctatctaataaaacgtattgattgtcaccaccaataattgt

SEQ ID NO: 369919 - DNA, 438 bp, Homo sapiens
atgatgatgatgatgatgatgatgatagtaatcgctgccacttattgagaggcccataagccaagtactttgcagacatgatgacactaccttgggacacaaatcttagcattctcgtttttaagatgaagacaatgaggtttgggcaactgtgtcaygtattgggcccagagtcacaagttagtagcagaaccagtttttaaatcttgtctgtctgccactaaagtctggcgtgctcaaacatccccccttggaagcttctctcacactgtgtgtatgtgactgtatcaggacaacagttcaaaaccagccctggtatggactaggaggtaaggatgactgaatgctaatagaaataaacatttgcgagtcaggcttctcctttgttctccttttgctatctaataaaacgtattgattgtcaccaccaataattgt

SEQ ID NO: 369920 - DNA, 604 bp, Homo sapiens
ccagcaactcagatttaaaagatactccattccaaatctttactacctgccaagctgatgactggcaggaattcagtctcagccctgactgaccaaggttgtacaagatcctggagtctttcccagcagctsaggacccctctggttatatgtgtttgtcccagctagttgtcagtagaacccatcagcacagcctcatgtcccttcagttttggggactggcaaagctggagccccagggcctagagtccagcctttgtgggtacacacaacatttgacctctgagagtctgcctgggtccaggtggcgggtcctttggtccttgcaagacccatggacttccccccctttccagttgtgaggaccttctcctctctaccttggtgcatctccaaggcattcctctccagacaccctgtgtcatctcttcaacagctcaggatttgggaagacaaaatactatatagaaatggaagtgcactttggaaggccgaggcgggcgggtcatgagatcaagagatcgagaccatcctggccaacatggtgaaaccatatctctactaaaaatacaaatattagctgggcatggtggcacgcacctgt

SEQ ID NO: 369921 - DNA, 604 bp, Homo sapiens
ccagcaactcagatttaaaagatactccattccaaatctttactacctgccaagctgatgactggcaggaattcagtctcagccctgactgaccaaggttgtacaagatcctggagtctttcccagcagctgaggacccctctggttatatgtgtttgtcccagctagttgtcagtagaacccatcagcacagcctcatgtcccttcagttttggggactggcaaagctggagycccagggcctagagtccagcctttgtgggtacacacaacatttgacctctgagagtctgcctgggtccaggtggcgggtcctttggtccttgcaagacccatggacttccccccctttccagttgtgaggaccttctcctctctaccttggtgcatctccaaggcattcctctccagacaccctgtgtcatctcttcaacagctcaggatttgggaagacaaaatactatatagaaatggaagtgcactttggaaggccgaggcgggcgggtcatgagatcaagagatcgagaccatcctggccaacatggtgaaaccatatctctactaaaaatacaaatattagctgggcatggtggcacgcacctgt

SEQ ID NO: 369922 - DNA, 438 bp, Homo sapiens
atgatgatgatgatgatgatgatgatagtaatcgctgccacttattgagaggcccataagccaagtactttgcagacatgatgacactaccttgggacacaaatcttagcattctcgtttttaagatgaagacaatgaggtttgggcaactgtgtcacgtattgggcccagagtcacaagttagtagcagaaccagttttyaaatcttgtctgtctgccactaaagtctggcgtgctcaaacatccccccttggaagcttctctcacactgtgtgtatgtgactgtatcaggacaacagttcaaaaccagccctggtatggactaggaggtaaggatgactgaatgctaatagaaataaacatttgcgagtcaggcttctcctttgttctccttttgctatctaataaaacgtattgattgtcaccaccaataattgt

SEQ ID NO: 369923 - DNA, 314 bp, Homo sapiens
attttcatctttgaagacgaatttcaagcccagcttcctcctagatgtccccaatcagaatttttccttcctgcgcatgttccagtgattctttaagtgatgtgttttccctctgattaagcttcttacccttgcttcaccatttattagagtctacctcctatttgagtcagtacatatgagataggcttttccactaaattctgtttctgagggctagggagatttgtggtagtcatttctgtgtygcacatagtgatttgcctgccctgtgcttataaaggctcaacaaattttaaataaatttttgggtg

SEQ ID NO: 369924 - DNA, 386 bp, Homo sapiens
tgtggtagtcatttctgtgttgcacatagtgatttgcctgccctgtgcttataaaggctcaacaaattttaaataaatttttgggtgatgataggctgattggactccaaaactgcaaatttayctgagccacatacccagagcccattctggttataatattttgggttgatcaaatacagaacattttactagcagtattgtttttgtttcaaaagctggctaaatgcaacatgtctcagtaagagtaacaattaagtattttattgagaagtgctgaattctttgttgaaagctgaaatttattctgtaagtattttgtgagccctaattatatctctggctctgtgcatacagcaatgcaaatcggtgttctggaagcacct

SEQ ID NO: 369925 - DNA, 386 bp, Homo sapiens
tgtggtagtcatttctgtgttgcacatagtgatttgcctgccctgtgcttataaaggctcaacaaattttaaataaatttttgggtgatgataggctgattggactccaaaactgcaaatttatctgagccacatacccagagcccattctggttataatattttrggttgatcaaatacagaacattttactagcagtattgtttttgtttcaaaagctggctaaatgcaacatgtctcagtaagagtaacaattaagtattttattgagaagtgctgaattctttgttgaaagctgaaatttattctgtaagtattttgtgagccctaattatatctctggctctgtgcatacagcaatgcaaatcggtgttctggaagcacct

SEQ ID NO: 369926 - DNA, 386 bp, Homo sapiens
tgtggtagtcatttctgtgttgcacatagtgatttgcctgccctgtgcttataaaggctcaacaaattttaaataaatttttgggtgatgataggctgattggactccaaaactgcaaatttatctgagccacatacccagagcccattctggttataatattttgggttgatcaaatacagaacattttactagcagtattgtttttgtttcaaaagctggctaaatgcaacatgtctcagtaagagtaacaattaagtattttattgagaagtgctgaattctttrttgaaagctgaaatttattctgtaagtattttgtgagccctaattatatctctggctctgtgcatacagcaatgcaaatcggtgttctggaagcacct

SEQ ID NO: 369927 - DNA, 571 bp, Homo sapiens
atactataattttatccttttcttagctctaatattagtaaagccctgcaacaakcaggttttataattttcttctcagtgtcactttacaccataggctaggaagcatcagtagatgctcagcaataattactgcatttattgagttccaatgtatgccccacattgttttagaaactggagataggcaaaactcaatttatagtctcaaatagcttgcaaagtagtatcttatataggaattgaattgcttccagggaaaaataaaggaatatattactagaagaaggtacttgtgtaggaagctcacaattttttttccaggctagattgaaactggacattagagacatactctgttattttctgaaatgtgagtgctaactatggaaaaatagagcataaactctcagaacacagtaggttagtagaggttaaatgtaagaagacttttgtggaaaaaatatgtaaattatgaggagagaatgcattcagaatgagtaaagaatattttttagatgtctgctgtatgcatatataaagatctgtggcttcaaatttgactagattt

SEQ ID NO: 369928 - DNA, 571 bp, Homo sapiens
atactataattttatccttttcttagctctaatattagtaaagccctgcaacaagcaggttttataattttcttctcagtgtcactttacaccataggctaggaagcatcagtagatgctcagcaataattactgcatttattgagttccaatgtatgccccacattgttttagaaactggagataggcaaaactcaatttatagtctcaaatagcttgcaaagtagtatcttatataggaattgaattgcttccagggaaaaataaaggaatatattactagaagaaggtacttgtgtaggaagctcacaattttttttccaggctagattgaaactggacattagagasatactctgttattttctgaaatgtgagtgctaactatggaaaaatagagcataaactctcagaacacagtaggttagtagaggttaaatgtaagaagacttttgtggaaaaaatatgtaaattatgaggagagaatgcattcagaatgagtaaagaatattttttagatgtctgctgtatgcatatataaagatctgtggcttcaaatttgactagattt

SEQ ID NO: 369929 - DNA, 571 bp, Homo sapiens
atactataattttatccttttcttagctctaatattagtaaagccctgcaacaagcaggttttataattttcttctcagtgtcactttacaccataggctaggaagcatcagtagatgctcagcaataattactgcatttattgagttccaatgtatgccccacattgttttagaaactggagataggcaaaactcaatttatagtctcaaatagcttgcaaagtagtatcttatataggaattgaattgcttccagggaaaaataaaggaatatattactagaagaaggtacttgtgtaggaagctcacaattttttttccaggctagattgaaactggacattagagacatactctgttattttctgaaatrtgagtgctaactatggaaaaatagagcataaactctcagaacacagtaggttagtagaggttaaatgtaagaagacttttgtggaaaaaatatgtaaattatgaggagagaatgcattcagaatgagtaaagaatattttttagatgtctgctgtatgcatatataaagatctgtggcttcaaatttgactagattt

SEQ ID NO: 369930 - DNA, 571 bp, Homo sapiens
atactataattttatccttttcttagctctaatattagtaaagccctgcaacaagcaggttttataattttcttctcagtgtcactttacaccataggctaggaagcatcagtagatgctcagcaataattactgcatttattgagttccaatgtatgccccacattgttttagaaactggagataggcaaaactcaatttatagtctcaaatagcttgcaaagtagtatcttatataggaattgaattgcttccagggaaaaataaaggaatatattactagaagaaggtacttgtgtaggaagctcacaattttttttccaggctagattgaaactggacattagagacatactctgttattttctgaaatgtgagtgctaactatggaaaaatagagcataaactctcagaacacagtaggttagtagaggttaartgtaagaagacttttgtggaaaaaatatgtaaattatgaggagagaatgcattcagaatgagtaaagaatattttttagatgtctgctgtatgcatatataaagatctgtggcttcaaatttgactagattt

SEQ ID NO: 369931 - DNA, 565 bp, Homo sapiens
caaggctggatgaatttactcaacatggccaaaaagtctgttgacatagtgtcttcccattgggatctcaaccacactcatccatcagcatgtcaggtaagctacatcctctgtgtgtgtgatgattttacttatgtgcattttccactccttagtattctgctcctccactcctcaaactcaagctcatttattttagtctacacacacccagagtacatgtacattattacatttatgtagatgtgtcgttgttaatcatatgtcactcagctcctactagaatgccaggtttgcaaggacaaaattatgtttcatctttgcctacagtcggctctttatacagaattgctgtgttgtacaacttcagggcgtgctatttacaygataatctctgtcaatggcatggtccagaattctgcttcgcccaactagcgtgtttacagttctaattctgtaactgctcgctgaggcatttatttggttaatttgtgttataattcacctttcaagttataattcacccacagccacatttttttaatagagtgaaatttcccaggat

SEQ ID NO: 369932 - DNA, 438 bp, Homo sapiens
atgatgatgatgatgatgatgatgatagtaatcgctgccacttattgagaggcccataagccaagtactttgcagacatgatgacactaccttgggacacaaatcttagcattctcgtttttaagatgaagacaatgaggtttgggcaactgtgtcacgtattgggcccagagtcacaagttagtagcagaaccagtttttaaatcttgtctgtctgccactaaagtctggcgtgctcaaacatccccccttggaagcttctctcacactgtgtgtatgtgactgtatcasgacaacagttcaaaaccagccctggtatggactaggaggtaaggatgactgaatgctaatagaaataaacatttgcgagtcaggcttctcctttgttctccttttgctatctaataaaacgtattgattgtcaccaccaataattgt

SEQ ID NO: 369933 - DNA, 562 bp, Homo sapiens
cttcaaaggaaatttcctactcttcttccagccttgaatgataggagtagaggctagcctccaccatgacccaatcccacatggctttatttatttacttattaatttttttgagacagagttttgctctgttgccgaggctaaagtgtggtggtgtgatcttggctcactgcaacctctacttcccgggttcaagcgattctcctgccacagcctcctgagtagctgggattgcaggcayctgccaccacaccaagctaatttttgtatttttagtagggatggggtttcaccatgttagccaggctggtcttgaactgacctcaagtcatccacccaccacggtctcccatatgactttaggtagatgttattgatgtagaaaggtagatgctagatgttattgatgtagaaagatgataacacttagaagcttagttcaagtcactctctaacaactggcctgctgccaacaaatggaatttttcaacttactgcctatgacctaactatcgttgaactcacaggcaagcttttaggaagagacctagtttagaataat

SEQ ID NO: 369934 - DNA, 550 bp, Homo sapiens
cccctcctttccccctctcactgggcaggtaggggaataattgtgaagtgatgaaaaatggaaaaaggaaacaggtacttgctgccaactccttttttttgggtgcagttcaaggacccctatatcctgttctttgcarataaaaatcaccaagttttaccctaaaacttcactgcctataaaaaggcactaactgaaagctactttgattaaaatttttacctgattttatctttcaaatggaaaaggaaattcaagtactatccaaacctttcaaactttgggcaggcagtctttggacttgcgtgtgcccttttatctttaccaaaaccctataaatattggcaaatagtctctcattggtttattgcgtgcaaaaatatgctaggaaaaaatagttcacaccctgattactcaagctgaacaaatttaaattttctttaaaatattctggtgccaaacactatccttcacagatacgtgcgataaaaaaatgtgtgagcgaacacagcttctttttcattaatttttttaaagatactgttttttt

SEQ ID NO: 369935 - DNA, 554 bp, Homo sapiens
tcatatagtcacgcatttcaaaatagcaaaacgatgatgacggtgatgatgatggtgatgatgatgatgatgatgatgatgatagtaatcgctgccacttattgagaggcccataagccaagtactttgcagacatgatgacactaccttgggacacaaatcttagcattctcgtttttaagatgaagacaatgaggtttgggcaactgtgtcacgtattgggcccagagtcacaagttagtagcagaaccagtttttaaatcttgtctgtctgccactaaagtctggcgtgctcaaacatccccccttggaagcttctctcacactgtgtgtatgtgactgtatcaggacaacagttcaaaaccagccctggtatggactaggaggtaaggatgactgaatgctaayagaaataaacatttgcgagtcaggcttctcctttgttctccttttgctatctaataaaacgtattgattgtcaccaccaataattgtctacactccattaatacatggatggatttctatccctgaaaggaccacattaagtcacc

SEQ ID NO: 369936 - DNA, 589 bp, Homo sapiens
ctatgaaggaaaatcatttgttttcgtgttttgataagaagtcttattatatttcaacagaatctaagttgtagtagtatctacatatgcttggaaattcaaacacttctttttctgtgagatgcaattactataatgaaattttaacatatagttcacaatagaaatgtaaaccaggcctttattcgtgcatttgtcaatcactatttgctgtttacagtagcaaatattcakcaactccaaagaaaatctgttaggcttcctaatatccccaagctttaacttttggttgagtttacaagctttagcatgggctatggcaagaaagagagctgtggatgtctcgggctccctccttctcttcctaacacatcagctttttatcctgccaggataatcaaacccaaagagatgctaggaaactccataaggaaaatcatctgcaaatacaggaccctcggttaaccaaaagtaatcaattcctcagaaaaaaaaaaagtgttctctaacaaattatcagatagtgagaacccaattttacatttttaaaaaataggaaaagtaagaatacatttctaagccacgttga

SEQ ID NO: 369937 - DNA, 589 bp, Homo sapiens
ctatgaaggaaaatcatttgttttcgtgttttgataagaagtcttattatatttcaacagaatctaagttgtagtagtatctacatatgcttggaaattcaaacacttctttttctgtgagatgcaattactataatgaaattttaacatatagttcacaatagaaatgtaaaccaggcctttattcgtgcatttgtcaatcactatttgctgtttacagtagcaaatattcagcaactccaaagaaaatctgttaggcttcctaatatccccaagctttaacttttggttgagtttacaagctttagcatgggctatggcaagaaagagagctgtggatgtctcgggctccctccttctcttcctaacacatcagctttttatcctgccaggataatcaaacccaaagagatgctaggaaactccataaggaaaatcatctgcaaatacaggaccctyggttaaccaaaagtaatcaattcctcagaaaaaaaaaaagtgttctctaacaaattatcagatagtgagaacccaattttacatttttaaaaaataggaaaagtaagaatacatttctaagccacgttga

SEQ ID NO: 369938 - DNA, 574 bp, Homo sapiens
acttttacctttccatatccaacacctagaagaaagaaatatattcttattatcaagcataaaaaagatttacgttcgtctatactgtcttatacaagatgtccatctttccttaaagtcatggggcgtatcaatatattaagaaaaacacaaagcaattagcacaactagactcaaatatgaaacagatattgaaactagcatccaagaaacttaaactacaatatattaaaagattttaatagcagaggtggataacatgctaaaactgatgcttaattttagtagagatttaaaacatatgagaaaggattaaatggaaatgcaacaaatggaaaagaaaataaagattttctctcaataggttcgtcagtagagtgggcacagttgagggaagaatcaaaaaacttgaaggtaggtcaatagaaatgactcaaactgaaaggacaaagaaaaaayaggagactgatggcaagacggctgaataggaacagctgcagtctgcagctcccagtgagattgacacagaaagcgggtgatttctgcatttccaactgagttacctgtttcatct

SEQ ID NO: 369939 - DNA, 646 bp, Homo sapiens
tgctgtttaaagaataaagaattcacatgcagtgtaaaggtgattttcctttaaacatgcatgtgtttttgagaatagtgtgtagaaattggttttctgggttttaaaaacatttgacaggccactgttggtcgttgggcatgtgtcctcagccctatttttggcagtggggacttaggtgtattttcagccccagacaggctgtccttgggtgcctgtcctctgggccaggaagggagctaagtgccagcggagaaaggcaggtgtgacacagacagcctgtcccttggagggctcgtggcaagaggaatgaagcacatagaatagcaagtgcagaagggctgacttaggtgtgtcttcagggtgcatggggaccacaagggagggaattgtcaggtccgtttagaagacaaggttaggaaagactgaagatattctagattctctaaaacatcagtttagacatgtttgggctttaacaaccagtcttctctatttggaagaagggtacaccacagtgatttctaaactaatgagttcatccrttgtttcaaaactcagatttagtttttaagttatcttgaagtcaaacttagaaaaccgatatcatttataattttaatttttttgcaaaattaaattacaa

SEQ ID NO: 369940 - DNA, 646 bp, Homo sapiens
tgctgtttaaagaataaagaattcacatgcagtgtaaaggtgattttcctttaaacatgcatgtgtttttgagaatagtgtgtagaaattggttttctgggttttaaaaacatttgacaggccactgttggtcgttgggcatgtgtcctcagccctatttttggcagtggggacttaggtgtattttcagccccagacaggctgtccttgggtgcctgtcctctgggccaggaagggagctaagtgccagcggagaaaggcaggtgtgacacagacagcctgtcccttggagggctcgtggcaagaggaatgaagcacatagaatagcaagtgcagaagggctgacttaggtgtgtcttcagggtgcatggggaccacaagggagggaattgtcaggtccgtttagaagacaaggttaggaaagactgaagatattctagattctctaaaacatcagtttagacatgtttgggctttaacaaccagtcttctctatttggaagaagggtacaccacagtgatttctaaactaatgagttcatccattgtttcaaaactcagatttagtttttaagttatcttgaagtcaaacttagaaaacygatatcatttataattttaatttttttgcaaaattaaattacaa

SEQ ID NO: 369941 - DNA, 579 bp, Homo sapiens
gagtagttcttctaatttctgaaacaatcacctgtaattcagcaccaaaaaaacacacaaaggaataaaaggtaaggaaaaaccatatgaacrtaaggtgcccttgaaaagtactggcatggaaaagacttgaagattatataacaagactaatccatattagagaatcaaaaggagattaaactcccaaagatacgttcagaagaaaaactactatgaactaaattatccttcctttccatattgttcatgcaatatacacacatgcacaactttcccccactttcacctagttgggatgagatgttaatttaggctgaaggactattatttctctttactcctgttatgccagagaggatccaagaggaaaaaagatatacagtaaaataaaaagattaggaatcagagccccaaggaaaataaaagactgtattaaacatcactgcaaatcaatgtctctgaaccgaattttttaaatattttgcaacgtctcagatcaccatacgtagtgcaggagcaggggaagagtcttcaagagtcatgctagccacactgtcattagaggtggcctagaga

SEQ ID NO: 369942 - DNA, 603 bp, Homo sapiens
gtggttggtggttgcacagctacaggtgtttgtcaaaattcattgtactatacacccgaaaagtgcaaattctgctatatgtaaattatacctcaataaaccagacttaaagaggagggcaggtgtggtggctcacgcctgtaatcccagcactttggagggaggaggcaggcggatcccttgagcccaggagttctagagctgcacggtgaaaccctgtctctaccaaaaaatccaaaaattagccaggtgtggtggtgggtgcctgtagtcccagctacttgggaggctgaagtgggaggatcgtttgggccctggagggggaggttgcagtgagctgagatagcaccactgcattccagcctgggtggccgagtaagactctatctccaaaaatatataaaaataaaaataaagaagacactgagctcagacaccayaccaaagctactgaggcacctgtaaggtgtctgttttataatattggatgacattcatcattcatcaaatgtactgagtgcccatctaatgccaaatgctctgctatgagctagtacagagtgaacaaaatagacaaaaaaatagacacaactatacaaacaa

SEQ ID NO: 369943 - DNA, 580 bp, Homo sapiens
atcaggaaggcagtggtggctctgtgccatgaggtccctctttgtaggctgtggctatttttgggctggcagcccctctgattcctgacttggccctagataatcatgaggccgcctttagagagaaacccttcagaagccaggcaggtccctgtgggattagcaacactccactgctaacacagmaagtctcaggtcctaagtgctataaaggccctccaaggacagcgccctctaacctgatggccctcggttggccagacccaaggctgggctcccatttcaaatgggcaagtccgtggttttatggggctaacaaatcaaagctgacacagatatactactcatacatggattttagccaggaaatttcaaacaactcaatgatgggatttttttccccccttaaatgtcatgtccattcataacactgagatttcagatgtgtgtaacagctttgggaaaaggtattgataaaaatattcaaagaaaatgttagtcacttttcaaaaaaagcacagcataccaagatgatgtagtaagttaaatattcccttgtgctatttatagacataaccat

SEQ ID NO: 369944 - DNA, 580 bp, Homo sapiens
atcaggaaggcagtggtggctctgtgccatgaggtccctctttgtaggctgtggctatttttgggctggcagcccctctgattcctgacttggccctagataatcatgaggccgcctttagagagaaacccttcagaagccaggcaggtccctgtgggattagcaacactccactgctaacacagaaagtctcaggtcctaagtgctawaaaggccctccaaggacagcgccctctaacctgatggccctcggttggccagacccaaggctgggctcccatttcaaatgggcaagtccgtggttttatggggctaacaaatcaaagctgacacagatatactactcatacatggattttagccaggaaatttcaaacaactcaatgatgggatttttttccccccttaaatgtcatgtccattcataacactgagatttcagatgtgtgtaacagctttgggaaaaggtattgataaaaatattcaaagaaaatgttagtcacttttcaaaaaaagcacagcataccaagatgatgtagtaagttaaatattcccttgtgctatttatagacataaccat

SEQ ID NO: 369945 - DNA, 580 bp, Homo sapiens
atcaggaaggcagtggtggctctgtgccatgaggtccctctttgtaggctgtggctatttttgggctggcagcccctctgattcctgacttggccctagataatcatgaggccgcctttagagagaaacccttcagaagccaggcaggtccctgtgggattagcaacactccactgctaacacagaaagtctcaggtcctaagtgctataaaggccctccaaggacagcgccctctaacctgatggccctcggttggccagacccaaggctgggctcccatttcaaatgggcaagtccgtggttttatggggctaacaaatcaaagctgacacagatatactactcatacatggattttagccaggaaatttcaaacaactcaatgatgggatttttttccccccttaaatgtcatgtccattcataacactgagatttcagatgtgtgtaacagctttgggaaaaggtattgataaaaatattcaaagaaaatgttagtcacttttcaaaaaaagcasagcataccaagatgatgtagtaagttaaatattcccttgtgctatttatagacataaccat

SEQ ID NO: 369946 - DNA, 468 bp, Homo sapiens
agtggaaacatttttactgcaagaaagagttgcaagttggagtgaagatcatttaagtttggcaaataaactgtgtggggagtaaagaagaaaaggtgagattaaaaaaaaaaatcttaatagtatagcaccacctggtgttagaacattaggcatttttcaaatgaaatttttkcttatcaaattgcatttttcttcctgtttgggtgattttaaaattttccactcaggagaattttgttaaagttttcagttaacgtgagttctgttttctgtgtataaatgagtgaatttcctgagatctctctttcattccaaagatgtatttggacttggttcttatttatttcttatatgatagcctattgtcctaatggattattttttttttagtcaccagtatggggggtcgtatcaatttgtttattttttttatttcagttttgccaaaagctgctttctcatgat

SEQ ID NO: 369947 - DNA, 473 bp, Homo sapiens
cgaatattggtttctcgctttgtctgcttgtttctttgtgatgtgatatctttagtggcatcatttaagaacttctgatataacacagtgctgttgtaaaattagcactgggttctcggaactttgggatcctatagaaataatgttactaarttttttaaatgaccgaatcaaaatacgtaaggcaataaattgttcttatttgggaattttagcaggttctttgtgtgtgttcttttaagtgtagaaaatttcaaagttacgatcttgatccttttggatattagtgtaaaacatttcacaatggtttctataccaaatgtgctcatttatagaggttaaagattataaggtctttcacactcagatacctaatatccagtttttaagatcattaaagtaactgggtaaaaataaatgatatattgtatgtcatgaacagagttgaagatttggggactattgtgcaattt

SEQ ID NO: 369948 - DNA, 573 bp, Homo sapiens
ccacatcttcccaccatatccatccctaacatttaaggtctaaaattatgagtctggcattcaatgccatgtctcacccaactgtaaactacctgcctctccagccttattttcttcttcccacctgtgttcctactaagctgtataaactacagaacaacataccttatggtgagacatgatgttttctttagtttacagtttttactgagaacgtctaattctgtggcaggatgtcaggtggttctggctctgtatatgtttgaactttgtgattacttgcacttgccttactaggtaagcacataaatacttgtgtaagacacaccttcatgtgaatctattgtccagatttttattaagatgatctgttttggccaggcacggtggctcacacctgtaatcccagcactttgggaggccacggcaagtggctcacttaaggtcaggagtktgagaccagcctgatgaaaccccatctctactaaaaatacaaaaaaattagccgggtgtggtgttgtgtgggtgtaatcccagcttcctacaacacaagttgtgcagcacatctgtagg

SEQ ID NO: 369949 - DNA, 555 bp, Homo sapiens
ttgtctggaatctttatacttcccgcaggctttgctgggagcttctccttcggggtgctgtctttgctatcaccagctaggggcttgctcctccaccccatgcagaggctttttaattgcatagtgtgagttatctaagacaaactgactatactgtgctattgactgagtaagtcagttttccactccaatgcccatttaaattgtaaccatattaaaaaaacaaaaacaaaaatcccccgaaaactccagaagtgtaaacaaaataccattaattgtttaatctttattggtgtaaacatgattttttgggagattctttgacttttctggtgtgttgatatcagttttagaggactttrgaatgctgtctgcccaccaggactctctcttctctgctggtggtcttgtaatggttttttgtttttgttttttgttttggaggtaggagacttctatcttcttataagtcacttgataatttttgactgtttgtataaaaatgttctaattgctgcaaaaaggctcttaaagatattttaaatacaaacctca

SEQ ID NO: 369950 - DNA, 614 bp, Homo sapiens
gttccaggctgcctcactcccttacagatgttgacggtgggaaaagcctacacttcccccatgaactcaaaacgttgacagtatctctgggtggcaatgagagaatgggtttggtttggttttctcccaggcttctactttccagagagattttaacatttttttctgagttctccacctcatattctaattctccatggttctgggaccagactctccttcagtcagtggtctctgaagtgacatttgctcatcttctgtggaatagatcttgggaaactgaacttgacaccttgaatcttcctcatattatctcaaccttgggtactttgagtgccacaggataaatrtgggacatctttctgaagcatcagtttcccttgattctcttgagatcaagagaaaaaacatgaatgtacttagggatgacagtcacataggtttctaagagtataccagacctctctctgaaatgaggcttgggttgtcctctttctgataaattctgatttaagagaaaggctgccttctgccatgaggacacattgatataagagtttgagaggtactggtgcacttcttcacactaacagacgtgtgaggatgtatgactc

SEQ ID NO: 369951 - DNA, 605 bp, Homo sapiens
ctcttacaaataaagctaccctcatgtttgtatgggggcagcagtctgcagtctgtcatccaggggtaggggaataaacctgaggatcaacaaagtccattcaatattaaataaacctaattacatacaaaagaggggtcatgtcttagtctgctcaggttgacatcacaaaatgtcatagattgagtgcttcaaacaacagaaattttttctcacagtgatggaggatgcaagttcaagattaagtttctggaggctggaagtccaagtcaagcaagtgacacctgtgaccacctccagcagcagagtcccactaaacagtggagaacagaaagcataacaatgcctgcctccaggagcagtaatcccaagaygtcaacccaccacatgattttcaggcacgactcatgcaggcactggatggaacaacgctttatgcacatagagaagacacagagcaagagcagcttcagtttcgactgttgatccctcatggccagtgggtctcaccccacagccagcacagggagatgttccacacactcatgctatagacaaaggcccctgttcccagcagtggggtcgttcaggtgccatatgatgca

SEQ ID NO: 369952 - DNA, 459 bp, Homo sapiens
aagagcagcagcgtggcatagctggcataactgagagagctcaggcctgggaattcaagtgtctgatactgggtcaccttatgctagttctttaaytttcttgggcttccatgttctagtctgcaaaatgggaaggttggaccccatgatctcagtatctagatcaggaagttccttcctatcaggacccatgtcctttctgctgcagtcaaggcattttaccttgtgctctgatttcagaaaaaatggaaaataactgcttggtgcttaacagggaggaaggaaagagcgttgcattgaggttctacaagggctggcaagctccatcgctggtactaacatgctgtgtgatcctgggcaaggagctccccctctctaagcctcagtttccccataatcaaaacagagggctggatgagatgatcccacagcccctttcagtgcctcgtcctgccgtgg

SEQ ID NO: 369953 - DNA, 557 bp, Homo sapiens
aatattcccttttcacagatgagacaattgacgctcagagaggttggtaatttgcctgaattcacacagatattaacgagcgagccaagatgggaacctaaatgtatctatctgcaaagactttgctcttaaccrtcagcgctcttactgagaaggggaggtcatcgcctctccccaagctgacttacaggactggaatcacagggcagtgaacacccaaagcctgaatgactccaacaaacctcccaccccctccacccccacccagcctcggcaaaagcagagccagcagggtcgtggatcaacaaagccagaaggactttgggtcatctaaaccaagctttcacttcacatacaagaaaactgaggtccacagtggcgtgcgacttgcctaaggtcacacagcaagtctagggtaaacctcggtcccggccatggggtcctgggagtccccctccaggttgagccagtccctttgccactccttccacctgggtgtagacatgccttcagccactcactccagggacatctggccttacccctctctgcttctc

SEQ ID NO: 369954 - DNA, 548 bp, Homo sapiens
acttgaatagtgacttctgtttcataatttttcatcgccttttggtttcatctttagaaagttttttaagttatgagaatttttctttcccttagaagttgatgcacataaatccccttgtttgccacattaatggcagaccttactttcccctccccgattcctgcaggggmtctccaaaaatctaagcgttaggaaagagcccagccaatcgcatcccagtggtatccccacccttcttcacctctcccagactgtagccttgccccaccctctcagccaccagggacactcacagggaatcttgttaatctcattgaagaacttctccttcagtttggcaaacatgtcctcctggctctccccagcactcccactctcggtggagttgtccacgggtccaatgggcatcgtgacggtggtggtggcaggagccacaataggctcttggttcctcttgaaaatgttcctcatggtggcagaggggacagatggggatgagaggggaagagggcagggtgagcatcccagaggttgtcttcccctca

SEQ ID NO: 369955 - DNA, 539 bp, Homo sapiens
ccaagcatttattaaactcttactacctgccatgttgaaatagccttgaccccaaaactggtcttgaagtgaaaaaccaaggtccactggacttcacctctggggacaaagagatgggtgcagtttggcgggaactgcaagtagccacacaaggggataaatatrtgtccagggccttccgccatgtccatctcccctcacttctacaaaactgttaagggctctgtgacctttttttcaaaaaacagctttattgagatgtaattcatatataagtcacccattaaagtatacagttcagtgcattttattgtattcacagaattgtggaacaatttgcataacctaagtagaacatttttgccacctcaaaaagaaacccagtcccattagcagtcactcttcgttcccatcctcttcccagctccagcaaccactaatctactttctgactctatagatttgtctatcctaaacatttcctatcaatggaattataaaatatgtggtctttgtgactggcttctttcatttagtat

SEQ ID NO: 369956 - DNA, 568 bp, Homo sapiens
tgatgttttcaaggttcatccatgttgtagcatgtatcagtatctcattccctttttattgccacataatattccatggtgtaggtagaacacttttttttttttttgagacagggtctcactctgtcgcacagctggagtgcagtggtgcaaccatggcttactayagcctccacctccagggctcaagtgatcatcccaccgcagcttcctgagtagctgggactacaggtgcatgccatcacaccaggctaattttttaattttttgtagatatggggtctccctatattgcccaggctggtctcaagctcctggcctcaagcaatcctcccacttcagcctccgaaattttggcattacaggcatgagccaccgcaccttgcctagaacacattttatatttatccgttcatcaatttataaacatttgggttatttccactttgggctattttataactaaatatggctaataatatcccacttgtgggatattatgaataatcctgctgtgaacatccatgtatgtttttgcatggacatacgttttcatttctcttgggta

SEQ ID NO: 369957 - DNA, 542 bp, Homo sapiens
tacagcctccacctccagggctcaagtgatcatcccaccgcagcttcctgagtagctgggactacaggtgcatgccatcacaccaggctaattttttaattttttgtagatatggggtctccctatattgcccaggctggtctcaagctcctggcctcaagcaatcctcccacttcagcctccgaaattttggcattacaggcatgagccaccgcaccttgcctagaacacattttatatttatccgttcatcaatttataaacatttgggttatttccactttgggctattttataactaaatatggctaataatatcccacttgtgggrtattatgaataatcctgctgtgaacatccatgtatgtttttgcatggacatacgttttcatttctcttgggtatatacgtaggtatggaattgctgggtcataactatgtttgacattttaaggtgccagcaccaatttatgttcccaccagccatgtatgagggttccaagttttccacatcccagacaacacttctttttttttttaat

SEQ ID NO: 369958 - DNA, 542 bp, Homo sapiens
tacagcctccacctccagggctcaagtgatcatcccaccgcagcttcctgagtagctgggactacaggtgcatgccatcacaccaggctaattttttaattttttgtagatatggggtctccctatattgcccaggctggtctcaagctcctggcctcaagcaatcctcccacttcagcctccgaaattttggcattacaggcatgagccaccgcaccttgcctagaacacattttatatttatccgttcatcaatttataaacatttgggttatttccactttgggctattttataactaaatatggctaataatatcccacttgtgggatattatgaataatsctgctgtgaacatccatgtatgtttttgcatggacatacgttttcatttctcttgggtatatacgtaggtatggaattgctgggtcataactatgtttgacattttaaggtgccagcaccaatttatgttcccaccagccatgtatgagggttccaagttttccacatcccagacaacacttctttttttttttaat

SEQ ID NO: 369959 - DNA, 609 bp, Homo sapiens
agagccaaattatcgggaactcacagctgcctcgcctcccgcatggctgggagctgcagtccctgggagagcagccagctggaagactcaaggacgataaatggatctgggtgccagggctcccaggacagagtgaactcctctgtctggtcagaatcacccgagcaggaaagcatgaaatggcaccattaggtgaaggctgcagctgtcyggggagggaggctgggggtgtggagagatgcctgctcccagcctgctgggccacaggtcaaggtctgaagaggaaggggcctgggaggccccaacaagggagaagacacacaagggaagggactgaggaagggtctctcaggcttggcctgcatcaagcccccctggggagtttgttaaaatgtagaccctctgccatcgcacctgtctcccagagcctaactcagaaaactcagtggactggaatgtgcccagggatctgcatggtaacaagcacccccatttcctctcatgcaggtgatctgggcaccacactttgaaaaaatgaggttctaagtaattcagaaattcttgccagagaggtcaaagtccaagcccagttgctggaagtaaaataag

SEQ ID NO: 369960 - DNA, 541 bp, Homo sapiens
aaggttcaatccaaagaaggcctcacaagtcacattacaggttgagcatckctaatctaaaaacctgaaatctgaaatgcttcaaaatctgaaactttttgagaactaaaatgacgcttaaaggaaatgctcattggaacatttcagatttcagattttcaaattagggatgctcaactggtaagtataatgcaaatatttcaaaatctaaaacaatctgaaatctgaaacacttcgattctatgcactacagataagggatccttcacctgcataacgaattgtcaaaaattgaagacacagaaatttgaaagcaacaagaaaagaggcttggcacatacaagcaaactctgataagactattagcagatttctcagcagaagccttacagccagaagatagtagaattatatagatatattcaaactggtaaaagaaagaaagatactgctaaccaagaatattttacctaaaaaagttgttcttcaaaaatggagatctaaagccttctaaacaaacaaaagctgaggagttcaccac

SEQ ID NO: 369961 - DNA, 579 bp, Homo sapiens
taaattcctagaaaccatatcttaccaagtccaaagcatgaagaaatggagaaactaaacataccagtaatgattaaggatatcaatttggttgtttaaaatctccatcaaaaagaagtctatgggccaggaacagtggttcatgcctgtaatcccagcactttgggaggccgaagagagtggatcacttgaggtcaggagttcaagaccagcctggccaacatggtgaaaccccgactctactaaaaatacaaaaattagccaggtgcggtggtgcacacctgtaatcccagctactcaggaggctgagrcacaagaatcatatggcttcactactgaattctatcaagcatttaaagaagaattaatgtcagtatatcccaattgcttcaaaaaaactgaagatgatggaccacttccaaactcattttactatgccagcattaccctgatatcaaagccaaaccagaacactacaaaaaagagaaaatcacagaccagtaaccctgatgaaaacagatccaaatatcttccataaaagactagaaaaccaaattcaataccgcattaaaatggcca

SEQ ID NO: 369962 - DNA, 611 bp, Homo sapiens
tgcctgtaatcccagcactttgggaggccgaagagagtggatcacttgaggtcaggagttcaagaccagcctggccaacatggtgaaaccccgactctactaaaaatacaaaaattagccaggtgcggtggtgcacacctgtaatcccagctactcaggaggctgaggcacaagaatcatatggcttcactactgaattctatcaagcatttaaagaagaattaatgtcastatatcccaattgcttcaaaaaaactgaagatgatggaccacttccaaactcattttactatgccagcattaccctgatatcaaagccaaaccagaacactacaaaaaagagaaaatcacagaccagtaaccctgatgaaaacagatccaaatatcttccataaaagactagaaaaccaaattcaataccgcattaaaatggccacagttctacaggctgtacaagaagcatgatgccagcatctgcttctcctgagggcttttgtgctgtgtcaaaacatggtgaagaaggtaaaaggtgaggcgggcatatgtgaaatgagaacaaacccaaggggtatcctggatttgtaacaacctactccaaggggaactaattt

SEQ ID NO: 369963 - DNA, 611 bp, Homo sapiens
tgcctgtaatcccagcactttgggaggccgaagagagtggatcacttgaggtcaggagttcaagaccagcctggccaacatggtgaaaccccgactctactaaaaatacaaaaattagccaggtgcggtggtgcacacctgtaatcccagctactcaggaggctgaggcacaagaatcatatggcttcactactgaattctatcaagcatttaaagaagaattaatgtcagtatatcccaattgcttcaaaaaaactgaagatgatggaccacttccaaactcattttactatgccagcattaccctgatatcaaagccaaaccagaacactacaaaaaagagaaaatcacagaccagtaaccctgatgaaaacagatccaaatatcttccataaaagactagaaaaccaaattcaataccgcattaaaatggccacagttctrcaggctgtacaagaagcatgatgccagcatctgcttctcctgagggcttttgtgctgtgtcaaaacatggtgaagaaggtaaaaggtgaggcgggcatatgtgaaatgagaacaaacccaaggggtatcctggatttgtaacaacctactccaaggggaactaattt

SEQ ID NO: 369964 - DNA, 579 bp, Homo sapiens
ttgttttgattaaattaccctttttgaggggtgggggctcagctttatcatttgcaaaatgaaggatagtaactgggctgatggttacagatgtggatgcgtgtcagaatcacctcagagagctttttaaaaacacattctccccagcactttgggaggccgaggtgggcggatcatgaggtcaagaratcgagaccatcctggtcaacatggtgaaaccccgtctctactaaaactacaaaaattagctgggcatcgtggcacgcgcctgtagtcccagctacttgggaggctgaggcaggagaatcgcttgcacccaggaggcggaggtggcagtgagccgagatggtgccactgcactccagcctggcaacagagcaagactccgtctcaaaaaaaaacaaaaccaaaaacagattctctgggtatgctttgaaatgagcatttcaaaaatgctctttcaatcactgatgcaaccaaagtctttgggacttttaggctaagaatatattctttagatacccagaatagtttaatgtggagtataacaatttagggaaatgaagaaggggtgaatta

SEQ ID NO: 369965 - DNA, 579 bp, Homo sapiens
ttgttttgattaaattaccctttttgaggggtgggggctcagctttatcatttgcaaaatgaaggatagtaactgggctgatggttacagatgtggatgcgtgtcagaatcacctcagagagctttttaaaaacacattctccccagcactttgggaggccgaggtgggcggatcatgaggtcaagagatcgagaccatcctggtcaacatggtgaaaccccgtctctactaaaactacaaaaattagctgggcatcgtggcacgcgcctgtagtcccagctacttgggaggctgaggcaggagaatcgcttgcacccaggaggcggaggtggcagtgagccgagatggtgccactgcactccagcctggcaacagagcaagactccgtctcaaaaaaaaacaaaaccaaaaacagattctctgggtatgctttgaaatgagcatttcaaaaatgctctttcaatcactgatgcaaccaaagtctttgggacttttaggctaagaatatattctttagatacccagaatagtttaatktggagtataacaatttagggaaatgaagaaggggtgaatta

SEQ ID NO: 369966 - DNA, 522 bp, Homo sapiens
ggatttaaaaataaacatttaattttaataagctctctgctagtggcactgcagtgacagatggytgagagtttgtccctaaagctatggcaccggtcttctaattgactcaccctgtattcagcctgtgtagccctggcagattctttctctgtttcagaatgggacaacagaagaagtgacttcagaggaagaggaagaagaggagatggctgaagtaggtattttatataagaatgacatttcataaatgtcgtcatttttgatttgaggaattctctaaatctcctttgtaaactactattaatgtggaataattgaaagcacattgtatttggaatggaatataatttctcacctctggctttacctctaactgatgatacatctttgagaaaattgctttatctgaattctttggatttgattttctggaaaacaaaagctcttaacttttagcaccaaagttgtacttatatttaatactaatcagtccttaacctgtatttggttatttttagg

SEQ ID NO: 369967 - DNA, 575 bp, Homo sapiens
cttatcacctcaacagacctttaggcttaaacatagcggctcatttacaatgtagtccatcattaaaatggcacagcagagttaacaaggctcgtgaaccctactcatcattatttcatttgtttttgaataagrcttgttcatttcccgttttcttgtagtctgtccaacattttgttacagctaatgtatttcctaattaaatcatagcttataattcaaaattcaaattcttctggcttttagtgttttcgtatgaaagattactttctacctattctgttaatgtatattacactttattggtaatagagtgttataccttgaactgggagaggctcaagagtcagtgtaggtgaaaagaaccaaggctttttaggggaaatagcaagaggtcctgaaggaggttaaaaagggtaagggagagaggattttgtagagctgaagctggttgtgtggtatttggggctttaagaggaattggaaaactttctgtctgtgttgtccactatagtagccaattggtatttggagcctcaagaggaattggaaacttttctctctgtgccattcac

SEQ ID NO: 369968 - DNA, 550 bp, Homo sapiens
ggattttgtagagctgaagctggttgtgtggtatttggggctttaagaggaattggaaaactttctgtctgtgttgtccactatagtagccaattggtatttggagcctcaagaggaattggaaacttttctctctgtgccattcactgcagtagccaattgctgggatagtataccagctggccttacagtgtctgggtggagattaatataatttcactgtatttcccttgcttacaattacatctctatttcctgcaaactgttggatctctgagctactagtaaaatgccactaagtctaattktttccttttttggggggcctaaaataaatgaattgtgacctgtgtgattactgatggtacccaacttggttctcagagatgtgtcgagtagatttttatctaaaagattgagcatatagggcagtattaccaggaagatgagaaggcttaggatcttaaaaatgggggttccttctgatggctcagaacaaaaggtctccagtgagatggagtagctgtagaagatgggagagaacataaag

SEQ ID NO: 369969 - DNA, 572 bp, Homo sapiens
acagtgttgtgcttggtcatggagggaacaggtaggccacacttcccaagccagccccatctggtttcccagtcctgagttctctgcttactttggaaggcagctcagacagagttgacatttgtgatgaggaatggggtagatggcagtgtagagggagatgctcaaccaccttggagtgaaaaacaccaggcacacagcttaaagctggaggtatgtaaatactgtaccctcttctttgtgttcaatctaggaagcttccaggatcaaatatcatggtttacagaactgtccttgcaattgaaggttttatgtratggatagtgtttgtttctaggagaaggtctaaaggaatttgcctctatggctggttttatcctctgtaatttaggggacacaaaaggggtacttaaaaatgcatgctttcagtagattttatttaaaataatctacataactttggtatgctgggaggcaaacagggggtctaactgcactttataaagtatgggatggcaaaagatgaaaaaaataccagcagttttcctcttggactctaattgaattcactc

SEQ ID NO: 369970 - DNA, 567 bp, Homo sapiens
tagaactgatccaaatatcagaaaaaaaaatgatcagacatggtgcccagtatagaatgagtgaaaagaggatgatgaagataagttattaggaggctactgtaatagctcaggccaaaagaatgaacatgtattactgtgcctgccttagtccaaagatgagcaatgatctctaagaccatttagtgtgctaaattgagaagccagtaggagacaattttgaaccattactaagttatttgagctttcgatgagaaaagcatgcaattcccttactcaggttatgttgggatttgaaatgtagactgaagtatttctagcttccccataatcaatttcaattttgccaagctttgaggcgatgggaattcaatgagggtcattaatcctrctgagaataaagcagacacagtccacagagtttcaggctgcttttctgattgtgtgtagactcagccattgtacataggccatggtccagccagctgcacaggagctccgtggaggcccaaaggcaaagtgagaaagtaggtatcaaaaaaattgggatcatgtctttgttccagc

SEQ ID NO: 369971 - DNA, 567 bp, Homo sapiens
tagaactgatccaaatatcagaaaaaaaaatgatcagacatggtgcccagtatagaatgagtgaaaagaggatgatgaagataagttattaggaggctactgtaatagctcaggccaaaagaatgaacatgtattactgtgcctgccttagtccaaagatgagcaatgatctctaagaccatttagtgtgctaaattgagaagccagtaggagacaattttgaaccattactaagttatttgagctttcgatgagaaaagcatgcaattcccttactcaggttatgttgggatttgaaatgtagactgaagtatttctagcttccccataatcaatttcaattttgccaagctttgaggcgatgggaattcaatgagggtcattaatcctgctgagaataaagcagacacagtccacagagtttcaggctgcttttctgattgtgtgtagactcagccattgtayataggccatggtccagccagctgcacaggagctccgtggaggcccaaaggcaaagtgagaaagtaggtatcaaaaaaattgggatcatgtctttgttccagc

SEQ ID NO: 369972 - DNA, 563 bp, Homo sapiens
acatacttattattccaaacaagaggttatgctttaaaatctggagaggtatttccgacctggtttctccaaacttattacttttatggagaggagaaaataggaacctatcttatctattaagatygtaaattaaatcagtacttgataccctcagtagcagatttaattgcccatataaaaagagaaggtaagttttgacaataaatgtaaatgtaaacaaggtcatcctgaaacatcacagcattctggcacagttattacctatattgattattttgtttctgtgatagttaattttatgtgtcagattggctaggccaacctactcagctatttggtcaaataccagtctcgaaattgctacgaaggtattttttagatgagctaaacctctaagtcagtagactttcagtagggcagattgctttccatgtgtgtgggggcctcatctagtcagtaaaggccttcagagaaaacagactggaattccctgggaaagagggaattctgcctccagaccgtcttcagagtctagatgcaactctttccggggtgcccag

SEQ ID NO: 369973 - DNA, 563 bp, Homo sapiens
acatacttattattccaaacaagaggttatgctttaaaatctggagaggtatttccgacctggtttctccaaacttattacttttatggagaggagaaaataggaacctatcttatctattaagattgtaaattaaatcagtacttgataccctcagtagcagatttaattgcccatataaaaagagaaggtaagttttgacaataaatgtaaatgtaaacaaggtcatcctgaaacatcacagcattctggcacagttattacctatattgattattttgtttctgtgatagttaattttatgtgtcagattggctaggccaacctactcagctatttggtcaaataccagtctcgaaattgctaygaaggtattttttagatgagctaaacctctaagtcagtagactttcagtagggcagattgctttccatgtgtgtgggggcctcatctagtcagtaaaggccttcagagaaaacagactggaattccctgggaaagagggaattctgcctccagaccgtcttcagagtctagatgcaactctttccggggtgcccag

SEQ ID NO: 369974 - DNA, 620 bp, Homo sapiens
gtgttttagataagatgtgagtaaattatagctattatctattttcactgtttctagtgtaagtgaatgataaatcctcctcctccctttcctcttccttcttcttttcttccccccctttcttttttctgtttttggagacagagtctcactctgttgcccaggctggagtgcagtggcaccatctcagctcactgcaacctctgcctcctgggttcaagtgatgctgtgcctcagcctccagagtagctgggattacaggcgtgtgccaccacgtccagctaatttttgcatttttagtagagacaaggtttcaccatgttggccaggctggtctcaaactcctgacctcaagagatccatccaccttggcctcccaaaatgctgagattacaggcgtgagccaccattcccggcctcttccaatrttataaaacatggtatcactcatttaagcttctagagctagttgtctacacaccttcattcatttactcagcaaataataattgagggtctgccactttatcagatactattagaccccatagttttcatcacaggccaaaaaaccaagtttccttggtttccaacattctaactgatcatggcagtggcgg

SEQ ID NO: 369975 - DNA, 620 bp, Homo sapiens
gtgttttagataagatgtgagtaaattatagctattatctattttcactgtttctagtgtaagtgaatgataaatcctcctcctccctttcctcttccttcttcttttcttccccccctttcttttttctgtttttggagacagagtctcactctgttgcccaggctggagtgcagtggcaccatctcagctcactgcaacctctgcctcctgggttcaagtgatgctgtgcctcagcctccagagtagctgggattacaggcgtgtgccaccacgtccagctaatttttgcatttttagtagagacaaggtttcaccatgttggccaggctggtctcaaactcctgacctcaagagatccatccaccttggcctcccaaaatgctgagattacaggcgtgagccaccattcccggcctcttccaatgttataaaacatggtatcactcatttaagcttctagagctagttgtctacacaccttcattcatttactcagcaaataataattgagggtctgccactttatcagatactattagaccccatagttttcatcacaggccaaaaaaccaagtttccttgrtttccaacattctaactgatcatggcagtggcgg

SEQ ID NO: 369976 - DNA, 548 bp, Homo sapiens
cccaggcactatcaacttgaatttgcagtggagccatcacttttgttgatcaatgaaattgacataacgctctttttttttttttttttttttttttttttttaacaccaaccgtgtgcctcgagctaactgtgtcaagaaaagcatgcttcagttggctggagtgagcaatttaacttgtggaggaatgaraaacgttagtgttgagaatagaaacataaaaccccagggtaaggtaggaacctacctgagaaccttgggtgagtcatccaccctttgggggctccctgtgcctcagtggagtgaagaattatcccttcctcgccttgctgcctcctgggaaagttgataagaatcaagtgaaattaagactgtcaggctgtcattgtcatccctatcaggggaagggtcctctggggcctgaaggggctttgggtgaagcacagctgtgttttctccagggacccaccgtgttcccatcctccgccattgtggcccagccactgcctgtgcaagtgtcacccaatccttccacaggccatcagaat

SEQ ID NO: 369977 - DNA, 548 bp, Homo sapiens
cccaggcactatcaacttgaatttgcagtggagccatcacttttgttgatcaatgaaattgacataacgctctttttttttttttttttttttttttttttttaacaccaaccgtgtgcctcgagctaactgtgtcaagaaaagcatgcttcagttggctggagtgagcaatttaacttgtggaggaatgagaaacgttagtgttgagaatagaaacataaaaccccagggtaaggtaggaacctacctgaraaccttgggtgagtcatccaccctttgggggctccctgtgcctcagtggagtgaagaattatcccttcctcgccttgctgcctcctgggaaagttgataagaatcaagtgaaattaagactgtcaggctgtcattgtcatccctatcaggggaagggtcctctggggcctgaaggggctttgggtgaagcacagctgtgttttctccagggacccaccgtgttcccatcctccgccattgtggcccagccactgcctgtgcaagtgtcacccaatccttccacaggccatcagaat

SEQ ID NO: 369978 - DNA, 548 bp, Homo sapiens
cccaggcactatcaacttgaatttgcagtggagccatcacttttgttgatcaatgaaattgacataacgctctttttttttttttttttttttttttttttttaacaccaaccgtgtgcctcgagctaactgtgtcaagaaaagcatgcttcagttggctggagtgagcaatttaacttgtggaggaatgagaaacgttagtgttgagaatagaaacataaaaccccagggtaaggtaggaacctacctgagaaccttgggtgagtcatccaccctttgggggctccctgtgcctcagtggagtgaaraattatcccttcctcgccttgctgcctcctgggaaagttgataagaatcaagtgaaattaagactgtcaggctgtcattgtcatccctatcaggggaagggtcctctggggcctgaaggggctttgggtgaagcacagctgtgttttctccagggacccaccgtgttcccatcctccgccattgtggcccagccactgcctgtgcaagtgtcacccaatccttccacaggccatcagaat

SEQ ID NO: 369979 - DNA, 578 bp, Homo sapiens
ccaaccgtgtgcctcgagctaactgtgtcaagaaaagcatgcttcagttggctggagtgagcaatttaacttgtggaggaatgagaaacgttagtgttgagaatagaaacataaaaccccagggtaaggtaggaacctacctgagaaccttgggtgagtcatccaccctttgggggctccctgtgcctcagtggagtgaagaattatcccttcctcgccttgctgcctcctgggaaagttgataagaatcaagtgaaattaagactgtcaggctgtcattgtcatccctatcaggggaagggtcctctggggcctgaaggggctttgggtgaagcacagctgtgttttctcyagggacccaccgtgttcccatcctccgccattgtggcccagccactgcctgtgcaagtgtcacccaatccttccacaggccatcagaattccacttccacccaagaggggaaaggacacattggaggcagcacagacattaaacacggtattttcagaaggagcagacataaccttacagaagtgctttattttctgtaactagattttgttttactggaggcagc

SEQ ID NO: 369980 - DNA, 572 bp, Homo sapiens
tgggtgaggaatgtcacttcctgggtcaaacaccaaactcgagtcctggtcctgagtgtgcagagcagaaggcaaacagaaagcagctgcatggagggtgaaggagaggctgaggggagagggcgagggtgaggtggagctgggaaggtcaggggcagttaatggccagacagcagcagaaattccacctggcgagctggggccccgaggtcttatcgggtgaggttgggggttgagggtgaggcccaaggatgagactgaggcacaggagtgctgcccaggctctcggttcttcctgcccctcctggtgctcayagtgggtgtcagcctcgcttttcccaagtgggagaaagcagatctgcggaggtgggaggtgttgggtccatggcagagcccttctgctgggttcctatctgagagcaggcagagggtcctgtgccagcagacgctcttcctcctctgccccaaccccgtacccctgcatccctctttctcccctctccaggtggccggtgaagagccctggcaccagccttgacctcaccctctgggacagactgaggcaggggacc

SEQ ID NO: 369981 - DNA, 493 bp, Homo sapiens
ttccctcccacccccgcccgcacgccgttccctacagccagggggtcccctcccccccgtcccctcccccagccaatccccggacccgagaggctgtaaactcggagctggcgggtggggtggggagtgttgcaggagtgcacggagctggcggggactcctcagtagaatcgggggagtcccgtagggctccgggggctcggagccggccccgccctcctcaaacttctgtaggaccgcgccagtttaaacccctctgccccagcctagtccgtcccgcacacacctccccttcccctgtcgcccatttccccctcggccggcagtamggactgcagaaggggggcgtgggcgccaggaggcggcctctcccgcagcggggattgcctggggcggaggacctgcgtcgcggtttgcggggatcgccttcggaggggccgcacgcgctgtgtgcaggcggatgtgaggagcatctcaagaggcgggtggggga

SEQ ID NO: 369982 - DNA, 493 bp, Homo sapiens
attctggaaccatggcgtgtccatggataagacatgaagtccttctttcaagacttggttttctggtactggaaaataccaatatggataaaagaccttcaaagctgctacgatgggtaaggaacaatgcacacagtataccattaaggcaaagaagatagtyttaatcctgtatgaaatgccaatgaagatgtaattaatgaatagacatttcattgaaatgaaatcaaaagacattttccttctctgacataacagagtagaactctctagtaagaacacaaaactgaccagcctgaccaatgtgataaaaccccctgtctctactaaaaagacaaaaattagccatgcatggtagcagatgcttgtaatcccagctactcaagaggctcaggcatgagaatctcttgaacccaaaaggtggaggctgcagtgagtcgagatcgcacaactgcacttcaccctgggcgacaaagcaagactttgtttttta

SEQ ID NO: 369983 - DNA, 605 bp, Homo sapiens
cttttttaaaaaaatacacatagagaaaagacaaaagcacaaaaaccaaaatgttagcaactattcgttctgggtcacaggatgtgggtcattattcatctcttccctttctgaatttttcaaatttaaaaaaaaaggaaaatgacaacaacaaacagaacaagggggatgctaaggagattcactctgagaaactgtcagaaaatcaacatttacacaaacagttttactttaaggctaagtttctcagataaggtattaaatatagaaaattgatttaaatattatgtactctctaagatggattaatgtctgtaaagcaaatggccattgtttaaataaatttgattgatatgcaatccaatgcctctggtataccttgaggaaaatctgttctctggaatactcttggcatctcttagttgtttccaggtaccttgcaattagcattccacagaccatagctcygttttgacttttatatcaaagaaggtccttagtctctaatggagaacacaaggcttaggctagggtaatgccacaaagaagtgacctgtaactgtccatattagcagtcttcgaattggcttatacttattcccaga

SEQ ID NO: 369984 - DNA, 543 bp, Homo sapiens
actcactactgtggaaggaggggagctccttgattacttttctttcttttttttctttgagacaagaccttgctctgttgcccaggatggagtgcaatggcatgataataattcactgtagccttgaactcttgggctcaaatacttctgattcagccttccaagtggctgggaactacaggcacacccccccacacctgaccagtttttttttcttttttaaaattttcagtagagatggtgttcccctatgttgaccagactggtcttgaactcctggcctcaagcagcattcctgcctcagcctcccaaagtgttgggattacgggcatgagccaagtgcccagcccttggttttggctgggatccttggacytcaattgcccagatccttggttctaccttctggaactttcttgtccatcttcctccatggccacatctaaaatggggtctcaggaggatgttgtcttgggggagcttcaagaatgctggggtaattctgaaagcctgtaggttattttacaatgaactccatcaaag

SEQ ID NO: 369985 - DNA, 570 bp, Homo sapiens
acgctgaaaaaacatttgataaaattcaacatctcttcatgataaaaactctcaaaaaactggatattgaaggaaaatatatcagcataataaaaaccatctacgacagacccacagctagtatcatactaaatgagaaaagacagaaaggttttcctctaagatttagaacacgacaaggatgtgcactgtcacaactgttattcaacatagtactggaaatcctagctagagcaatcggacaagagaaggatataaagggcatccacactgcaaaggaagaagtcaaattatcactgtttgctgatgatacagtcttatatttggaaaaactaaaagactctaaaggcaaactattagaaccgataaacaaagtcagtaaagttgcaggatacaaaatcaacatrcaaaaaccactggcatttttgtatgctaacagtgaacaatctgaaaaaaaaaaattccatgtacagtagccacacatagaattaaacacttagaaattaaccaaaaaagtgaaggatctctataatgaagactgtaaaatattggtgaagaaaatggaagaga

SEQ ID NO: 369986 - DNA, 573 bp, Homo sapiens
aaatacccaaagccaatcaaaagaagaataggtcaacaaattgttgtatagacctaaaatggatattagtcttcatttaagaaaaggcaaatgaatacaaacaatcacatgggtgaatcacaaaatcattatgctgaatgaaaaaagctggataaactagggtaggtagtctatgattccatttatataaaattctagaaaatgtaaactaatctataggaacaaaaaacagatcattgattggggagggrggtggagaaagggttggattacgaaggggcatatgagttgatggaaatgtttttcttggttgtggtgaggatctcacatgtgcatacttacgtcaaatatgattaaattataaaatttaaatatgggtattttattgacctcacttataccttaatatagttacaaaataaagcaatatagatggacgtttctgatggttctttgctaagtaatagcaaaacatatttttgcccttgaaagataatatataacttgatcataaaatattaatttttaaatcacgaagaaataaaaaatctgaagagaccaataatgagtgat

SEQ ID NO: 369987 - DNA, 573 bp, Homo sapiens
aaatacccaaagccaatcaaaagaagaataggtcaacaaattgttgtatagacctaaaatggatattagtcttcatttaagaaaaggcaaatgaatacaaacaatcacatgggtgaatcacaaaatcattatgctgaatgaaaaaagctggataaactagggtaggtagtctatgattccatttatataaaattctagaaaatgtaaactaatctataggaacaaaaaacagatcattgattggggagggaggtggagaaagggttggattacgaaggggcatatgagttkatggaaatgtttttcttggttgtggtgaggatctcacatgtgcatacttacgtcaaatatgattaaattataaaatttaaatatgggtattttattgacctcacttataccttaatatagttacaaaataaagcaatatagatggacgtttctgatggttctttgctaagtaatagcaaaacatatttttgcccttgaaagataatatataacttgatcataaaatattaatttttaaatcacgaagaaataaaaaatctgaagagaccaataatgagtgat

SEQ ID NO: 369988 - DNA, 573 bp, Homo sapiens
aaatacccaaagccaatcaaaagaagaataggtcaacaaattgttgtatagacctaaaatggatattagtcttcatttaagaaaaggcaaatgaatacaaacaatcacatgggtgaatcacaaaatcattatgctgaatgaaaaaagctggataaactagggtaggtagtctatgattccatttatataaaattctagaaaatgtaaactaatctataggaacaaaaaacagatcattgattggggagggaggtggagaaagggttggattacgaaggggcatatgagttgatggaaatgtttttcttgrttgtggtgaggatctcacatgtgcatacttacgtcaaatatgattaaattataaaatttaaatatgggtattttattgacctcacttataccttaatatagttacaaaataaagcaatatagatggacgtttctgatggttctttgctaagtaatagcaaaacatatttttgcccttgaaagataatatataacttgatcataaaatattaatttttaaatcacgaagaaataaaaaatctgaagagaccaataatgagtgat

SEQ ID NO: 369989 - DNA, 396 bp, Homo sapiens
cccaaaccagttagaactaataaacaaaatcagtaaggttgcaggatataaaatcaacacacaaatatcagtagcatgtctatacactagcaatgaactatcagaaaaagaaatcaagaaaacaatccaatttaaaatagctacagctacaaaaaatacttaggaataaatttaattgaggagatgaaagacctgtatactgaaaacaataaaataytgataaaactaaaggcacaaaaaatgaaaagatatcccatgttgatagaatgaaagagttaatggtgttaataggtacatactatctacagtaatttacagattgaatgcaatccttatcaaaattgcaaggacatttttcacagaagtacataaaacaattttaaaatttgtatggag

SEQ ID NO: 369990 - DNA, 396 bp, Homo sapiens
cccaaaccagttagaactaataaacaaaatcagtaaggttgcaggatataaaatcaacacacaaatatcagtagcatgtctatacactagcaatgaactatcagaaaaagaaatcaagaaaacaatccaatttaaaatagctacagctacaaaaaatacttaggaataaatttaattgaggagatgaaagacctgtatactgaaaacaataaaatactgataaaactaaaggcacaaaaaatgaaaagatatcccatgttgatagaatgaaagagttaatggtgttaayaggtacatactatctacagtaatttacagattgaatgcaatccttatcaaaattgcaaggacatttttcacagaagtacataaaacaattttaaaatttgtatggag

SEQ ID NO: 369991 - DNA, 480 bp, Homo sapiens
agatgctctccttgctaaaattctaggagaatggggcatatttaatattagtttccaaaactcttatgtgaataatgtatcaacaaagtagacatcctccctcacctagaagttgaactgttttttcatattttaataattctagttcattttgcatagtactacttgaaacatacacgttgagaagatgcagaacttgtttaccaaatcagctatgacaaaaacgkccttaggcagaggttgcagtgagccaagatcacgccactgcactccagcctggacgacagagtgagactctatttcagaaaaaaaaaaaaaaaatggccttagggatttcttgagtttgtgatctaaaacatacacctgctttttattttttaaaattataatcactttttagtgacattatgcagtggcggttttccattatagagatgaatatagattctgtaaaacaatgtgcacatagtagcaaaacat

SEQ ID NO: 369992 - DNA, 530 bp, Homo sapiens
attaatctataattaaatgtaattccaagtcttgtttttggaatattttactttagaatttgaaaacttaaaaaggcattttatagtgcatttagaaaaaatgtataagaaatattaagaaaatgtttcaaaaaaaaaccaagaaatttatcctatcattgaaatatattttaatatgtaagacttcagcaatgaacatgttccatattaacatatattatgtaatcaattcagtattgtaccagtgtcagattgtacaattaaaaataaaccaaaatatctataatgatttagtgtgtggatacggtggcatggaaagccattgagcaaggtcacataataataacagcatttactggttactcactgtgttccaggtgctgctgtaatcacttgacatatattatttcatctccacagtaaacttagaaggttgcattagtcttattttgtagaygtggaaactaaggcatagagagattatgcaaattgccaaagatcatatcggtggtaagtgaaacaggcagatt

SEQ ID NO: 369993 - DNA, 576 bp, Homo sapiens
ccagtctttgggccctagtggtggcagcaatggactgagaatgccttttgggcaacccagggcagcttacagtattattggttccaggagggctgattattccagtattgggatcatgtgtgggtgtgtgctggctgcggtggtattggaaagttgaatcagcccaacctcagagtctgggaggagtgctcaggtgttagcagtagtaggcttggctggaaggtttccatagttctggatggcatgctcaagtactgggtagaggggcccagtctggaagacttgtcctcaggccccgtggtggtacattcagatattggctgtgataagcaagggatggtggtccccaggccatggcagaatgctctgstgtgggcagcagtgtctatgctgcatacctgccaccggggaaggtggttcccctcttagctggagaagtataagcaggtagctgtggggagagcagtttactcatgcatttgtcacatagcagcctacagcagcagcagtggggtttgcactaggtgtatgtaagtgtgcccagccttccttcttcctccttggcccagcagtggc

SEQ ID NO: 369994 - DNA, 492 bp, Homo sapiens
aaacatattgtcattttctgctggaaattctacgaccagttcttggaaaacagcatatccagcaattctcattttctcactatatccttaattttccatatagttgccatctacrtttttgcatgctgaacatgcctctttctccttcctctagtaaatgcaactcccttcttttgggaaactggttcttccctggtccaactatttgacactggtgaggctgccagttgtagacacacaaacaagcctcacaatctcaacagtatcctgttgtgttagcaacagagattggtgtcaaggatagatataagactgagatgtggttaatcagaattattaaataggagtattatatatggaataaggtagagagaagccctgtctttgctcagagtcatgaaattgtcatgtttacaacctcggagcggctgctacccatcgtgttctcaatcatgtggggaaagcctgtttgaaggaggggagaatgaagga

SEQ ID NO: 369995 - DNA, 492 bp, Homo sapiens
aaacatattgtcattttctgctggaaattctacgaccagttcttggaaaacagcatatccagcaattctcattttctcactatatccttaattttccatatagttgccatctacatttttgcatgctgaacatgcctctttctccttcctctagtaaatgcaactcccttcttttgggaaactggttcttccctggtccaactatttgacactggtgaggctgccagttgtagacacacraacaagcctcacaatctcaacagtatcctgttgtgttagcaacagagattggtgtcaaggatagatataagactgagatgtggttaatcagaattattaaataggagtattatatatggaataaggtagagagaagccctgtctttgctcagagtcatgaaattgtcatgtttacaacctcggagcggctgctacccatcgtgttctcaatcatgtggggaaagcctgtttgaaggaggggagaatgaagga

SEQ ID NO: 369996 - DNA, 611 bp, Homo sapiens
aaattttgaaaaccactggcctataataataaggtggagaaactagaatttcttttgcacagtatttaaggaaagagtcaggggctcagggaratggaacttttagaatggatttattaagtaagacacaagaaccatgttggatatattcccttggggggttctaagtgcaccctttccttaaggcaatacagaaggcacaggctaggggaacactagaatcttttaagaaacttggtggtgctgtcatctgtgggacggggttaactacaggagatgctgtcatgaacctgggctccctaatgccaatgggatgataagattataggatgatggaggcaggtggcagcacttagggtcagaggttgctataataggcaagtggtaattggggtgcattgacttacaggggcttgtagaaatgactaaacagatcatggcagtggtggggaagggcagtgtgcagtgatagagggatagctgattacagtgttgctccatttgtaaaataacaaaaaaggccatctcagctgccacaatggaaagccacagtccttcacctgttccagttcacaatcccagagtctgctctgtgaatagaaggccacatc

SEQ ID NO: 369997 - DNA, 611 bp, Homo sapiens
aaattttgaaaaccactggcctataataataaggtggagaaactagaatttcttttgcacagtatttaaggaaagagtcaggggctcagggaaatggaacttttagaatggatttattaagtaagacacaagaaccatgttggatatattcccttggggggttctaagtgcaccctttccttaaggcaatacagaaggcacaggctaggggaacactagaatcttttaagaaacttggtggtgctgtcatctgtgggacggggttaactacaggagatgctgtcatgaacctgggctccctaatgccartgggatgataagattataggatgatggaggcaggtggcagcacttagggtcagaggttgctataataggcaagtggtaattggggtgcattgacttacaggggcttgtagaaatgactaaacagatcatggcagtggtggggaagggcagtgtgcagtgatagagggatagctgattacagtgttgctccatttgtaaaataacaaaaaaggccatctcagctgccacaatggaaagccacagtccttcacctgttccagttcacaatcccagagtctgctctgtgaatagaaggccacatc

SEQ ID NO: 369998 - DNA, 611 bp, Homo sapiens
aaattttgaaaaccactggcctataataataaggtggagaaactagaatttcttttgcacagtatttaaggaaagagtcaggggctcagggaaatggaacttttagaatggatttattaagtaagacacaagaaccatgttggatatattcccttggggggttctaagtgcaccctttccttaaggcaatacagaaggcacaggctaggggaacactagaatcttttaagaaacttggtggtgctgtcatctgtgggacggggttaactacaggagatgctgtcatgaacctgggctccctaatgccaatgggatgataagattataggatgatggaggcaggtggcagcacttagggtcagaggttgctataataggcaagtggtaattggggtgcattgacttacaggggcttgtagaaatgactaaacagatcatggcagtggtggggaagggcrgtgtgcagtgatagagggatagctgattacagtgttgctccatttgtaaaataacaaaaaaggccatctcagctgccacaatggaaagccacagtccttcacctgttccagttcacaatcccagagtctgctctgtgaatagaaggccacatc

SEQ ID NO: 369999 - DNA, 508 bp, Homo sapiens
cttctttgaccaattttcctggttaagtgcagaaatataagtgttggttgagcatctcttgacaattctgggaagcaagtcaaagggtataattckaacccttaaggatcccatagtctagctagggagggactgagggagtataaaaatagaaaaataatagaaccatgtataaggtacctaacaggggacaaagaagacatctttgaggcggggatgcttgagcaagattttgaagacagataaagtgggaaagcaaattgctagcaggaagaaagatatgacaaccacaggcaacagcatgatgtctgttgagaaatacaggtagatagttttggtggggtttaaaatatcagtgggaaaggtgaaaggaaatgaagctggagaaatagacaggaccaagtcaaagattgtcttatatacctagaagcacagcctttattctttaggccagtggttttcaaaatgttgttcctggatcagcatcacttgagaacttgttagaaat

SEQ ID NO: 370000 - DNA, 531 bp, Homo sapiens
tttcttccttccagagcacccctcccctctccctcactagctgtaaaaatgcataccccactcctgggcccaaccgacatggcacttcattccaaagcttccctcaacctctgtctgacctagtcatgtcactacttcagtgctctttgctgccttcagaatagaacctaagctctcctgagcacctatagtgttatttgttacctggcacagtgctaattttgactactttactccatgaggacagaagcctttytgactcccttctcctctccacttggctttgcatggggcttggcacataggagccaatattaattgactaaataaacaaacggcaatacaaacttaaatgtatccaaacagaaaactgcagaggacacatgcatccatctcaaattatttctgagtgatagtacctggaaaccaatattagctttccctagaagcataactctacaagatctccaagttagaaagaggccccaaaggtcactgcctctaggctgaccctccagccttccttaagac

SEQ ID NO: 370001 - DNA, 513 bp, Homo sapiens
tcacttcctcttgctctctgtctctaaagcaggcatggtctttagaggctgggctggtgtttgctctaaaggatttcccctagtggccaggcaaggtcaggatccccattccatgctcccacagcatcccgtatttaactcatcrtagctctgaccacactgtattacaattcctccttgatatgcctgagctctgtgaggatgtgacagaggcagagccagtactgagtaggtgctcaataaatgtgggttgaaagaaagagtgtgtgaccctacctgtcctgtccccaagcctgggaggtataccaagcactgcatttaatcaagactaaattttgagagcttccgacactggcaggaatgctgattactctctggtcctcacttgccactgctcccgactccaaaaccatacattcccggagcagaaaatctggtagaatggcagggagcactggctgcttaggatacactctcagagcaagggccccaagtagtcacacaagaatatct

SEQ ID NO: 370002 - DNA, 513 bp, Homo sapiens
tcacttcctcttgctctctgtctctaaagcaggcatggtctttagaggctgggctggtgtttgctctaaaggatttcccctagtggccaggcaaggtcaggatccccattccatgctcccacagcatcccgtatttaactcatcatagctctgaccacactgtattacaattcctccttgatatgcctgagctctgtgaggatgtgacagaggcagagccagtactgagtaggtgctcaataaatgtgggttgaaagaaagagtgtgtgaccctacctgtcctgtccccaagcctgggaggtatrccaagcactgcatttaatcaagactaaattttgagagcttccgacactggcaggaatgctgattactctctggtcctcacttgccactgctcccgactccaaaaccatacattcccggagcagaaaatctggtagaatggcagggagcactggctgcttaggatacactctcagagcaagggccccaagtagtcacacaagaatatct

SEQ ID NO: 370003 - DNA, 650 bp, Homo sapiens
gtaccactttagagcagaagctttaaaactattgtgtggttcatccatatttccttatttttaccacaagaccaacaatgtcccagatagggattgattattctttctggagcctgaaaagaagacgatgtggagcagagctacagttgatctgcagtgaaactgacttccatgcagatagggaaataaacctttgttattgtaagccacagattgggagttgtttgatattgcacaataacttagcctaagctgaattataggtacagctggtgacagtgccatggatattcaatacaagaagtgtcataaaattggagaacctaacagttaaagaaggtcatcctattagcctcgcatccaacagagcaatcctttgcccagttccctgggccttttaaactctgctcaaattcytttgatatcagggaaggaagtcatcagattgttcagttcatttcattactggaattcaacttgttaaaatattccagttggttttccccgactggttctagttctgctacctggagccacccagaaaaattcactctgtattccatagcatagaacttcttcagtttttagaagtttagtcatgtccaaactaagcgtttccagtccttactttgttaaattacttagaagat

SEQ ID NO: 370004 - DNA, 482 bp, Homo sapiens
tccttaaaaaaatctttctggaactttgatttgttgtggtttgatgctttttttcaaaggcagctttactaaagtcttttctaggctttttggccccattcaattaaagctaagtattcagccagctgtcttatttctgatttgaggtcacttaatgtgtayatttcgactcttaactcatatagttctttattcttggcttattaagtctacttgcctcagaaatacagccttaatttttttttcagcagaaaagtacgcgtttactatcatgatgagtgagcattttttgactcacaatgacaagttctaggcagcccaggtgtctatgatatcttgactaactttgatggcacctgggcctcctggggggtggcggtggggtagggaccctgggtgtgggcaggctttgtgacctctctcttccttgtttccctctgcccttctttctagtcttcttttgaggtctccctccttgccag

SEQ ID NO: 370005 - DNA, 507 bp, Homo sapiens
ctactttttgccaactaataccctggccttattatggtaatagtgtccaccccttctttgtctggattatgtcatgaagaattctgcattaacttgacaagaaagaaccaggagcccaaatttacctccccctaattcctggatggaggtgtggggagtacataataaagttttattttatcatgycatgtaaatctaatgaagctgctgtagatacaatgaagtcaattcacataacaccctgtgtagttgccaggcctgtgctaggtaatgagaatttagagagaaaagaggtccagtctctgtggtaaagaagctcagaatttactgaaaaatgaaacaaaacaacagtaaaaacaaaaaccatgagaggtcccagcaggatacatgccaaagcttagatgtgccagcccaagggtttgaggaaccttttgcagtcaagccctcccctctaactggcatgcgactaggagcacagaagttgaatcttgtccatggttatggttc

SEQ ID NO: 370006 - DNA, 507 bp, Homo sapiens
ctactttttgccaactaataccctggccttattatggtaatagtgtccaccccttctttgtctggattatgtcatgaagaattctgcattaacttgacaagaaagaaccaggagcccaaatttacctccccctaattcctggatggaggtgtggggagtacataataaagttttattttatcatgtcatgtaaatctaatgaagctgctgtagatacaatgaagtcaattcacataacaccctgtgtagttgccaggcctgtgctagrtaatgagaatttagagagaaaagaggtccagtctctgtggtaaagaagctcagaatttactgaaaaatgaaacaaaacaacagtaaaaacaaaaaccatgagaggtcccagcaggatacatgccaaagcttagatgtgccagcccaagggtttgaggaaccttttgcagtcaagccctcccctctaactggcatgcgactaggagcacagaagttgaatcttgtccatggttatggttc

SEQ ID NO: 370007 - DNA, 507 bp, Homo sapiens
ctactttttgccaactaataccctggccttattatggtaatagtgtccaccccttctttgtctggattatgtcatgaagaattctgcattaacttgacaagaaagaaccaggagcccaaatttacctccccctaattcctggatggaggtgtggggagtacataataaagttttattttatcatgtcatgtaaatctaatgaagctgctgtagatacaatgaagtcaattcacataacaccctgtgtagttgccaggcctgtgctaggtaatgagaatttagagagaaaagaggtccagtctctgtggtaaagaagctcagaatttactgaaaaatgaaacaaaacaacagtaaaaacaaaaaccatgagaggtcccagcaggatacatgccaaagcttagatgtgccagcccaagggtttgaggaaccttttgcagtcaagccctcccctctaactggcatgygactaggagcacagaagttgaatcttgtccatggttatggttc

SEQ ID NO: 370008 - DNA, 439 bp, Homo sapiens
ccagcccaagggtttgaggaaccttttgcagtcaagccctcccctctaactggcatgcgactaggagcacagaagttgaatcttgtccatggttatggttcaaacacaagtacatgctcatttgggccccagtggatgccatgtggggccaacaagccccctaagcaaggagagtgatcagcacaagtgagagcccgagtgtggaaggtggtagattgctcaggtataggtgaggctgtagtttaatgtaatccgatgtacctacccctgggtaatgctgtgaggaggggcagtctgtgcagcaaaactgagagctgttgtattctcatcacagaattaaatcacattgtaagtgatgtaaatgatgtgtaaaccaaaartttggagatggacaaatatacataatgtgcttggcaaccaataatttcagcagggcaag

SEQ ID NO: 370009 - DNA, 527 bp, Homo sapiens
acctaagccaagattttcaaatgttgaacctacaggaaattcaggctacataaatatgtgagaaaatagtagcattataataatagtttaataataattaatagcttaagtcattgttcatcaaaccagctgatgagtaaatacccagtgagtagatcataaaataaggtttgagagcagrgagaaggccctgtgggctggcttggtctgacaagatttgatggagggaataggtgaggtagtgctttcaggtggggagactctggtaaggtgagagggtaaggaaaggcaatattgtgatgaaaagggagcgacttccagtttcaaccctgatatgtaaagaactttgaagtcatcactcccagtcttatggggcaaggaaaagctagacaagctgaaaatcaacaacttttcttgaacgtgtcataaaactgtggccacagggcaaactaataccctcaaatctggagagacataacatccagaaagagactgcaactaatatttgcttatcggagacattcttg

SEQ ID NO: 370010 - DNA, 527 bp, Homo sapiens
acctaagccaagattttcaaatgttgaacctacaggaaattcaggctacataaatatgtgagaaaatagtagcattataataatagtttaataataattaatagcttaagtcattgttcatcaaaccagctgatgagtaaatacccagtgagtagatcataaaataaggtttgagagcagggagaaggccctgtgggctggcttggtctgacaagatttgatggagggaataggtgaggtagtgctttcaggtggggagactctggtaaggtgagagggtaaggaaagrcaatattgtgatgaaaagggagcgacttccagtttcaaccctgatatgtaaagaactttgaagtcatcactcccagtcttatggggcaaggaaaagctagacaagctgaaaatcaacaacttttcttgaacgtgtcataaaactgtggccacagggcaaactaataccctcaaatctggagagacataacatccagaaagagactgcaactaatatttgcttatcggagacattcttg

SEQ ID NO: 370011 - DNA, 585 bp, Homo sapiens
ctgcaactaatatttgcttatcggagacattcttgagctataaactggtgggaacattaattgggtgagttgctggaggctgaatatgtatcagagtgagagggaaagacccatgagagccatagtcttagggggatcccatacttttataagctttccctctagcaaccccaccgtattctcacagtgaggatcctagaaagatccccccctgtggctctggcaagggaaggggaagartgatcattatgaaacaagcccagagcatcctccatagcaaaggcccactgctcaggagaaggggttttgctggagcacaatactgaaactttatgccagcggaagaaaaggatttttttctccatctttcctaaatcacacaagggagaaaatactcacaaagtcgactggggacagagcctcaagaaaacagatttgcaataatgtagtcagggaaaggtgcaagaggagggggaaagatatactactggaagagtatcagaagccttcctgaagtccacagcaccaagacacaggtcctgtaaaagactcagacttaatggaaagatggtagaatgctcttcc

SEQ ID NO: 370012 - DNA, 585 bp, Homo sapiens
ctgcaactaatatttgcttatcggagacattcttgagctataaactggtgggaacattaattgggtgagttgctggaggctgaatatgtatcagagtgagagggaaagacccatgagagccatagtcttagggggatcccatacttttataagctttccctctagcaaccccaccgtattctcacagtgaggatcctagaaagatccccccctgtggctctggcaagggaaggggaagaatgatcattatgaaacawgcccagagcatcctccatagcaaaggcccactgctcaggagaaggggttttgctggagcacaatactgaaactttatgccagcggaagaaaaggatttttttctccatctttcctaaatcacacaagggagaaaatactcacaaagtcgactggggacagagcctcaagaaaacagatttgcaataatgtagtcagggaaaggtgcaagaggagggggaaagatatactactggaagagtatcagaagccttcctgaagtccacagcaccaagacacaggtcctgtaaaagactcagacttaatggaaagatggtagaatgctcttcc

SEQ ID NO: 370013 - DNA, 615 bp, Homo sapiens
aaggagaaaaggtcattaaataaagaatgatagttttttttcaacaaatggtgaagatagacacagcccttacaatctgcacmaagtttaactcaagatggattacaaacaaatttaaaatacaaaacaataaaacttctaataaaaacatggtagaaaatctaggtgactttggattggacaatatatttgtaggtgtgacactaaaagcataatccacgaaagagaaagtggataagttggactttattaaaattagaaatttctgccctgcaaaaaacactgttaggagaatgaaaagacaagtcacagagtgggagcaaatagttacaaaagacatatctgataaaggacttgtaaccaaaacatgcaaagaactcttagaatttagcaataagaaaataagctaattgaaacatgggcagaagatctgaacagacatctcaccaaaaaagataatacagatggcaaataaacaattgaaaaatgcttaacatcatttgtcactagggaattataaattaaaacaacagtgaggtacccctgcatgtctcttagaatggccagaatccaaacaactgacaatatcaattgttggtgaggatgttgaggaac

SEQ ID NO: 370014 - DNA, 403 bp, Homo sapiens
tattaaaattagaaatttctgccctgcaaaaaacactgttaggagaatgaaaagacaagtcacagagtgggagcaaatagttacaaaagacatatctgataaaggacttgtaaccaaaacatgcaaagaactcttagaatttagcaataagaaaataagctaattgaaacatgggcagaagatctgaacagacatctcaccaaaraagataatacagatggcaaataaacaattgaaaaatgcttaacatcatttgtcactagggaattataaattaaaacaacagtgaggtacccctgcatgtctcttagaatggccagaatccaaacaactgacaatatcaattgttggtgaggatgttgaggaacaggaactctcatttatcactgggggaatgcaaaat

SEQ ID NO: 370015 - DNA, 562 bp, Homo sapiens
taagtaggagaaacaccagcttccaaataaactttaatatgaagttactggttgttatagactgaagtccttctaaaattcatttgttgaaatcctaacccctaatgagatggtaataggaaatgtgacctttgggaaaaatcagtgttcatatttctttgttgtctttcttctgatcttttacagtttgattcaattcagatacaaataaggtccacatattataattgttgatatctagcctaagtatcttttaacctaaaggttcccctttcctctctctctcgtcttttctttgtaatttagttgataagttaactggattgtttttcctaaagggttttccmctgtctggattttgctaattagatcccatggtttcatttgatgagttcctctgttcctttaaattgctagagctaagggcttgattagattcaagtttgtttgttttcttgtttctgttcttttttttttttttttttggcaaaaccacttcactggtggagttgtgtactttcttcaggagatccataatgcccacgtgtctctgtgttgttag

SEQ ID NO: 370016 - DNA, 562 bp, Homo sapiens
taagtaggagaaacaccagcttccaaataaactttaatatgaagttactggttgttatagactgaagtccttctaaaattcatttgttgaaatcctaacccctaatgagatggtaataggaaatgtgacctttgggaaaaatcagtgttcatatttctttgttgtctttcttctgatcttttacagtttgattcaattcagatacaaataaggtccacatattataattgttgatatctagcctaagtatcttttaacctaaaggttcccctttcctctctctctcgtcttttctttgtaatttagttgataagttaactggattgtttttcctaaagggttttcccctgtctggattttgctaattagatcccatggtttcatttgatgagttcctctgttcctytaaattgctagagctaagggcttgattagattcaagtttgtttgttttcttgtttctgttcttttttttttttttttttggcaaaaccacttcactggtggagttgtgtactttcttcaggagatccataatgcccacgtgtctctgtgttgttag

SEQ ID NO: 370017 - DNA, 450 bp, Homo sapiens
tttaaatcttgaatccaaaagattttattaatatcaatttattgacaaaaatatctttgtatgactcaatgaaatatttcactttatcctgttttctaaacaaaaatacttttagattcttaaaaatcattggtttgatttgacctagtgagaaaagtgaagccaaagtagcatatcttatttagataaagtaattgcagtggcatgagtaactgtgtttgtcctccttgattaactttaagatgaatcccgaaattagttcatggataccacaatagaataattctgttggggaaaccctgyctctgaggagcaaatgactggcctctttcaaactgctttagaggactacaatttgtaacagtaaaacaatctgggggtagtggaatgaactatacctagaattagtttacaagagtttgaagattgactctgtcagtactttgcctt

SEQ ID NO: 370018 - DNA, 533 bp, Homo sapiens
acagtcgttggattagggctgaccctaatcaagcttgacctcattttaacttgattatatttgcaaacatgctatctccaaacaaggtcacattcacagatactggggttaggacttgaatatctcttctgggggacaaaattcaacccatgacatgatattttaaggaaatrtaataatctgttaatatgactctcaggaaccccattctggaacaattgagcagcacaatcacaacctgtggcttacagcccggattttggaacatttctacaagagatgtttaagtctctaaacaaaccaacaactgaagcatccaacactccccatgctcccaaaaagttctcatacttacctatctgcattgtttgctggaaatcaaatacacagaggctgagaccatgaagcactaacagctaagttactcacctcaccccatcacctattgcatacaaatgcaggtaccaggaagataacaaaataattggaatccaaacagaaatcccataccatagcattccctagaatgtgca

SEQ ID NO: 370019 - DNA, 607 bp, Homo sapiens
aaagaaggagaagggggtggctttgaaggaagtcagggatggggcctgtggtcaccttcactttgccctaggaagccctaggctcactgtgttttccttgcattctgctaacagtcacatacctgttgtgcctgcatgcatgtcacgtctggccaggkacagagtgaaagcttccatgtaggttctcatctcttctttcgtcttccgtctacccctcccccttcctttcctcatcagctgtctctccaaagtctccactaatggaatctgccccatatttcttctctccctcctccctggctgtggctgtgtttgtgtatgtgttttagatttggatatctgtatctctcatttagtccccggggacacaatgcctttctcatatacatcctgttgtagatgttcccccaaaatgtatgttggagtcctaacccactgtatttcaaatgtgaccttatttggaaatagggtcattgcagatgtcatgttaaggtgaggtcatactcaattggtgtgggtcctattccagcatgattggcatccttctaagaaaaaacagagagacacaggcacacaacaggacactgtcatgtgatgatggaagcag

SEQ ID NO: 370020 - DNA, 607 bp, Homo sapiens
aaagaaggagaagggggtggctttgaaggaagtcagggatggggcctgtggtcaccttcactttgccctaggaagccctaggctcactgtgttttccttgcattctgctaacagtcacatacctgttgtgcctgcatgcatgtcacgtctggccaggtacagagtgaaagcttccatgtaggttctcatctcttctttcgtcttccgtctacccctcccccttcctttcctcatcagctgtctctccaaagtctccactaatggaatctgccccatatttcttctctccctcctccctggctgtggctgtgtttgtgtatgtgttttagatttggatatctgtatctctcatttagtccccggggacacaatgcctttctcatatacatcctgttgtagaygttcccccaaaatgtatgttggagtcctaacccactgtatttcaaatgtgaccttatttggaaatagggtcattgcagatgtcatgttaaggtgaggtcatactcaattggtgtgggtcctattccagcatgattggcatccttctaagaaaaaacagagagacacaggcacacaacaggacactgtcatgtgatgatggaagcag

SEQ ID NO: 370021 - DNA, 512 bp, Homo sapiens
ctatgaactgagccatgatctgtaagtatattaaagcataatccttacaacgattacaaaggactacttytttgggcccaaatctaaccaaatttatttttctatctgaaataaccaaaaactgacaaaatacatgaaataatggttttatatatatatatataaaaataatagttttcaataccattatttcatatatttcaacagagggcagtaatacctgaaagatgaaaaacaaacaaggtaatccaatgatttccccagcttccaggccatgggacagggaaggggaactttggtacagcccagcagacaacctggattaaggaggctgcaagtctgagaagatcaggacaattagtgtgtggaacagtgcaccaacaaggaaaaagctgcacatagagagacatccagatacctgcagagggtctctctcaactacttagctgagtactgatcagtatatgagtatggggataacaactgaggccagtaaaagaatcacccaaaag

SEQ ID NO: 370022 - DNA, 512 bp, Homo sapiens
ctatgaactgagccatgatctgtaagtatattaaagcataatccttacaacgattacaaaggactacttttttgggcccaaatctaaccaaatttatttttctatctgaaataaccaaaaactgacaaaatacatgaaataatggttttatatatatatatatawaaataatagttttcaataccattatttcatatatttcaacagagggcagtaatacctgaaagatgaaaaacaaacaaggtaatccaatgatttccccagcttccaggccatgggacagggaaggggaactttggtacagcccagcagacaacctggattaaggaggctgcaagtctgagaagatcaggacaattagtgtgtggaacagtgcaccaacaaggaaaaagctgcacatagagagacatccagatacctgcagagggtctctctcaactacttagctgagtactgatcagtatatgagtatggggataacaactgaggccagtaaaagaatcacccaaaag

SEQ ID NO: 370023 - DNA, 512 bp, Homo sapiens
ctatgaactgagccatgatctgtaagtatattaaagcataatccttacaacgattacaaaggactacttttttgggcccaaatctaaccaaatttatttttctatctgaaataaccaaaaactgacaaaatacatgaaataatggttttatatatatatatataaaaataatagttttcaataccattatttcatatatttcaacagagggcagtaatacctgaaagatgaaaaacaaacaaggtaatccaatgatttccccagcttccaggccatgggacagggaaggggaactttggtacakcccagcagacaacctggattaaggaggctgcaagtctgagaagatcaggacaattagtgtgtggaacagtgcaccaacaaggaaaaagctgcacatagagagacatccagatacctgcagagggtctctctcaactacttagctgagtactgatcagtatatgagtatggggataacaactgaggccagtaaaagaatcacccaaaag

SEQ ID NO: 370024 - DNA, 566 bp, Homo sapiens
ctaaccaggaaaattacaaaaaatggggagatccttaatgtggcttgaaggaagaagagaagagaagcctttggggcaggggtttgattgtccacagatcggataagagaattggggagcaggtatgtagtgatcataaaacaaggcaggtaatgagaaatgcactgtatagactaagagggcacctccattggtcagattttatcgtttgctttttcattgcctctctgggaagtgtaaggtggtcattgagtaggagcagctgatttcatcyttttacatagtaacttgattaacatgttttctgtgtaatttttgtcagcattggtgaggggaggggaggccaggggagggaaggagaggggagggaaggagaggggagggaggctcagtggggctcagtaagatatgtactctcatgccttgctgcaggaaatgtaaattagtacaacctctttggcaagcaacttggcaatatgtctcaaaacagcttaaaaatggccatccagttgggtgcaaactttggagcagtatcttatagaaataaatgatcaaaaatgtgacta

SEQ ID NO: 370025 - DNA, 598 bp, Homo sapiens
cccaagcatgcctcaaatttgtttaggaaaatattttcttctcataccttcatttgttctcatatcatcattgtaatatgggtggatgatcaaataagcaaggccggcaattggtctgagaaaagagctcatttggaaataacatcctgagctttgcaaccgcaagtgagaagtgtatctcagcacctggtagcaaatgcaggtgaggtccaccctggtagtacatacaggagagttcatagatggttggcaaagaggtacaaactaatggaaacacaacaacaagctctgtagctactttacatggagttgactcagcaaaggcccatctgacctaacaacaacaaccagattagaatagttaatctttattgaacagttgttaccaccagttctgggtgcttcacatatgctatttcatttaatcctcacgacaatcctatgaggtactaattatctttctgctattttgcagatgtggagactgaggcttacaaagattaaataagtgttcaaagtctcacaactattaggtggcagatgtagaaytcatatccaggttcccaaaccccagagcccaagtttttgccccagaatc

SEQ ID NO: 370026 - DNA, 450 bp, Homo sapiens
cccagttaattaagatgggaagaccgtgtgagaagctggttttgtgggtgggatgaggagataagaagctttattttgaacatgttgagtttgaggagcctgttagacttccaaatggagtttattcttttttatttttctgtgtaccatagtaaacatttataattttattcaaagggtttttttttaatcagttccagcaagatacaggtgtcaaaaccaaaggatttatttctctttctctctctctacatatatatakagagagacaggttcttgttctgtcacccaggctagaatgcagtggtgcgatcatagctcactgcagccttgaactcctggactcaagcaatcctctcttctcagcctcctgagtagctgagactatagatgtgtgcccccatgcctggctaagtttattttttgtagagatagggtctcactatgttg

SEQ ID NO: 370027 - DNA, 581 bp, Homo sapiens
tattgtaaattctaattagtctgtttagtctcttgagaaagtataaagcgcctcccatcctgtgggataactgacttgaaaagtcaaataccttacttgaaatcacttggtgtgacacagtggccaaaggctagccacaaaactatattyggaataaaaaattgccaataaatctctgaagcagttcatgcctcaaatagtcatacattggaataaaattagtaataaaggaaaatccatccgtggaatcctcaacttaactgctgtctttcatcacaaaaaagggacaataattcacaatattactctacaatttcttccacactacctatggtgatttttcaaatcacaaatttacttttcaactatgtactggcatctcgaaggcattgtgttctatgtctttcattaggtgaggggggatcacatgttaatgtgaaataacactattcaaaactaattatttttcttcactctttctctaggaggcactatagaacatttcagtcaaaatgctggcagcgtgtgactagaaagtgccatgaagatgagaattgcattagcaccttaagcaaacagga

SEQ ID NO: 370028 - DNA, 597 bp, Homo sapiens
ttggtattaaccaaactaaacttatagtaatatatacagttatataataatggttatttataggttctttctaatattacaaggtatgaagaaaaatgttgattctacaggttaataatgattcaatttatttggcaaaaattctctaaaaatacaggtctaaacatcctaattctagttctaaacatgtttttctcaaatataataacaattgtgttcaattttcatagtgtttgcttactataaccttttcagagcaaaaaatttgcagaggcactaaagatagacatttaaaattgtgtaaatattaaagttctrtatgaatgctttaaagaatgaaaattcaaaatgatttcacttttctttactcacctaggaagaggaagtttttgctccaaatattacctactaagactaggaatttcaaatgacaggattatagaattaaaggaacctcaaaggcctttggtcacagttcttggtagaattgtcccttggtatccatggggaattggttccaggactcaaatggacaccaaaatttgttcatgttcaagtccctgatataaaatggtgtagtatttgcatataacctat

SEQ ID NO: 370029 - DNA, 607 bp, Homo sapiens
cttaaatgttaaagtgttagagatggaaattacgttaaaacttttactgtgatagagtcttactggccatatgttgagacaagaaatgttagcaatggtcaatttgcaaacctgagaaaattgtgtaaatgagtgagtatatagttttgtaagatagtttttgaattacctaacacaatatgctattttatatataaatattttctcagatatcacattataacaacagtcttgtgattttttwaaaaaaaactattaagtcaactaacatgtctattgttaattcagaattagtaattgctacttcttttagtagcaaaaaaaatcattggatagattctggtaatttttaggaaccaatctgaatgtgagagattaaaataacaagggattataaaaagaattagaaatgtttaaacatttaattgacacacattttaatacatgaaactaaaagtgaaatagcctgaaataagctcaattgaaggttaaacttctaacatatttaaatcaaaagttgagaaatcattttaaactgactttttttttatttccaaagagcaatagattaaaaaaaaaaaagatccacaagtaattttagcttcac

SEQ ID NO: 370030 - DNA, 573 bp, Homo sapiens
tgatatactgggttcgtctttctgggaatcatttacttaacagatccgataatatccaataggtgctaaatttcaaatggcaaggagtattctactgcagatggaatggttttgcttcagagcccaaggtgtctgtgttgtaactctcctattaagttcttgccagagactccatataccaacctgagagcttsaatgagattaagtgtataaagtgactattaaatagcaaatattgtgtatatgttacacactgtgcctttatttttatatttttaacttttattttaggtttgggggtacatgtgaaggtttgttacgtaggtaaacatgtgtcatggggatttgttgtacatattatttcatcacccaggtattaagcccagtacccaagagttatcttttctgctcctctccctcctcctccctcccccatcagggagaccccagtgtctgttgtttccttctttaacactctgcctttaaaaccattatgttgatttggattaagaattgaaccattaggcttcttttatttgatgccttacaaagactatagtgaatactgctaca

SEQ ID NO: 370031 - DNA, 662 bp, Homo sapiens
gggaaccacttctctaatccacatttgggaaaacccagtcaccagccataggtcccagatcctcttttcacttacacctctcagggaataagaaaagtctgtgctcagaagggaaagaccaataagactaataccatgcagctcccaaggtggcctgcttcactccagtgcccaaaacaattgttggtacacattagccactcaataagtagtgaatgaatgaatgagtaaatgaatgaaagtcaaccatagttctatggcagcactgttcttgaattcaatagcttttccttgctttattggaagtatcctaatactgcttctctatttagagcctcaattctttatgtttccactcaagctggaacttttaattcaaatatttgagcaaaagaatcaggaattaacaagaccaggctgctactgctcactttaataaaaacatttcaagctccttgtattttccaacacttttcctttttatagatctgctctcaaaaagtttgagtagtaggaaataattttacagttgatccttsagtggtgtcatcattgcaaataagcaattgatcctaacacatttttgctcttaaatgtgtgcattcctttaatgactgatatggttagccctatctgtgaatgacagaagattgttcccaact

SEQ ID NO: 370032 - DNA, 396 bp, Homo sapiens
aaaagtcaagagtcagaaaacatctgaacactgagtgtcatcacttgattttcagcatcaagcacactgtgtttagaaaggagtgaagaatttttgcttcgcactgggtaaaattagacttggaagcaaagagcaaccaacagatgtgtgtcagkgagagatcagctggataaggttagttgtttaacatctaagtcaaacctgaacatatttgagtaagtcatattttccacagtaacttttgcaactttagaggttctttggtcatggcagttggaatttgcatcagaacttcgcaaataggaaaatctcccttaagttcactctagattttcctagatttctccaaaaagcagcaaaaaaaaaaaaaaaagtcagactcagctacggagttag

SEQ ID NO: 370033 - DNA, 498 bp, Homo sapiens
ctaccaatggtctacatcctgactgtatagatatatgctttacatgtttttgttttattattttaaaaattttatgttaagttcaggggtacatgtgcagatttgttatacaggtagacttatgtcatgggggtttgttatacagattatttcatcacccaggtattaagcctagtacccattagttattyttcctgatcctctctctcctttcaccctccactcttcaaaaggtcccagccagcatgtgttgttccctctatgtgtctgaccatatattgaaagggtatagaaaagtatttgaaattatgaaagcctagtacttatctctacttttcccttgccctattaaatcaaaacgtacagcaatagaacccagaaatctctcattgctccataggtaatactaatgtgtaaccactagcaaaacataatttcttactttaaaaaaaatagctcctgttgtatgtttaccctctgcaagttaccttacatgcc

SEQ ID NO: 370034 - DNA, 498 bp, Homo sapiens
ctaccaatggtctacatcctgactgtatagatatatgctttacatgtttttgttttattattttaaaaattttatgttaagttcaggggtacatgtgcagatttgttatacaggtagacttatgtcatgggggtttgttatacagattatttcatcacccaggtattaagcctagtacccattagttatttttcctgatcctctctctcctttcaccctccactcttcaaaaggtcccagccagcatgtgttgttccctctatgtgtctgaccatatattgaaagggtatagaaaagtatttgaaattatgaaagcctagtacttatctctacttttcccttgccctattaaatcaaaaygtacagcaatagaacccagaaatctctcattgctccataggtaatactaatgtgtaaccactagcaaaacataatttcttactttaaaaaaaatagctcctgttgtatgtttaccctctgcaagttaccttacatgcc

SEQ ID NO: 370035 - DNA, 587 bp, Homo sapiens
tcatttgcttattctttacacatatgggtacatgtctrtaaaatttgagtagcataaatgttaatgaagaaatatacataagtgtgtatacagccatatatacatgtaagtacatacacaaattatatcagtaagattgggccttcagaggaacagaagtattcactggagatttaccttatgacatctgacacctagaaagattaattcagtcaactctacaatacatataaacatatcttgctcctccagagatctcagacttaaaaaggccttgacaattaggcaaataaaagactggcatgagaaggtgtacggtgataccaaggggtcaggtacatacggacatcctaatttatttatttttaaatgcaatgccagctaaacaaaatgtatccactgtttggacccaatccctctaagcatttaatttgttgttaactaaaatcagtaccaaaacacactgcttttctccaaggccttaaaagttacatttgtatgagaagacattccgtgggttctaagatatgggttgaaagccaaataattagagtccattgctaagagggaaaaatagcatttggaat

SEQ ID NO: 370036 - DNA, 587 bp, Homo sapiens
tcatttgcttattctttacacatatgggtacatgtctataaaatttgagtagcataaatgttaatgaagaaatatacataagtgtgtatacagccatatatacatgtaagtacatacacaaattatatcagtaagattgggccttcagaggaacagaagtattcactggagatttaccttatgacatctgacacctagaaagattaattcagtcaactctacaatacatataaacatatcttgctcctccagagatctcagacttaaaaaggccttgacaattaggcaaataaaagactggcatgagaaggtgtacggtgataccaaggggtcaggtacatacggacatcctaatttatttatttttaaatgcaatgccagctaaacaaaatgtatccactgtttggacccaayccctctaagcatttaatttgttgttaactaaaatcagtaccaaaacacactgcttttctccaaggccttaaaagttacatttgtatgagaagacattccgtgggttctaagatatgggttgaaagccaaataattagagtccattgctaagagggaaaaatagcatttggaat

SEQ ID NO: 370037 - DNA, 587 bp, Homo sapiens
tcatttgcttattctttacacatatgggtacatgtctataaaatttgagtagcataaatgttaatgaagaaatatacataagtgtgtatacagccatatatacatgtaagtacatacacaaattatatcagtaagattgggccttcagaggaacagaagtattcactggagatttaccttatgacatctgacacctagaaagattaattcagtcaactctacaatacatataaacatatcttgctcctccagagatctcagacttaaaaaggccttgacaattaggcaaataaaagactggcatgagaaggtgtacggtgataccaaggggtcaggtacatacggacatcctaatttatttatttttaaatgcaatgccagctaaacaaaatgtatccactgtttggacccaatccctctaagcatttaatttgttgttaactaaaatcagtaccaaaacacactgcttttctccaaggccttaaaagttacatttgtatgagaagacattccrtgggttctaagatatgggttgaaagccaaataattagagtccattgctaagagggaaaaatagcatttggaat

SEQ ID NO: 370038 - DNA, 556 bp, Homo sapiens
tttattcataatctgatctgagaagactctgttgctcctgataagaaacatatcttaaagttaccaagaaagggccaggcgcggtggctcatgcctataatcccagcactttgggaggccgatgcgggtggatcacaaggtcaggagatcaagaccatcctggctaacaaggkgaaaccccatctctattaaaaatgcaaaaaaaaattagccaggtgtggtggcgggcgcctgtagtcccagctgctcgggaggctgaggcaggagaatagcgtgaacccaggaggcagagtttgctgtgagctgagatcacgccactgcactccaacctgggcaacagggtgaaactccgtctcaaaaaaaagaaaacaaaattaccaagaaagataacccgcatgcttatgcatattaactaaatccctgtagaataattaatcaactgttttaactttgaattctcagttggagaactctcatctcttttactcttctccctcctcaagagggtatctttgcgaatggagagaatgctgaggtgtgcatgctgccttctgga

SEQ ID NO: 370039 - DNA, 592 bp, Homo sapiens
gtagaccagggtttatggaagttctattcttaaatacatgaatttacttttttacaacaatgatccaaccatgcacaaactattccctttgttgaactctgaataatgctaagcctgctaaacattttacagagtcaagtaaaatctgattgagtaatttatctttatttttctttattcttttctaagcacagtckttcagtttcctccatattcagtatatcattcactgcaaagcaggacatattaatatgttacacaaagtcatattaattatttaatacaggcatacctcagagatattagggatttggttccagaccactacaataatacaaataacacaataaagtcgcatggattttgggttttccagtgcatataaaagttatgtttatactataccgagtctattatgtgttcagtagcattatttctaaataaacaatgtacataattacaatattttgctaaaagttgctaatgcttaactgaccattcatacagttataatcttattgttggtgtagggtcttagcttgatgttgatggctactaactgatcaaggtggtgattgctgaaagttggggt

SEQ ID NO: 370040 - DNA, 592 bp, Homo sapiens
gtagaccagggtttatggaagttctattcttaaatacatgaatttacttttttacaacaatgatccaaccatgcacaaactattccctttgttgaactctgaataatgctaagcctgctaaacattttacagagtcaagtaaaatctgattgagtaatttatctttatttttctttattcttttctaagcacagtcgttcagtttcctccatattcagtatatcattcactgcaaagcaggacatattaatatgttacacaaagtcatattaattatttaatacaggcatacctcagagatattagggatttggttccagaccactacaataatacaaataacacaataaagtcrcatggattttgggttttccagtgcatataaaagttatgtttatactataccgagtctattatgtgttcagtagcattatttctaaataaacaatgtacataattacaatattttgctaaaagttgctaatgcttaactgaccattcatacagttataatcttattgttggtgtagggtcttagcttgatgttgatggctactaactgatcaaggtggtgattgctgaaagttggggt

SEQ ID NO: 370041 - DNA, 592 bp, Homo sapiens
gtagaccagggtttatggaagttctattcttaaatacatgaatttacttttttacaacaatgatccaaccatgcacaaactattccctttgttgaactctgaataatgctaagcctgctaaacattttacagagtcaagtaaaatctgattgagtaatttatctttatttttctttattcttttctaagcacagtcgttcagtttcctccatattcagtatatcattcactgcaaagcaggacatattaatatgttacacaaagtcatattaattatttaatacaggcatacctcagagatattagggatttggttccagaccactacaataatacaaataacacaataaagtcgcatggattttkggttttccagtgcatataaaagttatgtttatactataccgagtctattatgtgttcagtagcattatttctaaataaacaatgtacataattacaatattttgctaaaagttgctaatgcttaactgaccattcatacagttataatcttattgttggtgtagggtcttagcttgatgttgatggctactaactgatcaaggtggtgattgctgaaagttggggt

SEQ ID NO: 370042 - DNA, 592 bp, Homo sapiens
gtagaccagggtttatggaagttctattcttaaatacatgaatttacttttttacaacaatgatccaaccatgcacaaactattccctttgttgaactctgaataatgctaagcctgctaaacattttacagagtcaagtaaaatctgattgagtaatttatctttatttttctttattcttttctaagcacagtcgttcagtttcctccatattcagtatatcattcactgcaaagcaggacatattaatatgttacacaaagtcatattaattatttaatacaggcatacctcagagatattagggatttggttccagaccactacaataatacaaataacacaataaagtcgcatggattttgggttttccagtgcatataaaagttatgtttatactataccgagtctattatgtgttcagtagcattatttctaaataaacaatgtacataattamaatattttgctaaaagttgctaatgcttaactgaccattcatacagttataatcttattgttggtgtagggtcttagcttgatgttgatggctactaactgatcaaggtggtgattgctgaaagttggggt

SEQ ID NO: 370043 - DNA, 460 bp, Homo sapiens
acaaccatgactgcaaacattaaatacccaataaaaatggtgtactgttatagaaatgcagaaggttcagggaagagcctctaatcagttagtggtaaaagwaaatttccagccaggtgacatggctcatgcatgtaatcacagcactttgggaggctgaggcaggaggatcacttgaggtcaggagttcaagaccagcctggtcaacatggcaaaatcccgtctctactaaaaatacaaaaattattcaagtgtggtggtgcatgcctgtaatcccagctactctggtggctgaggcatgagaatcgcttgaacccaggaggcggaggttgcagtgagctgagatcttgccgcttcactccagcctgggtgacagagtgagactctgtatcaaaaaaaaaaaaaaaaaagaaaaaaaaaagtaaaaaaagaaaatgtccatgaggtagaagaatactaa

SEQ ID NO: 370044 - DNA, 460 bp, Homo sapiens
acaaccatgactgcaaacattaaatacccaataaaaatggtgtactgttatagaaatgcagaaggttcagggaagagcctctaatcagttagtggtaaaagtaaatttccagccrggtgacatggctcatgcatgtaatcacagcactttgggaggctgaggcaggaggatcacttgaggtcaggagttcaagaccagcctggtcaacatggcaaaatcccgtctctactaaaaatacaaaaattattcaagtgtggtggtgcatgcctgtaatcccagctactctggtggctgaggcatgagaatcgcttgaacccaggaggcggaggttgcagtgagctgagatcttgccgcttcactccagcctgggtgacagagtgagactctgtatcaaaaaaaaaaaaaaaaaagaaaaaaaaaagtaaaaaaagaaaatgtccatgaggtagaagaatactaa

SEQ ID NO: 370045 - DNA, 460 bp, Homo sapiens
acaaccatgactgcaaacattaaatacccaataaaaatggtgtactgttatagaaatgcagaaggttcagggaagagcctctaatcagttagtggtaaaagtaaatttccagccaggtgacayggctcatgcatgtaatcacagcactttgggaggctgaggcaggaggatcacttgaggtcaggagttcaagaccagcctggtcaacatggcaaaatcccgtctctactaaaaatacaaaaattattcaagtgtggtggtgcatgcctgtaatcccagctactctggtggctgaggcatgagaatcgcttgaacccaggaggcggaggttgcagtgagctgagatcttgccgcttcactccagcctgggtgacagagtgagactctgtatcaaaaaaaaaaaaaaaaaagaaaaaaaaaagtaaaaaaagaaaatgtccatgaggtagaagaatactaa

SEQ ID NO: 370046 - DNA, 561 bp, Homo sapiens
aattaaatgagttgatgtgagagaatgtaacaggacttactttaaactgagttgtccaggaagattcattaaggaggtaaaatttatgctgagacctcaatgacaagagggagccaaacatgcccagggaaagagccagggaaacagacacagaaaaaaactaaggtaaaggacctgagatggatctgagtgtgccttgttccaaaaacagagaagacagtggggtagactacagtgcacaaagtgaaaaatggtacaagaattttgaatatatatgaagctcgagatgcctgttggatacccaagaggaggtatcaaataggcaagtgcctctcaaagttaatytgcatatgagtcacgtaaggatcttgtttaaaatgcaaactgtgatgcaatgggtatggagtgaaggctcagattctatttctcaaaaggtcccaggggattatcctgctggtcttggaccacatgttgagttgcaagaatgaaggcaactgtgcatttgtgagtctgcagtcaaacataagaaggaagaggccaaaagataaataaggtggagaa

SEQ ID NO: 370047 - DNA, 592 bp, Homo sapiens
taacttcaggtgcctttcacttataaattacatccagcaagggttgacagaaagatttttgtcattaatgtctttcttctcttttcagtaagtccatttgtcacaattatacagtagaatttgttgatatcgcaccaaagaagaattttgttttggcttttctcyaccattttatttaaccagtagatatcattatgaaacaacactgcatgtattcttaaatcatttgtcgggtgcttaaatatgtctcgtatactatgatagattctggagtttcaagaacctcacgtagaatgtggtttctgccttcaagttcaagcaagcaatgtggactcacaacagaaaattctgtaccatagttaaagccacaaatagagatatgcccaggttattacggaggcagagatatgaggccatcaacccactgaggaaaaaaaaatgcagaaaggaatgtgtcagggaaaagtgccaagaagggtaaagcctgacctgaggtttatacaaaatgtataaaagaggatggaggatatatggggcactgtatgcaggcagagagaagagcagtccaagatatcttaaatatccatggcgt

SEQ ID NO: 370048 - DNA, 592 bp, Homo sapiens
taacttcaggtgcctttcacttataaattacatccagcaagggttgacagaaagatttttgtcattaatgtctttcttctcttttcagtaagtccatttgtcacaattatacagtagaatttgttgatatcgcaccaaagaagaattttgttttggcttttctctaccattttatttaaycagtagatatcattatgaaacaacactgcatgtattcttaaatcatttgtcgggtgcttaaatatgtctcgtatactatgatagattctggagtttcaagaacctcacgtagaatgtggtttctgccttcaagttcaagcaagcaatgtggactcacaacagaaaattctgtaccatagttaaagccacaaatagagatatgcccaggttattacggaggcagagatatgaggccatcaacccactgaggaaaaaaaaatgcagaaaggaatgtgtcagggaaaagtgccaagaagggtaaagcctgacctgaggtttatacaaaatgtataaaagaggatggaggatatatggggcactgtatgcaggcagagagaagagcagtccaagatatcttaaatatccatggcgt

SEQ ID NO: 370049 - DNA, 491 bp, Homo sapiens
tttggtggttatgttagaatcctcagcaatacagtgaattcataattctctttttagggaattataactgctgcatggaatccatgtctctataatttctggacattccctaaatatacatgtttatgctgaagaattttttttgttttgacaagagtctaactctgccacacaggctggagtgcagtggtgcagtcttagctcactgcagcctccacctctgaggctcaaatgattctcatgcctcagcttcctgagtagctgggattatagtcttgcactgcaccaccatgcctggctcatttttrtgtttttagtagaaacatggtttcaccacgttgactatgctggtcttgatctcctggcctcatgtgatcctcccgcctcagtctcccaaaagtgttgagattacaggcataagcaatcaagcctggatgaagtctcttattaagcttcttttattaaatctacttctaggtatttgattaatt

SEQ ID NO: 370050 - DNA, 545 bp, Homo sapiens
gtaattttctccctggatctttggtggttatgttagaatcctcagcaatacagtgaattcataattctctttttagggaattataactgctgcatggaatccatgtctctataatttctggacattccctaaatatacatgtttatgctgaagaattttttttgttttgacaagagtctaactctgccacacaggctggagtgcagtggtgcagtcttagctcactgcagcctccacctctgaggctcaaatgattctcatgcctcagcttcctgagtagctgggattatagtcttgcactgcaccaccatgcctggctcatttttgtgtttttagtagaaacatggtttcaccacgttgactatgctggtcttgatctcctggcctcatgtgatcctcccgcctcagtctcccaaaagtgttgagattacaggcataagcaatcragcctggatgaagtctcttattaagcttcttttattaaatctacttctaggtatttgattaattttgatgctatttaaattattttttgttaatttcat

SEQ ID NO: 370051 - DNA, 546 bp, Homo sapiens
tttctcacactagactgatttgtcatcatcaaatattatttatcttaagttcccttagaagagtgctgaataaagagcagcagaaaactttgtgataagagctgggaacaagaaggtctttcaaaggccctgaraagctgaactatagtttcagacccaaatatctattacagtccatcctcagtacctcacaccatagctgacacagagtacgtgcttaataaatgtgaaataaattaacacaagcacatgacgattaagatttagtgttgaattatatgaagggtctgaactagaaaaaatgctgacagataaatgaaagagtcaagcaagctaagttctttaaaaaaataagttttagcaaataatctgtagaatttcctgagtactctgagtcgaattgccaaaaaaaaaaaaaaaaacagagagagagagaatttaagtagttcacagcaatgcattagctaattcttttaatgaggcttaaacttcttgagaaagtcagacaaggacacacaatttgctcactaataatcttacacttac

SEQ ID NO: 370052 - DNA, 551 bp, Homo sapiens
tgttgctgtcattagacaaagtaaaatttaaggtgaaaacatgacaaagagggacattaaataaggataaatgtacaatcaatggtgacaaacttttataaacttgaaattatattwacaaaacataaatcatgtaaaactaaaataccttgataaaatgcaaattatcaggtaacaagaatatatctattgcagaaagtaatatatcaaactaaaataatgtgtatctattacaagtatacaatactttgtagcctacaaaataagaatatacgatttcttcttaaaatgttatacatttacaataattaataatttggccactcagaaaaccttggtaaagcaaggaaagtagagatattataagccaacttaataatttagtaacattgggtaaaaatggaagaagtatcatattgtggttgtgaacataagctctagttctcctagttttgtgatttgggaaagttaattatcttctctctacctcgtcttaattttcagtaatattaggataacaatagtttgtacatcatcagtgtttttttttt

SEQ ID NO: 370053 - DNA, 551 bp, Homo sapiens
tgttgctgtcattagacaaagtaaaatttaaggtgaaaacatgacaaagagggacattaaataaggataaatgtacaatcaatggtgacaaacttttataaacttgaaattatattaacaaaacataaaycatgtaaaactaaaataccttgataaaatgcaaattatcaggtaacaagaatatatctattgcagaaagtaatatatcaaactaaaataatgtgtatctattacaagtatacaatactttgtagcctacaaaataagaatatacgatttcttcttaaaatgttatacatttacaataattaataatttggccactcagaaaaccttggtaaagcaaggaaagtagagatattataagccaacttaataatttagtaacattgggtaaaaatggaagaagtatcatattgtggttgtgaacataagctctagttctcctagttttgtgatttgggaaagttaattatcttctctctacctcgtcttaattttcagtaatattaggataacaatagtttgtacatcatcagtgtttttttttt

SEQ ID NO: 370054 - DNA, 569 bp, Homo sapiens
tgttttccaaaataactgtatgaattaacaataccatcaacaatgtacaagggttccctctgctccacatcctcatcaacacttgctagttttcatgttttcgataatagccagtctatcaggtgtaagataatatttcattgtgatttaattagcatttctttgataatcagagattttgagccttttttaatatatctgttgaccacttttatgttttcctttgagaaatgtgtatttaagtcgtctgcccatttttaataggatcatttgttttcttattattgaggggtttgagttccatgcatattttagatactagccttttatccaatgcgtaatttgcaaatattttctcccaatctgtgggttgtctctttaacctgctaactgtttcctttccttcctgcagaarctttttagtttgatgcaattccatttgtctatttttgcttccattgcctgtgcttttggggttaagaaatctctgctcgattacatttattgatttgcgtatattgaaccagccttgcgtcccacggatgaagcccacttgatcatggtggata

SEQ ID NO: 370055 - DNA, 531 bp, Homo sapiens
acaataggtatatattttcatggggtacattcaatgttctgatacaggcatatgatgtgtaataatcacatcagggtatttggagtattcattacctcaagcatttatcatttctttgtgttagggaatttcagtttcattcttctagttatttaaaatatacaatgaattattattgactgtagtcaccctgttgtgctatcaaatagtatgtcttattcattttatytaactatatttttgcacccattaacaatccccacttgatttgaatatggtaagccattcttgcatcctaggaataaattccatttgaccatggtgaatgatccttttaatgtactgttgaatatagtttttggtattttgttgaggatttttgcatccatgttcatcagcgatattggcctgtaatttgcttttccggtagtttcttgtttttttattatactttaagttttagggtacatgtgcacaacgtgcaggttagttacatatatatacatgtgccatattggtgtgctgcaccca

SEQ ID NO: 370056 - DNA, 531 bp, Homo sapiens
acaataggtatatattttcatggggtacattcaatgttctgatacaggcatatgatgtgtaataatcacatcagggtatttggagtattcattacctcaagcatttatcatttctttgtgttagggaatttcagtttcattcttctagttatttaaaatatacaatgaattattattgactgtagtcaccctgttgtgctatcaaatagtatgtcttattcattttatttaactatatttttgcacccattaacaatccccacttgatttgaatatggtaagccattcttgcatcctaggaataaattccatttgaccatggtgaatgatccttttaatgtactgttgaatatagtttttggtattttgttgaggatttttgcatccatgttcatcagcgatattggcctgtaatttgcttttccggtagtttcttktttttttattatactttaagttttagggtacatgtgcacaacgtgcaggttagttacatatatatacatgtgccatattggtgtgctgcaccca

SEQ ID NO: 370057 - DNA, 512 bp, Homo sapiens
tctggaaaagcacaaaaagaattggtgtcattccttccttacatgatctatttcattaaccagtaaagatatctggcccatgcttcattaaaaagatttgaaaatataaattcaatgtgttaacttgttgtaagactattcttgttatctatttcttcatgagtgagctttggtaatttgtgtcttccatttgctgaatttatgttggatttttatccttaaagttttcagtttactgtttctttttggtttctatctccctacaaaattgctcctagtatttcctaattgtcctttttaatrtctgtagcagttgcagtgatgtcctttttatgtttacatattgataatttgtataatttgtgtcctttcaattttactattcattgtttctttatgtgtatgtctgatttgattttaatgtgttctccattttcttgcttcctaacataaaaccttgagccactgatttgagattttattctttcctcatataagcatttaatactatg

SEQ ID NO: 370058 - DNA, 571 bp, Homo sapiens
aatcccagcactttaagaggccaagacaggcggatcacaaggtcaggaggattgagaccatcctggccaacatggtgaaatcctgtctctactaaaaagacaaaaaaattagccaggtgtggtggcacgcacttgtaatcccagttactcaggaggctgaggcaggagaatcgcttgaacctgggaggcagaggttgcagtgagccaagattgtgccattgcactccagcctgggtaayagagtgagattctgtgtcaaaaaattaaaaaaaataaataaaaatagaataattaaaaaaaaaaggcttttggaatgtggtttctggggttggatttatggcctttctacttactagctgtgtttcaatagacaaataacatctctctgagcttcactttcttccttgctaaaatggagacaatacctttctcacagtattgttacgagaattaagtgagtcactcctgtaaagcttttaaaacagtgactgctggcaagagctgcatagcggttcattttaccattacataggcccacaacagcacagacaaattgaaggagttttaatca

SEQ ID NO: 370059 - DNA, 571 bp, Homo sapiens
taaagcttttaaaacagtgactgctggcaagagctgcatagcggttcattttaccattacataggcccacaacagcacagacaaattgaaggagttttaatcagaatatagaaaaaaagggaaaaaatcaaaagtcaaaacaaaaatcaaaacaattattgaattcatcgatgtagagaatagaaggatggtgaccagaggctgggaatggtagtggggggctggggagrggggaggtgaagatgattaatgggtataaaaatatagttagaaataatgagtaagacctactatttgatagcacaacagggtaactatagtcaataatataattgtacatttttaaatgaacagtgtaatggaattgtttgtaagtcaacagataaatgcttcaagggatggataccccattctccatgatgtgcttatttcacactgtatgcttgtatcaaagcatctcatgtaccctacaaatatatacacctactatgtagacacaaaaattaaaaataatttttaaagcatagattttctatctaacctctgcacccgcttcatagagcctgtgcaa

SEQ ID NO: 370060 - DNA, 573 bp, Homo sapiens
tgattctgttaacgaaagcccctttcagatgaacagggtttatgtctattacatcctaagagtgatttctaaatcagaaatcaattacaatttctttcatttaaacataacatatacacatattctatgaaaagatatcttgataagtagtagattttgaattgtgaattactytttgggaaacactacatataccaggatttttattattgctctgtcacccaggctggagtgcagtggtgcaatctcagctcactgcaacctctgcctcctgggttcaagcaattctcctgcctcagcctctcaagtagctgggactacaggcatgtgccaccacgcctggctaattttttgtatttttagtagagatgtggtttcaccatgttagtcaggatggtctcgatctcctgacctcgtgatccacccgcctcggcctcctaaagtgctgggattacaggtgtgagccaccacgcccggccaatgtttataattttacaattctataagcgttattttaaaaagttattgagatataattgaaaagtaaaaagctgcccatatttaatgtatgca

SEQ ID NO: 370061 - DNA, 608 bp, Homo sapiens
tttaggcctatgtttcatatctctggctatacaataagtcacttgggaagcttttaaaaattaccatgctcagtcccttctcatatgaattaaattaaaatctcagctgcaaatcactgatttagaccagtagaatactaataaattggagcaaaacatagtgtaataattaagagtataaacctgagttttaaatcctagctctgccacttcttgcttatttgattttgggtaagttatttactcaggaaaggcctaagcttttcattttaaaatggaataataggaatatgtaatcatttatatcatactaaagatctcagaagaatgccaagcatataataaatgcttaatgtattttgaatcattttcttctgaaaatgtcagtccaawttcctaagtttccagtttatgatcagagaatttaggcactgtgattatctgaatttcctccttttttgtttaatctttttgagtacttatatttaaaaactgatgatctggattctgtataaagcacattagtaaagcctcaccctagaatggatttcaaactggaataataatagccgattcgtgtcagtgcccactgggtatcaggggctttt

SEQ ID NO: 370062 - DNA, 583 bp, Homo sapiens
tactttgttaatttataatagtgctatccagctcttgtatgcaaaaaaagaaggaaaaaaggagtgactcttccatgttcctaacccaatggttcaagttaattagactataatgttcacattttgagttatacaatatttttcataataattatatgctatggagacatctattaaaagcctaaagtgatcatttaaatgcaaaatctctgatagaactccattatatttttcatactaaattaacattacaggcttctaatggatgctttaattargcattgatgttatcagcaatatttggcaaaataaaatctgtcactgtgaaatattcattatgttcaatttctgtcagtcaatattaagtgttttgtgaactttatgatttaagtaagaagctaaaacctaagtgagaaactaaaaatccccaaacctccgtatgtgccatacacacaaacacacacaaacacagtcattaagcatcttttgtgtttcataattgccaaacaaccagcttctttatagacatttatactcagggcactccattagaaagtggtcttaatgcttcagagaatgaaaa

SEQ ID NO: 370063 - DNA, 431 bp, Homo sapiens
gaatacctttcaacttttccagggtcatgtgtcattattcttaggaccttcatcgccasccttacatatggtggacactcgaatgttggttgaattggtcagaatataataaaataattaaggtgagagccagaatttgactgcagttcttcaatttcaagtctaataatgagtttagacaaaccagagcgacttgtaagtttgtaaggattagatatcaggtactagaaaaagataaaggcagatacgatgaaataacttacaaattcatgaacattttataacatgtttaataatctgaactataaatagcatcttatgctaaagccaaataaattgcatagagtggaaaagacacttgaaaccacagccctcggaaattcagtggtttatttttatgaaaataaacagacatgcagtggcctccataa

SEQ ID NO: 370064 - DNA, 504 bp, Homo sapiens
gggtcctgctgaggagataacactaaaaccaaagcgatgctcacttaattagttgtatatcagtgtaagaacatttacttagcacatcaacagccagcgttccaccaaagggtcgcctgaaacttctccaacatgcaccctggataggggaaattctgcagtggcttcagattgagcattygtaaatttaaatttgtcaattagccatggatcatttaacctcagaaacgtaataccacttatttttagagtatctgtttgaaatacaaaagcagtaaaaccttaattgttggtatagcttttcactaataattttaagaaaaaaatgacagaacatttattttttacaaagcactagtttaaaaataaattattgcaatttgagttaagctttaactggctggagattcctttagattcaatggatcaactaattcttcctaagtcttaaggagaggcaagaaatccaaatgtaaagttaagtacaggtagaatagctatatt

SEQ ID NO: 370065 - DNA, 442 bp, Homo sapiens
ttgaaaaatagtaatatataatattataataagatgattaatattaaaaatagccctcatttggataactatttttggcaccaactcccaggcaacttttcacagcgtgaatagttagccctctttgaacaagttactaagtaccagccactttaaatacataatctcatttaatcctaacaaattactagtatcattcctatttygcagatgaaaaacaggccaagacaggttcagttgacaagaaattgcacagatctaaatgcagactggacttactgtgaatcccaaattttccctcaccatgttattttgtccaaaatgaaactaaaatgcttggcatagatctagacttttgtaggcactcagtaaatattatttccactctgaagaaaacgattcatgtttcatttcgcttctcatcagaggtaccacgaacaga

SEQ ID NO: 370066 - DNA, 488 bp, Homo sapiens
aaacaataaaatattttaacgacatagagatcagggaagctgagtatgtgagtgtgtctgtaaatgttttggcagatgagtgttatctacttaacatgcttttcaaagattcaaatttataagactctaatgcacttttgtgcgttagaatatagctgtttacgtcaatatctgtttaggatcaaggtttgtggccacatctcaaataaaatcaaacttctaagtttacatgaagtatctcatctcataaagaatcatgtcaggtaggcctatttttacattaaagrttgactctaaagaatggcagccaaattaaaatattaaactttattaatattaaaagcagtaagaaacacatattaaaggaaataaagaggacaaatagtgtagaccaacatttgcctatgaaaacataatgtgtaattttaaattgactagaagctacattaaaagatgtaaaaataaataggtgaagttaatacctttta

SEQ ID NO: 370067 - DNA, 536 bp, Homo sapiens
ttattcagaaataatccattacttcaaaaaagaaaatattcattgggctagcccaaccttctctaggccctaagaattattacctcccctttctaattctagcaaacatggaacattctccttaggcacttgacacccacgagggtaatcctgagtgctcagtttggaataggttgcaaatctcagattttagggattgagtcacaccttcaatctayagaatgaagttgaccaattaaaaaaaaaaaaaacctatcattttcacaaatttctagatccttctagtcaaaaataattatttaggaaataaaatttttaaaaatccatttaaatacatgttatttgtcttcagtggaagttatatttctgctgcatgcttttgaaactttcttcattaaatagaatggtttgtcttagtaactggcaatgccagtattagcaccatgcatttaatctataatacaatcaatttaaacatcctcaaaaaactctagtatcatttacctggtagtattaatatacaatgatgtcaccac

SEQ ID NO: 370068 - DNA, 548 bp, Homo sapiens
tcactttcatgcaaatctttatggcaaggtctgtttctagggaattcactcaaggcaagatccttctagctgtgatccaatttcaacacacaaacaacaaatgaataaaatactcttttcatcatccagatatttcattctcatagtgtcagcagcagaatatggggtcacataggtgttgaacattatatagctacaattattgaaagattaagtttggcatgtgtattagggtcctctagagagacagaaccaatagtgtgtgtgtatacacacacacatatatactattggtgtatatatatttcggtttgcacgatatatatatatatatatayacacacacacacacacacacacatatatatacatatatatatatatatatctgagacctaatgttaaatattaacctacacgatcacaaggtctcacaataggctgtctgcaagcttgaggagtaaggagagccagtccgagcctcaaaactgaagaacctggagtccaatgttcgaggacaggaagtgtccagcactggagaaagatat

SEQ ID NO: 370069 - DNA, 572 bp, Homo sapiens
ggagtatctttatggtgttctctgtatttcctgaatttgaatgttggcctgtcttgagaagttctcctggataatatcctgaagagtgtcttccaacttggttccattctccccgtcactttcaggtacaccaatcagacgtagatttggtcttttcatatagtcccatatgttttggaggctttgttcatttcttttcactctttttgctctaatcctctcactttatttcattaagttgatttcaatctctgatatcctttcttcccaagctggctctctagattcctcgtctctgggcagggcatctctgaaaaaaaagcagcagccccagtcagggacttataggtaaaaaccccatctccctgggacagagcacctgggggaaggggcrgctatgggcacagcttcagcagacctaaacgtccctgcctgacagttttgaagagagaagtggatttctcagcacagtgtttgagctctgataagggacatactgcctcctcaagtgggtctccatccagcccatgtatcctgactgggagacacctcccagttggagccgacagaca

SEQ ID NO: 370070 - DNA, 609 bp, Homo sapiens
gctgtcctgcagcctccactggtgatacccaggcaaacatggtctggagtggacatccaacaaactccagcagacctgccacagaggggcctgactgtttgttwgaaggaaaactaacaaacagaaaggaatagtatcaacatcaacaaaaaggatgtccacgaagagactccatccgaaggtcaccaacatcaaagaccaaaggtagataaatccacgaagattaggagaaaccactgcaaaatgtctgaaaattccaaaaaccagaatgcctcttctccaaaggatcacaactcctcaccagcatgggaacaaaactggacagagaatgagtctgatgaattgacagaagtaggcttcagaatgtgggtaataagaaactcctccaagctaaaggagcatgttctaacccaatgcaaggaagctctaacccaatgcacggaagttaagaaccttgagaaaaggttagatgaattgctatctagaataaccagtttagagaagaacataaattacctgatggagctgaaaaacacagcacaagaacctcgtgaagcatacacaagtatcaatagctgaattgatcaagtggttgaaagtataatgtag

SEQ ID NO: 370071 - DNA, 609 bp, Homo sapiens
gctgtcctgcagcctccactggtgatacccaggcaaacatggtctggagtggacatccaacaaactccagcagacctgccacagaggggcctgactgtttgtttgaaggaaaactaacaaacagaaaggaatagtatcaacatcaacaaaaaggatgtccacgaagagactccatccgaaggtcaccaacatcaaagaccaaaggtagataaatccacgaagattaggagaaaccactgcaaaatgtctgaaaattccaaaaaccagaatgcctcttctccaaaggatcacaactcctcaccagcatgggaacaaaactggacagagaatgagtctgatgaattgacagaagtaggcttcagaakgtgggtaataagaaactcctccaagctaaaggagcatgttctaacccaatgcaaggaagctctaacccaatgcacggaagttaagaaccttgagaaaaggttagatgaattgctatctagaataaccagtttagagaagaacataaattacctgatggagctgaaaaacacagcacaagaacctcgtgaagcatacacaagtatcaatagctgaattgatcaagtggttgaaagtataatgtag

SEQ ID NO: 370072 - DNA, 598 bp, Homo sapiens
atatttttaatgtggcatttatagaccctttaatgaaaagctagcccattggagataaaggaggaacctagagaaatagccacaggaacatcatttgtgagaygcacaattcacagaggaacacagaagccaaagcattttcacttccccagaatttcttctgtgaaattacaaactctttctgatgaataattttctccaatccaacgattatcttgagaatcctttgtgaaagagcctgccttttcctcctaagcaatgcctgcaatctaacatttcacaagcatcctctgagacctgtggttggaaggaattgctatcaaggaggcccacattaaggtaaactttcttatgggaacaaagagtgaggagaggacttgatgtcatctctttcaggccagtgccacaaagatgcccaaagttgggtcttggctaaaaattgaccatcggtcatagtctcctttagattaaatgagtcaaaagtcaaacctgagtaattttcattgtctctagaaccacactcacaaaaatctcattacatgacactgtttgaatacaagcacacaagtgtttctctcccctttacagtcttaaaaga

SEQ ID NO: 370073 - DNA, 644 bp, Homo sapiens
ctctttttcttcttctttggtaagaaagatttcctagcctggaaataaggcacttctcttcaaactccttgggattctctcatttgctgccttgattcatttcccttgttcaaagaaatcttttatcaagtctctgcctgtattttggctctgattgctatatggctacatcctgtgctcagccaaccttgtatctatctttctaccttcatctctgaatgggataagcctggaggctgctcaatgacccagaagacctctaaccccttctgaatatagaagaatgagtatagataccctctgaagacacatttcacttctgcataacttyaattctatgtcttgatcttttgtatcttaaatctctattcccttcagaattatcagattttctatttcctctgccctttgatgacctccttgagcctccgggagacttgtctcaaaattatctcactaattatcttgaaatatttcctggttaaaaattctctttcaaaagcaagatattatcttatatcactgcattttgttttgatttatctgacaaaactttattaagaaataagtcatcagaaaaaatattttattaatacttaaacctactatgcagctcgtttcgcttgcagtttaacctggacctg

SEQ ID NO: 370074 - DNA, 577 bp, Homo sapiens
gctactatggctactttaaatgaaaaattttactgcaccagtgatgtttagtttgggacacaagatttggaagtcaacctatgctctgaagtgctacaataacaaaaggatacaattttttttaaagaagatttgatgatagatggagcagagaattggcatttttttactagttattttcttctaattacattaatgccaaagctgcctaaaacaaaatctgatacaatgcagtataagtggattatgtccttcatagaagggaagtagaatcagttgtgctgtttctatactaatttcatcaaataataagcatgtctgaagagccaaagaaccattctctgatctaatggcaacaaggcaaaatctcgttttcttttattttcatggtacccttaagatccttcttttgtttttatttgaactatttctctcaagccatctcttctttcctattttcagatatctctggctagagtttttgtttgattttatgttttttatagctcctctttaaatrccactcctctcccccactcaactggaggcatgccccgccatccctttggaattatta

SEQ ID NO: 370075 - DNA, 540 bp, Homo sapiens
agcttttgccaaagtgcttagggtaggatttaagatgactggagattttctcaacatggcaccaaatcccacttttgcacattgagaagactggtgttctctctgtggagaaacaaaatatatccaggaatccagttcatcaggtcaatctaatgctcgaacattcttctcacagaaatgacacggggcgggggggaacccaaatcaaaaacaaacccactacagatagcttagttacatttggctagtttagtgaatgcttcagtgtcttgaaagcagttatatggtaggccaggtgtcattttggtacygcctccccaccttcttttacatgagtccctcttaactctgcttcagagacctgctgccttgatgttccactgttccgtgatttcacaacccctttcctgataacacagcaccaagagattgttcaatgccttactcaattagttactttcccctccagagccttattaacagccctgcactgtggaagctctgtgagtgattatgacttcccagaatgctcacacatga

SEQ ID NO: 370076 - DNA, 582 bp, Homo sapiens
tttagccaatgttcttttcactgaactaccatcctcctgaatccagcctcaagctagtagtgattttggggggatgaaaatatttcgaggatgttttttaaccccaatcctggagctatagctaaatcccaccaccaatcctgtaagcttgcttctctctccccrtagccatgctggatcttcctgtggtgtctttcaacttttaaatggcataaaattcacatttcatcataaatcagattttagttgaaaccatttaaagacagttttctttggtactgctgccctgttaggtgaggtatttggaagaactctccaggcaagtctaaatagtatcattgttataaggtatgtggtaagtaccctatccatctccttacagtagtagatttaagattcagcagaactataaataaagataacattatcagaaaagacaaccaatgaaacatatgagaccattaaagaatgtctctttttatatagattacccaattctctaagtttacttttagaaggctactttctccactttaaaaattttatgtcataattgctgtactttgtagatacattcatttc

SEQ ID NO: 370077 - DNA, 592 bp, Homo sapiens
ggagcaggacttcgtgccatcttacttcatgctggattgatactaagacactcatagttattttttacgtcttctattttaatttctcatgtgtgccttcctgttggtttagaagatgcctaatatgtcacctagctaagatattttgaccccagttttatctcattttaaaaactttttggcttttaaggaagtatagacttaggtgacatttttatttataaatgcctgcagttgtaacagaattcttctgaagacatgtaatcatccagcgtggcaacatagacccatctctacaaaaatcaaaattaaaattaaaaattagagtagtggtgtgcaacagtggatccggctactcaggaggctgagatgggaggatcacttgagcccaggaggttgagtctgaagtgagctatgattgcaccactgcactccagcctrggtaacagagcaagaccctgtctcaaaaaaaaaaaaaaataaataaataaataataaactagaaaaagatatgtaatcatcaatctcactaagtatacatttcttcattcttataatgattcttttatttttagtgtgagcccacttgaaa

SEQ ID NO: 370078 - DNA, 613 bp, Homo sapiens
cacacacataggagcctgcatcctatctcctacttccttacatactcacagtcattgtcccagcagatattaaacatgccgttttatgctgaagatataatataaggtgactgaattaatttatcttattgcttgctagaaatttgacatcctaacttcagctgtgacttgatatcaaaagaattttttaaattgtgaatatagagtcagttaacaggattctaagttgtttcttgaaagctgttttgcaaataaaatgataaaatcttgggaaagctttagtaagggtagtgtttgtcatgcaaaataaagtcacaaaaccaggacttgaaagttatagagatgaagaaaactgaaatctctaaatgtgagaaaacaacctatgttactgtatctgagtgtcctggttggctttctctatgtcatccactgattggaactgctttcagaaataactgttttaagcaaataaaatagaaaattacctatactctggtctttgttygcatacagattcacctctcaaatgttttacataagtagtctacctagatattctagaactcaaaatctaatcaaatgatttcagttctatgaatgcaccagtagagaa

SEQ ID NO: 370079 - DNA, 620 bp, Homo sapiens
tagacttcaaattattaatgatacggttttagtcattcctcatttccatttgtccagaaagttcagggaaaattataattacttttgataatttgattttttatagaaaagatacatacagaaagcatttcatttcttcattgtggcaccaatattgactcaccaggattgttggactgggcatccatgggaatcatgagcttggcccggggggctcggcgtgcagccagcgacctctccagagtggacatagagctccctgcttcctcagtgtcttgacctaaaaaatacacactcctgagaaacatgccctcttcaaggatgcaacactttacmtaatttctagcaggcattccaatgccttttcagtcttacagatgctttctatgatagtatctaccttcttgttacctgaatctatttcattgtacaaatcttaatgaaattaaccataaactctaaactcattgcatacaataaaccattatttatattttgatgcttataatttttgcatatgtttatacatgtgaaagtgggagagcgtacattaatatatttttcaaaaatggcattatatcatgcatactttttgtaacctgctataaaaggtaacacaa

SEQ ID NO: 370080 - DNA, 631 bp, Homo sapiens
aattcattcaactaatactttaagcccaaccatattaaattttattacaaaaaacccacaagaaataaactgcattcttcaaaaataagatcagacatatttacataaatttattaggattccataaaatatcatactaaagagtcactaaaaattagaaaaaatggatatatgcagatttgaaaagttaattataataygtattaaaaaaactgaagttctgaatagtgtatgttcccatttgtgtagtatgcatataaaaccatattgtgacacacatttctatgtgtatatgaatatatatatatataagtacacacctatatctatgtaataaggttatacacaaaatttttaacattgttttccttttgcgaaagggattaggaatttgggataggcaagaggcaaacatatgttttactattttgggtacttactattttttgaaacttttttattctttttattttttatcatatgcatgcattttttaaaaaattaacagcataattactacaatttaaaataaaaaattatactgggagaagtccacataggtgaagtcatggaagcttcctaaatctaactctgtccacacatcctacaaaaactacacagaatcatataa

SEQ ID NO: 370081 - DNA, 631 bp, Homo sapiens
aattcattcaactaatactttaagcccaaccatattaaattttattacaaaaaacccacaagaaataaactgcattcttcaaaaataagatcagacatatttacataaatttattaggattccataaaatatcatactaaagagtcactaaaaattagaaaaaatggatatatgcagatttgaaaagttaattataatacgtattwaaaaaactgaagttctgaatagtgtatgttcccatttgtgtagtatgcatataaaaccatattgtgacacacatttctatgtgtatatgaatatatatatatataagtacacacctatatctatgtaataaggttatacacaaaatttttaacattgttttccttttgcgaaagggattaggaatttgggataggcaagaggcaaacatatgttttactattttgggtacttactattttttgaaacttttttattctttttattttttatcatatgcatgcattttttaaaaaattaacagcataattactacaatttaaaataaaaaattatactgggagaagtccacataggtgaagtcatggaagcttcctaaatctaactctgtccacacatcctacaaaaactacacagaatcatataa

SEQ ID NO: 370082 - DNA, 606 bp, Homo sapiens
tgttgggtgtctgtgtgtgggttttcagtttttttttttattctaaaaatagactgtgcttgatattacatgaattcattgaaaagttaaacaagattttttccttttactttttttgaagcataaaattttttggtagtaacactttgtggcttgtctcataaacttgccacctgacattatttaccattggtccaaatgaggttgggaaatttaaatacaggatttaatagacatgtatataattcaaaataactaataaaaagttaagtgttaaatcacattgcccatttggtgttatgtagctcttttatagatgttattcactgaattgaacatttttagaaattgaatactaccaaatgccacatgctgaaatttacttgttcattcttccgaagtgaagctaagtaacataatcctgtggtgcttctgtagtgaaattagactaggataaatccatttcaagaaactaaattctatttgtaagtcctagagatcaaatagacctgaactctttcgtttcttyattgtaaacttttaagtaaagaaaataattttgaaatccactagatgtagaagagatgtatcatgaagcaataactt

SEQ ID NO: 370083 - DNA, 609 bp, Homo sapiens
aaatccatttcaagaaactaaattctatttgtaagtcctagagatcaaatagacctgaactctttcgtttctttattgtaaacttttaagtaaagaaaataattttgaaatccactagatgtagaagagatgtatcatgaagcaatracttatcatcttaattcctagatattttagtggcatcctctatttttgtggttagagaatgaagtaggttttgtttaagcagtttgcataccagcagtagggaagaatgagtaaaataaaaaattaactctcaataaaattagttgttgttgtttatgcagcaattgcttgattcaattctcttttccatagctaaagtatgaatactgtaaactaatttctggttttatccaaaaagctaatttcatgggcgcaaaacaagaaaagtacttatataaaagtattacatgagttaattgaaactggatcaacaaaacattaatttggggtcagatttttttggtcctggctgtgatactagctctgaaatctgggcacattatttaacccttcttaatttggttacttcatttactatatgaaaagaatgatagcatctacctcaaagtattttgtgaagat

SEQ ID NO: 370084 - DNA, 505 bp, Homo sapiens
ttagaaggatgtgtcttagaagtcattggcaaaacctccttagggcagtgaggcaattctatccctttcagtgggaggtggaggtgctctcccctccctgatatccagtcaagaacaaagctagaagaagaatcacttgtaaaatatggaggttcctgcaaaagggatttgttttctgtcactccccaggcgaaagcctgtttaggcagtgggcttgctgttctaccccgagtctatctaagcagaggaaaaagtaattgaagagagcaaggttgagagagggccagtggtagagtgcaagctctctcaccattgggtctgrcaaggatataggagattcttgtgggccaagtgggcatgtgaaaagttggctgggcttcagtccccttgctggaatttcccagaggcctcatgacggaagaggaagagctgtgttaggtggtaagcctggacttcatgtctcccatcatggaactgggcctggtctacaaggccccacaaagca

SEQ ID NO: 370085 - DNA, 530 bp, Homo sapiens
aataatgcaaactgttaaaatctagttttgacagmagactagagaagcatctacttcccacttccttaatttgcagtgaacagtttattataataactaccttccatggctgctcaatagttcatacaagctactctcagtgaaaacacctgtaacctgtgcaaagtcattggagtggctttggttttccgatgatgaataagtagctttgtaaatactaggtaattaataaatatttggtggtgtaatttgttgaattttccctgacatccttttttttgtctttcttgaagcgtgctgatgaggataggagataaagaatcccagacctagtatctattttgtattttagcagagaaaaaataacactacctgcactttgctgatttcctggtggcagccccacaatgttttaaaacaatggtctgaaacaacccctattttctaagtgtctatgtgtctaagataataactcactgataaccatttatttcctgaattcatttctatatacttcacttgcccacggc

SEQ ID NO: 370086 - DNA, 586 bp, Homo sapiens
accttccacacagctaaagcccaatatgtttattagttattataattattattcatgcaagttaggaatgaaacaactgaatarcaattgaattcttaatagaataaaacataaagatggcttcataatatcagtagtatggtggtagatggtggtctctgaagtccttcctgtcattggaatctccttttatgcacacttgcctctagtatatctgaagtaacagtcatcctaggggtctaagaaaccacttttatatgcagcttagtctttattaaaatctaaaaagcattctgttcctccaaatatgggcactgccttggatgactagatatttccaagagctagttcatttgccaggctacaacataaagaatgagacaatcttttttggcttataaaagagcatctgttctcaaaggccacggaatgatccataaaagcctcccccatctgcgtggttcacaagcttatcctaaaggcaggtgtgagatatgtttgtgcctgagcaaatttgccaagcatcccgggaagaagaggcagaagaggatgagagagttctctcctccaagtgactatagatctg

SEQ ID NO: 370087 - DNA, 448 bp, Homo sapiens
gggaaccaaaggagctggacagataaagatctgtcttgatttattaggtagagaaccgtgaggtggatgagcttagaaaaaaaaggcagaggtacaataataaaactccctaaatgctctgcaaaatggtctagaatttattttatagaggatagggatccactgaagatattttaagcaaaactstgactaattacacatatattttagaaagattattctggatgactgtggaactaaatggatcagaataaactgttccaataaatatggcaatattaattatgcatctctgaggcagacattactaaccccattttatagctgagaaaactatagctcagaaagatgaataaacacagggtttcatttgaagtggctgatactgtatgactctgatgatgatgattttagcattataggtgaataaataactaaaagaaggaat

SEQ ID NO: 370088 - DNA, 528 bp, Homo sapiens
ccttgcctggctgaaaaaggttttcttgactcttcttcaatcagagtagcagacttccaaacaagatgttgtttggaaacaacaacaagatgttgttttttcactttagaactgccatccacaaaccaagcagctctttgtcagtcaggtgagagctgtttatcagtctccctagaatccagcagctgctcacacagttgcagagttagtcctaggggaaaaagaggytccctgctcatgagtatctctgcatgcttttaggtagcaaaacactatataaaccatttcaactttatcatggaactcttttgggcactgctatccccatgaaagtggttccctgatatcaccccatgagtcccaataaatgttccactaagggccatcgagtggagaatttgttcttaccagcactccagcttctactccacactgtgtgggcttgggcaaccttaccagttcccatttatcatgcctgattaatattgctcaaagagcagaattacatgcttctcttttgaagtacta

SEQ ID NO: 370089 - DNA, 342 bp, Homo sapiens
gtttcacatatgtacagtctcttcaattatattatccctgccctacagtagcttactatatctaatttctcgtgcccagaacagtataatgctcaagtctcaaaatatatttatatgaacaaatttgcacctcacttggattaacatgtctattattatacttatcacactgcatggtaacaactggttaaaaaaaaaaaaaaagtctagggatttgcttcaaaataaaraaggaagtggatggaggtatggatgaagcaagactgaccacaagttagtaactcttaaagttggtgatgtgtgtattattgctgtcaattttccataatacaaagtttaaaa

SEQ ID NO: 370090 - DNA, 639 bp, Homo sapiens
tgtttttcagctagtcactacatgggagagtgaggttcagtctctcctgggaacctctaaagaaccatacaaaatgagccttagcattgtccctctgaaggatgrgagtctgaggcatttttttcatggattcccatctcccactggggtttgctgtcaggaatatttcctggctaccctatgggggaatgactgatgtccccttgcctcaggagaaggtttaaggctgaacaaagcacagggagactgagaggtgggagaatttgtgcatgggaagtacccaccagaattgctactaaaatccacgctgggctgagggcatgtggcttgggacaaaaaaagcacatgcttaaaaaacccacatcaggaaagttaatggaaaatgtttaactttttagagaagaatcttcctatctcccatcttccactgcagggttttccagaggagggtaggtatgacatttcctgctgcctttgcacatgcattttaaccttaactgaattctcttctcagtcaagtttctcactcctgctctcagtcctgtctgccctctcagactccagagccttcagaggttgccaggcatatcctctgcctcctagttatatggcagccccttggagcttgttccaggattc

SEQ ID NO: 370091 - DNA, 534 bp, Homo sapiens
agttataattatatttattatcattgttaatctacactatgaaattctatgaagttgctcttagagggtggcatttgaaagcctaacggacacttctgtttgtttatgaaaatctacattattttaaaaatattacgtttatgatgcataataatatacccagaagagtagcacaacataagatttgttgttattcttttcagatgtaccatgtaataattttgttgtggaggatggatattaccacagggcagagagattttccttctttttgttaataatacagtgctgaataataataatataatctttcttttccttcttctcctcttcctcctcctcctcttcttcttcttcttcctcttcattttattcttccctctttttgagacagagtcttgctttgttgctgaggctggcctgcagtagcacascctcaggtcactgcaacctctgtctcctaggctcaagtgatcctcccacctcagcctcctgagtagctgggactacatgtgtgcaccaccatgacaggct

SEQ ID NO: 370092 - DNA, 582 bp, Homo sapiens
cttgaatgtaaatgggctaaaygctccacttaaaagtcccagagtggcaagttggataaagaagcaagacccaactgtatggtatcttaaagagacccatttcacatgcagtgacacccataggctgaaagtgaagggatggagaaagatctaccaagcaaagggaaaataaaaaaaggccaagagttaatattctaattgcagacaaaatagagtttgtcccatccaagtagtaacaggcccaaccctgcttagcttccaagatcagacaagatagggagtattcagggtggtatgtctgtagactggacaaaataggctttaaaccaacaaagatcaaaaagaacaaagaaggatactacataacaataaagggttcaattcaacgagaagacttaactatcctaaatatatatgcactcaacactagagcaccccgattcataaaacaagttcttagagacctgagaagagacttagataagcacacaataaaaatgatagacattaacacccccactggcagtattagacagatcattgaggcagaaaaaaaacaaaaatattcaggacctaattcaa

SEQ ID NO: 370093 - DNA, 577 bp, Homo sapiens
ctacataacaaccagctaacaacacaatgacaggatgaatttacagatgttgatattaaccttgaatgtaaatgggctaaacgctccacttaaaagtcccagagtggcaagttggataaagaagcaagacccaactgtatggtatcttaaagagacccatttcacatgcagtgacacccataggctgaaagtgaagggatggagaaagatctaccaagcaaagggaaaataaaaaaaggccaagagttaatattctaattkcagacaaaatagagtttgtcccatccaagtagtaacaggcccaaccctgcttagcttccaagatcagacaagatagggagtattcagggtggtatgtctgtagactggacaaaataggctttaaaccaacaaagatcaaaaagaacaaagaaggatactacataacaataaagggttcaattcaacgagaagacttaactatcctaaatatatatgcactcaacactagagcaccccgattcataaaacaagttcttagagacctgagaagagacttagataagcacacaataaaaatgatagacattaacacccc

SEQ ID NO: 370094 - DNA, 544 bp, Homo sapiens
ggagggtaggaggagggtgaaaataaaaaaactacctctcagctactatgctcattaactgggtgatgaaataatatgtataccaagcccctgtaatgtgcaatttagcccatgtaacaaacctgcacatatactccctgaacctaaaataaaagttggaaagaaaaaaattatgggctataatgtcatcatttgttcagttctccatgtaaatgccttaatcacagagaatcaaccaaagtacaaattaagttctctctgaaaatataaaacctaaaaatcatataatttatcatacaatttaccaatgaagaccatcctcaaaaattacttggcccctgtctgtatttcctgcaaagggatctgttaamcgtgttgaataaggatagatactatgagacagcccaaatagaacttgttatggactatatattccaggcaacttatcctcatccactgaacatgtttcctgtttgtctttggctgtgtttggtaaaaaccctaaaactgatactgagcttcatgtcctcacagtgggatgtgg

SEQ ID NO: 370095 - DNA, 611 bp, Homo sapiens
cagcataaatatacagggcataacaatgctggcaggtctgtgtatattatgtacaatgatgggcttggtgaaagcaatttggaagttaaaaagattaaaagtaatgaggacaatcaataataattttctttgactcaatcttattctgggaattggcccaaggcagtaattkaaaataaaatagtaatgcttgtcaaatgtggatattaagttttattagtgtcataaaaaagttttctctatatgttgggtaatctaaatgattgtttatgtagtagccactgggcatcactaagagatccctatgcctcaagcatgagagagggagggaacttggcttcctattccctacgaggctcttggcaagtcctgtggcccatccctggcctggctcctgtggatctctctggcctcatctagcaccagggctctctggcactttatgccctagagatactggatggcttgtagttggcttacacatggtatttggttcacttctagggcagctcaaagaactgtgctcttatgtgttcattacaggtactacattcttatcaaaagataaatccaagggacagagtaagattgcctagaagacaatagtcttc

SEQ ID NO: 370096 - DNA, 568 bp, Homo sapiens
tatgcctcaagcatgagagagggagggaacttggcttcctattccctaygaggctcttggcaagtcctgtggcccatccctggcctggctcctgtggatctctctggcctcatctagcaccagggctctctggcactttatgccctagagatactggatggcttgtagttggcttacacatggtatttggttcacttctagggcagctcaaagaactgtgctcttatgtgttcattacaggtactacattcttatcaaaagataaatccaagggacagagtaagattgcctagaagacaatagtcttctaggtaattgtatctagatgttcttttctttattcatcccaagtcaaccaattggaataggaacaatgattctttttggccttagatatgtctgttcctcattctgatgactaatttaaagcagaatttcaaacaaaaagggcaattcttgcaagagacctgcaatggtgaagagaatgctagcgatttgcatcttgagcacataacacacctcagcttcctcaagagacagtatagacagttgtgaaatcacagactgg

SEQ ID NO: 370097 - DNA, 611 bp, Homo sapiens
cagcataaatatacagggcataacaatgctggcaggtctgtgtatattatgtacaatgatgggcttggtgaaagcaatttggaagttaaaaagattaaaagtaatgaggacaatcaataataattttctttgactcaatcttattctgggaattggcccaaggcagtaattgaaaataaaatagtaatgcttgtcaaatgtggatattaagttttattagtgtcataaaaaagttttctctatatgttgggtaatctaaatgattgtttatgtagtagccactgggcatcactaagagatccctatgcctcaagcatgagagagggagggaacttggcttcctattccctacgaggctcttggcaagtcctgtggcccatccctggcctggctcctgtggatctctctggcctcatctagcaccagggctctctggcactttatgccctagagatactggatggcttgtagttggcttacacatggtatttggttcacttctagggcagctcaaagaactgtgctcttatgtgttcattacagrtactacattcttatcaaaagataaatccaagggacagagtaagattgcctagaagacaatagtcttc

SEQ ID NO: 370098 - DNA, 538 bp, Homo sapiens
tcaaaaaaaaaaaaaaaaattgcccatttactagtacattcacagaatttcacaaccatcacagtgatccattttagtaggtttcattagtggtcactccctacttctccctatttccccatccctggaaaccactagccaacttcatgtctctatagatttgcctattctggacatttcatgtacattcagtcctataataagtggcctttygtgactggcttttttctcttagcataatattttcaaggctcatttgtgttgtagcatatgtcagtacttgattcctttttattgacaaatattattccattggaatgggggatacatcacattttgcttatccatttatcagttggtggacatctggattgtttccaccttttgggctattcaatatagacttttgagtgagtggttgtgttaattccaatataaaacctacctttctgctttaggggtattaaaatatcctttcataagctgacagtaggagtaaatgtatttcttaatgtccttacctggcaaaataaaacac

SEQ ID NO: 370099 - DNA, 506 bp, Homo sapiens
ggataatccatagagctttcaatgtcttttctttgttcaccctcttagcttttccctcccctggacccagccttctgggagaaaagcagggargtggtaatgctagcacctgcacccgggccaactgtgcacacagaaagctgggaggctggggcaggctggggcaggctgggcagaggcgagcacgtggatccatctgctccctgtgtcatgggcggatgcggtagcggacgggcacgtcgtgttccggctgcatcagaccgaagccgtacctgctgaggtcaaactcagggatctccacatctgcgttgatcagctccaagtccaagtgcaccagcacaaggaacacaaatctgcagagagatggcatggaaggtgtgaaggagaggagtagggcagggggttatcgggaacaaggcaggggagccatggctgcctcctaagtctgactccaactttgagtaaagtgaggagaggagtgaggaagtagaagaaacgcatttgct

SEQ ID NO: 370100 - DNA, 433 bp, Homo sapiens
gaataaatgagtaaacacaaggcccatctgtggcatccttagagaacccttgcctgcctctccaggtacctcctccagttttcatttctgggattatgtgatgggttttgcctcccccactggatggggagctccagggggaagactttcccttcacggagcctggcattctgcttgcacataggaagctgtcaataaccagatgtccaacttaacatgaataaatgaatgaatgaatgaatgaatgaatcaccagactatataaaccagctcactcttcaccctctcttccccatacctcgctttatttttcttcttagcggttatcaccacctgccacattgcatatgtactgatgtrttcattgtccgcctccgtcccccacccccgaccccccgctaaaatctagaatggaagctcatgaaagcaaggg

SEQ ID NO: 370101 - DNA, 586 bp, Homo sapiens
aataccaacatttagcatacagaaatgtaaaagtcaaagattctacccaaactataatggcattggaagtttcttattaaaatatatctctgttatcaataagttttgttgtcattcactttatsatattctatgctatgaatgtttgcatcctccaaaaatttctgtgttgaaacctaatcatcaatgtgatgatattagaagagggggcctctacgaggtgattgggtcatgaggatgaatccctcatgaatggaatatgtgacctcataaaacagactccagacagcttccaccatgtgaggacacagtgagaagatggccatctgtgaaccaggaagtagccctcaccagacaccaaatctgccactcttggactttccaatctccacaaacatgagaaatattatttctgttatttataagctatccactgtatggtatctgttatagcagcccaaatggaacaagacataattaaaaggacgaaaaatttaaattacaaagactacctttcaggaagtacaaacaggaaaataatcggttactgacctcaatgaagtgatgctagaaattaacaataaac

SEQ ID NO: 370102 - DNA, 457 bp, Homo sapiens
ttgtttttttttttaccttgactcttaatagaacctgacattgttttatatcttcaggggaaaaataaaacatctggacaaaatgtgtcaatattaagaccattgctttggccgagcacagtggcttatgcctgtagtcccagtactttgtgggaccgaggtgagaggatctcttaagaccaggagttcaagagcagcccaggcaaaatagtgaaatcccatctctacaaaagtataaatacaaaaataaaaataaaattagctgtgtgtggtggcacactcctgtaattgcaactactcaggaagctgaggtgggaggatcacttgagccaaggaagtcgaagctgtagtgagcygcaatcatgccactgcactccagcctggttgacagcaagaccctataaaaaaaaaaaaatcattttacatatgccggaattattgcccctaaataccatat

SEQ ID NO: 370103 - DNA, 613 bp, Homo sapiens
ggttgttcacttggtcaaacagctaatttatcaaactactgtttactaatccaaaattccctcaagcgtcatgccttgctgtgtccatcaaaccaaaaatattacttcatgaactttacccaattcaagttaaatgtgtgcatggaaagacctgtcttaaagcactctgtcccagagcccaaactctagcaaatttctacccctgacctctgctttctgaaacactgttaagaccctgtcaaggtgatgtcctcccttactgcagtaggttcaataaattttgctatttgaccgcatgttctcactcataggtgggaattgaacaatgagaacacttggacacaggaaggggaacgtcacacacaggggcctgtcgtggggtggagggagcgggggagggaaaggattaggggatatacctaatgtaaatgacgagttaatgggtgcagcacaccaacatggcacatgtatacatatgtaataaacctgcatgttgtgcccatataccctagaacttaaagtataataaaaaaataaataaataaaaataaattttrctgtttgaatagcaagttattttagctgtcttttgaggagttgatagtcaatcctt

SEQ ID NO: 370104 - DNA, 698 bp, Homo sapiens
tagactcaaagtcagaatgttgtcactcaaccaagatttatataatattcaccatgcatgattcctcttaatcaaaaattggtgaactaaagagaccagctatctaccactgtattagtccattcactcactgctataaagaactacctgagactgggtaatttgtaaagaaaagaggtataattggctgacagttccacaggctgtacaggaagcatggctggggaggcctcaggaaacttaaaatcatgatggaaggcaaaggggaagcaggacgtcttcacatgtgcagagcagaggaagagagtgggcaggggctgagggggagataggaggtgccacacactttgaaacaaccagatctcatgagaactctatcttgagacagtactaggggaatggtgcgaaatcattagaaaccactcccatgatccaatcacctgccatcaggcccctcctccaacatcaggattacaatttgacatgagattttgggtggggacagagagccaaaccatattaaccacycaaccatccactgcacatggtggtatgtgcataggataaacattatagacattcttagtataaaagattaatggaaggcacatagctatccctggatcataataattcaaaaattcaggaggtacatattgccagtttctaggttatatttctctcctagtttatgaaaa

SEQ ID NO: 370105 - DNA, 616 bp, Homo sapiens
cagaagaagtcagatattaaaagcatgagaagaactaaatgcatcactgctggcttgaagatgaagggggcaacatgtgggctgcactttagtgatacagcttaaagtgattgctgtatcactttagcaaggaaatagagacctgagtcattcagtcacaaagaactggatactcccaataatctgaatgaatttggaagtagatttcttcccagagactccagataagaaatcagcctggccaaaaccttaattccagccatgtgatatcctgagtagagaatctagccatgctggactcttgacctacagaacaatgagttgtaaatgagtatcattttatgctgttacatttgttgtaatttgttacagagaatagaaaatgaatggaatagcgaagtccaaattttgaagaagrctcccaaaaaagttcaccagtattcattctcaatttgttgttttcaacacttacatgaacagtggtgtttacattttttgtatttccacaggttttgggggaacagatggtgtttggttacatgagtaagttctttactggtgatttgtgagattttggtgcactcatcatctgagcagtatacactgtacccaattt

SEQ ID NO: 370106 - DNA, 621 bp, Homo sapiens
taggaaaaaaccaggtttttcaacatgaagtgactagagataagtattttctaatatcaggatattattaattgtggcttttaaaaccatacaattaatgacaattttccaaatagaacatagaaaagggaagtgaataaattgattcaaaataaggtgtctttcaagaaattttcctgaccagataaaaagaaagactttgtatcagttttctgttgatgtgtaaaaagaatccctaaacctagtggcttamagcaacaattttaatttgctcacagttctgagggctggcacttggaactgggcttagataggatggctgctttctgcttcatggagtactgactaggcttattcatatgtctgggacatcaactaggaagtctgagatattttaggcagctggacttctctttatacaaaatctctcattctcaagagagtcaagcttgttcacatgatggtatcattgcaggagcatgttctatgtcatcttgaggtctatgctcaaaacttgttcatttctgccatattcgagcagtcaaagcaggacacaaggtcagccaatgttcaagcagtgaaggggcagatttctatcttgatgggaggatgagagaagct

SEQ ID NO: 370107 - DNA, 531 bp, Homo sapiens
aatcttgtaaccttgggaaatttacttaatcttcagttttcttgtgaaattgaggtaataatgcttctttattctaagtttcttgccaatgataattgatatactttttaaagattatattttattgcataccttatggtctggggtagggcagacggacgggatgttgagcctgcattccaggcttactctggttttggggttgtttttctttttctacattaaacaactgatacttgtgatgtcacacacatacagaatctatgtcacttaccctctgaaacaaacacattaaattattctatggttcatcactaggatttccattgttgccttcaaagaaatagaaaacacrattctttctttaatatggagttttagccacagataaacttaatgtcaagtgatagttgattgtatatatatatatatacacacacacacacacacacacacacacacacacacacacacacaggtttctagagtagatatgttgtgttgttatttatgttaacatattaatgtgct

SEQ ID NO: 370108 - DNA, 605 bp, Homo sapiens
attctaagtttcttgccaatgataattgatatactttttaaagattatattttattgcataccttatggtctggggtagggcagacggacgggatgttgagcctgcattccaggcttactctggttttggggttgtttttctttttctacattaaacaactgatacttgtgatgtcacacacatacagaatctatgtcacttaccctctgaaacaaacacattaaattattctatggttcatcactaggatttccattgttgccttcaaagaaatagaaaacacgattctttctttaatatggagttttagccacagataaacttaatgtcaagtgatagttgattgtatatatatatatatayacacacacacacacacacacacacacacacacacacacacacaggtttctagagtagatatgttgtgttgttatttatgttaacatattaatgtgctcattcttccaggtccagaaaaaactcatttgtgatccctcctccttgtacctctctggaatttgcaatctcttattcctgcaaatctaaagtatggcacttattgcatagtattttacttatttgtctgacttcaaaggtagtt

SEQ ID NO: 370109 - DNA, 618 bp, Homo sapiens
tatacgtatattttacccagattcattgtgcattatatttcacaatttgaaaagggataacaagtactaagtttggtggaataaggaaagtcagtgggtcagggttggggagaatgttgttttataaaggctggtcacgaaagttaatttggagcagggaaagagacacaaccctttgcagttcaggtttattggtttggagttattgatatctaagaatgaaaggaattctctagcccttgtgatagagctcaggtaagatgaacaagatgtataggagtctccattagtgcggttcttcatagggcttggaggtgatttcaagcatatttgatgctatgatctttcatgtttttaactrtaacatttacattatatattataacctaatacatatatcattttttcatggggcactgtactttgaaatgtcttccttgagatttcctgattcccctgttaactgggactgggtcccagcagtaccatgatccccattgctcaccttttagatgttctgtgactctctgcacccatgtgggattgatcatatgccccaaattactccaggactcatgcctctggggacgtcctgggatgccatgagtgggcccagat

SEQ ID NO: 370110 - DNA, 618 bp, Homo sapiens
tatacgtatattttacccagattcattgtgcattatatttcacaatttgaaaagggataacaagtactaagtttggtggaataaggaaagtcagtgggtcagggttggggagaatgttgttttataaaggctggtcacgaaagttaatttggagcagggaaagagacacaaccctttgcagttcaggtttattggtttggagttattgatatctaagaatgaaaggaattctctagcccttgtgatagagctcaggtaagatgaacaagatgtataggagtctccattagtgcggttcttcatagggcttggaggtgatttcaagcatatttgatgctatgatctttcatgtttttaactgtaacatttacattatatatyataacctaatacatatatcattttttcatggggcactgtactttgaaatgtcttccttgagatttcctgattcccctgttaactgggactgggtcccagcagtaccatgatccccattgctcaccttttagatgttctgtgactctctgcacccatgtgggattgatcatatgccccaaattactccaggactcatgcctctggggacgtcctgggatgccatgagtgggcccagat

SEQ ID NO: 370111 - DNA, 618 bp, Homo sapiens
tatacgtatattttacccagattcattgtgcattatatttcacaatttgaaaagggataacaagtactaagtttggtggaataaggaaagtcagtgggtcagggttggggagaatgttgttttataaaggctggtcacgaaagttaatttggagcagggaaagagacacaaccctttgcagttcaggtttattggtttggagttattgatatctaagaatgaaaggaattctctagcccttgtgatagagctcaggtaagatgaacaagatgtataggagtctccattagtgcggttcttcatagggcttggaggtgatttcaagcatatttgatgctatgatctttcatgtttttaactgtaacatttacattatatattataacctaatacatatatcattttttcatggggcactgtactttgaaatgtcttccttgagatttcctgattcccctgttaactgggactgggtcccagcagtaccatgatccccattgctcaccttttagrtgttctgtgactctctgcacccatgtgggattgatcatatgccccaaattactccaggactcatgcctctggggacgtcctgggatgccatgagtgggcccagat

SEQ ID NO: 370112 - DNA, 618 bp, Homo sapiens
tatacgtatattttacccagattcattgtgcattatatttcacaatttgaaaagggataacaagtactaagtttggtggaataaggaaagtcagtgggtcagggttggggagaatgttgttttataaaggctggtcacgaaagttaatttggagcagggaaagagacacaaccctttgcagttcaggtttattggtttggagttattgatatctaagaatgaaaggaattctctagcccttgtgatagagctcaggtaagatgaacaagatgtataggagtctccattagtgcggttcttcatagggcttggaggtgatttcaagcatatttgatgctatgatctttcatgtttttaactgtaacatttacattatatattataacctaatacatatatcattttttcatggggcactgtactttgaaatgtcttccttgagatttcctgattcccctgttaactgggactgggtcccagcagtaccatgatccccattgctcaccttttagatgttctgtgactctctrcacccatgtgggattgatcatatgccccaaattactccaggactcatgcctctggggacgtcctgggatgccatgagtgggcccagat

SEQ ID NO: 370113 - DNA, 467 bp, Homo sapiens
  misc_feature (1)...(467): n = A,T,C or G
nnnnnnnnnnnnnnnnnnnnncatccccaaccaatactagcccacgctttgcctttaagaacttgttaacattttagctgatgttttgttaaccccttgtacagtggccatatccttcttctgttccgtgcaaaagctgrgatcctttgtgtccccatctttccttggagcctttttttgttctttcatttccttacaacttcacctctctgatgggctttaaaaagttgatttttgtgtgtggattatccatattattctcattgctgttgtgggagcaacatttttggcaactttttacattctaagcaaaagtagaagtctcaacaaaacattttttaaagtaactatgttattgaaaacaagactagaaaattattaacgcaaacaactattgaatgtttcaaattaaaaaaattaatgagaatggaaaaaagtaaaatatgattgtgaagaagggcatctta

SEQ ID NO: 370114 - DNA, 459 bp, Homo sapiens
ttttatcaaaacaacagagaataatgaatgctggcaagaatatggagaaaggcgaacccttgtatgctgctggtgggaacataaactagtacagccactatgaaaaatagtatgaaagtacctcaaaaaattaaaaataaaactaccatatgatccagaaatccctctactgtgtatctatccaaaagaaggcaaatcaatatatcaaagagatagctgcrgtcctatgtttattgcagcactcttcataatacccaaaatatagaatcaacctaggtacccagtaatggatgaatggataagaaaaggtggtatgtaggcacactgggatgttatttgccgcaaaaagaataaaattctattttttgtagcagcatggacagaactgaaggtcactgtgttaactgaaataagccaagcagagaaagacaaatatcacatgttcttacttacaagtgg

SEQ ID NO: 370115 - DNA, 566 bp, Homo sapiens
  misc_feature (1)...(566): n = A,T,C or G
atcccttactgttaaaccagtgacttgcttttaaatggacttggctgccttccaacctttctcaaggtggccctaaaaacagcagtgaaaggaaatcaccctattggacaacaattcggatggttaacctggccatcctctttgtgtggaaagagaagtgtccattgtttagaatgtacatagactcatgaacattggtgagtggcttggctgagaggtaaaggacttggaaagaataagatcggagaacaaagaagtctaaaggttaagcatatggagaatagtcataagctgcaaacatctttgcaaactaatatgatctttaagtttataacgattgtcataggctaggtttagagatggacctttttttcttttttttttttttaccatgacttgttttctgctgttttggtgactattcrttcttccttctcctctatttttactgggtctttgtttctgtcttgaaatatatttattaatattaggcctactgggctgngttgttttttatttatttccctcccttttatgtgtgtatacatatttactatacactatat

SEQ ID NO: 370116 - DNA, 552 bp, Homo sapiens
atcagtttttctcagaatttactgggtatttttttgtaatgaaaaatccttgtcttttatcaactctggaaaattgtcaactctgatttctttaaagatttcctgaagtatattctgaatacaatatttccctctggaactattagaaatacattgcatcttctaaatttttattccttggacctcagtcttcttatatgttctttctttaatatttttcattttgtataatctacttccatttcactaatactcttcaacatatcatktttttttttcttttctgagacggagtctcgctctgtcacccaggctggagtgcagtggtacgatcttggctcactgcaagctctgcctcccgggatcacgccattctcctgcctcagcctcccgagtagctgggactacaggtgcccgccaccacgcccagctaattttttgtatttttagtagagatgaggtttcaccttgttagccaggatggtctcaatctcctgaccctgtgatccaccaacatgtcatttttaattaggatatttttaatttatagaa

SEQ ID NO: 370117 - DNA, 557 bp, Homo sapiens
tctttaccccagatgcagctgtaacctaagctcaaatcctaattgccctggccttcatttctctcttggtttgaggcacttgcagagtttctcttctttcttcctatctttctttcttttctttctttatttccagctcaggtaacatttaatatacattttgttaaaatttttgcaacatttctaagtaccggagggtttaattctggagggttgttagtttttattatctatcataaacctggaaccacaagttctgcaatattttcactttaaaactggaaatcaatgccatttttctcatcactaaggcctgtttcagaaatgtgagtttatgcatgtgatgattcaaataggcttttcctagaactatgcacttgtactgcttgggggcagagagcattctgttaacttgacactcttgcagagaggttacgtaattcacccaaattaagcactagctataggaaagacacagggctagcatttaaggccctgcccctcaacaccaggccctttgcatacacaamattattgttactttctttacaaatacg

SEQ ID NO: 370118 - DNA, 555 bp, Homo sapiens
ttttgtctcatcattttatagagcttctctcctgctgcagaacatgagtaaatccaagaattaattaaatagtatgctattcatttacccatttctttatacaacacaaaatgccttcaagtagatgaatttgctttatcacagttataatcctgaggcacatagaacaggttttaaaaactgatttttagtgtcttttaaagattaraaaataattgtaaccaggggtttatgcagcttaccaaagctctccctaataatagatggaactgactttgaagaccatattttctgactgtttaccctctgtgcctcatattacattagtcactgcataggcccattataaagtgagtgccttaaaattctgaatattgagataatcagtacagattctcaataccctaaaagctattcctaattaggcttcaaaaaatgaacttggcatgatataacagggaagagcaaaggatttataatcagacaaagctagatttggactctgactctgttaattaatcacttagttaccttctgtcctagatatttatgcaa

SEQ ID NO: 370119 - DNA, 542 bp, Homo sapiens
atttttcttcctagttaaacacaagaccttccttttagacagaaaatacttatttttgagcacataaaactgagcttgtttcttatggttttaatatattctggtctctctgtttgtcatttctctgtgtaatggttataagaaaacatccatctcttttggtctggttacattaaggcatatgggttcattctctaatatttcagagccaatgatgactcaraaaataaaacctactcatactgcggtagatagtcaagaaacaggtggttagcaagataagtaaccaaatttgagattgtgtggttctaaaacaattttttttctggttagagcaaaattacaggacataaaacgtctgggagataaatgaaataatacaagcctcacattcaggggtcccaatgttacaactatacagcaacaatagaatgcagagataaatacaagacagactttccaagattatgaaaacagaataagacaataaacagaaatctcaaatattgttaatattctatgactgtaatcaaccagaagaa

SEQ ID NO: 370120 - DNA, 563 bp, Homo sapiens
aacctggtgaggcttattatctttgttctttaatccagaaatgacaattgtatgtgagactatgttttctttcaaagtatttcttttgcccttgaatatctataatttctaattttcttaattatctctaaagccttgaaggttacatgagggttctaatagtctaaaaaataactgaaagtaaaggaaaccctgggttatgattggagtttatcccaatgactatcaaacacgtgcttatacatcattagaggctgcagctctgagtttatgtctttgatgatgaatatatgtgctgtgcatcttactaacactgctctaacttttggattaattcccaaaaatcttttgggccacagggacgtaaaacagaagcwatactttagcccatcatccataattaattacctgtcttttggaggaagttctttcaactctctgggatccttttttttttttcatctgaaaaataggtatacatatttgttgctgtgaaaatccaaattgccttggcaaagataatgcattatatggatacagatacactgtctttcaaacaatag

SEQ ID NO: 370121 - DNA, 563 bp, Homo sapiens
aacctggtgaggcttattatctttgttctttaatccagaaatgacaattgtatgtgagactatgttttctttcaaagtatttcttttgcccttgaatatctataatttctaattttcttaattatctctaaagccttgaaggttacatgagggttctaatagtctaaaaaataactgaaagtaaaggaaaccctgggttatgattggagtttatcccaatgactatcaaacacgtgcttatacatcattagaggctgcagctctgagtttatgtctttgatgatgaatatatgtgctgtgcatcttactaacactgctctaacttttggattaattcccaaaaatcttttgggccacagggacgtaaaacagaagcaatactttagcccatcatccataattaattasctgtcttttggaggaagttctttcaactctctgggatccttttttttttttcatctgaaaaataggtatacatatttgttgctgtgaaaatccaaattgccttggcaaagataatgcattatatggatacagatacactgtctttcaaacaatag

SEQ ID NO: 370122 - DNA, 503 bp, Homo sapiens
cagacttatccttcgcctacctttcacttccaagctatttactgtcctttgcccacacaaaaaatttgaatcttaaattttgaagtttatgtcattgtatataacaagcactacccccttccttgtttatgtcattttctaacttcccaggtatttttcttattttaaaaagatattaagacgttcatgatagcggtctccaccttttacctgatcacctttcttgatgactcttgagatacacttggatacttcagccatgacttggatctctctttttcttaactttctcattaacaattatattttcctccagcccagttcagcttccaactagtatcatgattatcattctcaatatttgyatcatatccaaaatatcaattttaagcattccctctgagatccatatctcctatcattctaacttactgattctagaaactccactcaaaaaaaaacttcgtcttttcctgtattacccagtcaatgattctaatttt

SEQ ID NO: 370123 - DNA, 479 bp, Homo sapiens
ctctcttacttttattatctcttaaacttttttaagatatatatttttaaaataactcatttatggagctattttaaacctgttctttagtccttgtatgctgcaaatgcaattcccctatatatttctcctctttattcagggctctrttcagagagcttttctaaccttgtgtaacagtgcagatccaggcagaaacatgactgcataagttaagtggaagaagttcattagagggaactaatgactcaggtgagggaagaagtgagaagccaaattgaggatggtgaaaaaatacaaagagtggaagaaaattactaccatccacaggggctgggaggacatagggtataggtgaggctactacaatctataaaccatggctaagtggcaggagatagagtcacaccaaaacatctccaaaaaaaatgataaactccccatggaccaaaacacaatctctataagagcggagactt

SEQ ID NO: 370124 - DNA, 448 bp, Homo sapiens
actatgataagctaggttgtgttaaattctagaatcaagtatgttagaataggagaaaatctgagtatacccacagaattgtaataagtctattcctttttctgtcctctcagttttggcaagagaacagacctgactatgtcaacatccagctgtacctcagtcaaacagatgggatacaggtatgtggttgatgttatcgtaaattaaacaagcctsttgataatagatttactgtaggagctgtggtggaagaaaattcctgcaggtggttcgaacagaagtttcctagaggaaagcctcctttggaatatgtccaggaaagtcatagcttgtccttgaagtcaaccacattatgccttccatttgtccttctcacagggagcttttgagtctgcccctcccctcttcactatcgcctcaagttcttctaaaattcagactacac

SEQ ID NO: 370125 - DNA, 448 bp, Homo sapiens
actatgataagctaggttgtgttaaattctagaatcaagtatgttagaataggagaaaatctgagtatacccacagaattgtaataagtctattcctttttctgtcctctcagttttggcaagagaacagacctgactatgtcaacatccagctgtacctcagtcaaacagatgggatacaggtatgtggttgatgttatcgtaaattaaacaagcctcttgataatagatttactgtaggagctgtggtggaagaaaattcctkcaggtggttcgaacagaagtttcctagaggaaagcctcctttggaatatgtccaggaaagtcatagcttgtccttgaagtcaaccacattatgccttccatttgtccttctcacagggagcttttgagtctgcccctcccctcttcactatcgcctcaagttcttctaaaattcagactacac

SEQ ID NO: 370126 - DNA, 448 bp, Homo sapiens
actatgataagctaggttgtgttaaattctagaatcaagtatgttagaataggagaaaatctgagtatacccacagaattgtaataagtctattcctttttctgtcctctcagttttggcaagagaacagacctgactatgtcaacatccagctgtacctcagtcaaacagatgggatacaggtatgtggttgatgttatcgtaaattaaacaagcctcttgataatagatttactgtaggagctgtggtggaagaaaattcctgcaggtggttcgaacagaagtttcctagaggaaagcctcctttggaatatgtccagraaagtcatagcttgtccttgaagtcaaccacattatgccttccatttgtccttctcacagggagcttttgagtctgcccctcccctcttcactatcgcctcaagttcttctaaaattcagactacac

SEQ ID NO: 370127 - DNA, 448 bp, Homo sapiens
actatgataagctaggttgtgttaaattctagaatcaagtatgttagaataggagaaaatctgagtatacccacagaattgtaataagtctattcctttttctgtcctctcagttttggcaagagaacagacctgactatgtcaacatccagctgtacctcagtcaaacagatgggatacaggtatgtggttgatgttatcgtaaattaaacaagcctcttgataatagatttactgtaggagctgtggtggaagaaaattcctgcaggtggttcgaacagaagtttcctagaggaaagcctcctttggaatatgtccaggaaagtcatagcttgtccttgaagtcaaccayattatgccttccatttgtccttctcacagggagcttttgagtctgcccctcccctcttcactatcgcctcaagttcttctaaaattcagactacac

SEQ ID NO: 370128 - DNA, 591 bp, Homo sapiens
ttttgttgctttttttaaattcagaaattgaattatatgatggtattatatgatcatggaaagtgaaggagctttgggagtcaacctgccttcatttttattttacaaatgaagaagctaggacctcaaaatataatgatttatcaaaagccatggttaatgagccagaatgcagatatgaacacaagtctcctgactgcaagttcattgtgctttacagcagggcatagtcagcttgtcacagataaagagtggcaatcttattttaccatgttccccttagatgggaggtagggaggtgctgcaagaaattcccatgtttactatgaatgctgtagcagaatgttaactgtaacactaaaagaattaataactaattattttgaratagagatattctaaatattacattgtaaaccatttagtatttaataaactattagaaaattatttattatatctaacccaaacttggtttcctattgtttgtaattaaaatgtatatcctgttttgagctgtgaagtttattcatgatgcaaagagagaaagaaaatttgaactttgtttggctttttgagtagagaattact

SEQ ID NO: 370129 - DNA, 465 bp, Homo sapiens
aatatattcatgtagcatgtgatgctgtttgatagcattttgccyacagtagaacttcttgcaaatatggagtcaatcctctcaaaccctactggtactttattagataagtttatagaatattctaagtactttgttgtcagttcaacagtgttgacagcatcttcaccagaaataagtttcatctcaagaaactattttctttgctcatccataagatgcaacccctcattcgttcaaattttattatgggattgaataatttgtttccatcttcagggtctacttgtactccagttctggtgcaatttcccccacatctgcagtaactttctccactgaagtcttgaaccccctcaaagtcatccatgtggtttggattcaccttcttccacactctatgaatgttgatattttggccacctcccatgaaaattaatgttcttaattgtatctaaatagtta

SEQ ID NO: 370130 - DNA, 595 bp, Homo sapiens
atgctgtttgatagcattttgcccacagtagaacttcttgcaaatatggagtcaatcctctcaaaccctactggtactttattagataagtttatagaatattctaagtactttgttgtcagttcaacagtgttgacagcatcttcaccagaaataagtttcatctcaagaaactattttctttgctcatccataagatgcaacccctcattcgttcaaattttattatgggattgaataatttgtttccatcttcagggtctacttgtactccagttctggtgcaatttcccccacatctgcagtaactttctccactgaagtcttgaaccccctcaaagtcatccatgtggtttggattcaccttcttccacactctatgmatgttgatattttggccacctcccatgaaaattaatgttcttaattgtatctaaatagttaatcccttccaaaaggttttctattcattttgctcaaattcatcagaggaatcactgtatgtcggctatacccttatagcatgtatttcttaaataataacaattgaaagtcaaaattactccttaatccatgggctgctgaatggatgttg

SEQ ID NO: 370131 - DNA, 629 bp, Homo sapiens
atctccttgtgtatctccatcagagctcttgggtgaccttgtcaatgtgcagtaatattttgaatgaaatctttttttttttttgaaggagtgggtctcaacagtggacttgaaatattcagtaaatcatggtataaacagatgtgctgtcacctaaacattgttctatttacagagcacaggcagggtagatttagtgtttttgatggcctttggacttttggaatggcttcaactgaataagcactggcttcaacttaaactaaccagctgcattagctcctaacaagagagttagcccatcctttgaagctttaaagccaggcattgagttctttctagctaagaaagtcctagatggcatcttccaatagaaggcaatttgtctaccttgaaatttgtttgtttagtgtaatggctttcatytcttatcttaacaagatcttctggttaattttctgcagcttttccatcagaacttattgcttcacctggcacttttattttatgaagatgggctcttttcttaaaactcttgaacaactgccagattcaaactttccttcttcaacttcctcactgctctcaggactcataaaattgaagagagctggggccttgctctggat

SEQ ID NO: 370132 - DNA, 485 bp, Homo sapiens
cctctgagaaaaggaacacttaaggtgtttaatgctaattaatgcaggtgtctgttggataaacagcttacatttcaagatgaaggtcaagcagagcgtcttccaagagagaaaatctacacatcagactttggtagaagcatatgcatacttgcaactgcagaaacacccctgtcatcctgtgtaaacacacagagaacagggtacttactattattagtaacagagtggtagccaagaccccttgattccaatrttggttgtaccgttaactgtgacctttggattcaaattttattttgcctctgtaaaatgaggggtttggaagggaagaaaacaaattactgctttttcagaactaagccaatcatttatattgtctcattttatccttaactattgttacttgacatttcacttccttattttatttttgttctcataaatacattaaaatagatagtaccatcccttttctataaatg

SEQ ID NO: 370133 - DNA, 571 bp, Homo sapiens
tactattcagttaccatgtattactatgcattaccatgtattattattgagttaccatggtaataaaggacattcgcttratttaaacaaacttttcagtagggagatgtatgctccatatctttctagttggtatggatatactctaagtttgccctttaattcttctttttagaaggaatttgtttttctaagattaatatgcatacttctaaggaaaataaataccaaattttgacaaaccattaatttctttaaatccctagaaataatgtgcttctttccctttttaaataattttgtaattacattctaaattcttttcaagtagctataatggcattgaagttcttttgttgtcctggcattttttgtgtgtgcttaataaacagagctgccttggtgataataatttgttttgttcacagtatgtgacaaatgataggtactcaataaaagtttgttagatgagtgaaaaagtgaataaaacatgctttaactgatgaaattctgattatccaaaatattgattttattttcaattctaaattttctatcattatagattatt

SEQ ID NO: 370134 - DNA, 571 bp, Homo sapiens
tactattcagttaccatgtattactatgcattaccatgtattattattgagttaccatggtaataaaggacattcgcttaatttaaacaaacttttcagtagggagatgtatgctccatatctttctagttggtatggatatactctaagtttgccctttaattcttctttttagaaggaatttgtttttctaagattaatatgcatacttctaaggaaaataaatascaaattttgacaaaccattaatttctttaaatccctagaaataatgtgcttctttccctttttaaataattttgtaattacattctaaattcttttcaagtagctataatggcattgaagttcttttgttgtcctggcattttttgtgtgtgcttaataaacagagctgccttggtgataataatttgttttgttcacagtatgtgacaaatgataggtactcaataaaagtttgttagatgagtgaaaaagtgaataaaacatgctttaactgatgaaattctgattatccaaaatattgattttattttcaattctaaattttctatcattatagattatt

SEQ ID NO: 370135 - DNA, 571 bp, Homo sapiens
tactattcagttaccatgtattactatgcattaccatgtattattattgagttaccatggtaataaaggacattcgcttaatttaaacaaacttttcagtagggagatgtatgctccatatctttctagttggtatggatatactctaagtttgccctttaattcttctttttagaaggaatttgtttttctaagattaatatgcatacttctaaggaaaataaataccaaattttgacaaaccattaatttctttaaatccctagarataatgtgcttctttccctttttaaataattttgtaattacattctaaattcttttcaagtagctataatggcattgaagttcttttgttgtcctggcattttttgtgtgtgcttaataaacagagctgccttggtgataataatttgttttgttcacagtatgtgacaaatgataggtactcaataaaagtttgttagatgagtgaaaaagtgaataaaacatgctttaactgatgaaattctgattatccaaaatattgattttattttcaattctaaattttctatcattatagattatt

SEQ ID NO: 370136 - DNA, 575 bp, Homo sapiens
gtggtgatttttgagattttagtgcacccatcacccaagcaatgtacactgtacccaatatgtagttttttatccctcacccgacttctaacattcccgctccagagttcttaaarttcattatatctttcttatgtctttgagtcctcaaaggttagcttagctctcacttataagtgagaacacaggatatttagttttccattcctgagttacttcacttacaataatggcctccagctccatccaagttgctgcaaaagacattattttgttcctttttatggctgagtagtattccatgttgtatgtataccacattttctttatctacttgttagttgatgggtgcttaggttggttccatatctttattgttgtgaattgtgctgctgtaaacatgcatgtgcctgtgtctttttcatgtaatgacttcttttcctttgggtagatacctagtagtgagattgctggactgaatggttgttttactttaagttctttaaggaatctccatgtattgtacatagtcatttgcactaatttacattcccatcagcagtgtaaaagtgttc

SEQ ID NO: 370137 - DNA, 613 bp, Homo sapiens
gttccctttttaccacatccataccaacatctattgtttttagactttttaattgtggccattcttgcagtagtaaggtagcatctcatcgtgattttaatttgcatttccctgatgattagtgatgttggccattttttcatgtttgttagctgttgtatgtcttcttttgagaaatgyctgctcaagtcctttgtccactttttgatgggattatttgtttttttcttgttgatttgttttaattccttgtagattctggaaactagtcctttgtcagatgcaaagtttgagaatataagcaaatattttttaagcaactcaaagttaaaaggtggcttaaagatcactgaactcatctgactcagttgtgagttcagaaaaggaattaagaatagaggcagactaaggtcaagaactcaggctctctgacaaccagttgagtgttgtttcttttattttttctttttccaagagaatttcttttctgctttatttaggtataattgacaagtaaaattatgtattttcagggagtacatatctctggtatacatatgcattgtgaagtgattaccacactcaagctaattaacgtatttatcacctcaaa

SEQ ID NO: 370138 - DNA, 328 bp, Homo sapiens
gcaccttaattatgtatcagataatgttctgtatcttggtggcacaatactcatctactagaagaagaaagagggatagagagataaatacatataacaataaaacatagtgtgataaactctgtgaargtggaggcacaagttgtactgggagtgtacagtaggtccagcctattccaaattgggcaggaggagagaacaaaaaagtaatggagggatcaaggaagcctttccataggtatgactctagaggtaatgcatacctattcctgaaaatgtgcatactctatgccatgcagatagctatgcaacgtaagtatttccaagg

SEQ ID NO: 370139 - DNA, 328 bp, Homo sapiens
gcaccttaattatgtatcagataatgttctgtatcttggtggcacaatactcatctactagaagaagaaagagggatagagagataaatacatataacaataaaacatagtgtgataaactctgtgaaggtggaggcacaagttgtactgggartgtacagtaggtccagcctattccaaattgggcaggaggagagaacaaaaaagtaatggagggatcaaggaagcctttccataggtatgactctagaggtaatgcatacctattcctgaaaatgtgcatactctatgccatgcagatagctatgcaacgtaagtatttccaagg

SEQ ID NO: 370140 - DNA, 422 bp, Homo sapiens
gacatgccaaagtgattgcatattgcaggcagaaataggactactgcaaatagattagatgtgtgggaaactatatctgagaagacttccaagattattgcatgagaaataacctgggtacaggtgccatttattaagttgtggaagtttggatgagaaagtaatttttttcaataatttttaggggtacaagtagtttttgattacatggataaatygtataatggtgaagtctgggttttaagtgtacccctcacccaaatagtatacgttatacccaacaggtaacttttttatccctcaccctgttcccatccttccaccttctgagtttcaaatgtccattacaccactctgtatgcctttgcatagcatatggcttagctgtcatttattagtgagagcatatggtatttggtttg

SEQ ID NO: 370141 - DNA, 561 bp, Homo sapiens
ccccagctactgttactgttggctgctgattgctcatagctgagtccctcttcaagaactgtgctcacagaagggagtctctggcctgagtctcttgcctggggcagctcaaatgcaatgactagacaatgtgggaaaacaaatactgaagctcctggctttgatgtgggacagttctaaaagaccatcccaactgcagatagctgttggatcacctgagacttctggggaacctgaagactactggtgccmaaagtagtcttaggaagcattctctgaaataggattttgctgctggattatccaccagttaattggcaatgaaaactccatcactagtagtagttgaaatacggatagctcctagcatgacatagtgggcaattgttaaaaactttatcagtattaactagaatgggcttatagaagaattgaatgcacctgtaactaaagcataatttagggatttgggaagttcaaaggaagtggcttttgttgagtgctattgatacattgatgctgaaaaatgacaatgaaagtttaggggtgactaaaatgaat

SEQ ID NO: 370142 - DNA, 589 bp, Homo sapiens
ttctacaaaattcagactggtttagtcaacccctataattatgtgagacaaatttcttataaaaagtttatacatatgcttatatgtatgtttatatgtttgtatatatattcatatttctcctagctgcagagctccccatagggtrggctgaagcctctactacattgctttttctcttcctttcactccatacttctcttacgccattagagatattagttctgcaagcatttttccttttcttcttttattatttcctttatttgaatttttatttatttataatcatggaatagaagtgcaatttttgctacattgacatagttcattgtggtgaagtcagagccttcagtgcattcattactggagcaatgtgcattgtacccaccaagaaacctgccattgtccatcctcctcccactcctccaccccgtggattcctcattgtccatcattccaaactctgcgtccatatgtacacattatttagctcctacttatgagtgagaacaaattttacaaacactttctaaaaactacctgcatgcaaacatctgccttagagaacccaaactgaaaaaccttc

SEQ ID NO: 370143 - DNA, 589 bp, Homo sapiens
ttctacaaaattcagactggtttagtcaacccctataattatgtgagacaaatttcttataaaaagtttatacatatgcttatatgtatgtttatatgtttgtatatatattcatatttctcctagctgcagagctccccatagggtaggctgaagcctctactacattgctttttctcttcctttcactccrtacttctcttacgccattagagatattagttctgcaagcatttttccttttcttcttttattatttcctttatttgaatttttatttatttataatcatggaatagaagtgcaatttttgctacattgacatagttcattgtggtgaagtcagagccttcagtgcattcattactggagcaatgtgcattgtacccaccaagaaacctgccattgtccatcctcctcccactcctccaccccgtggattcctcattgtccatcattccaaactctgcgtccatatgtacacattatttagctcctacttatgagtgagaacaaattttacaaacactttctaaaaactacctgcatgcaaacatctgccttagagaacccaaactgaaaaaccttc

SEQ ID NO: 370144 - DNA, 589 bp, Homo sapiens
ttctacaaaattcagactggtttagtcaacccctataattatgtgagacaaatttcttataaaaagtttatacatatgcttatatgtatgtttatatgtttgtatatatattcatatttctcctagctgcagagctccccatagggtaggctgaagcctctactacattgctttttctcttcctttcactccatacttctcttacgccattagagatattagttctgcaagcatttttccttttcttcttttattatttcctttatttgaatttttatttatttataatcatggaatagaagtgcaatttttgctacattgacatagttcattgtggtgaagtcagagccttcagtgcattcattactggagcaatgtgcattgtacccaccaagaaacctgccattgtccatcctcctcccactcctcmaccccgtggattcctcattgtccatcattccaaactctgcgtccatatgtacacattatttagctcctacttatgagtgagaacaaattttacaaacactttctaaaaactacctgcatgcaaacatctgccttagagaacccaaactgaaaaaccttc

SEQ ID NO: 370145 - DNA, 589 bp, Homo sapiens
ttctacaaaattcagactggtttagtcaacccctataattatgtgagacaaatttcttataaaaagtttatacatatgcttatatgtatgtttatatgtttgtatatatattcatatttctcctagctgcagagctccccatagggtaggctgaagcctctactacattgctttttctcttcctttcactccatacttctcttacgccattagagatattagttctgcaagcatttttccttttcttcttttattatttcctttatttgaatttttatttatttataatcatggaatagaagtgcaatttttgctacattgacatagttcattgtggtgaagtcagagccttcagtgcattcattactggagcaatgtgcattgtacccaccaagaaacctgccattgtccatcctcctcccactcctccaccccgtggattcctcattgtccatcattccaaactctgcgtccatatgtacacattatttagctcctacttatgagtgagaacaaattttacaaacactttctaaaaacyacctgcatgcaaacatctgccttagagaacccaaactgaaaaaccttc

SEQ ID NO: 370146 - DNA, 453 bp, Homo sapiens
cgtccatatgtacacattatttagctcctacttatgagtgagaacaaattttacaaacactttctaaaaactacctgcatgcaaacatctgccttagagaacccaaactgaaaaaccttcaacatctagagatagaagagttgaaccttttggaaatgccaagaaagaaaaagcagacaggaagaaaatgcctacaggtgagttactgcttagaaaccataaggaaagagtgtttatgtagaagagagaatcaagttaaatgagtaccaaaaatgtcatctaatttgtcagtatagacacctttggtgaccatggtaaggaaartttccatagagaggcagaacagaaaacaaattgaagtgtgttaagtagtcagtaaaagacatagcagtaaagaccacaaatataatcagccttattaagaagcttggctatagaaagaaatagggcaaa

SEQ ID NO: 370147 - DNA, 453 bp, Homo sapiens
cgtccatatgtacacattatttagctcctacttatgagtgagaacaaattttacaaacactttctaaaaactacctgcatgcaaacatctgccttagagaacccaaactgaaaaaccttcaacatctagagatagaagagttgaaccttttggaaatgccaagaaagaaaaagcagacaggaagaaaatgcctacaggtgagttactgcttagaaaccataaggaaagagtgtttatgtagaagagagaatcaagttaaatgagtaccaaaaatgtcatctaatttgtcagtatagacacctttggtgaccatggtaaggaaagtktccatagagaggcagaacagaaaacaaattgaagtgtgttaagtagtcagtaaaagacatagcagtaaagaccacaaatataatcagccttattaagaagcttggctatagaaagaaatagggcaaa

SEQ ID NO: 370148 - DNA, 453 bp, Homo sapiens
cgtccatatgtacacattatttagctcctacttatgagtgagaacaaattttacaaacactttctaaaaactacctgcatgcaaacatctgccttagagaacccaaactgaaaaaccttcaacatctagagatagaagagttgaaccttttggaaatgccaagaaagaaaaagcagacaggaagaaaatgcctacaggtgagttactgcttagaaaccataaggaaagagtgtttatgtagaagagagaatcaagttaaatgagtaccaaaaatgtcatctaatttgtcagtatagacacctttggtgaccatggtaaggaaagtttccatagagaggcagaacagaaaacraattgaagtgtgttaagtagtcagtaaaagacatagcagtaaagaccacaaatataatcagccttattaagaagcttggctatagaaagaaatagggcaaa

SEQ ID NO: 370149 - DNA, 453 bp, Homo sapiens
cgtccatatgtacacattatttagctcctacttatgagtgagaacaaattttacaaacactttctaaaaactacctgcatgcaaacatctgccttagagaacccaaactgaaaaaccttcaacatctagagatagaagagttgaaccttttggaaatgccaagaaagaaaaagcagacaggaagaaaatgcctacaggtgagttactgcttagaaaccataaggaaagagtgtttatgtagaagagagaatcaagttaaatgagtaccaaaaatgtcatctaatttgtcagtatagacacctttggtgaccatggtaaggaaagtttccatagagaggcagaacagaaaacaaattgaagtgtgttaagtagtcagtaaaagacatagcagtaaagaccacaaatataatcagccttattaagaagyttggctatagaaagaaatagggcaaa

SEQ ID NO: 370150 - DNA, 541 bp, Homo sapiens
ttggatactaaaaatactttttttttttttttacaaaacacagaaagattaaaaaaagagtagcagctgcttatttctcttttttttccaacagaatgtggcttataatgtagcaatggaaaataatcagagcagaagcataaaatgaagcaatttgtaaaggtctcagtaaaaaacaaaaccatagaatataatgttgattataatttaatggaactgtcastttgaaatatcagtcatgtaatttctgtgccatattgagaaaaccatggagttaaagtgatgatggtttcatcatagatgttgcttttatacaaatagacacctcaagcctctagagaaacaaaatgatgttctatattgaggtgcggtgatggagggaattgcctgtgacaaaggaaaaaaatgactttatatggctccctctcagtaacaatgacaatttcttaggtggacttttattcaaaatgtgttgcaaaaatgattgaaacataccaccctggactaaaatcttgccttcaaatcattcctagataagtga

SEQ ID NO: 370151 - DNA, 622 bp, Homo sapiens
ccagacccagagaggtttctaggagcctggattgagtaggtctgcctttaatataccaccaaggracagagaaagtatggtattcaaagatgacactggaaacaaaagtagtcaaactgagatactatttgaaaatcctaagcagacaagcacaactaggtataaggaaactgaagagactgggaacacctggacaaagtaaattaatttggttggaggctgaaagaaagaatggtgaaaacccctaaaataatgtggaagagtaatagggactttttatagagcatggttaactttgctttacagtggggagagttggtaagaaccctgagccaatttaaataaagataatatagactcactgcttaaattttctctatagattccaaatcaaattagccacccaatccagtatgtgaagacttccagtggtaaccacttattattgtccaaaggtgtccattttgattttgtaactctgagtattgaacaatgtttccccttattgaactaaaatgggcccactataacttcttcccactgatcctagtcttttatgctatgcatagccataatacaaatgcaatatcaattttactttttttggaaatcaatagggccc

SEQ ID NO: 370152 - DNA, 599 bp, Homo sapiens
atcaatagggccccaaaatttaagtagtaggattatctgaacattctaatttgaaatcttaataggcgaggaaaatggaaatgagttattttactagaactacagaaaggctaatattcagataattgttcaaacttcaaatgtttgattgcattttaaactttctctaataagatactttttaggaggtgaaaagatgttaatatagttatcatcattaaaatatttaatggacacatcttgagacaggcacttagctggatgtgttatagacgctgggcccttgttctcagtgaccttaaaaaatatcgtcagagctatgacaggaaagagctaaaggttcttttctatttgaagtccataatgtattttggagcagaaatgtaaaataaaggggaatatcatcctttctgaagaraataaaaatgtgtttctgaagcctaaaggagtcagttaatgtagatttctcactgttttattaaaataaagaaggggccaataaaacatatatagatctttaaataatcagaaggcaaaaatcaaaattatttcaattttttaaaataagagcactttaattcacatacaaataacagttc

SEQ ID NO: 370153 - DNA, 462 bp, Homo sapiens
taaaagggctgagtgaaaacagcaagacaaagacaggtgtgttctacctgagttggaagaaggctayactttgtattaggttacaattttgcaaatggtctttacagaaaaataccagcagatattctctgggaacctggacattactttgagttagagtgaggtcaggctttttggccctactctattgcctaagccttttataaatggctctgatacaagctgtggtaatcctctttctccatgaggagtggctgcttttcttcaggaagctgctttctcttgtgacgacacagcaagctcacaagccctgccagcagggcagtgaggacggcccctaccatcgccgccccaaggagccatgaccagatccgactcgcttgttccaaataggacttaatgtagtcttgaaaagagtctgggtctgaaataaaaagacatcccattgtttttattgttacc

SEQ ID NO: 370154 - DNA, 462 bp, Homo sapiens
taaaagggctgagtgaaaacagcaagacaaagacaggtgtgttctacctgagttggaagaaggctacactttgtattaggttacaattttgcaaatggtctttacagaaaaataycagcagatattctctgggaacctggacattactttgagttagagtgaggtcaggctttttggccctactctattgcctaagccttttataaatggctctgatacaagctgtggtaatcctctttctccatgaggagtggctgcttttcttcaggaagctgctttctcttgtgacgacacagcaagctcacaagccctgccagcagggcagtgaggacggcccctaccatcgccgccccaaggagccatgaccagatccgactcgcttgttccaaataggacttaatgtagtcttgaaaagagtctgggtctgaaataaaaagacatcccattgtttttattgttacc

SEQ ID NO: 370155 - DNA, 462 bp, Homo sapiens
taaaagggctgagtgaaaacagcaagacaaagacaggtgtgttctacctgagttggaagaaggctacactttgtattaggttacaattttgcaaatggtctttacagaaaaataccagcagatattctctgggaacctggacattactttgagttagagtgaggtcaggctttttggccctactctattgcctaagccttttataaatggctctgatacaagctgtggtaatcctctttctccatgaggagtggctgcttttcttcaggaagctgctttctcttgtgacgacacagcaagctcacaagccctgccagcagggcagtgaggacggcccctaccatsgccgccccaaggagccatgaccagatccgactcgcttgttccaaataggacttaatgtagtcttgaaaagagtctgggtctgaaataaaaagacatcccattgtttttattgttacc

SEQ ID NO: 370156 - DNA, 462 bp, Homo sapiens
taaaagggctgagtgaaaacagcaagacaaagacaggtgtgttctacctgagttggaagaaggctacactttgtattaggttacaattttgcaaatggtctttacagaaaaataccagcagatattctctgggaacctggacattactttgagttagagtgaggtcaggctttttggccctactctattgcctaagccttttataaatggctctgatacaagctgtggtaatcctctttctccatgaggagtggctgcttttcttcaggaagctgctttctcttgtgacgacacagcaagctcacaagccctgccagcagggcagtgaggacggcccctaccatcgccgccccaaggagccatgaccagatccgactygcttgttccaaataggacttaatgtagtcttgaaaagagtctgggtctgaaataaaaagacatcccattgtttttattgttacc

SEQ ID NO: 370157 - DNA, 550 bp, Homo sapiens
gcataaacattttgttataagacttgcagcactctttggcttgtaaaataacatgcttataatatttgataaaacaaaattaattaaaagatatgcttaacaacttatgtgtatgtggaaaaaagtataagaaaaagtacacaggagactaaaacagcacaagtgatcaatctaacaataagattacagttgatttttatttttggtttattctattaattttccaaaataaaaaaaaagtctttttactgatacaattagaaagcatgctactaaaagtacctgatgcaattaatagatgatataactatatatttaggaaatccataatcagataatgcatagtaaaaaaataaaatacggctagataagtattacataaattaaacttccctatacatcaacaattaacctattgtttctattaaaayggctccttgaaggccaatagtgtgctttcatcattgatataattctagaatctggtacagtgtctgaaacacatatgagagaatgaacatgtttactgaatgactgaatgtgttattgg

SEQ ID NO: 370158 - DNA, 568 bp, Homo sapiens
attttgttgcctttgtagtaaaaagtatccattgggacactagggaaggaacaaagaggtggagcatatgygtagaagacaatgtaggggttaaagggaaccctcttctctgtgcagtgatggagtgatgaagttttggattcagtatttgacacttactagctttgtagtttaaaattaatcactttatctttctgagtctcaatttacttacctgtaaaacagaataaaaatcacccttccatggggttttaaaaattagctgagtcaataatttatatgctgatgtctctcgcattaggatctgagggccagacaccgcttttgagtttcaggctgtgtatccaacttctcaagagacattcaccttgccgtcccatataacttcatttcactgtataacaaaaccataagctttcctccatgtctttctttgctcctcttgttattatatgagtgaattatactaccattcatcattttcacaggccagaaagcgtaaagccattcctaatctccttcatctgatatataaataattttccaagttctgtaaattttgccttca

SEQ ID NO: 370159 - DNA, 593 bp, Homo sapiens
ttctcctgcctcagcctcctgagcagctgggattacaggcactcgccaccatgaccagctaatatttgcattcttggtagagatggggtttcaccatgttggccaggctggtctcgaactcctgacctcgtgatccacctgcgtcagtctcccaaagtgctgggattacaggtgtgagccaccatgcttggccctctgatccttctttaaatcaaaaccattagaatttgaactgcaaaattaagggatacacctttttaatgcttttaatacacgctgccaattgccctctaaaaatatatttattaattacaaacccaactgtaggctaggagtgcctgtttcccaaaaactcagactaaattttgtaaattttcattattttttataagtaggatggggtattatttcatatgtctgttacttttaattcttctgtgacctttctgtttataatcattacccatttctatagagtatttttaattcatatgtgtaatttagatagacctacatttgcttaaactttactttcctcataagcttgtaatgycacctttattatctgcaggttcttatatattgcaaggtca

SEQ ID NO: 370160 - DNA, 391 bp, Homo sapiens
gtgtattttctcccttttcaattattcccttctattttcatgttaccaatttcatgtatatgggatgtatagatgcagacagatgggaacatgttttacaacatgctttacaacatgttcccatctgtctgcatgtatacataccatatatataaaatagttttgctatctttcttaartatacatttaaacatgtggtctctgttctcaattatctttcttagaaaatgaataaagtccaaatatccaacttcaatgagaatattaaataaattacagtactttcctactgtgaaatattatatggtcattaacatgaatgaggcacatacagtaatatggaaagatgtccatcacatgtagttgagtgaaaggagccagttacaaaaca

SEQ ID NO: 370161 - DNA, 507 bp, Homo sapiens
tggaatcagggcctcaggcctctgcccagggccctatcctactgtggctgagctggcatcccagaggcaggacaaagtcctctttattcatccctctcctctcttcaagcagaaggaagaggtctctcccagaactgtgagctgtgttgcctgagcttggtagagaggtggtgcaagcactctcttggctgctctggctagtgtctcactggggcktgtgccacccacatcactggctgtgagccctgcacagcaccaggacttgcagggaatttcagtcctttaaacctagactgcctttcaagtttatttacaatcccagagcactttagcccaaaatggcaaggcttgctgagacttaggttttgactgctagaatgggcaattcctttttggctagtactgggtctaaatgctccctctgtgggctctggctgagttcctcctggtgttgcttttcattgtgacagggcaacactgagttctcttctccctaacctccttatg

SEQ ID NO: 370162 - DNA, 507 bp, Homo sapiens
tggaatcagggcctcaggcctctgcccagggccctatcctactgtggctgagctggcatcccagaggcaggacaaagtcctctttattcatccctctcctctcttcaagcagaaggaagaggtctctcccagaactgtgagctgtgttgcctgagcttggtagagaggtggtgcaagcactctcttggctgctctggctagtgtctcactggggcgtgtgccmcccacatcactggctgtgagccctgcacagcaccaggacttgcagggaatttcagtcctttaaacctagactgcctttcaagtttatttacaatcccagagcactttagcccaaaatggcaaggcttgctgagacttaggttttgactgctagaatgggcaattcctttttggctagtactgggtctaaatgctccctctgtgggctctggctgagttcctcctggtgttgcttttcattgtgacagggcaacactgagttctcttctccctaacctccttatg

SEQ ID NO: 370163 - DNA, 521 bp, Homo sapiens
ttactggatgaagctgaattgcattaattagtttaagctaggaatgtgttgtccttctaggctcttccaattttcctcaagtatcaaggcattacagatgacaataaaggataatctctaaatttgtttaactataacttggactgtcattttgtaactatcatttatatttagtcttatctaggtaattagttattatggcaactagtatattgattcccaygccaaaggaattagcttttaaatcttaactattttgattatattgtagactggcacatttttgttcggggtctttatgcatttctgtggctaaaaaatctgaaagaaaagaaaacccatgcctcttattttatcttattttattttattttttgagacatggtctttctgtgttgctcaggctggtctcaaaagtctggcctcaagtaatcctcccagctcagcccctaagtgctgggtttacaggcatgatccagcatgctcagacccagctctcctgatttgttttatttcacttt

SEQ ID NO: 370164 - DNA, 292 bp, Homo sapiens
tattatgaccttgtgggcattgttaagccttgtcttttggggcagttgcgttccctttaacccttayctaccagtaacaagaagagtgcttcaaattagagctaacagacagacagagccctgagagccacagctataccttgaagttgtactatgactacatcttttgttttgttttctaatataaactcttttcctcacctatttcctggaacctaactttaaccttgaaccttgtttttccctgttggttaataacccagctacagactttaagacccaaagttcactg

SEQ ID NO: 370165 - DNA, 292 bp, Homo sapiens
tattatgaccttgtgggcattgttaagccttgtcttttggggcagttgcgttccctttaacccttatctaccagtaacargaagagtgcttcaaattagagctaacagacagacagagccctgagagccacagctataccttgaagttgtactatgactacatcttttgttttgttttctaatataaactcttttcctcacctatttcctggaacctaactttaaccttgaaccttgtttttccctgttggttaataacccagctacagactttaagacccaaagttcactg

SEQ ID NO: 370166 - DNA, 292 bp, Homo sapiens
tattatgaccttgtgggcattgttaagccttgtcttttggggcagttgcgttccctttaacccttatctaccagtaacaagaagagtgcttcaaattagrgctaacagacagacagagccctgagagccacagctataccttgaagttgtactatgactacatcttttgttttgttttctaatataaactcttttcctcacctatttcctggaacctaactttaaccttgaaccttgtttttccctgttggttaataacccagctacagactttaagacccaaagttcactg

SEQ ID NO: 370167 - DNA, 521 bp, Homo sapiens
ttactggatgaagctgaattgcattaattagtttaagctaggaatgtgttgtccttctaggctcttccaattttcctcaagtatcaaggcattacagatgacaataaaggataatctctaaatttgtttaactataacttggactgtcattttgtaactatcatttatatttagtcttatctaggtaattagttattatggcaactagtatattgattcccacgccaaaggaattagcttttaaatcttaactattttgattatattgtagactggcacatttttgttyggggtctttatgcatttctgtggctaaaaaatctgaaagaaaagaaaacccatgcctcttattttatcttattttattttattttttgagacatggtctttctgtgttgctcaggctggtctcaaaagtctggcctcaagtaatcctcccagctcagcccctaagtgctgggtttacaggcatgatccagcatgctcagacccagctctcctgatttgttttatttcacttt

SEQ ID NO: 370168 - DNA, 292 bp, Homo sapiens
tattatgaccttgtgggcattgttaagccttgtcttttggggcagttgcgttccctttaacccttatctaccagtaacaagaagagtgcttcaaattagagctaacagacagacagagccctgagagccacagctataccttgaagttgtactatgactacatcttttgttttgttttctaatataaactcttttcctyacctatttcctggaacctaactttaaccttgaaccttgtttttccctgttggttaataacccagctacagactttaagacccaaagttcactg

SEQ ID NO: 370169 - DNA, 521 bp, Homo sapiens
ttactggatgaagctgaattgcattaattagtttaagctaggaatgtgttgtccttctaggctcttccaattttcctcaagtatcaaggcattacagatgacaataaaggataatctctaaatttgtttaactataacttggactgtcattttgtaactatcatttatatttagtcttatctaggtaattagttattatggcaactagtatattgattcccacgccaaaggaattagcttttaaatcttaactattttgattatattgtagactggcacatttttgttcggggtctttatgcatytctgtggctaaaaaatctgaaagaaaagaaaacccatgcctcttattttatcttattttattttattttttgagacatggtctttctgtgttgctcaggctggtctcaaaagtctggcctcaagtaatcctcccagctcagcccctaagtgctgggtttacaggcatgatccagcatgctcagacccagctctcctgatttgttttatttcacttt

SEQ ID NO: 370170 - DNA, 521 bp, Homo sapiens
ttactggatgaagctgaattgcattaattagtttaagctaggaatgtgttgtccttctaggctcttccaattttcctcaagtatcaaggcattacagatgacaataaaggataatctctaaatttgtttaactataacttggactgtcattttgtaactatcatttatatttagtcttatctaggtaattagttattatggcaactagtatattgattcccacgccaaaggaattagcttttaaatcttaactattttgattatattgtagactggcacatttttgttcggggtctttatgcatttctgtggctaaaaawtctgaaagaaaagaaaacccatgcctcttattttatcttattttattttattttttgagacatggtctttctgtgttgctcaggctggtctcaaaagtctggcctcaagtaatcctcccagctcagcccctaagtgctgggtttacaggcatgatccagcatgctcagacccagctctcctgatttgttttatttcacttt

SEQ ID NO: 370171 - DNA, 618 bp, Homo sapiens
tataatttccatcaatcttgtcagcaaacatgtgtgtgagattttaccatgagaaaatataggtgtaccacagcaagaaacaatcacaatttccttggaaaacccatcaaatcaggatatccttcttgtgtagggaagtcaatgacatstatgaaaaatagtgaagcattttaaataatcaaaactccaacctttgccctcctaataaattcgtgcttaaagcttagctttaccttgaccaaaatagtatttctgtgccctgtcttttgtactttgaagttatactttcagtatgaaaagcttaatctccatcttaaaaagtgagctaaaactcaaactactgaatttgtaatagctgtatatattattgatttgattgtttctaactggcacagtatatgaaaataagtattagactttttaaaaacagggggatttattcaaatttcaccacttcacaatattagaagagcttagtagtatggacaatcgaaagctttcacattactatagaaaacacatatttgtgctttcaataaacctcagttcgaaatggtaattttacttatttttgttttctgactccagcaacacagatgtccaaaagtaagagcagtg

SEQ ID NO: 370172 - DNA, 546 bp, Homo sapiens
ttattatttgtgctgagaataagggaggtgaggtgaaaaatgacttcatcatagaccagatataatccacaaattgcgtctatttgtctttggtggttctttctaaagacctttgccataggtacattttcccctcctcttttgttagagagaaataagcaccatgatctcaaatattagactttaattaaatactctattctgactcagtctactccaaatgasagccactttggaaataaatatttctcctttcttctttatccctccaacatttccttttctgtagttgcaccctctaaggaagactgtgctataaagagatgggggaaggaggctctgtctacaaagcatttctcaagctaggtcctgaactctatatattaggtggtttttactctttcaacagatatgcattgattatgcaccacatactgtgctatgaattcatctttcaaagggctcatggagcttatggtctatgaggagaacagatattaattaaacaaataatttaatgactggtgttgaagagtgtacatggga

SEQ ID NO: 370173 - DNA, 576 bp, Homo sapiens
ttgcaaacacttctgtgagatagctctttgtaatttctagactggtctcattgttagaaatgtctttattatgttaaataaaaatgtattttcctaaaactttctgcctattgggatcccaaaggaaaaaaaaaaatcaaatctttcacccacacgacagattttcagtacctgagactactttcatattcccgtttctcattttcaagttgaaaagccacatgctcawgtcttgtacttgcttctcaaaaaaagcataatttcagaaatgaaagcaataatccaagttaaaaccaggtattttaagattatgaaagtaataataatatctgtattaccaagtattgaccactaatgatgtgccaagggttttatacacattattttataaactaatattgacaatatcaaagatgcccttccaggtaagtatcactagcactgttttgcagatgatgaaactgagccttagcaaggttgagagatacattcacagacacagaagtaacaagtgagggatctggaattgagttctaaaatccttgccctttgtctgaatagttactactattttat

SEQ ID NO: 370174 - DNA, 608 bp, Homo sapiens
gtaaggcagctaaatctctttgaactaaagtgtcagataatgacatgactatttaggtgttctctgcatgactgcttatatttttttccaagtcaacaaatatttcaagtcaacaacaaagaaggtctattaattgaaaagcatctgactagaactgaactctgaatagaatgatcttgtttctctcagtgacataatacattaaaaagggagaataaaattaacactattaagtgwtcctaatagagatgattaaaatagtaagacatcatttattttaatgagctactggtaataaaaattaactttgtgaaaaaactcagtaacaatagctaataataaaccatcaggagtttctgcttaatcttatgaattaaattatgttttcattgcatgttttctttcagatatagaattctatcaatttaccattcatgactgaatttaattcctactatattgggattctcaccagaaaagaactttccttattttttatttccaaaacagtagaaaaaaaaaacactgtgataatatcaacttatattgggcatattgtgattattcatatgttcatactccaccagtgtatacctatcagaggacga

SEQ ID NO: 370175 - DNA, 608 bp, Homo sapiens
gtaaggcagctaaatctctttgaactaaagtgtcagataatgacatgactatttaggtgttctctgcatgactgcttatatttttttccaagtcaacaaatatttcaagtcaacaacaaagaaggtctattaattgaaaagcatctgactagaactgaactctgaatagaatgatcttgtttctctcagtgacataatacattaaaaagggagaataaaattaacactattaagtgatcctaatagagatgattaaaatagtaagacatcatttattttaatgagctactggtaataaaaawtaactttgtgaaaaaactcagtaacaatagctaataataaaccatcaggagtttctgcttaatcttatgaattaaattatgttttcattgcatgttttctttcagatatagaattctatcaatttaccattcatgactgaatttaattcctactatattgggattctcaccagaaaagaactttccttattttttatttccaaaacagtagaaaaaaaaaacactgtgataatatcaacttatattgggcatattgtgattattcatatgttcatactccaccagtgtatacctatcagaggacga

SEQ ID NO: 370176 - DNA, 536 bp, Homo sapiens
taaaacccaaaaatacttatgtaaaacaataaattacacacgttaaaattgctagtgtatttcatttaactacaaatcttgctaaaacatcttctaagttaaaatatatataagaaaagccagttttaaatcacaaaggaagaaacaaaaactaatgcttttttgtgtcattttctccctagataatatatacttaccctaacaaattccagggagaaaaaaattcttaatgtgacattaattttccatgcccaacaattatgctcctacagaaataactctatttcattccctcccttaattctcagaagacatctggagtggtgagggtagctggggagagggatgagttgtggaagtgtaggtaaaaaaagtgctttatggycccatatttaggaaacctagaaaacatccaggtagtcaaaatgaaagaacaaaatttagtttacaataagaaaaatgaaaaatttcttcttgttttctggattcctactcacttaccctcgattccaaaatttgaataatggttttttcat

SEQ ID NO: 370177 - DNA, 347 bp, Homo sapiens
ggtacttattttccacatttcctttttctgagaactgcttgaggtcacggataatgcttctgtctttttatagaaatcacttccccacccagaccttagtaatgtagacagtagacataaaacatatcattacatacatgaatgggcaaatgataacctgtatcatagaatgtacaatacatctgccctggcatgtaacacttttaaagaaaactaaacattgacatccaacatattaaatgcaacttakgaaacaccaatgatgcatttttaaagacttaatcacagtacgatgatttaatgaaaaacaagaagagaatgttatattttatcgtttcgtatctcag

SEQ ID NO: 370178 - DNA, 572 bp, Homo sapiens
ggaattcaaatgcattcggtggggaagtgtgaagtaaaatctaaacgaacgctagacagtagtatcttccatctacgcttcaaaatactcagactttagggaaacttaacgttggtttttctcccagagaattgtagggagtgggtggaggggacactgttaggggaggtatattgggagtcagatccttttgtggagcgagggaccccgaagtgtcaccaagggctagccgaaaccaggggcccaagaggggacagggctaacaccccagccaaggccggagccaagcgcggggctgcagcgcggggagccctggagcccagtgcrggcggacgggtggggcaggagggcaaaggggcgaaggggcggggtggcgctgggtgggagcgcggcggcggggaggagggtctgggagcccgggtgcgatttgcaagcgctctgagcctgcgtccgccgagggggagggtttccccagcccggccggagttgcggctgtgcgctgcttctggctcacaacgccgacgactgtcaagagagttggggagtggaactgccggaagtgtctgcgcgcc

SEQ ID NO: 370179 - DNA, 666 bp, Homo sapiens
cacttgctccttctttcttctctacccagctttccttctctttcatgctcaacccatgaactctttgtgagtagtttattttaccaaagaagttgtttgatcaacttggagtagatcagctgaaaataaatggatttgatcgggagatgagtgtcaagaactctttaatttgaaaaaaggaggttggggtggtattcaccatggggagggaggaaagacgtcataattttgagatattcacttggcttccatttcaaataaagttagtccgtcattctcacaccagttgaaggttaaaaatcactccagattttttgctgcttaccaaatatagcctagatatgtcagctgaaggcaaaatagggtcagatcttcttacaggttctttccctctaggagattatgaaggagaaatctattttgtaactctctamgtaaggcaaaggacacatgataccgatctactaaaacaggcaattttaaatctgaaaggaaaatagctataagttctccaccctaatgtgtgggattatttcatcctttgtcatgatacaaatatctatgatattagagagggaagcttggtctgagatgttattctcttatcaaaatatggctcatcatcattgaatcataagttgataaaatgcgatctaaatagttgtt

SEQ ID NO: 370180 - DNA, 561 bp, Homo sapiens
ataagttgataaaatgcgatctaaatagttgttagtaatcagaatttggttttcctttggcttagtttttcctatctggttttggttttatggtcacctttccagctatgagcaaatgcttaaaaaaaaagattaagaaaataaaaacactattgtgaaatattgttcagtcttctaaatatacagattgttcaggaaattgagactgaagtttgatattatgctagagacatatgcattaaataccaaagcagcacacagacataaaatgaacacatttcattcctgaatgcctgttaaagaaaaaaaaaatgatgattccctcccacactgatactctgcaacagtatgagasagaaagatagagagagagagagacagaaacagagagaagtgagaaagagaaacagagagagacagagagagagagagagagagagacagaatgagaaagaatacacaaatttactggttagaatggcgaagagattggagccaagttcttgtgggtaaccatcaatccctttatttccaaaggatcatcatattctccttcatcag

SEQ ID NO: 370181 - DNA, 591 bp, Homo sapiens
aggataaagtacaaatatggcagacatctgcagcttgcccagtcagtgtaatcagcctcagatgttacagccggaatgttcttgctaccagctcatgagctactcttaaaaaatgaggagtctgagagccaggagcctataataacttgcccaaagtcgtgctgctcctaaatgacagtgctaagactagaatccaagtgttctcactcactggctctagtcctaaatgaggaggacaccttaatcccagaagaaasggttgttttcttcaactcaactgctgttaaagacctaaaccagattgggccaatgaggaactgcagagtagtacttgctcatcctaagcagttgacttatgccaaacagtaagatgtttcaaaggtcataagaaatcctttttgtttgatatgtcccatctattaaaattaaaattttatttttttctcacaagttttgaatgggacaactaagtaaaataaaatagtataacattgctaatcatttctacagcgtgagttggtttgtggaccactctgaggtctacagtcctttcatgctgatggggactctgtgctacactagaagcagcag

SEQ ID NO: 370182 - DNA, 591 bp, Homo sapiens
aggataaagtacaaatatggcagacatctgcagcttgcccagtcagtgtaatcagcctcagatgttacagccggaatgttcttgctaccagctcatgagctactcttaaaaaatgaggagtctgagagccaggagcctataataacttgcccaaagtcgtgctgctcctaaatgacagtgctaagactagaatccaagtgttctcactcactggctctagtcctaaatgaggaggacaccttaatcccagaagaaacggttgttttcttcaactcaactgctgttaaagacctaaaccagattgggccaatgaggaactgcagagtagtacttgctcatcctaagcagttgrcttatgccaaacagtaagatgtttcaaaggtcataagaaatcctttttgtttgatatgtcccatctattaaaattaaaattttatttttttctcacaagttttgaatgggacaactaagtaaaataaaatagtataacattgctaatcatttctacagcgtgagttggtttgtggaccactctgaggtctacagtcctttcatgctgatggggactctgtgctacactagaagcagcag

SEQ ID NO: 370183 - DNA, 560 bp, Homo sapiens
tctctgtcgcccaggctggggtgcagtggcgccatctcagttcactgcaatctacgcctcccaggttcgagtgattctcctgcctcagcctcccgagcagctgagattacagccatgtgccaccacacctggctgatttttgtatttttagtagagacggggtttcactacattagccaggttggtctcgaactcctgacctcaggtaatcaacccgcatcagactctcaaagtgctcggattacaggcgtgagccacygtgcctggccctcacccagacttcttaaattagaagctgcattttaacaagattcccaagggatttgtgtgaacactaaagtttaaggagcaccgtcttaggcactacatgaaagagccccatgaaagcagaatgctgtttggatcctgtcttgatgctctggcggattttgccccaggaagcatgcaaactccttggcacagctatttacattaatttgggactctagaaatgatagttttctgttcctttcttggaaaattattgattatagcttgtttaaacaaggcaatagttaaaa

SEQ ID NO: 370184 - DNA, 645 bp, Homo sapiens
gcttctcaactgcagacaatcagtaccattccacctatcctcaggcgaaacagagcactgtcagctctgtatgtggtgaggaaaggactgttctgtcttcaaggggcatgctgaattttaaaaccctgctggagtgtcctaaaaaagtggaagaacactaaagggaacggaacactagaaagaagagtcaggtcaggaaacaggatagttaaataaaatcctgggcttccactgtggatagcgaaggttacccacaatctaaagccctccaaaagctaaggcaagagccggttttacggaggggcacatgccacagttattaggccccatccttgtctagtacagtattacttgtctagtatagtagagtagtgcctactctgagagtaatggaacgcatagattgagcaggataatggtaagtttaacaatattatatgtatttataaatggccacaatgaactctagygggcggctggatctcagtttcagtgctaccgtgggaaaaggatttctgaaccatatcctacaaccaacataattatgagagtcaaaccaagtatggcagtggtgcagcaaacatttaccttttaaattttttttccccagctctgtcaggattctctctggccagtgagtgttgc

SEQ ID NO: 370185 - DNA, 552 bp, Homo sapiens
tgaaactgcataaaaaggaaagataaacttacagaaaaacagaacaccattaaaaggagaagcagatctgcctgcagttggaaaagaaattagaaaatggagagtcagcaatttcattaacttagtgaattaacttagagcttaaaaacttcagagcttaaaagttttttttaaaaagrcaagattttgagaggagtataaagtctaggactcactaaggatattagtgtgggaagaaccaaacaacagtaaccttagatcagaaaatctctgaatattttccagctggaaaaacttcccttgcaagagaacatttactggataaaataccagggaagaggcagagcattggtcaatgtagcaacagagataagaataagaatcatttccccaagaagatttcaaaaaaatatactgtattttgcagatattctaaattaagcataaagagagcaggaggctctatttcccttaaaataaagtacaagtttttattaaagtataaaagttcactaaaaaattaacttaaaattgccacttcagaaggaagat

SEQ ID NO: 370186 - DNA, 552 bp, Homo sapiens
tgaaactgcataaaaaggaaagataaacttacagaaaaacagaacaccattaaaaggagaagcagatctgcctgcagttggaaaagaaattagaaaatggagagtcagcaatttcattaacttagtgaattaacttagagcttaaaaacttcagagcttaaaagttttttttaaaaaggcaagattttgagaggagtataaagtctaggactcactaaggatattagtgtgggaagaaccaaacaacagtaaccttagatcagaaaatctctgaatattttccagctggaaaaacttcccttgcaagagaacatttactggataaaataccagggaagaggcagagcattggtcaatgtagcaacagagataagaataagaatcatttccccaagaagatttcaaaaaaatatactktattttgcagatattctaaattaagcataaagagagcaggaggctctatttcccttaaaataaagtacaagtttttattaaagtataaaagttcactaaaaaattaacttaaaattgccacttcagaaggaagat

SEQ ID NO: 370187 - DNA, 637 bp, Homo sapiens
cactggagcctctttgaagcttcatgctagagcaaagataggaggtggaaaaagaagtgggaaaaggggaaagataaggttgaagaaaaggtgattgattttattttttccaggcayggttccccagttatacatgaggaaaagaaaaaaaaatactttaatttccttgagcagaatcccccaatgatatggaaggattcttaatgagcttaagttaattaaagccacaccagaaattgactatgctttctaaatattctttgatatgatgttgtggattttcttttactttatagtgtatgtttcactgaaaagttccaaccttgtttccgccaaggtaaaaggaaaagatgattttctattcattcaagtgtcatgattttaagctgttcatgacaaacctgccaacagatccaaggtgctcagttaagaattccaggttaggtaaaaaacttggagacagttaaatacaagaacagattttgaggcaagaagcaagatagaaatggaatgaaaagaccattttttcctgagaataggattgggatgcccagaactcctttatatcaggtgctagtgtccaactgtctgtgttccattgtaaacaaagttacttttggagtaaatttatagcctt

SEQ ID NO: 370188 - DNA, 541 bp, Homo sapiens
accttaggagctccagatcactttcggttccactcataaaagcaccagttgctttgttatagtttaaatctaagtatctaacaagtcagcartttgtcacccaacattaaaatgaagataacttataagtaaaattaatttttacaacttgtgccaaagtccacgtggcaggggcggtggttgggaacaaacaaaccaaccaacccagatgaggctagtttattcctggggccatgatatcatcttcaaatataccttggcagatggtaatgttttagaaaactacacaaaaatgagattctaataagaaattttctctattcctttggattcataaaaataatttaagattctcatatataaaatcctaaaaataagaaatatttcatcatgtttgtgggcttaaagtctgtccctattttaatttttacattaacaccaaaatatattttaataatgctatttgatattggcatggtgttattccaataatatttctcactttggttaacctgtttccatttattaagtagttttaaac

SEQ ID NO: 370189 - DNA, 588 bp, Homo sapiens
tctgccataattgtaagtttcctgaggcctccccagccatacagaactgtgagtcaaacctctttactttataaattacccagtctcagttctttagagcagtgtgaaaatggactaatacatgatccttgtctcataaaattcctaccagctttctcatcactctcacaatgctctcattcataccagaacgtatttgtttctttgcttctgcccacacctcacacaaactttctcccttcttccccattatcacctgtgggagtcattactttaaatgcccttctttcatgaaactatcccaccagttagaaacagttttatccttgtacgaacccccaaatcatgtctccaagtatcctttctaatacacatgggcatccaggcctgggggtccccaacagaggaatayacaaagcccagacttatgggccaagatagccacatacatatgttcaaggtaatttctagtatgggatggagccaagagttgaaagaaagcataactttatttttagcttgaagaatgtattgtaaatatttaggcacatagtatgtgggtatgtgggcctcttgacctgggccctg

SEQ ID NO: 370190 - DNA, 588 bp, Homo sapiens
tctgccataattgtaagtttcctgaggcctccccagccatacagaactgtgagtcaaacctctttactttataaattacccagtctcagttctttagagcagtgtgaaaatggactaatacatgatccttgtctcataaaattcctaccagctttctcatcactctcacaatgctctcattcataccagaacgtatttgtttctttgcttctgcccacacctcacacaaactttctcccttcttccccattatcacctgtgggagtcattactttaaatgcccttctttcatgaaactatcccaccagttagaaacagttttatccttgtacgaacccccaaatcatgtctccaagtatcctttctaatacacatgggcatccaggcctgggggtccccaacagaggaatatacaaagcccagacttatgggccaagatagccacayacatatgttcaaggtaatttctagtatgggatggagccaagagttgaaagaaagcataactttatttttagcttgaagaatgtattgtaaatatttaggcacatagtatgtgggtatgtgggcctcttgacctgggccctg

SEQ ID NO: 370191 - DNA, 590 bp, Homo sapiens
tggctacacatttagcaggacaccacactttatatgcctaatggcagtgagcaacatgagattctcttactatcctttaggttctctgatctcagatmtgtccgtcatctgcctgggcactggtcagcttgctaacagccactgagaatgtctgcagctggtcagtgcaagacccagtctcttggcttaggcagagcccaggggtcttttcttgctgactcagcctcaccttactctcatcagtagtaaagataactctgagacccccctacaatgtcctcactaggacctctggctggagagtctcctgcctctgccttctgcagtgacctgcttcactcatcttcagcaggaggcctgctggctatctattcttctatttccctcctctcccataggtcttataaaaattcctaggacttgtctatgccatttggaaactaaaagaggttcaaaactactaacttagtctctgtctgccccaacactccacactgtgattttcactctgatgccacccctcctctagtcggtactgtagcatattggtggtctcgcagagttctgaccagaaaatgaggcaaaagacc

SEQ ID NO: 370192 - DNA, 629 bp, Homo sapiens
tgtccccaaagtcaaagtttggattgaattttcactggagccacatctttgctattccactgggtgtccccttcactccaaggtaaagcaccagagccatagctctgtcttctttgcctctcagctcccttggatgactcagatggacatgacgtctgggtgcctacctctgacccagcctgtccccagtgggttgccatggagagaataagctgactataggcccaacttcaccaaaaaagagcattttgaacagtgcttcacagcctgccagagacaagggaaaacagaataaacactttttagtatgcaagacattccttgcaaaaatattaaattttttttaaccatcttctgctactctatggctgggcatgyaaaaaagttaacagatgatctcatggcttgtacacagataacataagtatggcatatataatatacattataagccataaaaagtttataaatataagcatggctatgcaaatgttatacagatgtgtatatttaaatatctatttctttttgaatttacagatttctagctgaatgacaatgttccattaaaaaagaaggaagcttgtctactcagaacacaaagagagccctggcaatgggtgttacca

SEQ ID NO: 370193 - DNA, 504 bp, Homo sapiens
gctgaggaatggggcaggctgtctgtggagcagaagacaggaaggtgttctaggcaggtggtccaggctggaaaacagatcagaagagggagaaaatagtactatgtctcagacaatgaactcagcagatactctgaagagagccaacttttcatgaggggtgagtaggaagatggcaggcataagatggatcatttaaaagtggcacttgccatcaaactagcaaatagccaagttagctgatatgaatttcacstcacctccttttttatctttttcttttattcattcttgcattcaatgtacatttattgaatatttaatgtcaccccagaacacaagccccttgctagccataggaaactgctaaaatttgagcactgcctggaaatcgtgcttctgtataactttatttgttaatgtatattcctttctttataacggcagccttaacaaatcacaaatatatttgtgaaattctcccatatataccaaaagattgca

SEQ ID NO: 370194 - DNA, 504 bp, Homo sapiens
gctgaggaatggggcaggctgtctgtggagcagaagacaggaaggtgttctaggcaggtggtccaggctggaaaacagatcagaagagggagaaaatagtactatgtctcagacaatgaactcagcagatactctgaagagagccaacttttcatgaggggtgagtaggaagatggcaggcataagatggatcatttaaaagtggcacttgccatcaaactagcaaatagccaagttagctgatatgaatttcacctcacctccttttttatctttttcttttattcattcttgcattcaatgtacatttattgaatatttaatgtcaccccagaacacaagccccttsctagccataggaaactgctaaaatttgagcactgcctggaaatcgtgcttctgtataactttatttgttaatgtatattcctttctttataacggcagccttaacaaatcacaaatatatttgtgaaattctcccatatataccaaaagattgca

SEQ ID NO: 370195 - DNA, 613 bp, Homo sapiens
tctacaagaggaaattggatgtcttgatgagccttaaaggatttaaggtatagtcaaaaaagaggagcaaagctctggattctatacttccttgtgaaaaagagcaaatcttttgtttaagtgccttgcacatactaggtcttcagatatttgtgaagtgaaccaaacaagccagataccgaaagcatttcattacataagttccaaagaactcaggtacaaccaaaggaatggaggaagaagaactctaaagtgactaagattaagtttttgctattggagagaatggagcttgcaatgaataaatgaagttgtatttctttgccccctgacatttgggactgagattcacatctgctactatactttcacatatattatttcatttgctctttatagtaaccctgtgagaaaagtatagyggacgttattattatcactattttacagaggaaaaaactgaagtccaaagagtttaggacaaggattcaaatccagaatttttgcccactttttcttctagctagcacataattttgtcctgctctggtcaactacttcctccaagagcctaaccttcagggcacggtgttttcttgagaatgtatgattt

SEQ ID NO: 370196 - DNA, 564 bp, Homo sapiens
aaagagtttaggacaaggattcaaatccagaatttttgcccactttttcttctagctagcacataattttgtcctgctctggtcaactacttcctccaagagcctaaccttcagggcacggtgttttcttgagaatgtatgattttctctcccaagcctcatccaagttctcagttttgccctttggatctctggaaaaagatggagttttgttttgttttgttttgctttattttggcttggttccaaaggtttctctgtcataaacattggaagscttggcgatgagctattttggaacttcagtgtcatagtccaaaggaaaggcagaaagcactagggaagtgaaggctggaaaagcaataaacctaattacagagtacaaagagacatggtgaacttgtccttgattctatctactgtccatatccgtgaggactcattccagggaggagactgcagcagcaggcgaggtagtgagaccaattgaagtcacatggctgcagcatgagagtttcagagatcagtctgttggaagcaggactccagccagaaccagcagtt

SEQ ID NO: 370197 - DNA, 570 bp, Homo sapiens
tacagcactacttctattttgaaccaaataactgcacttcagcattctccttcatggtctggctaattatacaattttatgcagtggggtttataaataaaagaatattttccccttcatgtcataagctagtttatacacacatcctaaaggaaagtttggttcccagagcttggggctgtgcctagtatttccaaggtcttctcatccttttttttaaggaggatgaggaggttaaatcaaattccaaaatcatgccttattttgagactatccaaattcaggcagctcttagtttatgtagacagccaaactatactctgtgtctctaaaamgtggattgccttctttttttctagtaatgaaaaaattctatcaacaggatcttataaataccctgatgtttagacatttgaactttacaatacctcttaattgattgattgattcattgatacatgatatgatacagatagatatgtgagttataggtatttgagcaaattttaactgttcatcctcatatcacaacttatactaaaaaattaactccttactccctcaacccag

SEQ ID NO: 370198 - DNA, 519 bp, Homo sapiens
caatacatatttaaataagtcacgttaaataaagtactgaaccattacataaacaagaaactaatttacatgataatttactcaatataggattcacttttttagtaatctgtgcatttaatatacatgaagggagaaattactatgtgagaaattagtctaagtgagaatttactctgtgagaattagtaaaaaattactatgcaccacatggtagatgattccagtttaattaaattcttgttcagaaatacacttttattttaccatttgaaatccatttccctacctatatgtaactttaatttttctattcgtggtgtgtttgagtccttgtccaatttatttatcttcaaactttgcaggttggcattttgctstttcaaatttgtttatctgagtaaatcttccttttttctgacaaccaagctatactcctccaaaagtctgaaatattcttaatagaacaaaattaaaagacatggtttatgtcaaaggcatgcatttgcacagaaaata

SEQ ID NO: 370199 - DNA, 608 bp, Homo sapiens
tttgggtaaataccttaaaatttccatgtattttttagcagaaattaaagagaaaccaaattattttttttactcggtcatttattttagcttaagtatgtccctccctagcatgatgcttaatccacattaggtgactaataattagctgaaaaatgaattaatttaattatcacaataaacctgtgtggcaaagatagttatcccatatttaaaatagaggaaacagcctcagagagcgctaagaacttgcccaaggttgtaggttgtacagaggatcagmggatccattcccaggttggtctaatcaatggcagatcttacaagactgtagcagtttgtttcatgatttccaagtctcaaattttctcctttcaactttgacccatctgcctcaatatctgtgacttcaaagacaataaggacatattttcctatgagggactgtcacaggaatgagatttgtttctaatagtatataaaacattacaaaagatattaaactcactataggttctctacttaaacctgtgccagaaatgtattctcaataatcttaaaacctaaatctgttttccaggagaacacttatggttgttaatactagt

SEQ ID NO: 370200 - DNA, 506 bp, Homo sapiens
cttctccatgctgtatatcctacctacccatctgtcacttaagagctgtctcagatatcagattgacagatcacaataagaaagctgagtatagtacagggtatttgagagacagacagacaaacaacattcactgggaggccaaggcgggcagatcatttgaggtcaagagttcaagaccagcctggccaacatggtgaaacgccgtctctactaaaaatacaaaaattagctgggcgtagtgacatgtgcctgtagtcccagctactcaggaggctgaggcaggagaatcgcttgaaaccaggaggcagrggttgcagtgagccaagatcatgccactgcacgtccaccctgggtgacagggtgagactccatctcaaaaaaacaaaaagagctgtctcaggtagcagattgacagatcacaaaaagaaaggtgagtatagtacaaggtatttgagagacagacagacaaatcatattcatgtaactttaattacagtacattg

SEQ ID NO: 370201 - DNA, 506 bp, Homo sapiens
cttctccatgctgtatatcctacctacccatctgtcacttaagagctgtctcagatatcagattgacagatcacaataagaaagctgagtatagtacagggtatttgagagacagacagacaaacaacattcactgggaggccaaggcgggcagatcatttgaggtcaagagttcaagaccagcctggccaacatggtgaaacgccgtctctactaaaaatacaaaaattagctgggcgtagtgacatgtgcctgtagtcccagctactcaggaggctgaggcaggagaatcgcttgaaaccaggaggcaggggttgcagtgagccaagatcrtgccactgcacgtccaccctgggtgacagggtgagactccatctcaaaaaaacaaaaagagctgtctcaggtagcagattgacagatcacaaaaagaaaggtgagtatagtacaaggtatttgagagacagacagacaaatcatattcatgtaactttaattacagtacattg

SEQ ID NO: 370202 - DNA, 611 bp, Homo sapiens
tcattggacagagagcagtcagaccttgaaatgcctttgttatacttccatcaggggcagtgttgtttgggatgaaggtacaacattgagttttaattatgacacaaactccttctttttctgctaatatcgtgtctaaggctatcctatttttcccaagccatctggtagtggccctaattgctcagctattcctttaatagcatctctagtgtagttaatagatcgcttttggttgtaatagatgtagtttatccaatttacattttattaattgtcacccaccaaaatattgactcaaatccttcagctatttgatttcgggctttaaattgatatggtattscccatgggactctaattgtgtctaagtagatgtgggaatggaaagacccataaggggcttcttttgctttatgatgtcttatttttcctttctctggttgattaaatgccagggtgaaagggatagccagttggactaaagcataagtgccacttcagttacttggcacagtgtccagtaaaggtccaccataataccattacacatctgctcagggatgaataagggctgactgattgataagctcttgcaaattcttaagctc

SEQ ID NO: 370203 - DNA, 588 bp, Homo sapiens
ttttgcatcttcgagatatttatgaattaccgtgcatctttacaaacaagaaaaactttcaaggagagctggaagagttgaaggaaagaactctgttcatcaagcagaggcagcttccataaaattttagggccaagtttatgaattcatggacaaaactggaatttatgactgtgtgataaaattctgagatatgtttgggctaatttgctctggaaaagcatataggtactttttggcatgacggggttataaacccagcataagttgaaaatatcattaaattgaaaatacatttaatatgtctaacctatcaaacatgacagcttagtttgggctactttaaacatacttagaacactttcaatatggtattcaataaattatatgagataggcaacactttgttataaaatgggcttcatgttagataatttagtgcagcctaatgaaatcatattgcatatcactagcccaggaaaagataaaaaawgcaaaatttgaagtttgatttctactgaatgattatggctttcagaccattgtaatttgttgaaaaatggtaagccaaactcattgtaagttgaa

SEQ ID NO: 370204 - DNA, 588 bp, Homo sapiens
ttttgcatcttcgagatatttatgaattaccgtgcatctttacaaacaagaaaaactttcaaggagagctggaagagttgaaggaaagaactctgttcatcaagcagaggcagcttccataaaattttagggccaagtttatgaattcatggacaaaactggaatttatgactgtgtgataaaattctgagatatgtttgggctaatttgctctggaaaagcatataggtactttttggcatgacggggttataaacccagcataagttgaaaatatcattaaattgaaaatacatttaatatgtctaacctatcaaacatgacagcttagtttgggctactttaaacatacttagaacactttcaatatggtattcaataaattatatgagataggcaacactttgttataaaatgggcttcatgttagataatttagtgcagcctaatgaaatcatattgcatatcactagcccaggaaaagataaaaaatgsaaaatttgaagtttgatttctactgaatgattatggctttcagaccattgtaatttgttgaaaaatggtaagccaaactcattgtaagttgaa

SEQ ID NO: 370205 - DNA, 529 bp, Homo sapiens
atctaatagctcctactctgccagcatgaaaaaagtctttaatgcctatcattcattggcttccagcttttatattttctctttttagagaagagttaatatgacactgaactggaaccctgaaaatggacttcttccatatcttacttcaataasttttgtaattgtattgctcttatttccatattatttaaaatattagttttatgaattaagaagtctttaggaagagatattcaaatttatgatttctatataaacattgttctgtaatatcagaatcataatgacatagttcattgatctgcaaaccaacttaaaactcagtaaagattacttttattcccctggtttggtctatttttaagatgtcttacacaagtaaaaaagtaacaatttatctgaaggtaaataagtgaaagttaacataaaattattttatttgcatattatcctaaagatagaaccagtagttgtaaaaatgattctgcaacatgcattctattttatgattttctttattaaccac

SEQ ID NO: 370206 - DNA, 589 bp, Homo sapiens
agttattgggattaatgagatcaatatctttatttttcccattaagtataaaatcatgacagaatcaatgtgaattttccatcaaggttagaaatttctatttttcaaaggaagcaaagtgatgatrtttataattttgctttcttctgcttttagaccactgaataatttccagatgtggcacattaatacctgggatattttcagaagagaatgactaggagggtaaggagagccagaaaaataaaatatgctgataatattgaggaaactgaatttctataatgtaaaagtaggttcagattatttttgtgggccaagaaaaagatattttgtgcccctataatgattaatattctacaaaaatggcagaccggtacatagagttgcttaataatgccagacccagtgtattctctcctcctagcatggggtacacattgtagaacagtacccactacatacaaatccagtacgatagtcatatattagtgaaaataacatttgtttccatttttaaaggaatctacctatctgaggaaaaaactgggtcttcccagaagatttacaaattcctacagatgcccag

SEQ ID NO: 370207 - DNA, 532 bp, Homo sapiens
ctatgtcatgcagtgcccagatattaacattatcctggatggttccgtgagggcattttttgcatgagattcatatgtgacctgagtagactgagtaaagcagatggcrctctcagatgtgagaggctctcatttaatcaattgaaggcctgaatagaacgaaaaggcttctcagagtaggacagaattcctcctgtctgatagcctttcagaaatggacattagttttttgtgaaattggactcaaactgaaacattggttcttcccgggcccagaggcttctggccttcagactgaaagaaaaccattggttcttctgattctcaggcctttgacatacactgaaattaaacaatcggttctcttggtctccagcttgctggcccacccttcaaatcttcagatttgcaaaactctaatcatgagaccattccttataataaatctctctgtctctctctctctaaatatatataaatataaatgtatatatacgtatgtataaaatcaataggatctcaccctgtttca

SEQ ID NO: 370208 - DNA, 579 bp, Homo sapiens
caaaaaccattaactggaagaaatcaaaattattggtatgaatataatttatatttggtatagagattaattttaggtaagcttatgaatttatgcatctgtcattggctaaaccaggccattttttaacactctcttaaattaatacccaatatttaaataatccaatacttgtttagcacaaagcatgcttgtttagtatgaggtttttaattggagaataaaaagtaaattcttacagaatactttctatgactgcgtataagtaagtgaagttgttttacaatcttcctagttcctcattccagggtaaaatttaatataatatatacaatatgatggaataatttcctttcgaaayattttgtgcttggattaatatttttgagtgcttattcaagggttacacattgatcagaagctgttggctgttgtgctgaaatgttctgtctccaggttctaattcacctggcaaatggtcagtcatgcaacagtcgtacagtgagtcatgcttcttccttccaagtactgaagtccatttctaaggtttacctttgctatagtcctatacacaaggaa

SEQ ID NO: 370209 - DNA, 592 bp, Homo sapiens
ttgaattaatcataaaaaaatatttccaagaatgcaaacaatatttgacaatttaggctaatattttatttacttaagacaatactatatatgaattaaatatgtaatatatacagtaaactcaagagaaaatgcatagaaataataacagcaaatttaccacactggttacctcttagaagggagattcaatctggaagagtacccagaaaacttcaatattacatttaatcttttattacttaacctgggtggtaattcaagggaacttgtttcactcatttttgtgtctgctaatcwaacttgtcataataataaaaagtcagagtcattaaaagctccaagtactctgcacagcagcacctcaactctaaatgccatgttcacatgtgattactgaaattctgctcttggcaaatctgcctttctgatgcaggactcttgtacttcagtaagagtgactcatgtgatctaatttactatactctaagcaaatctttctctgaagcacggtaatctgggaagacacaaaataagatctaaaaagctttgcaaatggctcctcccccaaatgctaaattaagtgccatat

SEQ ID NO: 370210 - DNA, 552 bp, Homo sapiens
gtgaaaagatgtgatcattggcattgtatcagagtcaatttgctgtatatmtccattgctattgtgtcactgaaatagcttttgaataacttttattcagggttacttcaatcactttacttcaggttaataatttctccatttacaatagagttaaaatgaaaataccaaagtgttgcaatattcagtataagggtataaaggacttttttttaatctgtaaaagaaaagaaaagctattatttcatatagtaagaaaagcataatgaccatgcaaagttgaataaagatgactgacattcatcttatttctaaaacaagtaaattattggtgtttcaacttctttctacaaggggatctgaaaaaaatcatttgcaacccaactacaagttgaaagttctgcatttaatgtgtatcattttagaactgagaaaagatgtgttttacacaagctgacagattttatacaaaatcaatgcagcttatctatgaccataattaaatggggaagtttgatagtggacacatataatagtgaacagaagaaaata

SEQ ID NO: 370211 - DNA, 552 bp, Homo sapiens
gtgaaaagatgtgatcattggcattgtatcagagtcaatttgctgtatatatccattgctattgtgtcactgaaatagcttttgaataacttttattcagggttacttcaatcactttacttcaggttaataatttctccatttacaatagagttaaaatgaaaataccaaagtgttgcaatattcagtataagggtataaaggacttttttttaatctgtaaaagaaaagaaaagctattatttcatatagwaagaaaagcataatgaccatgcaaagttgaataaagatgactgacattcatcttatttctaaaacaagtaaattattggtgtttcaacttctttctacaaggggatctgaaaaaaatcatttgcaacccaactacaagttgaaagttctgcatttaatgtgtatcattttagaactgagaaaagatgtgttttacacaagctgacagattttatacaaaatcaatgcagcttatctatgaccataattaaatggggaagtttgatagtggacacatataatagtgaacagaagaaaata

SEQ ID NO: 370212 - DNA, 570 bp, Homo sapiens
ctgtgcctggccatattgttttaataatataggcttcatattatattcctgtatcttctaggattaatgtttccttgcagcttttattttttcgtgttttcttagctattcttgaatgtttgttagttcatagtactgaatgacatgaaagagatttttcaatgcagcggaacaggtaaggcttcagtacttatgaaaggtagatttgattttagatttgattaggaaaagcagccctgatctcccagcagcagtccaagygtgtgacgttatgcagcctgactcttacgtcagtattgggcaggaagggggaaacatgcaaggaaacatgcctgctggacagtggtgcagtatgacaatccagcagcatagtttccactgcctgggggcatgagtacatgcacatgtacatacatttagcactcttctgtccatccactatgctacaaggaaggaggtgaatgtgagcactggtaataggctagtgaagcctattttgtcatttttaagactgtgtcacaagtcattcttttaagacatattttcatggaaagacaaggaaaaacaaat

SEQ ID NO: 370213 - DNA, 594 bp, Homo sapiens
ctaaatatacaatcatgtcatctacaatcagagacaatttgacttcctttcttcctatttgaatacgctttatctctttatcttgcttgattgccttggccagaacttccaatactatgttgaataggagtggtgagagagggggcttcttttytacatgtgtcttcagtggaaactgtcacttctgacccaggcagagatttcttcatctattgcattttacatgatatcagacagagcaggaaatagggaataaggaggatatgtcactcagattcagctcagagatgttgggcagggtatcaatagatacctgcacagatggctttagcacaggtgcttcatgactcctgttgatttgattgttgttctagcttacaatgttcacagcttttgtccccaacatttctgccaatatctacagttgaagcaccagcaagtcccaggacaggtcctgagggtcctagaggtgagcctcttttaagaggttttaacatctgacctgccacttccctttctaatcattatataaatatgagaaaatttaaaaacacttttatcttaaagacttataatagttctttgaaaagtaga

SEQ ID NO: 370214 - DNA, 594 bp, Homo sapiens
ctaaatatacaatcatgtcatctacaatcagagacaatttgacttcctttcttcctatttgaatacgctttatctctttatcttgcttgattgccttggccagaacttccaatactatgttgaataggagtggtgagagagggggcttcttttttacatgtgtcttcagtggaaactgtcacttctgacccaggcagagatttcttcatctattgcattttacatgatatcagacagagcaggaaatagggaataaggaggatatgtcactcagattcagctcagagatgttgggcagggtatcaatagatacctgcacagatggctttagcacaggtgcttcatgactcctgttgatttgattgttgttctagcttacaatgttcacagcttttgtccccaacatttctgccaatatctacagttgaagcaccagcaagtcccaggacaggtcctgagggtcctagagstgagcctcttttaagaggttttaacatctgacctgccacttccctttctaatcattatataaatatgagaaaatttaaaaacacttttatcttaaagacttataatagttctttgaaaagtaga

SEQ ID NO: 370215 - DNA, 535 bp, Homo sapiens
tttcattaaacattatttcataatggatgtagcacaaatgaatttgtaaaataggcaagcactgcacattaatgtttgatggtattcaataatatattggacagcaacatgctgacttctgactccactcactattctattaaatcgattattccaaaatcaaccaatcatatttcccagtctcctgtacctctgaaagtatttaatactactgttctccttctccaaagaacagtgtttcctctttcatattttgagatactgaaaccatgtcacgttggcccctttctgtgtctctgaaagctctctgtggttgtctcctgggactgcttttaccctgctttttgaaggagggagatttcacccttcataacattctttggcattttgtaaatttgcctttccgttcagtaagtagttattggttygctactcaaaaatcaaatgtaaatatattgtcattaactatagccactctgctgtacaatgctctcttgaatctatgcttatctgactataattatgtatcctttga

SEQ ID NO: 370216 - DNA, 653 bp, Homo sapiens
actatgtcaatagtctttctttgattttatagaactttatcgctgagattgtagatcagatctttaatgcaagttctataaaatcaaagaaagactattgtgaacaggtttttaaaaatgaggataaatggaggatcacagtaaaaataaacttttagttcagcaacrtggttttattaaatgaaacatttatttgagatagagacatcaaagcttttgataagacgacatggtgtttctttcttgcctagtcaagcttgctggagagtggatttggagggtaagtgaacttaacaaggatctctctcctcttcaaaggtcctgatcccaaagcaaatgtggacagtctcacatatcctccatttctattactgcattcaccgatgcagcatagtattagaaaactgtcctttaaatcactgattacataaaattcactgcaattttaagcatgatcttcatttgactctgggcaatcattttatttaaaataaactctccttttaaaatgaaattaagcctgacaatatgagaaggggtaaaattaacaacttttactattggtttcctctccctaaataccaaatttcaatcatctaaaatgagagactctatgctaaatatgcttaaaacacattctagttccatatttc

SEQ ID NO: 370217 - DNA, 653 bp, Homo sapiens
actatgtcaatagtctttctttgattttatagaactttatcgctgagattgtagatcagatctttaatgcaagttctataaaatcaaagaaagactattgtgaacaggtttttaaaaatgaggataaatggaggatcacagtaaaaataaacttttagttcagcaacatggttttattaaatgaaacatttatttgagatagagacatcaaagcttttgataagacgacatggtgtttctttcttgcctagtcaagcttgctggagagtggatttggagggtaagtgaacttaacaaggatctctctcctcttcaaaggtcctgatcccaaagcaaatgtggacagtctcacatatcctccatttctattactgcattcaccgatgcagcatagtattrgaaaactgtcctttaaatcactgattacataaaattcactgcaattttaagcatgatcttcatttgactctgggcaatcattttatttaaaataaactctccttttaaaatgaaattaagcctgacaatatgagaaggggtaaaattaacaacttttactattggtttcctctccctaaataccaaatttcaatcatctaaaatgagagactctatgctaaatatgcttaaaacacattctagttccatatttc

SEQ ID NO: 370218 - DNA, 439 bp, Homo sapiens
catgctctttttatatttcaaaaccaatcatgccttcccaacagtcccctaaagtcttaacttgttccagcattaactcaaaagttcaagtccaaagtctcatttgacaaaaggcaagccccttctaactaggagcgtgtaaaatcaaaaacacattagttacttccaagatacaatggaggtacaggcattgggtaaatattcctgttccaaatgagagaaattggccaaaacaaaggggcccatgcaagtccaaaaaccaatggggcagtccttaaattktaaagctctgaaatgatttcctttgactccatatttcacatccagggcacactgatgcaaggggtgtcctctcaaggccttggacagctccacttctgtggttcttcagggtatagcccctgcagctgctttcatgggctggtgtggagtgcctgtg

SEQ ID NO: 370219 - DNA, 537 bp, Homo sapiens
tatcgtgctgagtcctggtaagagtgtacctcagttgggtaccaaaaccaggctctctaatcctgcagcatccaaaattgaagggatgggaagcacaaaatatccagaaggtcactgggaataatggtaagcaggcctcttctgcttctatgccttggttcccaaatctgtgtattcttccttttgaggacatwgtgccatatagtggtctctgatttaatgcctacatgcatcctggaaagtagtatctcatcctcacaaagcattgcctctgagttatcacttcagcttcaccttcagcagacgctcataatgcctgtagtttctgggtggtacagaatacaagatactcaataaatcacttggtgatgatggtgatgagtccatcctgacatctcttctattgtgatgtttttgtttgttttatattttatttttactgattggatgctgtattgtatgggattcccatgtctttgaatcaggatttctgtaagaccctggattacgatattggaggtcttacagacagggagg

SEQ ID NO: 370220 - DNA, 583 bp, Homo sapiens
tgtgtacctggatatttgtggcagatatgccaaactgtaccttgattctacatgataaaaaatatgctataatytttatttttgcagccattttgtactttcctacttgtggttatgtttcattttttaaattttcataaaaaaagtaacgtgactactgactaaaatatgcggaatggagaatttgtccatttcgaagctacaagacataagagaataagagtagtctttagcagcaaagtggaggttttgatcatcccttttggagaactagggaaatcatgactcatctagttgagagagtaaactaaaactttgggagaagatgagtagaagacagtggtgattaaagaattcatcccactcacagtgttaccgtatacatgatgccaccatattccatgccttccactcttagccaaatacatcctgaaactgaaacaagcttatttagttcaagttacagtttgtatttgtgaactgccaggaattagaactgaagatacttatattttttcaatttcttcctaagacactgaaaacacagaaacaatcatgctgaggtaagcaaatatgagtattc

SEQ ID NO: 370221 - DNA, 583 bp, Homo sapiens
tgtgtacctggatatttgtggcagatatgccaaactgtaccttgattctacatgataaaaaatatgctataatctttatttttgcagccattttgtactttcctacttgtggttatgtttcattttttaaattttcataaaaaaagtaacgtgactactgactaaaatatgcggaatggagaatttgtccatttcgaagctacaagacataagagaataagagtagtctttagcagcaaagtggaggttttgatcatcccttttggagaactagggaaatcatgactcatctagttgagagagtaaactaaaactttgggagaagatgagtagaagacagtggtgattaaagaattcatcccactcacagtgttacygtatacatgatgccaccatattccatgccttccactcttagccaaatacatcctgaaactgaaacaagcttatttagttcaagttacagtttgtatttgtgaactgccaggaattagaactgaagatacttatattttttcaatttcttcctaagacactgaaaacacagaaacaatcatgctgaggtaagcaaatatgagtattc

SEQ ID NO: 370222 - DNA, 521 bp, Homo sapiens
gtggcaccatttgtaaggctaggtcactttcttcccatggatgtatattctcttctaattgcattcatcaattttaaaagcataagtattctaatatagttgaagtctgttcatttctcttggctttttcagcaataataayggagaggttacatcaaatattgtttaatttaatttccatatggtgtttgctggaaaactgcaagaggttcatgtaagaaaggtaagtgctttattagaggtaatattttagtaatatgtacaaagtaagaaaattgaaataataagaattttactaataaattcttctttcattatcagctgagataatttttcatatcaaaacagaatcagtagcactaggaagaaacaaaaagatcatttcaatacatctttacatgtttttgtaattatgaaaggggattatttattgaatgttacagttagaaggaatcttaattatataaataaacatgtaatatgaacttaataatatccctcttttatatactatgaaaaat

SEQ ID NO: 370223 - DNA, 382 bp, Homo sapiens
atgacactgtggttgtccatgagatactgtgggcaaactcaacctccagtagttatacataattaaagggctttacagtttaatagyctgaaagcactcatattttgctgatgtgaaatgggttcttggagaatttaagtggtagagtttaaaaaattctctaaggtaacgttctgaatataacttaatgaaataaactagcatttgctttagatgtgcttatgtgccataaacgtttctcaatagtttaaggcatttgtgcatttaatacatatagaaagcagaaaactattttatgtatttttttatgttatagtatttctgtggaaatattatagtgaaatttcattagtttattaggatacaaagtaaattttaggtt

SEQ ID NO: 370224 - DNA, 660 bp, Homo sapiens
aaaatgtatagtctccctaagataaaaacaaaactgtttgaaaactcaagtctcccaagtagaaatctgaaagcgggccaggcacgtggctcacgcctgtgatcccagccctctggaaggctgaggcaggaggatccctggaacccaggaaatggagaccagcctgggcaacatggcaaaaccccatctctacaaaaagtacgaaaagtagccaggtgtggtggcatgagcctgtagtcttagctactcaggaggctgagatgggaggatcgcttgagcctgggaggtcaatgctgcagcaaattgctccattacactccaggctggacgrcagaatgagatcctgtttcaaacaagcaaaaagaaccagaaagcagtatttttcctattatcttcaccatatacttaaagtgagcaaaactatgacttttagagatatttattttaaggtatgtcaatatcataacataacttgaaattcagaaaaaaaaaatgattctatgaggaaccaaaacaaaacggttcaggcaagagacttcaaaatgctgatctcatgcagaggaagacgatagtatccaggtgtgggatcagaatgacatgctatccatatctgtcactcatggaatctccctcactgatggcaggtatttttaagtgatt

SEQ ID NO: 370225 - DNA, 534 bp, Homo sapiens
gcaaccatgccaattaatagtttaataaactggaatattatctattgtttattcatagtctttttgctttgtttccaattgcctactttcttttcaaagtgtccaatttaaaaatcacggtacgatgtatagaatgtgagggagaaaaataatgtatgtgaaatttattctaaatatataagaagaacagatttataccaaaaatcaaaccaaaactacaaggacagtggaaaaacacacatgtcagttttaaaccaacaactttctatacaatataatggaaaataagcatctgatattttgcataatagtcaatacagtagcaccctgcggtttactaatatttagataaaatcaacttagaattgccatcaggggggcatgccyataaatctaacaaggtggcctgggatataaaaatactgttcttattattggcatgataatttaaagtagattaaaacagccaaattcgggcatagctaagaaggcactaagggattcttcaggagtaacaaggagaacaaacagatg

SEQ ID NO: 370226 - DNA, 536 bp, Homo sapiens
tccaattgaccatatgcttagtcataaagcaagtttcaatgaattctgaaaaatcaaaatcatatcaagtatcttcttggaccacagtagaataaatcagaaattgacaccaagagcagctctcaaaattacacaaatacttggaaactaaactacttactcctcaatggctttagggtaaacaataaaattaaaacaaaaatcaaaaataatttttgaaatgaatgaaaggaatkacacaacataccaaagactctgggacacagcaaaatcagtgttaagaggagagttaattgttttaaatgcctacaacaaaaagacagaaatatttcaaattaacaagctaatatcacacattaaggagctagaaaacaagaaaaacaaaactcaaagctagcagacaaaaataaataaataaatatcagagcaatttatattgcatctgtatggatcaacagcattaccttttccataacttgcccactacttttaaaaaaaaactaattatcaattttatattgaccccatttcatatt

SEQ ID NO: 370227 - DNA, 538 bp, Homo sapiens
tttaagagatgttctttgtttatagctatagttttaatcaaaatgcatggtggtgctatggtattttgccgtcttttagcaatgttttaattttttaatcacctaaagtgatcaataattttagaaacacaatgaaaatacacttgtatatactcaggtaaaattttcttttatcattcaaattgccagccaacrtgttttgtgccccagttttgtttctcaaacactgctaacttttggacataagtaaataagatatctagtctttgctcaagtagtttatagcatgcagttagctattctatcaataaataaatagaactagatatttgtgtacctattatcacaattacaaaagaaacaaataattatgagagttattcttttatgctattctgtgcaaatttgaaacagtgaacactgcaacacaacaacaccaacaaaacatgggctttggggacacatatgcctgaggttgaattccatttcttttactttctagctggttgaatgtcgctaattattttatttatgttag

SEQ ID NO: 370228 - DNA, 538 bp, Homo sapiens
tttaagagatgttctttgtttatagctatagttttaatcaaaatgcatggtggtgctatggtattttgccgtcttttagcaatgttttaattttttaatcacctaaagtgatcaataattttagaaacacaatgaaaatacacttgtatatactcaggtaaaattttcttttatcattcaaattgccagccaacatgttttgtgccccagttttgtttctcaaacactgctaacttttggacataagtaaataagatatctagtctttgctcaagtagtttatagcatgcagttagctattctatcaataaataaatagaactagatatttgtgtacctattatcacaattacaaaagaaacaaataattatgagagttattcttttatgctattctgtgcaaatttgaaacagtgaacactgcaacacaacaacaccaacaaaacatgggctttggggacacatatgcctgaggttgaattccatttcttttactttctagctggttgaatgtcrctaattattttatttatgttag

SEQ ID NO: 370229 - DNA, 599 bp, Homo sapiens
aggagaaacttgattcattcttgctgctgctgctgtcactgttgacctgccaaccagwacattgctatcaagatttcacagcatattttctctctgaaccacgacgattttcccagaaatctctcattttggaaataccctgtctgctgatgttgggagtgacctcagggaggcagctaatgaataatgaattggtatctaagactaatagactaatattactgctagtagctaatacctaaatcaggatattctagagtcttctatcctgccaaccctctaaatggtcaagctacaaaaagcgattaatagctctttcaccacttaacccagcaattagccattttacaatttttttctcctctcaagcatgcacttttcaaatttttacatttttttaatgaccgccagatttcacctgaataaaaaccatgaaaataaaaaacaacatatataattttatatttattgggttcaaggtttcttccaggatgaagaaaatttctgctggttctgccagtacaaataagcattctaatcaggcagatgatactagaatctttgttatcagttagtcagaaaattgaatcaataaacag

SEQ ID NO: 370230 - DNA, 552 bp, Homo sapiens
tatggtgataatggagattttgaccaccagtcctccatcaccatcactgcaatacaatgtttcttattgtcttgcccatcatcagaaactatgttatgtgggggaaaaatgttgatgaaaacatgtcatgtaatttcatctgactttctccactcgtttactagactatcaggtgctacatcacaaagacagcaaatatcccctggattcctgsggaagtgaattccactattttactttttttttccattccttatgcctaatactggacctaacatatattagaagcttaccacttgtttaaatgaatgaatagtaaatatttgaaatcattgataaaattttcagaagggaaacgaactctggaaataacaagaggctaagggaagagaaattccaacaggacattccagatttttaaaattctttggacatcactttcttcaaattacttaaaattagctttactttcttaaaattctagagtttttaaacattaattggagcttggagtccaaacagcttacgcaaaagaaaaataccatcttttcc

SEQ ID NO: 370231 - DNA, 566 bp, Homo sapiens
caaataataattatagaaaaataatggaggacaacaaactaaaatgatagtataaattatctcttgtttttttctcacataattattctctttttgattttgcttatccaaatttttaaatttttaatttttctgtataaatattatgtgtaaaataaacatggctacttttcaaagtaatcaaagtttttaaaataatctgtatttttttataccagcagcacaaaagtgtatcaacacagagtaaggattaaagttttctgaatcctaatctgaaacattgcttctgatacataaaatcatagtgcatgtgaagctttggaattaaacagactaggcttggtttatggctctcaattttttaaggagtttgggaarcaccaacctaaggcttcacttaaaagttttaaaaatctaattaaaaaaaattcattcctcacaaagtatttggaactcctaaggatgtcattgacatcctaaatagttaaaatattgagtagttttaaggtatatttgtggatttaaatgtcttattgaatgtgctaacttgcagcagggtcttttat

SEQ ID NO: 370232 - DNA, 583 bp, Homo sapiens
aatcaaagtttttaaaataatctgtatttttttataccagcagcacaaaagtgtatcaacacagagtaaggattaaagttttctgaatcctaatctgaaacattgcttctgatacataaaatcatagtgcatgtgaagctttggaattaaacagactaggcttggtttatggctctcaattttttaaggagtttgggaaacaccaacctaaggcttcacttaaaagttttaaaaatctaattaaaaaaaattcattcctcacaaagtatttggaactcctaaggatrtcattgacatcctaaatagttaaaatattgagtagttttaaggtatatttgtggatttaaatgtcttattgaatgtgctaacttgcagcagggtcttttatgtgttcagaaaaatataagaggatagaatttcagtttatactgaagtaatgaccacaaatgctttaaatgaatgcattaataaatccaaaataatcaggacattcattccattaaaatgtcttttaaatacctttttaaggaaatgattagccttaacataacaattgtttaatactagctattgtgaaaagaaa

SEQ ID NO: 370233 - DNA, 627 bp, Homo sapiens
tattataagttttaatctactcagacaatgtccatgtaggttgttaattataataatgcatttataaggcagaacctaaaatattctaacacaattaaatgaaaaaagtaatagcacatttgcttatagttacaatcaatgtaataagatttgacggtggctaactaaaattttgaaaaattatttattagttttctgtttgttattttaataaatgtaccaaaatttcagataaagtgagacactaccagccaccaatgkgtgactcttacttccatgtcccaatcttactatccaagagggtaaacaacaacaacaacaaatagaaccttccatttcaaggtgaaatgtcagttaatgtttctgaaacccctctattgccaaacctctaaaaatgctggataaaacaattcaaagcaaccattcaaaattggcttgctggcaagcaggcagggaaagtctcagagacctaaacaaataagaaaacccaaatccaggggtacgagtgctcaagcaggcagctgtcaatttccagcaagccaagcttcagattttaatgggccatttttggggaatgcgaaaaagccaggaaacaaaaaactttatatcagagaactcctgagtaaa

SEQ ID NO: 370234 - DNA, 549 bp, Homo sapiens
taagatccaaaatggataataagagattttatctaggcaagaaggcttactttatgaaaaataccttcaataacattcgttttatttaactgtcaattctaaggactctaaattagatgatgcttggtggttaccaagtcaatttaatggacataaatcattctgaatcctaccagaaaattctttaatttgtaaacagagttttgggaacaataaaccacgggctcttgtgtatgcgtatgcatgtgtgtgtttaatataattaataggcagattagtggcctgaaatttgtacagaataggaagttctattttttcttccaaaggtaactcaaactggacctggcgtagtgtttaaaccctagaagcagagatgtcttacaagtaaacattttaaattgtgtgcataccatgcatttccacagtttatatagccatactcaagaaaataccagatctgcctacttatgcttcttggaataattatacattactcgstatttcaaccatatttatataagaggttttattcaactctgtatttgcaca

SEQ ID NO: 370235 - DNA, 549 bp, Homo sapiens
taagatccaaaatggataataagagattttatctaggcaagaaggcttactttatgaaaaataccttcaataacattcgttttatttaactgtcaattctaaggactctaaattagatgatgcttggtggttaccaagtcaatttaatggacataaatcattctgaatcctaccagaaaattctttaatttgtaaacagagttttgggaacaataaaccacgggctcttgtgtatgcgtatgcatgtgtgtgtttaatataattaataggcagattagtggcctgaaatttgtacagaataggaagttctattttttcttccaaaggtaactcaaactggacctggcgtagtgtttaaaccctagaagcagagatgtcttacaagtaaacattttaaattgtgtgcataccatgcatttccacagtttatatagccatactcaagaaaataccagatctgcctacttatgcttcttggaataattatacattactcggtatttcaaccrtatttatataagaggttttattcaactctgtatttgcaca

SEQ ID NO: 370236 - DNA, 582 bp, Homo sapiens
aaaggaaatggaaaggtcaaggatttggagaaaatctgggagagaatggtgtctttgaacttacttgataaatttaaaatgatgcaaaaatttgaaataggatgaagtctgaagctagactgttgatttggcaactttaaacatttatgggatctaaacatgatcagattagagctgtccaaatctaccattggttgagggtgaagaacaggagacagccaaaaaggacactatttcataaagtttggtttttaagggtgcgggtggtctaaggatayaaggaaataccttgtgagaaaagattatgaaaactttgaccaatgttctttctaggattgaaataattataaaaataggtaaagaagtcaattattaaagaggttggaaatacatgaaggaggaaatctgatgagccatggccccaaggaaatggttgtctctgaagataagcagtgattattctgaaataggattatataagcatattttatatgcaatgttagaagtggacaggaaagcagagagagagaaccccactgaagctgtgggactggtctatgctgtaacctgagggtggaaatc

SEQ ID NO: 370237 - DNA, 582 bp, Homo sapiens
aaaggaaatggaaaggtcaaggatttggagaaaatctgggagagaatggtgtctttgaacttacttgataaatttaaaatgatgcaaaaatttgaaataggatgaagtctgaagctagactgttgatttggcaactttaaacatttatgggatctaaacatgatcagattagagctgtccaaatctaccattggttgagggtgaagaacaggagacagccaaaaaggacactatttcataaagtttggtttttaagggtgcgggtggtctaaggatacaaggaaataccttgtgagaaaagattatgaaaactttgaccaatgttctttctaggattgaaataattataaaaataggtaaagaagtcaattattaaagaggttggaaatacatgaaggaggaaatctgatgagccatggccccaaggaaatggttgtctctgaagataagcagtgattattctgaaataggattatataagcatattttatatgcaatgttagaagtggacaggaaagcagagagagrgaaccccactgaagctgtgggactggtctatgctgtaacctgagggtggaaatc

SEQ ID NO: 370238 - DNA, 570 bp, Homo sapiens
attataataagaagaaaaaaaaacaagaggatgtgactgtggcttatttccagcaccaagagcaatcagtgctctcaccatcactacaagaaccttccttgtacatatcctgccccccaaggagtcagaaagggagcagwtgctccataatctgcaattcacgatctcagcacacatttttgtcactggagtaatcccatttgatcatattagtccttgatctggcagtttgcatgtgcaggtggccaagacattgccttattgaccactttgtatcatactcaacaggaagtcctcctggggttttacatctacctactgcatttggctatccagtcatttcattccaaaacttccatcatacctcaccagctctcatatccagaatcacaatattcactgttaaatattttattttctctattaaatatacttgtttagtatattacagtccatagggcagatgcattgtaggtatgttcattttccacaaaatctcttgatttattgccttcctcctaatattaataggtgaagagtctattattctatggtgctatctttaaaatg

SEQ ID NO: 370239 - DNA, 560 bp, Homo sapiens
gtctctttttttcagaattatcttctaaatggcttgactggtgcccattaaatattgaatggctgaattaataaatctcaactgtttttatttacccataataaatatctgctgaatgcaataatgcatggagataacatgacttttataaacrctgacaaagattattcacctggccaaacgtcagctgagattctgaaccttctcctaggcacttctatgcacttccttgtaaacttcagttttagcaaagaacccagctaaatcagtttaccagaaaccccatccttgctatttgatcatccttgatatctaatgcagttcctcattttccaacatcccttaggttgttctgatcaccctggctagtcttagaaagaatcctgtttgaatcatttagccagaatcccccttaccctgatccactgacctccaccccactgtactctttggttataagttcctaactgcccatgctgtattcagtgttgagcccagtctgtctctccccgacacccacaacccgccaggcagtggtcctacccttatgatgatcctgt

SEQ ID NO: 370240 - DNA, 572 bp, Homo sapiens
ggtctgtttgcaatataaattataaatatttgtttagggtgggtaagatagttaagtgtaagttgcccgtgatgcagtggaaatgttaaagacatagctgtaagtcaaataattcatttgagttttaggaaactgccaggcacggtaacagttcatattgtccgggaaggagatgaagcaaaggatagtaggtaaacatwgataaaaataataagaagaatagaaaagtaattgagaattgtaaagaattacagaatgccatataataatatattttgtggttatactgaggtagggcaggagagccctaaaactggtgcttagtctagaagggctctcggcttcacccaggaaagaattcaagggtgagccagtgctgttaaacaggaaccttcactgaagcatcagtgtacagcatcagcagagatactccttcttgcagagcagggctaacccataggcagtgtgcccagagtagcagcccaaaggcagttctgtagtcatatttatacccacttttaattacatgcaaatgaaggagtatattatgcagaaatttctagaaaaaggtg

SEQ ID NO: 370241 - DNA, 572 bp, Homo sapiens
ggtctgtttgcaatataaattataaatatttgtttagggtgggtaagatagttaagtgtaagttgcccgtgatgcagtggaaatgttaaagacatagctgtaagtcaaataattcatttgagttttaggaaactgccaggcacggtaacagttcatattgtccgggaaggagatgaagcaaaggatagtaggtaaacatagataaaaataataagaagaatagaaaagtaattgagarttgtaaagaattacagaatgccatataataatatattttgtggttatactgaggtagggcaggagagccctaaaactggtgcttagtctagaagggctctcggcttcacccaggaaagaattcaagggtgagccagtgctgttaaacaggaaccttcactgaagcatcagtgtacagcatcagcagagatactccttcttgcagagcagggctaacccataggcagtgtgcccagagtagcagcccaaaggcagttctgtagtcatatttatacccacttttaattacatgcaaatgaaggagtatattatgcagaaatttctagaaaaaggtg

SEQ ID NO: 370242 - DNA, 572 bp, Homo sapiens
ggtctgtttgcaatataaattataaatatttgtttagggtgggtaagatagttaagtgtaagttgcccgtgatgcagtggaaatgttaaagacatagctgtaagtcaaataattcatttgagttttaggaaactgccaggcacggtaacagttcatattgtccgggaaggagatgaagcaaaggatagtaggtaaacatagataaaaataataagaagaatagaaaagtaattgagaattgtaaagaattacagaatgccatataataatatattttgtggttatactgaggtagggcaggagagccctaaaactggtgcttagtctagaagggctctcggcttcacccaggaaagaattcaagggtgagccagtgctgttaaacaggaaccttcactgaagcaycagtgtacagcatcagcagagatactccttcttgcagagcagggctaacccataggcagtgtgcccagagtagcagcccaaaggcagttctgtagtcatatttatacccacttttaattacatgcaaatgaaggagtatattatgcagaaatttctagaaaaaggtg

SEQ ID NO: 370243 - DNA, 604 bp, Homo sapiens
tcttttcactttcttgatggtattgcttacagcacaaaagttcttttctttgacatagtacaattcatgtcctttgtgtgtgtgtgtgtgtgtgtgtgtgtgtgygtgcgcgcttttggtgttatatctaagaaaccattgcctaatccaatgtcataaagatttacttctgttttcttccagcgttgcttttgtaattgtagctcttacatttagggctatactacattttttactttatttttaaatatggtatgaggtggggccctactttattcttttgtatatggatatccagttttctcagcacagtttgttgaaaagactcttctttccccatgaattgtcttggcatccttattgaaaatctgttgaccataaatgtaagggattatttctggactctggattctgttgtgttgatctctgtttctgttcttatgtcagtactgcactgtcttggttactttttagtatttttttttaattggcaactcagagtcttctaactttgttcatctttttcaagattgttttggctgtcctgtatcccttgcatttccataaaattttaggatcagcttgtcaatttctgaaaagaagc

SEQ ID NO: 370244 - DNA, 604 bp, Homo sapiens
tcttttcactttcttgatggtattgcttacagcacaaaagttcttttctttgacatagtacaattcatgtcctttgtgtgtgtgtgtgtgtgtgtgtgtgtgtgtgygcgcgcttttggtgttatatctaagaaaccattgcctaatccaatgtcataaagatttacttctgttttcttccagcgttgcttttgtaattgtagctcttacatttagggctatactacattttttactttatttttaaatatggtatgaggtggggccctactttattcttttgtatatggatatccagttttctcagcacagtttgttgaaaagactcttctttccccatgaattgtcttggcatccttattgaaaatctgttgaccataaatgtaagggattatttctggactctggattctgttgtgttgatctctgtttctgttcttatgtcagtactgcactgtcttggttactttttagtatttttttttaattggcaactcagagtcttctaactttgttcatctttttcaagattgttttggctgtcctgtatcccttgcatttccataaaattttaggatcagcttgtcaatttctgaaaagaagc

SEQ ID NO: 370245 - DNA, 556 bp, Homo sapiens
ttctcttcaaatcaattaaaagacaaatcatggctggaagactttgatacttagatacagatttcagaatctacttgtttagtatcttatttttcccattttcaaagttgaggatgtagctggaagtcacagaccctagagctcacctggacactagcactaattgactgggcaattctaagccctttctggctttcagggctagacttaatgagatttaagaacaccaaataactaccatagcccratgcttcttgaagctagtgaagagtgacagcatccccgaacactactaatgctgaaaggaggagcaatcacggtccctcggtgggcaggccttgggactttaggaatatccaaagagggggaactgatgcaagatgctacaaccttagaatcagagagggaaatgacacttatcttaatgagcagctcagctgcaggggttctaatggtcttgggtgggaatgggaggccagaggtgagatctcagctgtaggagcctgggaggtgggtgactactctttgctcattccaggtgctgcagtgtgtccag

SEQ ID NO: 370246 - DNA, 565 bp, Homo sapiens
aacttgaaggtccagctcagatgtgacccagttatcagaattagagttcacaaagatggacgtgggcttggaacaagcaaaatccccgtaatcagaattaaactccaaagggtgaggctagcacaatttaaggagctgttgctttaggccagatgtcataaactttctgcacaaggctagatagtaaatattttaggctttgtgggtcatacagtctctgttacaactacttagctctaccattgtagcagaaaagcagaaggcagccatagacaatatggaaatgaatgggcattactgtattctttatttacaagaacaggcagtctrtggttttctgacccctgttttaggttctgtctggggaaattgggtggtttgaatctgtaggtgacaccaagtaggaatagctgtagaggaaccaggcagagtcagaaaaatgtgcaagggactcccaggtagggaatagtgttaggatgaggcacacgcaggggaggggaaggcaaatattagaaacaggagggagttaattttggctggagtatgggatgcttgaaggagagaa

SEQ ID NO: 370247 - DNA, 549 bp, Homo sapiens
gtctcagtgccctacattcgtctgtgagctccccacatgtaagaatcacatctcatgttttgttctctcagctaaaacaaagtggtgatcaataattactgtcaatgttattagggagcctgctattggaacttggaagattaycagtagcagaaaaactgaagtgggaatggaaagacgtgaaagtagaacttagcctgggctagttctccagagtcttgagtctggggaggaactgccctttcatctttaccatgggtttcttgaattctggcttctgaagctctgcctttcgacagtaatcagcatttaggcaggtgacagaatcaggtgttcagggtgtgccctccagggaagaagagagagaggtgatggccggcaccccatgcagcagtgactaatgtgggccaaactggcaccatgcctcccagcccccgggtacgtgggagctgtaggcacacatggtagattggagctggagggatcatttaccagcccttccctgagctggaagcaggcggggagcagcaagccaattggcagacttgc

SEQ ID NO: 370248 - DNA, 623 bp, Homo sapiens
cagcttgttaatgcagaagaatccaggatgactgagccctctaggcctcaatttcctcacctgaaacatgggtaaccatgcttatgcttttatatcacaggatggctatagaggtcaataagatgaaatgtacctacatacaaattagaaagcatcttattctcggagggtttcgatcacatggcaaaaccttgagatggagtaggaaacaagttgatagacgagcatagcagaacggccttcatgaagacacagaaaaagaaatataccacaaagatacaggaaactaaaaatgacratctttatggggtggaaagctcaatcaagtgagatagctctgaaaaagcaggatattgtgggccttgaattctaagttaggaaatttagaatcactactgtagatgtcattttcaaaagataaatcccttggtacataatttggttcatattttgagacagctgggaacatttggcacagacaaaagggctattttaaatgctttgactcctttaaagaatattaaagggacacgtgaagaaatcagataattgcttgcagggatcaagtgtcaggatggtaatattgctaaaagaggaaagaagagaacatggttgtttttttg

SEQ ID NO: 370249 - DNA, 623 bp, Homo sapiens
cagcttgttaatgcagaagaatccaggatgactgagccctctaggcctcaatttcctcacctgaaacatgggtaaccatgcttatgcttttatatcacaggatggctatagaggtcaataagatgaaatgtacctacatacaaattagaaagcatcttattctcggagggtttcgatcacatggcaaaaccttgagatggagtaggaaacaagttgatagacgagcatagcagaacggccttcatgaagacacagaaaaagaaatataccacaaagatacaggaaactaaaaatgacaatctttatggggtggaaagctcaatcaagtgagatagctctgaaaaagcaggatattgtgggccttgaattctaagttaggaaatttagaatcactactgtagatgtcattttcaaaagataaatcccttggtacataatttggttcatattttgagacagctgggaacatttggcacagacaaaagggctattttaaatkctttgactcctttaaagaatattaaagggacacgtgaagaaatcagataattgcttgcagggatcaagtgtcaggatggtaatattgctaaaagaggaaagaagagaacatggttgtttttttg

SEQ ID NO: 370250 - DNA, 574 bp, Homo sapiens
ggatattgtgggccttgaattctaagttaggaaatttagaatcactactgtagatgtcattttcaaaagataaatcccttggtacataatttggttcatattttgagacagctgggaacatttggcacagacaaaagggctattttaaatgctttgactcctttaaagaatattaaagggacacgtgaagaaatcagataattgcttgcagggatcaagtgtcaggatggtaatattgctaaaagaggaaagaagagaacatggttgtttttttgagttaaaaatgaactggcattatgccagatgtgggcaaacagaatagaagtaaatttgaaaggagtttcaatataactcttgatgcttggaggcaaaaagcaaatggccttcagcgtaatttggaataaattctagcattattggatgaacaacacatggcttaaattttaatccaaaagctcaaccagctctctaagatgaaagtgtggcattggtagaagaatgagtttttggaaaataatatagaggaaatagtacctggtgttggtgataaytctatatattcaattgtttaaat

SEQ ID NO: 370251 - DNA, 518 bp, Homo sapiens
cttacaatcatggcagacggcaaagcagaagcaggcacatctcacatggtgggaacaggagaaagagagggaggaggtgcgacactgtttcaaaaaccagatctcatgagaactcaccactcactgtasagtaccaagagagatggtgctaaaacattcatgacaactccacccccatgagccaatcgcctcccactaggccttccctcccacactgggaactacaactcaacatgagatttggtggggacacacatccaaatcatatcaagagctgaagatccagtccttgtgttgacactgctggggagcagactttgggaagtaaggggtcaccaaggaataaggcaagaaatcagttacttggaaattacgatgccaaggtcagagcaggattaactgtacaagcaggagttagaagagtcatatagagatgcttcagaaaaaacattataattattataaatataatactgttataataataagacagatgataggaattctagatgactgtt

SEQ ID NO: 370252 - DNA, 518 bp, Homo sapiens
cttacaatcatggcagacggcaaagcagaagcaggcacatctcacatggtgggaacaggagaaagagagggaggaggtgcgacactgtttcaaaaaccagatctcatgagaactcaccactcactgtagagtaccaagagagatggtgctaaaacattcatgacaactccacccccatgagccaatcgcctcccactaggccttccctccmacactgggaactacaactcaacatgagatttggtggggacacacatccaaatcatatcaagagctgaagatccagtccttgtgttgacactgctggggagcagactttgggaagtaaggggtcaccaaggaataaggcaagaaatcagttacttggaaattacgatgccaaggtcagagcaggattaactgtacaagcaggagttagaagagtcatatagagatgcttcagaaaaaacattataattattataaatataatactgttataataataagacagatgataggaattctagatgactgtt

SEQ ID NO: 370253 - DNA, 559 bp, Homo sapiens
taaactttataacaacattgaactaattttagataatcattttctcattgttttgcttcttgtttaattgccaaaacaggatcctttttataatttagcatgtatwtgaacgcatgtgcttctgaatcttgaaaataaatatatgaataaagcctaaatcattacaaaggtaaacatctcaccaaagcaggagtatatggttggtcccaaccatgtgaaggctttataaaatgactaaggttctttcttttcttttctcttctgatgtctatggcctattcacctacttaatgtgcaatatattttatctgtaacaaaacaagagagttgtaaatttggcaatctagtatcaaaacaatgaacatttgtttttaaatctttaaacatctttaaaatatgctacaagaatggaattatccaataagaaaaaaattttttgttaaggaaattaacaaagcgataagggtaaaagtgaaagttgatgatgttatagtatttttattcaaatgtttgtagacggctcttcttgagattgtttatagtgaccactacttcaatc

SEQ ID NO: 370254 - DNA, 559 bp, Homo sapiens
taaactttataacaacattgaactaattttagataatcattttctcattgttttgcttcttgtttaattgccaaaacaggatcctttttataatttagcatgtatatgaacrcatgtgcttctgaatcttgaaaataaatatatgaataaagcctaaatcattacaaaggtaaacatctcaccaaagcaggagtatatggttggtcccaaccatgtgaaggctttataaaatgactaaggttctttcttttcttttctcttctgatgtctatggcctattcacctacttaatgtgcaatatattttatctgtaacaaaacaagagagttgtaaatttggcaatctagtatcaaaacaatgaacatttgtttttaaatctttaaacatctttaaaatatgctacaagaatggaattatccaataagaaaaaaattttttgttaaggaaattaacaaagcgataagggtaaaagtgaaagttgatgatgttatagtatttttattcaaatgtttgtagacggctcttcttgagattgtttatagtgaccactacttcaatc

SEQ ID NO: 370255 - DNA, 526 bp, Homo sapiens
atattatgagagagaggtgaacaattgggsaattggtgctatttttccaataaaacactataatatatgaaatgtccatgtttccacatacatctcatctttaatgctgaaattttttcaaagctgcaaccaatttgaaagaagtttcaacctaccacctgtatcctacattaacattttactttgcttgtttttgttacgtatctatccgtttgcccattactcaatccgtccatcaatccatcttttctgtatatatatttcaaagtaaatagcagacatctggatgtctccctatatacttttaaattcttatctttagagtttaatatttgtctaaaatatcattgttttgataacgacttttcccagcttctatctcccatgttcttttgctccaatccattgtcttccctacctctgttgtagtctgagattatcatcagtcccactcaagtctgatcctgaatccttcataaaaggcaactgtaatgcccaaaaaagcatgctaagttacactgcaatt

SEQ ID NO: 370256 - DNA, 526 bp, Homo sapiens
atattatgagagagaggtgaacaattgggcaattggtgctatttttccaataaaacactataatatatgaaatgtccatgtttccacatacatctcatctttaatgctgaaattttttcaaagctgcaaccaatttgaaagaagtttcaacctaccacctgtatcctacattaacattttactttgcttgtttttgttacgtatctatccgtttgcccattactcaatccgtccatcaatccatcttttctgtatatatatttcaaagtaaatagcagacatctggatgtctccctatatacttttaaattcttatctttagagtttaatatttgtctaaaatatcattgytttgataacgacttttcccagcttctatctcccatgttcttttgctccaatccattgtcttccctacctctgttgtagtctgagattatcatcagtcccactcaagtctgatcctgaatccttcataaaaggcaactgtaatgcccaaaaaagcatgctaagttacactgcaatt

SEQ ID NO: 370257 - DNA, 620 bp, Homo sapiens
gtttcatttgcacattgatatttatctggtttcttattgaaactatgaaaaccccagagcagtaacccttggctctttctaaatatatgaaattcaaacgtattattttttaagttattatgatgtacatattttcccagaggaactttgccaacaaacctgttccttttcatatatcaacttggtactcaggctggctaatctcgttggagaaaaaacgtgtttttcagttcctgggcccccacccacgtatcccatcaatccagacaatagccagtgtttttgtctctgcattctttaattatgagagcattayggctaatgaattaatgaattacctctgagaatagctttatccccactacataaatctcaactagaagtagtggcaataaaattgatttagaaatggtaaatataatttgtttacttattgaacaaagagacatttcaatgttagccaaaaaattgagtctttatgtctctgttataatagaagttttttttttttgtttttttttttgagacagatttttgcctgttgcccaagctggagtgcagtggcacagccttggctcactaaaaccgctgactcttggctcaagcaattctcatgcctc

SEQ ID NO: 370258 - DNA, 593 bp, Homo sapiens
ctgtttcatttgcacattgatatttatctggtttcttattgaaactatgaaaaccccagagcagtaacccttggctctttctaaatatatgaaattcaaacgtattattttttaagttattatgatgtacatattttcccagaggaactttgccaacaaacctgttccttttcatatatcaacttggtactcaggctggctaatctcgttggagaaaaaacgtgtttttcagttcctgggcccccacccacgtatcccatcaatccagacaatagccagtgtttttgtctctgcattctttaattatgagagcattacggctaatgaattaatgaattacctctgagaatagctttatccccactacataaatytcaactagaagtagtggcaataaaattgatttagaaatggtaaatataatttgtttacttattgaacaaagagacatttcaatgttagccaaaaaattgagtctttatgtctctgttataatagaagttttttttttttgtttttttttttgagacagatttttgcctgttgcccaagctggagtgcagtggcacagccttggctcactaaaaccgctg

SEQ ID NO: 370259 - DNA, 622 bp, Homo sapiens
tttgcttgttttaattttttgtttaaagaaaatcaaaaattgaaatgcttatttttcaatgcactgtgagtggcctgggttgtattttcagatttgtaatggcagtaaaactcaccaktttaaaatacccatctctgaggccaggcgcagtggctcacacctgttatcccagcagtttggaaggctgaggcaggaggattgcttgagctcaggagttggagaccagccagggcaacacagtgagacactgtctctattattaaaaaaaaattaaaaaataaaaaataaaatacaatagccatctgttgtagaaatttctcagcttttggaaactagtaaatatttacttgtctgaaaaatggcagaattcatagttcaaaaattttgagcatttgtagcaaaataaaagggattctgaacaatatttttccagtctgattgttgttttctttttttttctcccttccactaggtgtcactctgcaaacctgaatggtgtatactacagcggcccctacacggctaaaacagacaatgggattgtctggtacacctggcatgggtggtggtattctctgaaatctgtggttatgaaaattaggccaaatgattttattccaaa

SEQ ID NO: 370260 - DNA, 527 bp, Homo sapiens
acaagggctaggtggtatcagcaactgtataatagaaagtggagggaattcatgagactctgataaatctgataatctcaaaatagcaagcaggcaattgctggaaagcttggaggttccacttgggaacagcagctgaaactggaaaaagttttgcacactccaaagtcaggggaatgcaaagtgtctgacgggcacaatgaatgttcmaaactaaccacccaaatttccactcctggacaagcactgcacagagaagaaacttcttggaaaagaatgctcattgtacggaactgggacgatagagatcaaggaaagacggggtccagatgaaagcaaggaaagaaaacagagtctgaccatctcagaaaataagccgcgattgccgggcgtggtggctcacgcctgtaatcccagcactttgggaggctgaggcgggcggatcacaaggtcaggagatcgagaccatcctggctaacacaggtgaaaccccgtttccactaaaaatacaaaaaattagccgggcg

SEQ ID NO: 370261 - DNA, 527 bp, Homo sapiens
acaagggctaggtggtatcagcaactgtataatagaaagtggagggaattcatgagactctgataaatctgataatctcaaaatagcaagcaggcaattgctggaaagcttggaggttccacttgggaacagcagctgaaactggaaaaagttttgcacactccaaagtcaggggaatgcaaagtgtctgacgggcacaatgaatgttccaaactaaccacccaaatttccactcctggacaagcactgcacagagaagaaacttcttggaaaagaatgctcattgtacggaactgggacgatagagaycaaggaaagacggggtccagatgaaagcaaggaaagaaaacagagtctgaccatctcagaaaataagccgcgattgccgggcgtggtggctcacgcctgtaatcccagcactttgggaggctgaggcgggcggatcacaaggtcaggagatcgagaccatcctggctaacacaggtgaaaccccgtttccactaaaaatacaaaaaattagccgggcg

SEQ ID NO: 370262 - DNA, 527 bp, Homo sapiens
acaagggctaggtggtatcagcaactgtataatagaaagtggagggaattcatgagactctgataaatctgataatctcaaaatagcaagcaggcaattgctggaaagcttggaggttccacttgggaacagcagctgaaactggaaaaagttttgcacactccaaagtcaggggaatgcaaagtgtctgacgggcacaatgaatgttccaaactaaccacccaaatttccactcctggacaagcactgcacagagaagaaacttcttggaaaagaatgctcattgtacggaactgggacgatagagatcaaggaaagacggggtccagatgaaagsaaggaaagaaaacagagtctgaccatctcagaaaataagccgcgattgccgggcgtggtggctcacgcctgtaatcccagcactttgggaggctgaggcgggcggatcacaaggtcaggagatcgagaccatcctggctaacacaggtgaaaccccgtttccactaaaaatacaaaaaattagccgggcg

SEQ ID NO: 370263 - DNA, 548 bp, Homo sapiens
tcattatgctgttataagaccggtccctgtctgggtgagtaacttcctcaagttgagttttattacaatacttttgtttttttggccaggcacagtggctcacgcctgtaatcccagcactttgggaggccaagtctggagaattgcttgagcccaggatgggcaacatagcgagaccccgtctctattaaaaaaaaagaagaaaaaaacttctagttttattcacagtcactatgaaaaatagccacatgaagttccttatggtattttaatagtatattgtcattttccattttgtagtcttgaattgaaaatgagtgacaaaaatttttcttaaaattcagtgctaggaaaagtttttcttcctttgagaaactttcagcctcttttgaaaatgacaattatgtaagcggttgrcgtacctgggtctcaggaagctcagtgttttaattcgttgctcaatagtatgtttactattacctgtatgcttttccgggaataccattttatactaaaaatacttacactttgaaatatttatttttaaa

SEQ ID NO: 370264 - DNA, 548 bp, Homo sapiens
tcattatgctgttataagaccggtccctgtctgggtgagtaacttcctcaagttgagttttattacaatacttttgtttttttggccaggcacagtggctcacgcctgtaatcccagcactttgggaggccaagtctggagaattgcttgagcccaggatgggcaacatagcgagaccccgtctctattaaaaaaaaagaagaaaaaaacttctagttttattcacagtcactatgaaaaatagccacatgaagttccttatggtattttaatagtatattgtcattttccattttgtagtcttgaattgaaaatgagtgacaaaaatttttcttaaaattcagtgctaggaaaagtttttcttcctttgagaaactttcagcctcttttgaaaatgacaattatgtaagcggttggsgtacctgggtctcaggaagctcagtgttttaattcgttgctcaatagtatgtttactattacctgtatgcttttccgggaataccattttatactaaaaatacttacactttgaaatatttatttttaaa

SEQ ID NO: 370265 - DNA, 548 bp, Homo sapiens
tcattatgctgttataagaccggtccctgtctgggtgagtaacttcctcaagttgagttttattacaatacttttgtttttttggccaggcacagtggctcacgcctgtaatcccagcactttgggaggccaagtctggagaattgcttgagcccaggatgggcaacatagcgagaccccgtctctattaaaaaaaaagaagaaaaaaacttctagttttattcacagtcactatgaaaaatagccacatgaagttccttatggtattttaatagtatattgtcattttccattttgtagtcttgaattgaaaatgagtgacaaaaatttttcttaaaattcagtgctaggaaaagtttttcttcctttgagaaactttcagcctcttttgaaaatgacaattatgtaagcggttggcgtacctgggtctcaggaagctcagtgttttaattcgttkctcaatagtatgtttactattacctgtatgcttttccgggaataccattttatactaaaaatacttacactttgaaatatttatttttaaa

SEQ ID NO: 370266 - DNA, 567 bp, Homo sapiens
gaaggggaaaaatataacttattcatattttaaatttaagttacctcaattcttttggaaaatagtgtgatatgcataaatgcttaaatcccctaaacttctgaaatcttaccaaacagcaaagtgatatctatttcggaacagtgtaacaaagatggttagccctaactatcctttaatagtctatgccaaagtttactcctctgattgatcgagcttcctgttactcaaactatgtaacaacctcgtatatccgatgattttaaaaatgtttgctcatttaaaagctactgtacttcataakaaaataacctcgtcactacataaataccaggtttaccttcaattcaaaaactctgtattatattggtgttcaggggtcctcaccaggaaggtgctagggaaagaaaggagcaggtgcacccgaggctctgcaacacccactccggtaaccagagaacaccagcaggcggagtctggaaagcggttatggggcgggggtggtaggggcgcccagaaagcccgctccttccagcgcccaaacacgaaccgtcacccgtaagacac

SEQ ID NO: 370267 - DNA, 582 bp, Homo sapiens
caaactatgtaacaacctcgtatatccgatgattttaaaaatgtttgctcatttaaaagctactgtacttcataataaaataacctcgtcactacataaataccaggtttaccttcaattcaaaaactctgtattatattggtgttcaggggtcctcaccaggaaggtgctagggaaagaaaggagcaggtgcacccgaggctctgcaacacccactccggtaaccagagaacaccagcaggcggagtctggaaagcggttatggggcgggggtggtaggggcgcccagaaagcccgctccttccagcgcccaaacacgaaccgtcacccgtaagacacacaatacagacctcaactcgctcaaaaaaacaaaacaaaacaaaaaaaattaaaccaggcgagttcctggggagtaggctgagggatgcaaagttggcgcgcccagcctccctggcggggcctaatccccaaacgccagtttctgyaaaccaaacaacgtttcccccagtcccacttggcatttagtctttcccggttctaggcccaattctaactagataggtaggaagggagaaagaaggg

SEQ ID NO: 370268 - DNA, 466 bp, Homo sapiens
gagaccgcagcagagaggcccacacgtttcctggctgcctcggccccagtggccgccttttcgacctcagctacgcagcgccaaccgccgcagccaccgccatcttaggatctcattgtggtgggagaagaggggcgggggtactgcagagggggcaacgcgcggcgggacatgcgccgtctcctcggcaacggcgcgcgggggcgagaactcgccggtgcggagagcgcaatgcgagctagactggagtcatgtgacccgccggagtctgtggtgycgcttctggctctttaagccgaaaagagattacaccaacgaatccgcccccacccgcccaggaactatgtatcccagaatgccaactagacctcgcgttctaaacgcctgccggccacaggtggaggactacaaatcccagcatgccgtgcgcttccggcgttgatcgcggagctggaggccctaggcg

SEQ ID NO: 370269 - DNA, 558 bp, Homo sapiens
ctttcctgggcaaaccgggatatttggtcattcaccgacaaagctttacataatctgtgagcatccacctcctcarcacatctcttttcccatcatttttgcctgttctggctacattggcctctttggcatttttggaaaaccctgaaatacacagacttctcagggcgattgcacttgctgttctctctacctggaatgctcttctgaaaatctctgtggtttgctccatgacatccttcaggtctttgctcaggtattcccttcccagagataccttccctgactaccacatataaaataacagctgtcccctactgtcttagtccattctcattttataaatttacccagtaaagatctgcctgagactgggtaatttataaaggaaaaaggtttaattgactcacagtttgccatgactggggaggccccaggaaacttacagtcgtggtggaaggggaagcaaacatgtccttcttcacatgatggcaggaaggggaagagccaagcaaaagccccttataaaaccatcagatctcaggagaactcactatc

SEQ ID NO: 370270 - DNA, 558 bp, Homo sapiens
ctttcctgggcaaaccgggatatttggtcattcaccgacaaagctttacataatctgtgagcatccacctcctcaacacatctcttttcccatcatttttgcctgttckggctacattggcctctttggcatttttggaaaaccctgaaatacacagacttctcagggcgattgcacttgctgttctctctacctggaatgctcttctgaaaatctctgtggtttgctccatgacatccttcaggtctttgctcaggtattcccttcccagagataccttccctgactaccacatataaaataacagctgtcccctactgtcttagtccattctcattttataaatttacccagtaaagatctgcctgagactgggtaatttataaaggaaaaaggtttaattgactcacagtttgccatgactggggaggccccaggaaacttacagtcgtggtggaaggggaagcaaacatgtccttcttcacatgatggcaggaaggggaagagccaagcaaaagccccttataaaaccatcagatctcaggagaactcactatc

SEQ ID NO: 370271 - DNA, 532 bp, Homo sapiens
cacgcaaacaacatcacccacacacttcatatctctatcacaatggattcagtttctccttagcacttatcaccaaatataatgaaatattataatatatgtgtttattgtctacctactccaaccgccctgtacaatgtaagcacgaagaggtgagtggctacatctattatgtatactgccctaatgctaggtggatagttaggtactgtactagtttcttgaggccaccataacaaattaccataaactgagtggcctaaaacaacaggagtttattatctcacagttctggaggatacaagtccaaaatcaagaagaacagggccatacttccttcaaaggctctaagagaaaatcctttctggactcttctagcatttggtggttgccagcaattcttgacatcctttgacttgtggcagtatcactctattctctgayaccatcttcacatagctgtctttcctctgtgtgtctctgtgtctaatttccctcttcatataaggacatcggtcattggattagggtc

SEQ ID NO: 370272 - DNA, 587 bp, Homo sapiens
aacagctgcagttatttcacatgtaaattgtcaaaagacacatatccgctttactaacatagwacaagtatcagttacctgaatgctctcaagcctcgaagttggtggggaaaccatgtttccattacatctacagtgggaaacctaacctcacttgctggcaccttccaggatctttggagtcaatgtttttctattatttcctgcttttactgaattactgtaatttctctcaagtctagcctcttttggctgttctttttctccactctgcatcattcccaaagcaacagcctctttccctcttctcaaaatgctgcagatacaaggcatctctgtgtagtagattcttacggaagattcaggcaggggaagaggaagaggaatttaggctgcaccaaacatcttaaaactgactatttaaagatccttgctctttaaagatccttggccatagcccagaacttctccctggctgcctcttgctcagctccctggcatcttgatgtattccttcctcacatcctcctccccattcttatctcattcactccttcctttttcacacctttcttcttgggttacct

SEQ ID NO: 370273 - DNA, 587 bp, Homo sapiens
aacagctgcagttatttcacatgtaaattgtcaaaagacacatatccgctttactaacatagaacaagtatcagttayctgaatgctctcaagcctcgaagttggtggggaaaccatgtttccattacatctacagtgggaaacctaacctcacttgctggcaccttccaggatctttggagtcaatgtttttctattatttcctgcttttactgaattactgtaatttctctcaagtctagcctcttttggctgttctttttctccactctgcatcattcccaaagcaacagcctctttccctcttctcaaaatgctgcagatacaaggcatctctgtgtagtagattcttacggaagattcaggcaggggaagaggaagaggaatttaggctgcaccaaacatcttaaaactgactatttaaagatccttgctctttaaagatccttggccatagcccagaacttctccctggctgcctcttgctcagctccctggcatcttgatgtattccttcctcacatcctcctccccattcttatctcattcactccttcctttttcacacctttcttcttgggttacct

SEQ ID NO: 370274 - DNA, 587 bp, Homo sapiens
aacagctgcagttatttcacatgtaaattgtcaaaagacacatatccgctttactaacatagaacaagtatcagttacctgaatgctctcaagcctcgaagttggtggggaaaccatgtttccattacatctacagtgggaaacctaacctcacttgctggcaccttccaggatctttggagtcaatgtttttctattatttcctgcttttactgaattactgtratttctctcaagtctagcctcttttggctgttctttttctccactctgcatcattcccaaagcaacagcctctttccctcttctcaaaatgctgcagatacaaggcatctctgtgtagtagattcttacggaagattcaggcaggggaagaggaagaggaatttaggctgcaccaaacatcttaaaactgactatttaaagatccttgctctttaaagatccttggccatagcccagaacttctccctggctgcctcttgctcagctccctggcatcttgatgtattccttcctcacatcctcctccccattcttatctcattcactccttcctttttcacacctttcttcttgggttacct

SEQ ID NO: 370275 - DNA, 587 bp, Homo sapiens
aacagctgcagttatttcacatgtaaattgtcaaaagacacatatccgctttactaacatagaacaagtatcagttacctgaatgctctcaagcctcgaagttggtggggaaaccatgtttccattacatctacagtgggaaacctaacctcacttgctggcaccttccaggatctttggagtcaatgtttttctattatttcctgcttttactgaattactgtaatttctctcaagtctagcctcttttggctgttctttttctccactctgcatcattcccaaagcaacagcctctttccctcttctcaaaatgctgcagatacaaggcatctctgtgtagtagattcttacggaagattcaggcaggggaagaggaagaggaatttaggctgcaccaaacaycttaaaactgactatttaaagatccttgctctttaaagatccttggccatagcccagaacttctccctggctgcctcttgctcagctccctggcatcttgatgtattccttcctcacatcctcctccccattcttatctcattcactccttcctttttcacacctttcttcttgggttacct

SEQ ID NO: 370276 - DNA, 426 bp, Homo sapiens
agcatgcacctgtattaccaactactcaggaggttaagatgcaaggctcacttgaggttaggagttcgaggccagtctggcaacatagtgagatcctcatctctttttaaaaaagaaaaagcttggcatttaaaactttttcctctaacagaaaaaaacaaaattgagacaagtagaataacctttaaggaaatcttgtcaagaacgtagatcagggtataatttttatgtcagtgaactttacaaactctgatagcatcaattagataaaattttgcagaccttcagattgtttaaaagtacccagaatagatccaaattccttgtctttagaataaagctgtcttcaaaggactgtgagartaagaaaatgtggagtcatctggaaggtttaatgcttagaagttatggtacagggccaggcac

SEQ ID NO: 370277 - DNA, 486 bp, Homo sapiens
gcaccactgcactccagcctgggtgagagcaagactctgtctccaaaaaaaaaaaaaaaaaaaaaaaaaaaaagtctagaaacagatacttgtattttatacttttttttttttcaaatcagttaagtttttgatgacatgatatttgcttttgttttcaractatggttacaacatggtaggtatctgtataaacgaatagttataagtgctgaaaaaagctggactacatcatcagctttttattctctattggatattcccattagcataaaaacatacttttatttcttagtaaaaaatattctcttaattctaccagctattgtcctatctctttactgtcttttgtagcaatatttcaagagttatctatacttgttaactccaatttctgtcctcccattttctcttaaatctgttccaacaagtgtttactatgccagatccattctcatcagagccacctctgcattgccagttgtc

SEQ ID NO: 370278 - DNA, 486 bp, Homo sapiens
gcaccactgcactccagcctgggtgagagcaagactctgtctccaaaaaaaaaaaaaaaaaaaaaaaaaaaaagtctagaaacagatacttgtattttatacttttttttttttcaaatcagttaagtttttgatgacatgatatttgcttttgttttcagactatggttacaacatggtaggtatctgtataaacraatagttataagtgctgaaaaaagctggactacatcatcagctttttattctctattggatattcccattagcataaaaacatacttttatttcttagtaaaaaatattctcttaattctaccagctattgtcctatctctttactgtcttttgtagcaatatttcaagagttatctatacttgttaactccaatttctgtcctcccattttctcttaaatctgttccaacaagtgtttactatgccagatccattctcatcagagccacctctgcattgccagttgtc

SEQ ID NO: 370279 - DNA, 564 bp, Homo sapiens
tagtaattaaaactatgtagcactggagggagaggcacataaatcaatggaacagggaatccaaaaatagactcacataaacgtgccagctaatatttatttgttttaaagtacatttgttaatattagggtccatcctttatgttgtataggtctatgagtttgataaatgcataatgccatgtatctactattacagtatcatacagaatagtttcactgcctcaaatatccctagtgctccacttattcatcctttccctgctactactccayaaacctctggcaaccactaggtttttcttcttttttttactgtctaaagttttaccttttcccaaatgtcatatacttggaatcatacagtatgtagcctttttatactgatttctttcacttaatatgcattcaaagttcctgcatgtcttctcatggcttgacagctctttttagcaccaaaaaatatctcattgtctggaaataccacagattatttacccattcgcctactgacaacttgataatattgagtcttcctatccacgaacatgaaacatctttccc

SEQ ID NO: 370280 - DNA, 534 bp, Homo sapiens
tgtttccataatgtaaaaataccattttacattcccactcacagtgcatgtgggttccaatttttctgcatcagtcatagaaacagaaagcagaaaaggggttgctaagggatgaggtagggaggagaggaaattagtgtttaaygggtatggagtttctgttttgcaagatgaaaaagttctagagaactgctgcataacaatgtgaatatacttaacactactgaacttaaaaatggttaagatgataaacttaatgttatgtgttttgtcttaaaaaacagattatgtcacactgaaatcttctaatggtttagctttatataaacaactgactgcaattattggtcaaatcttagacttcgttatctatgcttatggaatgtcttaacagcttgaactgtgtgatttacagcctccaattatactctgacatttcttgattacttctgaaaaagtcttttattttcaaagagacacatgtctactaagaattaagattagtgaatttaataatcctgataagaaaactga

SEQ ID NO: 370281 - DNA, 534 bp, Homo sapiens
tgtttccataatgtaaaaataccattttacattcccactcacagtgcatgtgggttccaatttttctgcatcagtcatagaaacagaaagcagaaaaggggttgctaagggatgaggtagggaggagaggaaattagtgtttaatgggtatggagtttctgttttgcaagatgaaaaagttctagagaactgctgcataacaatgtgaatatacttaacactactgaacttaaaaatggttaagatgataaacttaatgttatgtgttttgtcttaaaaaacagattatgtcacactgaaatcttctaatggtttagctttatataaacaactgactgcaattattggtcaaatcttagacttcgttatctatgcttatggaatgtcttaacagcttgaactgtgtgatttacagcctccaattatactctgacatttcttgattacttctgaaaaagtctttyattttcaaagagacacatgtctactaagaattaagattagtgaatttaataatcctgataagaaaactga

SEQ ID NO: 370282 - DNA, 473 bp, Homo sapiens
cctcctgggtcctcaggctttcctgtcattgtgagatcacgtggtagcatggaaattgcaatctctgctcctcagaagatggaattgaggtagctctatgcagagagaaatgaccttgtacttgcaaacttaggtcccgtgtttgtctgcagtcctacccactttaccatgtaataagagagtaatccctgtcagtaacatcatcttagaaagagaaggaacaaccaaatgagatctagtgtgtgtggagatggtgcaacattctttcatcaaagcgactaatacccttaggggaattggcttgatactttgccaaaatgtgggtgtcagtgttgtggggttttttttcccctttgaaatgagactttattagtcatgtggttatcagaaggtgaaaaaatgaatgtgtgtcttctctcacatgaactctattaatatcrgttaagtaagatcctaatacagctctgtgtatt

SEQ ID NO: 370283 - DNA, 552 bp, Homo sapiens
cccaggctttgcggcccctttgtgggtctaggccagcgcctcaccttscaccctattccacctccagtccccttaggtgcccccgcatccctcctccagagtccaggctttgaaactgcagcaactccgcaaagaaagcctttgggaaaacctcttagagtgccgaatttggaggtaggttgggtgagtgggtgggtactcgcggcatttctcaaggttctgggtgttcgtaactaggggaacaaggcctatgggggcagaaatgacagacgcacgaacagcgtctctgtggctgtctgcagcgcgaggttcacgtctattgttttatgcctccgggagagctaccccgcgtgatagatcttttcagatccatcactggaagaaaaaccctggtgataacgattatctcccgctcgcgctatctcgccatcgccccaattcatctccctctggctctagcccttggggagacgaggagggcgaggcgctggcaggaggaccggccaagccgctgtcctcggatggagaggagagggagaggcacgaggccac

SEQ ID NO: 370284 - DNA, 703 bp, Homo sapiens
tatcaggcttctggtcaaagccattctggaagtctccaggaagttccaaatgttcccacatttttctgacttcttctgagccctccaaactgttccctcctctgcctgttacccagttccaaagttgcttccacgttttcgagtatcttttcagcagcacccaactcctggtaccaatttactgtattagtcattttcacgctgctgataaagaaatacccaagactgggcaacttacaaaagaaagaagtttaattggacttacagttccacgtggctggggaagcatcacaatcatggtgaaaggcaaggaagagcaagtcacattttatgtggatggtggcaggcaaaaagaracattgtgcagggaacttctcttttttaaaaccatcagatctcatgagacttattcactattatgaaaacagcacaggaaagactccccactccccataactcaatcatctcccaatggattcctcggatgacacgtgggaattgtgggagttacaattcaagatgagatttgggtgggaacatagccaaaccatatcaatggcatgtagaaaaagagtcagttaagaaattaaaatggaaaacaaagaatgattcaattaacacaaaagaagataggaaaagctaaacagaggatgaaaaatcaactgagataacttaaaaacaaatagtaagatgataaacttaa

SEQ ID NO: 370285 - DNA, 622 bp, Homo sapiens
tgattttttggatatgacactaaaagcacaagaaataacagtaatgtagataaatttgactatgtcaaaatttaaaatgtctatgcatcagaagacacaattaacagtgtaaaaggcaactcatggaatgcaagaaaatatttgcaagtcatatccgataaggggttaatatacagaatatataaaggaactgtaattcaacaataaaaaatgaacagtcaaaatttaaaaatggacaaaagaatagctatttctcaaagaagatagatcaatgtccaataaacacataaaaaggtgctcagcattactaatcatatggtaaatgcgaattgaatgcacaatgacatatcaccacacatccattattatggcttctgtcaaaaaaaaagggttgacaaggatatggagaaactggaaaccttgtgtaccrttgacaggaatggaaaatagtagagcagctgtggaaaacagtatagtggttcctcaaaaaactaaaaatacaattactatataacccagctattccacttctgggtatacactcaaaagaattgaaagcagagtctcaaagaaatagttatatactcgtgttcatattagcattatctgcaatgagtgaaaa

SEQ ID NO: 370286 - DNA, 608 bp, Homo sapiens
gtttattagaaaaataattaaattaacccctagcaagactgatcatggaaaaaaamcactaattccactaccagaaacaaaattaataatatatctataggtcctacagatattataatgagggaatattataaataatgtcaataaattcaacaactagatgaaatgggtatattccttgggaaaatacaacttaccaaattctgaatagaccagcactattgaagaaattaaataaatgataggggtccttacacgaacaaaactccaaacccagtttgtttcacatgaattctatgaaacatttaagaaagaagtaatgtattcatgcataaatgtttggggaaaatatgaaacagtacattttataggtaagcataaccataaccaaatttggaaaaggcattacaagaaaacagaattctaggcctctatccctcatgaacatagaaataaaaatctttagcaagttgttaataaattaaatctagaattacataaaaagtttatacatcataagcagctaggatttattcccggggtgcaaagatggtttaataattgtaaatcaaccaatgtaatttaactaattaacagaaaaagggagg

SEQ ID NO: 370287 - DNA, 608 bp, Homo sapiens
gtttattagaaaaataattaaattaacccctagcaagactgatcatggaaaaaaaacactaattccactaccagaaacaaaattaataatatatctataggtcctacagatattataatgagggaatattataaataatgtcaataaattcaacaactagatgaaatgggtatattccttgggaaaatacaacttaccaaattctgaatagaccagcactattgaagaaattaaataaatgataggggtccttacaygaacaaaactccaaacccagtttgtttcacatgaattctatgaaacatttaagaaagaagtaatgtattcatgcataaatgtttggggaaaatatgaaacagtacattttataggtaagcataaccataaccaaatttggaaaaggcattacaagaaaacagaattctaggcctctatccctcatgaacatagaaataaaaatctttagcaagttgttaataaattaaatctagaattacataaaaagtttatacatcataagcagctaggatttattcccggggtgcaaagatggtttaataattgtaaatcaaccaatgtaatttaactaattaacagaaaaagggagg

SEQ ID NO: 370288 - DNA, 608 bp, Homo sapiens
gtttattagaaaaataattaaattaacccctagcaagactgatcatggaaaaaaaacactaattccactaccagaaacaaaattaataatatatctataggtcctacagatattataatgagggaatattataaataatgtcaataaattcaacaactagatgaaatgggtatattccttgggaaaatacaacttaccaaattctgaatagaccagcactattgaagaaattaaataaatgataggggtccttacacgaacaaaactccaaacccagtttgtttcacatgaattctatgaaacatttaagaaagaagtaatgtattcatgcataaatgtttggggaaaatatgaaacagtamattttataggtaagcataaccataaccaaatttggaaaaggcattacaagaaaacagaattctaggcctctatccctcatgaacatagaaataaaaatctttagcaagttgttaataaattaaatctagaattacataaaaagtttatacatcataagcagctaggatttattcccggggtgcaaagatggtttaataattgtaaatcaaccaatgtaatttaactaattaacagaaaaagggagg

SEQ ID NO: 370289 - DNA, 584 bp, Homo sapiens
tgacgttggaataggcaaatatttctcaatgagaacaaaaatgtactaattattttaaaagtcatagtgttcttcatcaaaattaaaaagtctgctaatcagcagacatattaggtaaatgaaaaagcaagccttagattggaagaatacttgcattacacacatgtgacaaaagatttaaagctagaagacaaaagacaagtatccaataaaaatatatgccaaaatatggaacagacactttgcaaaaaaagttacatgaatggtcaaaaaatacattaaaagttgatcaaagtcataagttattagggaaatccaaaataaaaatcacaatggcctatcacttcagacccacaagaacaggtagaattaaaaagattgaaaacaccaaatgttggcaaagatgtgaaaaatgagaaccaatggtacaactacttcagaaaactgttcgtttctttcttatagatttagaggtttgctgaccccagaatttctactcctaaatatatgccaagcataaatcaaaatatgtattcacaaacaggcttctagaggaacatayttagtcactttctttataatag

SEQ ID NO: 370290 - DNA, 606 bp, Homo sapiens
gttgctgtctttgctcagctttgctttgcagacataagtgggtcatttggtctctgtggttttcacagaggcttctaataagagggttagtcaggtcattggctttctgagaaacatcttccaagaagcacactcagattgcctgttttctaagtgaatctgatggaatgcagttgcaaacgtaaatattggaggggatgtatgccccaaattcacctggttaataattaccataatgatgtattttcctgctctgacccmagttgcccagctctccaacagactaaaagggaattatgtgaagtcttgatacagaacttggtacaaggaagcctattctcttccttacttctctggctacccttaaatagtaaatgagccctctagaagatggacagaagggagcatggactggttcttatacaggcacacctcgtttcactgcacttcacgttattgtgcttctcaatcaccaagagcagttatctctctgtgggacaggacaatattactgagatggcctgatattcctgtttcacagtgtcttggttcacaattaaaataaaatttagggtacatttggatcctgtttgtgtgaatgatgat

SEQ ID NO: 370291 - DNA, 537 bp, Homo sapiens
gcagttgcaaacgtaaatattggaggggatgtatgccccaaattcacctggttaataattaccataatgatgtattttcctgctctgacccaagttgcccagctctccaacagactaaaagggaattatgtgaagtcttgatacagaacttggtacaaggaagcctattctcttccttacttctctggctacccttaaatagtaaatgagccctctagaagatggacagawgggagcatggactggttcttatacaggcacacctcgtttcactgcacttcacgttattgtgcttctcaatcaccaagagcagttatctctctgtgggacaggacaatattactgagatggcctgatattcctgtttcacagtgtcttggttcacaattaaaataaaatttagggtacatttggatcctgtttgtgtgaatgatgatcatttaagattctgtagaatctaggatgacagctgaacagtataagcatgagttttacactgtggccttaaggaataaagaaagctattattataattat

SEQ ID NO: 370292 - DNA, 296 bp, Homo sapiens
tcaccataacataaaagtgcaaggtgacgcagcaagtgctgatgtagaggctgcagaaagttatccaacttatccagaagatctagctaaggtcattaatgaaggtggctacatgaaacaacagattttcaatataaatggaacagccttctattggaaggagatgccatctggamtttcatagctagagaggagaagtagatgcctggcttcaaacgacaggctgactctcttgttaggggtgaatgcagctggtgactttaaggtgaaatcaatgttcatttaccattctgaaa

SEQ ID NO: 370293 - DNA, 566 bp, Homo sapiens
ataacattactctaatatttgttaaaagtacattctgtaaataaagccactccagacactgtctccagtaaaaatagtgcctgctccctgacctacacttcaaaccaggtcatctgccttcagttaccttccttagcaagtatttcgtcctataacaatcaggaattttwttctaccagagtgggaaggaaaataatcagttaagtttggaaagatgaatgaatcatcattggattttacttgatttctgtggcatttctatattcttcgtcctggattctttacctgatgtttgacctcagctgcttgggtgaacttatccatgtaggtacttgaagggtattacctcttaattatttgctgccaggatttgcatccacagttttctatgacctagatatgcctatgtcttccattttaacttacctcttcagtgtctcctctcgttctcttttcccttctcaaccttattatgatctataattgtctttagaatcacagatcatggcagagcatttctggtcttctacaacataatagcattgaaaaatggggctccattaata

SEQ ID NO: 370294 - DNA, 611 bp, Homo sapiens
aaagaatccaaatgactatcaactggtgaatacccaaattgtggtatatccatataatacagtgcagactacaagtacacacaacaatatatttgcattttaaaagtatcatactaagtgaaagaaatcctttatgaaagaccacatagttttctcgtatataaaattctctaataggtaaaactatagtgacagaaaacaagtgagagatagctaaaagccaacatgggcaaaaacggttgactgagcacgagggaaactttcaggctgatggaaatgttctatatyttgaggatgggggttgctacatgttaaatctcatgagactgatactgtctaaagtgagtaaattgtattttacaaaattatatttcaataaagctaattttttaaaaatgctgtaaaaatgacaattttggttttaagactatttaaccctcaggatactggaaagtgatgatcaggactgctgcatatggttatgtaaattgtgtgtttacgtaactgttcagttaaatgcagacgctcactcaagaatccgagtagtaccagctgtccaccggcatgaatcattttcctactcttgcctcacccagaacaaggggcagaga

SEQ ID NO: 370295 - DNA, 611 bp, Homo sapiens
aaagaatccaaatgactatcaactggtgaatacccaaattgtggtatatccatataatacagtgcagactacaagtacacacaacaatatatttgcattttaaaagtatcatactaagtgaaagaaatcctttatgaaagaccacatagttttctcgtatataaaattctctaataggtaaaactatagtgacagaaaacaagtgagagatagctaaaagccaacatgggcaaaaacggttgactgagcacgagggaaactttcaggctgatggaaatgttctatattttgaggatgggggttgctacatgttaaatctcatgagactgatactgtctaaagtgagtaaattgtattttacaaaattatatttcaataaagctaattttttaaaaatgctgtaaaaatgacaattttggttttaagactatttaaccctcaggatactggaaagtgatgatcaggactgctgcatatggttatgtaaattgtgtgtttacgtaactgttcagttaaatgcagacgctcactcaagaatccgagtagtaccagctgtccacyggcatgaatcattttcctactcttgcctcacccagaacaaggggcagaga

SEQ ID NO: 370296 - DNA, 601 bp, Homo sapiens
tacatagtagtgttcacttttttgttttccaccaaaggagtcaccaagggaaaccagatgaaactgtgttcattctttattaactttaagcactttaaatgcccctacttcccatacatactgaagcatactaaaattctttaaataaagataaacgatcctaataaatcagcaaagattgtcaagttcccattaatttggcaactttctaatgaagagtttactttatctttgaagaaccctaggatattatagcttttcaaaaaattatgaatgagatacctgttatgtcacagaatacagctggacatggttaaattaattgaatcacctttcaagtaaagaatatgggggaagccacattcagatgactggtgccccaagcatgcggatgtcaggagcctagttcaaattaaggcaactagagtgaacttcagatatcagattttagtctctaatttgctgaaaagcccaaagaagccagttcttgagactgaaataaaggtgggttcctgacacaragaatcaggtacagtggcatagttggaaggtcagtcttgaggagtgccagcagtaagagtgcctccagtgataatactgg

SEQ ID NO: 370297 - DNA, 565 bp, Homo sapiens
atgaggctataaaaactaaacatgacctaagcattcttctgccctccaaaacaaggctcaagatgacagtaaagccaagaaaacatactacctagaagaaagcaaaggatgcgacaaatgctcatcccaccctttcttggtacaacaaagcacagataaaatacagcattggaagaaccaatggtctgatgcagtagcttttcttctgtttctcaaatggtattactattagagatttacacatacgcaaacacacaccattctcacagtaaaatatcatctctaagatgtattagcaggaggcaccacctcaaaagacacaaaataagagctctcagagggtcattacttaaatatagaacagcatgtatttctcatcagtgcataatctttgtgtgtaaatgtatacagtggagcctctccagtatcttaccccagtaaattcatatgaaatagcctgcagcratcctactaggtaagtctgtatagcatggggctggaatcagctggaaggcagcttaataacagtggggaaaaagtaaggctatactagacatttggcatt

SEQ ID NO: 370298 - DNA, 593 bp, Homo sapiens
tatatctatatatcatatatagatgtattttatatataggtataaacagacagctatagatagatgtacacagtgcatatttatatctatatataaaatttactaacaaaaggattctaggaaattgactaaattaccatataagggagaaatagaaacaaattacatttatagaaatgaatcttgttacaggaattattttcctatttatatacaatggttttgattgaaatttataaattaaaattctaataataccgcttatgggctgaattgtgcttccacagaattcatatattgaaaccctaacgcctagtgtgactgtatttggagatagacctttagtgggatgattaatactggcgctcaataaaaactttttgaattgaatcratgacctctcagggtccctttgtatctttctatgagattgatcatctttgcgaagtaagtcagcttttccctactctgcaaaatatcaatcccacaacagagcacgactttaagcttctcccagcccatggctggacaacgtacaagtttagctcattcactaatttagaaattgcttgtcttaaaagagtaaagaaaaa

SEQ ID NO: 370299 - DNA, 577 bp, Homo sapiens
ttgaggggtgactgttctccttagactggtcctgcactctacagctaagcccaggcctgactcattttaggaatgcaaatatagataccgcctgcttccctttctcatggacaaaatccatcagatccctggaggcactgggtcaataatgggcattggacttgggcgttttgtcactgataaatatgggggagtaaatgcacagaggcaagttgggagtcatttctcctgtgctgttgattatgatggacagctgtcccattctcagcacagacattaagaaaaaaaaggctcagaaacttccytcctacttcatccctggagccgacgctctaggaccagaaggaaacctcactttctgaggatacctagaaaggagaatacaaaagcatagacctgcaagaactgtgctggcctgacaccaggcccatgctactgaccagtcccacctctgaccatgcccaggccagggatgtgttgggtcattttgtgagcatgaggaagaggtagacatcctccagactgagaaacaccaactctagatccccctggcctaggatttcttctttttttgttt

SEQ ID NO: 370300 - DNA, 636 bp, Homo sapiens
ccataattgtgtaagatgttaccattgaggggaagctgggtgatggatacatgggctctccctgcactgttttgcaaattcttttgtctgcaattatttctaaacaaaaaaagtaaaaatcagatgtattcatactaaaagttaatttcacctacagctcataattacatgtgagtaaaaacgttgctgcactctcaaaataatcatgcaactcagaattactgttggggtgaggtattggggaggggagatttttttacttattacaggagttatcttctattttgaagttttaactgcttttggagaggggcttttgggagctggatggtagagcatgaggggacaggaggagaaacagatttaagcacaagcataagaaagagatcgctttgtgatgtctaagaaggaggtaaccaaaagcacaaatactttgcatgttcacgtaaagttgtctttctcacgatgaaatgtattcaaatagaattaatacttctttggagttcttcatttgcatctgttaaatatgataataataccttatgtatacagtaatttacarttttcaaaattcacatgtattatctctttgatcttcataaaaattctgtaacacaggtaaagcagtgattatta

SEQ ID NO: 370301 - DNA, 552 bp, Homo sapiens
ggagctatctttgttcttactagctttgtccgctgcagacagttggaatcctggtttctctattccctgcctgtagcaaccacttgtaaggcagctgtgtgccacaaactgtctgcccagctgatttcagtgcagyggtagacagtcccatgtgcatgatctgtttcccacatcaagcatggacttcagcctctctctgctttgccatcccaaagttttgtctgaagtcatcgcctgaaagcaacccagaggtataaagattttaatcctcctgaaggcagccctttaaaggtaggggagggagtcatgaacacatgctctagcctgctccaagttgcttcaacacggctcctctgaaagcccccaagggatctgacacccagttgtgcaatataggagtcagctagctcatgagcccccttccagtttcacattccccaccttctcacttctgcagtcccggttcattttccatataaggctttgtttcatcttccgcttttagggaaacccaatgttccaactagaatttccagctgccagtgtcttgtc

SEQ ID NO: 370302 - DNA, 604 bp, Homo sapiens
atatcactctgattaactagtagttgcttttcagtgtgctgcactgacaacaattttgaggccatatttgrcgtgtgcatgaaaggatgttgtgattgatgagcaatgttttccatgggttccaaacctgggtggggctggcagcctgggtgccatgtgtttggtgactgtgttccagatgatgaaaagaaggctgacacatggactttaggaaagcattctccttagtaacaaatcaaggcagatgggcttagaattagaagctaaataaacagggatgatttaccccttaaggaggctagggctcacctactccaacttaaagaccctttaaggatatggtgtgctctggaagccagaaattaaaaccttttagaattcactaacaccagagctaaatatgaactgtggccattttgcccctagcctcttagggttttttgctttcttttccactcatgttttgtaactttgccacattcacctatgtcattccccagattttttcttgactattggatgccttgagatttccttccatctggagtacttagctcccttggtgaggagagcaggtggggcaggtgaaggcaacctcccacta

SEQ ID NO: 370303 - DNA, 543 bp, Homo sapiens
tgtgttgtggccatcatgacatttggcttaaatgaatgtgttattctttataagttcagtttttaaataaatgattcttacatcagyggttcttaacctttctggagtcatgcacccttctgagaatgtgacaaaagttatggatcttttcttgagaacaatacacacacatacacacacacactcacagacacacactttgcctacaacttcaagagtttcttaattcatccatggatccctagagctataatgaaacctggttaaggaatttgccttatataaaactgttttcatgtcagaggcttgatatacatttctattttaaataaatgtttgaatgaatttggtctttggtgagatgtgattggctgcctactttcccagagtttgtaccatgtcttttgagaatggtctgtggagagggcagtttatttgtatagccaactcaattctgctcttcactagctacaggaccttgtgaaatcctataactagcaagatgtgcagaaatcagctcagattctcagccaggggacctga

SEQ ID NO: 370304 - DNA, 590 bp, Homo sapiens
tattaatagaataagtgccaataagtcatgggaaacccatagacttttttaagagaatcgtattgatagaagagctgcccacttagactaaaagagacagagaaaatacaaaatgaaaagaggscagactgtttcctggcctttctaccagcagggaacagtctgagaaagtagctcagttgcagacatgggcttttttctgtttcttaggaaggctgattaaaggtggaactaatatatgagacagtagagacaagagcctcagagagtagttccaagacagttaagactggaccctaatcaaggaactggcaacatgtgactggcttgatttcagaattgctgtggatcagtaactgctgtgtgtctcccatcccacctcccctgtttctgaataggagtgttcataggagttatcttatctctgtaccaccaacatatattgagtaggagtggggcaggtaacttatcttcagattaagagaaatcattttcaaggaactactcctctccccaggagcccatccacatatggacatgatttagatgacaaaatcctgaaccttaaaccaatgctacaatagaaagag

SEQ ID NO: 370305 - DNA, 590 bp, Homo sapiens
tattaatagaataagtgccaataagtcatgggaaacccatagacttttttaagagaatcgtattgatagaagagctgcccacttagactaaaagagacagagaaaatacaaaatgaaaagaggccagactgtttcctggcctttctaccagcaggraacagtctgagaaagtagctcagttgcagacatgggcttttttctgtttcttaggaaggctgattaaaggtggaactaatatatgagacagtagagacaagagcctcagagagtagttccaagacagttaagactggaccctaatcaaggaactggcaacatgtgactggcttgatttcagaattgctgtggatcagtaactgctgtgtgtctcccatcccacctcccctgtttctgaataggagtgttcataggagttatcttatctctgtaccaccaacatatattgagtaggagtggggcaggtaacttatcttcagattaagagaaatcattttcaaggaactactcctctccccaggagcccatccacatatggacatgatttagatgacaaaatcctgaaccttaaaccaatgctacaatagaaagag

SEQ ID NO: 370306 - DNA, 615 bp, Homo sapiens
aatttgccagaggtcacacagcgagcactagcagcagctccaagatgagatcacatatctcctgcctacrggttcttatttgttttcctttccttttaaatggaaattttaatatcttgacatcaaaaattcaaaatatagcagagaaagactcataagagctataaagtcataataattaagtttacagtagcttttcaagtactacaattatatacctgctcacccacctcactccccatatgaagttctaccttatcatagaatgcttccctaaattgttttctagggactgtctaaaatatggagaaattagcttgtcatttcttcagctgaaaggataacacttttgctacataaaacttttaatttctgtcaaattgaaaagtggcattctaggtctccataaggcaattttatgtcaattaatgcatcagaaggtatttaatgagagccagtgttgtacttagcactatgttaggtaaacccgaagagaaagcggaaaaatgcatatttgttcagaaaggaattgggaagtgaagagggagttgaaagcttcgacactgggatcgcagtgtgagtcaacagagtgtatgagatgaacagtgggtgacc

SEQ ID NO: 370307 - DNA, 574 bp, Homo sapiens
aagcattctttccagcagattataaactgtgccttcctaatgcccaatctcggcccccacaaaacacagaacataggtaggagagacagagatggagagacagaactgcagtattacaaacaccaaaactatttccaagtaataaatagctggtagcagtcacttcagagagcccattgaaggaaagcagtcctcttaaatgctggctttgaacagatctggagagtagctacagcttagcaatatggttagcaatatgataaagacaagaggtggagtgtaaactttggagaactaacactaggatttgagagccttggtattctttgcaattattttgaaagccgttagacaaggaaatgatttcaatccatcctgacaagacaattggatgcacagggaaaaaaaggatgaaggatgataaaaaatataaaagcatttagtaaagccatccatgcatgagagtttcaaatttctttaataaatttataaataaaaactatagaagttaatatcccycctgtatgccatttgtaattgcttttatctttttgctaatattatatcatcctta

SEQ ID NO: 370308 - DNA, 544 bp, Homo sapiens
aaggggatttttctcagatattcactgtgagaacctggtagagttccaggaggaggaacagaaaaaagtgtaggggccaacctaygaatgaggtttttggagtctttaactctcagatttgtccacattgagcctccagcaatttgtcaattacagtttaggtttttctaccctggcactggttcctacagaggtttctactcctaagtacctgctccagtaagttatgattctcttaactgcctgtctctccaatttttgggacagttgtttgccctatgacttcatttctctggcagatctaagaagatttgtagatttttcagtccgatcagtttttttttttttttaacttgttgttaggaaagagtggtgacttctaagctacttactttccagactgcaatcattggcatttgcacagacattacctagctcatagttcttggaaatgagtatgaataaatggccatagaattaagtactgacttaacaaagcttctctctgtttttgatttgtatctgctgaacaaggatgacgagt

SEQ ID NO: 370309 - DNA, 590 bp, Homo sapiens
ttttgggacagttgtttgccctatgacttcatttctctggcagatctaagaagatttgtagatttttcagtccgatcagtttttttttttttttaacttgttgttaggaaagagtggtgacttctaagctacttactttccagamtgcaatcattggcatttgcacagacattacctagctcatagttcttggaaatgagtatgaataaatggccatagaattaagtactgacttaacaaagcttctctctgtttttgatttgtatctgctgaacaaggatgacgagttgtaatggtctatgttttatctttgttagccatcatatttcaaagaggctatgatattatgacccataacaaagaaagtctttgagggagaaatggaattattctgcaagcataaccaagagataaatgaataagcaaatatgtaactccttcagatctcccatatcctaagtttactgataccattagtacttccagaaatgtgtaatatcaatatccaagctcaaagcatgcaaacaaacaaatcttctctttaccttaaaaagataaaatggatatactttgaagtagtagcatcctat

SEQ ID NO: 370310 - DNA, 501 bp, Homo sapiens
tgtgtcattgcacatgcacctttgtacaatagtgcctattagttccaagtatgttagaaaaaaatggatggcactattttactaattattgtcatttcatttttttctaaatacctttttttgtgcccaaaacactacaacatggatgaaaacccatatctttactagcatatcttgttagtcatcataactcctggtaagggttatctttttgtttgcttgtgtgtgtgcgtgtgtaaggtttttgtttcactttgcaatatacccacactttgaatttgacttactagaaacatctgaggatgattcagattatttgcaaataattccatgaaacattgaccacaaatgagaagtgatttcaaaaaatgtacttatgctatatctcttggttttgagtccaaatwcttcctagttaccccaatgttaaaatgcacagttttctttttttaaaaaaaaatgccctgagtgactgaactgagtcagacaaaataagaattg

SEQ ID NO: 370311 - DNA, 611 bp, Homo sapiens
caagtgtgctgaggttcagggcaggaatattaagaaacttgaacacaacccaaaaactgatataaataaaagtggcatacgtccacacaatgactgttaggggtggaagctgcagctttgtcagcatgtggacattcagggtctcccctgggcacattggacaccattcaaaatgcggtggccaaatgtgaatctccatgsgtacactcaggaaaggatgaacagaaccttattttgtaagaactattatagcaaggcctttagcaaaaaattttttctcataagttctaagattgcacccaatttgaattctaattttaattactttgcaacaagtaagcttttaccagtgtatacaccaagggaggtttgggacactttctgaacagcacggggtattaaattagaatgaaataattttcgtagccatctaaaaatcagaccagttttaaaccatcaactcttgggttgttcatcatccagtgtgctccatagatataaaatgacacactaaaattgatgtaaaatccttggccaagatgattgggccaagttcacaaaattgttgagccattttgctttacagagttctttttaaaatcagagttgga

SEQ ID NO: 370312 - DNA, 611 bp, Homo sapiens
caagtgtgctgaggttcagggcaggaatattaagaaacttgaacacaacccaaaaactgatataaataaaagtggcatacgtccacacaatgactgttaggggtggaagctgcagctttgtcagcatgtggacattcagggtctcccctgggcacattggacaccattcaaaatgcggtggccaaatgtgaatctccatgcgtacactcaggaaaggatgaacagaaccttattttgtaagaactattatagcaaggcctttagcaaaaaawtttttctcataagttctaagattgcacccaatttgaattctaattttaattactttgcaacaagtaagcttttaccagtgtatacaccaagggaggtttgggacactttctgaacagcacggggtattaaattagaatgaaataattttcgtagccatctaaaaatcagaccagttttaaaccatcaactcttgggttgttcatcatccagtgtgctccatagatataaaatgacacactaaaattgatgtaaaatccttggccaagatgattgggccaagttcacaaaattgttgagccattttgctttacagagttctttttaaaatcagagttgga

SEQ ID NO: 370313 - DNA, 611 bp, Homo sapiens
caagtgtgctgaggttcagggcaggaatattaagaaacttgaacacaacccaaaaactgatataaataaaagtggcatacgtccacacaatgactgttaggggtggaagctgcagctttgtcagcatgtggacattcagggtctcccctgggcacattggacaccattcaaaatgcggtggccaaatgtgaatctccatgcgtacactcaggaaaggatgaacagaaccttattttgtaagaactattatagcaaggcctttagcaaaaaattttttctcataagttctaagattgcacccaatttgaattctaattttaattactttgcaacaagtaagcttttaccagtgtatacaccaagggaggtttgggacactttctgaacagcacggggtattaaattagaatgaaataattttcktagccatctaaaaatcagaccagttttaaaccatcaactcttgggttgttcatcatccagtgtgctccatagatataaaatgacacactaaaattgatgtaaaatccttggccaagatgattgggccaagttcacaaaattgttgagccattttgctttacagagttctttttaaaatcagagttgga

SEQ ID NO: 370314 - DNA, 575 bp, Homo sapiens
gatgacattaatgtaaaagtctatttttcttcaggcaaaacaattaacttcagtaacaaacatttattgagttgacatgggttcaaaaataatgacaataataaaaaagcttttatttagtctcaaatcaatgatattaatttaattgtttctaaacccattattgctgaattcaatactttttaaaaattaacttcatcattttaaagtcataaataaattttctgtgttttaagtaataaataaagcttccrtactttggtgggtcatgcctcttaatttgcaaatgatccattttctgctttttgattatagcttatatccagggttaaattacatgcaacaaattacattgcaatgaaagctttctttagagccagagacttttaactctcattgcccctacttcaaataatatttgatgtaacaaaaccctaatataaggaaagtttgatcctttgagagttttgtaaaagtggtttacctgaatttatttatagtttttctgaaagctatgataagaagagtttttgagctaaaacatggtgcatatatgcaaaggaataaattaaagc

SEQ ID NO: 370315 - DNA, 569 bp, Homo sapiens
tatttactgagcaccataagatcccaactattttgacaggagtcaagaattgaacaaataaagtctctcttctaggacagcttgtagtttactgggaaagacagaaatgatagcagatcttgtcacaagcatgtggtcagtaccatgatggttataacagcagagtgtgagggkcagaggcccttatctgagaatgggaaagtgccaggggatgatgcctaagtatggggatgtcaatgccaaatcttcagacagtatggcaaccttctgtaagttcccaggacataaaacagttgagtggaatgcttgcagagaactctacgagagttgatcctctttctgcacagagggtgaggcaggccaggcctggtgatgagtctgggggttactgaggagatcatataaggccttggaggtgagcacaggtaaaaagttagacaaggtgatcaattacatgatccaagctgggaagcaaaggccttgaagctagaagagccctgatagactggaaaacatttagaggatcaaagacctggtctctccatggggtagagagaaagagcagtgag

SEQ ID NO: 370316 - DNA, 463 bp, Homo sapiens
ccagtagattatagttatatgagggaaggatggttggcttagctagatgccacggactttaaaagcaaaggatttttctgtgaaagtttctgtgtggcacacaggaccccaaagcacctccaggcccttgggattctgctgagtacctcctggtccccagagaaaggtacacacctgaagtcctaasagataactcggttaaggccttcatcctcttcagtcttatctgggggtttggtgtgtcttcataaacatgagaaggacaagtcaatgacttaagtgtgcacagtaaaccagtgcttgatctaggaccagaatgaaaagatttttgcctgaactttgttacactagacttcactgtttttttttttttaaatagatgtcttgttcagacactgtttttcaataacaaattgatttcaatacaaaagtactggtgaaaattactttcttagaaatgtaa

SEQ ID NO: 370317 - DNA, 456 bp, Homo sapiens
tatatgcttggggataccaatgtatgtaagacagtgtctaccctgcagtaggagagaaagggaagccagtttagaatayaagatataaaatagcttacttaaaagacaaaatgaggtatgtgccattagagaaatctatctttacaaccttttagttgcagtgtcaatgtctaaaaatggaagggttttttttttcataatttctttgatagcaaaacctgacctaaactgaactcattcaatggcaagatttggccttaagctattgtcttacttgatcccatttagtgtgaatatttttgtttctgtttgattggctgtttctttgctgcccccatgatgtggtggctctgtagtaatccatcactctgtctggcttcccccacttccctgtctcacttccttcactctcaatgcactgaaatttcacctccacaggaaagcatcaaaggttaa

SEQ ID NO: 370318 - DNA, 583 bp, Homo sapiens
aatattttttgttctttgatgtttttcatctgttcaaaaaaatagactgtactgaacaaagccrtagtaaataactggaaaaagatattgttgtatttcacttttaagattattaaccaatgcctgtatacttatgtaaggttgcttaattgtaaggcctattaagttatttaatgacagtaaattttatagggatttgtgtctggagaagaattagagataatctaatcttgttgatttgggaaaactgaaactattaagtaacttacccaaggtcacacaattagaaagtagcagaactgggccagatcttggactcttgactctgagttcagtgttataaaaccttattatatcatgaaaagttgtttcaactgtgacttactggagcaaattaagtctttgatgttttaatgtgcagctccttagtacctagttatgtgtaccctttgtatattggggatcttatgtagcataaaaagcctgggatgaataatttgtaactttgacctaaatgtgccaaagcttgtgagaaattttgagtcaggcaaagaaactttgttataggagtgaaaaaataaat

SEQ ID NO: 370319 - DNA, 576 bp, Homo sapiens
attatgtatagaaggacttatttatgatcagtgtagtgtcagactggtgatggataggagacgtttgagctctgtgagggtggagaccactttccttcagtgacctcttttattcccagtaactaaggtagtccctagcacatgcgaggtcctcagtatttatttctcaaatgaataaagaacaaaatattgtgtggggacaggctagtgtgaaagaaaaactagccctgacaacctacttttgctttacttttttttccccgtagcatttaacayctcctagcatagcgtatttatttattatcttacactttattgattgtttctcctgctgaaatagaagtaccctaaaagcagtaattggtttttttctttgttctttcctccttatttttccactcgtatatcccaagttctccagacaatcatatttagagttcaacacagtttgttaaataaatttagttaatctcagtctgattcttagaccagcatcatcagcatcctctgtgcagattttcaggccttgccctagaactgccaggtatgtctctgcagcttaacaacgttccctgg

SEQ ID NO: 370320 - DNA, 627 bp, Homo sapiens
ttgattgttagcatggggagtaggggtggggtttgtgctctctatggaggatatttcctttaattggagagtttaatttgccagccactttggactgcataccaggccctgacagaaatcaaatagcctttgcccaaccaactgggctaacttcccctctaaagcaactaccttgacttatggtagctcccagtgtgctcaaaggaatcgacctctacttcctgcactttccaagaaattttttgagtaatgaattgtccatacaaaggaaatccatcagtcaawaatgccatgaaagacttaaataagcttcattattataatgtggagatttaatatctaaggcaattattctcatccaccttggattcctatatttagtcagcaccagtctggggagacaacagacatcccttggaacccagcttatctgatagaacaacataacctttaggtctgataaccgtgccaaatattgaatacttaaaagcaaatgttattctaattaactgcattcacaaatgacagcagcttctctttccaaagctgcttggaaacttcccctcaagactcaaagcagaagcagagcaaaataataataatagcatatgaacataaagccaaatt

SEQ ID NO: 370321 - DNA, 517 bp, Homo sapiens
tcagcaccagtctggggagacaacagacatcccttggaacccagcttatctgatagaacaacataacctttaggtctgataaccgtgccaaatattgaatacttaaaagcaaatgttattctaattaactgcattcacaaatgacagcagcttctctttccaaagctgcttggaaacttcccctcaagactcaaagcagaagcagagcaaaataataataatagcatatgaacataaagccaaatttgcattagataacaggaagctatscatgacgttcaaaggttagtgggtattatagcctagtctattttgcagtgcatggtaagaatgtggtcaatagggaatagcatacctatagggccaaaaaccatccgaaagctggctgggcagtttcacagataggattatgagacagtgggtacagaaaaatggctgatttaactcacctactataagtaaacgtccatttttcctgaaatgactttcaggaactcaatgctatggtgagttcatc

SEQ ID NO: 370322 - DNA, 592 bp, Homo sapiens
acataaatatgggaacaatggacactgtggactactagaaaatggagcgggggttaaaaaataaactacctgtcrggtactatgcttaccacttggataatgtgatctatattccaaacctcagcatcatgcaatatttccatgtaccaaatctggacatgtacctcctttatctaaaataaaagttgaaattaaaaaaaaatcaacatttttttttataatgggccaaagagggaaacaaatcctgaaagcagcctagaaaaaaaaaggaagaacagttttttaacataatgggatggtatggatgaccagccctctccttcatgtaatcatgaatggcttagtcaaagacacagagtttaagaggattgtttttgccagatggagtagtcagatggtgacaaatacctcaggtatagaaatgttctacatggaagagcttgtggccttttaatgcagttaataaactcccagtgtgtggcagattctatacaaaatatgaaaagtgtcaaaagaagctggatggcagaatttgtatttaattgcctctctcacttcttacttcccaaggcccatttcaaacagaggtgtt

SEQ ID NO: 370323 - DNA, 462 bp, Homo sapiens
cctcacaaatagacacttatgcagggtgagtaactagttatgtcatggggttagaaatgtggatattatttgtaatgcctgtgtatggttaattcgacttttacctgaaataggtttccataggctagcaaaccaatatatctatgttttagggccttagagttaagatctttccccgagttcaggtaagtatatctaaactgaaaaacctggagtcaagatacttaactgctcataataattgctaagatatactgaacccttcctstatgccaggcgcaattctaagtactttacatgtattgaatcactcactctttcacaaagccctatgaaaaacccactttccagatgaaaaaactgagacacagatggagtaaattttcctagagcacacagttagtaaatggcagaagtgggattcagctcctgtcagtctggctccagaacctgcctgtaggc

SEQ ID NO: 370324 - DNA, 646 bp, Homo sapiens
aaaaagatgctactatacaaccaaaacagaggctgggagaagactctcagcttctgttcaattgtagctgaaagggttcaagaatttggacatggaccaacagtggaaaagtgctaaccagtgtaacaacatgcacacgtctctggtttaattgcctgtcctgaaagatacaggtgataagacagcaagtttgttctacaggaactcttaagaggacccacatttaasgctccaggaactgtggaaagcacaggtagaaagcagaggtaaggcaacctctgataacatggcaattggctgaaattctataccccaaatctttaagccccaatgataccgcctcaatactaccaaactgaacaactattgatcccctacacacatacactgtccacatctttgtaaattgtctgtttattaaattccttacattatcccatttgatcatgctatctgtgtagacggatattgtaattagtactaagaatgggtcaatgaccgaatcttcaaagtggggttctggaatttagttattcatatatgcaagatatgcatattcatttttttctgcaggaaatagaaaatagataacctagtatctggctcattatggtcctagagaacaaacatggggaaaaagagaaat

SEQ ID NO: 370325 - DNA, 646 bp, Homo sapiens
aaaaagatgctactatacaaccaaaacagaggctgggagaagactctcagcttctgttcaattgtagctgaaagggttcaagaatttggacatggaccaacagtggaaaagtgctaaccagtgtaacaacatgcacacgtctctggtttaattgcctgtcctgaaagatacaggtgataagacagcaagtttgttctacaggaactcttaagaggacccacatttaacgctccaggaactgtggaaagcacaggtagaaagcagaggtaaggcaacctctgataacatggcaattggctgaaattctataccccaaatctttaagccccaatgataccgcctcaatackaccaaactgaacaactattgatcccctacacacatacactgtccacatctttgtaaattgtctgtttattaaattccttacattatcccatttgatcatgctatctgtgtagacggatattgtaattagtactaagaatgggtcaatgaccgaatcttcaaagtggggttctggaatttagttattcatatatgcaagatatgcatattcatttttttctgcaggaaatagaaaatagataacctagtatctggctcattatggtcctagagaacaaacatggggaaaaagagaaat

SEQ ID NO: 370326 - DNA, 522 bp, Homo sapiens
gtctctcctttgtcttgccatattcccaatattttatattgtatattcattaactgtaagaggtgggcacctacatatctgttttatgtttctctatacagtacttttaaaatagcctgtgcctttaattccttcatactcttaaaatakcaaaacaatgtaattttataagaaatgcaataatttgaatattagctgatctgttcttgtgaggaaaataaaagtataaaaaatcaaatcatagtgcattactcaactcagcaatactagtcaacaatataaaataataattattgccctcatgccagatacacgttagtacatagcaggaatactgtggaaaggaaatgagatggtggaaagacagctgtgtttaagatggggaaaatgaggcacagagaaattaattgtccaagggtatgtaactgaaaaacagtttagagccagggtgcaacccatgcaatttgctcttgcctactactgcacagatataggataaattgtgcgcaagtgcatgaaaca

SEQ ID NO: 370327 - DNA, 516 bp, Homo sapiens
aaatcctagtgacatagtatgtcttgggtagaaaaaagaagtgacaataaagatgatttaactagcctctatctctgagtttctttatatttccatctctttgcatttaaaaaatatcaaaataaagcctagttcaaagaagagagttgtcactacttctctcaagtttctaagagaatggtgtaatattatgtaacaagaaatagcataatctcagtgagagaaacttcctgtacttagaacaactgaattgtagaagtttatggcttaataaatgtgggcggaattgaattttttagttaaaaaagaacatggaacttgtgcttctggctatggtraagtagactgcaacagcacaaagtttactgaaagcaataaaagaagttaagcaaaattcaaaatcagggaagaaaacatgtttgaaggcattaagagaggttgtgattcaatcagaacttgaggggttaatattccaaaggaaagaaaacttcagagagatgagccaccgtattatga

SEQ ID NO: 370328 - DNA, 554 bp, Homo sapiens
tgatgagccacacgcatatcttatatagtttgcatggtatttgaaaacacacatttgttgctaacatttaaaaaccaagggttttcaaaaaaaatcagatttctggtttctataaaaaactggaagatgtggcaattgctggatttatattctgatacagcaaaaactggccagaggtgaggaccttcttcattcagatagggtctgtggtttttggttatcaacaattttactgcttgtcttccactcattcagggcacctgcctgcctgcatttgtgacctctaagacagacccaaggaaaacaaggcagttggcctgaagccttccaaagaatacacttttgtaaagcaaaattgatgaagcatgatgaattatgctgggaataaacattttagattttcagagaagccaatatatgttgtgtaagaaatatcataaatattgaggaccccaaygagaaacctctaaaattaaggtacatttcccacttctaaaaagatttggctaagttgactcattttgcttttttcccacaatactattgttatgagt

SEQ ID NO: 370329 - DNA, 649 bp, Homo sapiens
ttgtgggtttccaggttgcactccatacgttttagcaaatcctgacattgccatgcatctgtcttcttcctccaagttctctaatataatctaaaatgagaatttacattgaagataaaaattcttcatcaataacacatgccttattttgcttggtccttattaagtgaattcctgtcagttccttttttcttttttctttttctcacctgaatgaacataatgtataataaattctgaaatttaataatttgttagaaaattataagtatagagttgagaatttagacacgttaatatttccatgtcaacacaattatttgggtactatgtaaataaaccasgagcaatgctgctcacatctgtatattttcaaattaataagttataaatctttgttatcctttgttttttgttatcactcacattcaaaaaaggaaaaaagttataggtctacatacattttaaaagattttttaaaaatattgctgatgataatatttttctttatctttgaccttaacatatgagtgaacagataaatcaaatcatatttttgtgaagaacagagaagcatcaactgcgttttaattaacaagcttattgtgtttttagcagaggattctacattttaagagatggttctgaa

SEQ ID NO: 370330 - DNA, 649 bp, Homo sapiens
ttgtgggtttccaggttgcactccatacgttttagcaaatcctgacattgccatgcatctgtcttcttcctccaagttctctaatataatctaaaatgagaatttacattgaagataaaaattcttcatcaataacacatgccttattttgcttggtccttattaagtgaattcctgtcagttccttttttcttttttctttttctcacctgaatgaacataatgtataataaattctgaaatttaataatttgttagaaaattataagtatagagttgagaatttagacacgttaatatttccatgtcaacacaattatttgggtactatgtaaataaaccacsagcaatgctgctcacatctgtatattttcaaattaataagttataaatctttgttatcctttgttttttgttatcactcacattcaaaaaaggaaaaaagttataggtctacatacattttaaaagattttttaaaaatattgctgatgataatatttttctttatctttgaccttaacatatgagtgaacagataaatcaaatcatatttttgtgaagaacagagaagcatcaactgcgttttaattaacaagcttattgtgtttttagcagaggattctacattttaagagatggttctgaa

SEQ ID NO: 370331 - DNA, 598 bp, Homo sapiens
gtatataggtagtttttttataaatgtaaactctcaagtacccatcacccagatgaagatacagagtgtgtcagtagtcccaaactctttccagtcaatatccacgactttctatacctaggtaacccaccttccgacttccattgctatcacttagttttgcctgttctttaaattcatataaatggtatcagacaggcaccattttgcatctggtttctttcatacagcctaatatctgtgagaytgatccacattgttgcatgtatcagtagtttgttttctttggcaagtagtattctgccgtattaatatatcacaattttattgtccactcttttgctgatggacactgaggttgttttcagtcgctggctgtgagattatgtggttatgaatgtccctgtacatgccattcaaacatctctaaggtcccctgttatccacctaagagggcactggtgaaatgatttctccagaggcctttctatattttccagtttttaacaacccgcatgtggctctgacaagatgtttgtttacatctatgaaaaaagtctatctataaccaaggtctttggaggaatttgaaaggaaa

SEQ ID NO: 370332 - DNA, 598 bp, Homo sapiens
gtatataggtagtttttttataaatgtaaactctcaagtacccatcacccagatgaagatacagagtgtgtcagtagtcccaaactctttccagtcaatatccacgactttctatacctaggtaacccaccttccgacttccattgctatcacttagttttgcctgttctttaaattcatataaatggtatcagacaggcaccattttgcatctggtttctttcatacagcctaatatctgtgagactgatccacattgttgcatgtatcagtagtttgttttctttggcaagtagtattctgccgtattaatatatcacaattttattgtccactcttttgctgatggacactgaggttgttttcagtcrctggctgtgagattatgtggttatgaatgtccctgtacatgccattcaaacatctctaaggtcccctgttatccacctaagagggcactggtgaaatgatttctccagaggcctttctatattttccagtttttaacaacccgcatgtggctctgacaagatgtttgtttacatctatgaaaaaagtctatctataaccaaggtctttggaggaatttgaaaggaaa

SEQ ID NO: 370333 - DNA, 598 bp, Homo sapiens
gtatataggtagtttttttataaatgtaaactctcaagtacccatcacccagatgaagatacagagtgtgtcagtagtcccaaactctttccagtcaatatccacgactttctatacctaggtaacccaccttccgacttccattgctatcacttagttttgcctgttctttaaattcatataaatggtatcagacaggcaccattttgcatctggtttctttcatacagcctaatatctgtgagactgatccacattgttgcatgtatcagtagtttgttttctttggcaagtagtattctgccgtattaatatatcacaattttattgtccactcttttgctgatggacactgaggttgttttcagtcgctggctgtgagattatgtggttatgaatgtccctgtacatgccattcaaacatctctaaggtcccctgttatccacctaagagggcactggtgaaatgatttctccagaggcctttctatattttccagtttttaacaacccgcatgtggctctgacaagatgtttgtttacatctatgaamaaagtctatctataaccaaggtctttggaggaatttgaaaggaaa

SEQ ID NO: 370334 - DNA, 534 bp, Homo sapiens
tggggaaagctgaatcagtttcagtggaaaaatcaggaattcaattttggtgtttgagatgacttttagacatctaaagagtggtgttaaataggcagttgaataattaattccagactgcatctactaacatagagatcgttggtataaaaattgtgtttaaggtcacaaggatggtttctctggwggttgcaggaaatactcaaaccagcttcactacgaattggcagaccttcggtgcactgaatagcatgtggcctcttcacaagtagaaaagaaaggatacagagctggcaagggtgctgagtgtagtaaaattaatttcatctttaattaatgccagactcctactctggggggatattgtgtgaaataaaacttggactcaaaatccagaataacatcaatccaaccaagatgtactcaagcagctcctataaacagtatggagtaatgataatgatgaaaataataatattagaagaattgatgtagaagtggtatcagttatcgaacatacttttaaaacacagt

SEQ ID NO: 370335 - DNA, 542 bp, Homo sapiens
cctcatgttttcaatttgctaartggatactaaaaattagacaataacaagtcaattaacagcattgccaagcactaaatatttggccagaaattaatggtatgtttgcttccacatttccaaattcatcatgaagcttgctaatcactttatggtcttctttcattgagcacagacacaacctcagaattctttttaactcagttctcaaagtagccactatcaattaattggaactaacccacaacgtaaaagcctattttctattcccaaacaaaatgatacattgacttaagaaaggcaatacagcactaggttaaatccctgtcgaaagtgtgactcaattaatacgatttcagctgcatgaagaaaattcaagcctttggtattagatacaaatccaaaggagtcatggaacacagcaacaaatagaagtcgctcctaccgtaggtggtaggctcctcaagggcagggtacctgaattatttatcttcagattcccagctccctctccaataatttgaaatggttggcctgaatca

SEQ ID NO: 370336 - DNA, 542 bp, Homo sapiens
cctcatgttttcaatttgctaagtggatactaaaaattagacaataacaagtcaattaacagcattgccaagcactaaatatttggccagaaattaatggtatgtttgcttccacatttccaaattcatcatgaagcttgctaatcactttatggtcttctttcattgagcacagacacaacctcagaattctttttaactcagttctcaaagtagccactatcaattaattggaactaacccacaacgtaaaagcctattttctattcccaaacaaaatgatacattgacttaagaaaggcaatacagcactaggttaaatccctgtcraaagtgtgactcaattaatacgatttcagctgcatgaagaaaattcaagcctttggtattagatacaaatccaaaggagtcatggaacacagcaacaaatagaagtcgctcctaccgtaggtggtaggctcctcaagggcagggtacctgaattatttatcttcagattcccagctccctctccaataatttgaaatggttggcctgaatca

SEQ ID NO: 370337 - DNA, 548 bp, Homo sapiens
attatatgaaaaggcgggaaatttgggcagcaattaggtcatgagagtggagctctctcaaatggcgttggtgcccttataagaagcgactagagaactagctagctgtctttctgccatgtgaggacaaaatgataaattgattgtttacaatccaaaaaagaaccctcaccagaacctgaccatgctggcactttattcttggactttcagccagtagaactktgagaaataaatttctattgtttataagccactcattctgtggtactttgtcataacagccccaactcaaacagtgtgtatatgtattaaaaggtatatatgaatgcatttttgtgtatatacatacataaaaatatgttttctttcccattttattactttgtcatctaacgtagctaataatcataaactttacatctcagttgttaagttacagcatatcaaaggagaatgaaaagactgaggatcacacaataactttgcatcctcttttggagaaatgactagcatgattttggtgtttgcaggatatttgtatcata

SEQ ID NO: 370338 - DNA, 548 bp, Homo sapiens
attatatgaaaaggcgggaaatttgggcagcaattaggtcatgagagtggagctctctcaaatggcgttggtgcccttataagaagcgactagagaactagctagctgtctttctgccatgtgaggacaaaatgataaattgattgtttacaatccaaaaaagaaccctcaccagaacctgaccatgctggcactttattcttggactttcagccagtagaactgtgagaaataaatttctattgtttataagccactcattctgtggtactttgtmataacagccccaactcaaacagtgtgtatatgtattaaaaggtatatatgaatgcatttttgtgtatatacatacataaaaatatgttttctttcccattttattactttgtcatctaacgtagctaataatcataaactttacatctcagttgttaagttacagcatatcaaaggagaatgaaaagactgaggatcacacaataactttgcatcctcttttggagaaatgactagcatgattttggtgtttgcaggatatttgtatcata

SEQ ID NO: 370339 - DNA, 633 bp, Homo sapiens
gaaagtaaatttacccctgtggctgctggccatagagaataggagttcaaatggattttctaaactgtgcaaggaataaaaatttcttgtttttgtttcgtgtctgaatgttttccatgaaactaaaatcgaacacagagcagttaaaaagaaatctgaacattttcctacaggggatttttgaaatggattactgcttttcctaaggaaaaagaaaaagtaaagtgtagagctaaaggtgggaattttacaaggtgataaattcaagtccaagaagactaagtcrtgaaaattatatcttctttcacgtttaataatgcatggatctttctattataaatattgatgaagatatttattttcagattacaatgttactaaagatatatatatatatactaatttatttattaaatatagcaaacactaggttgccacaaaagcaaaatgaaacagaggaagtggctttttatctagctaattgagacaaaaaccatcctattcaaggaaagagagatttgcattctccaaaacccatttcagtagttcccattgatcatacgcaccggataatagctaatttcttcatttttatttgcctatttgtttcaaattatgttgagtggtgtcaaa

SEQ ID NO: 370340 - DNA, 473 bp, Homo sapiens
tgccacagtgaacacttccttttggaaacaggctcaggacaccttggccttgrcctcctcaaagcgacaaccagagcccaaagcagtgtagagataatataaaggcccagctatttgaactatataaaattatattttctcttctctgaagtaactcctgattaagtagttatgatgtacagactcttaaaacagtcctaattaatatagttacatgtggacaaaggaggtgttattgcttccttggctcccaatcccctgctaggacattcagatgtgtcccctatgaatgaatgtgactgaggatgggtaggatggtcaggggccctctcataataagcctgggctgctgttgtacctctgctaggtggcttatgtaagaaagtgtcaggatgtagggttatatctcaggatatcatccaatgagcaagaaagctcacctgaccactgccacccagtatgtgacaggtgcc

SEQ ID NO: 370341 - DNA, 497 bp, Homo sapiens
gtccctggtttgatagtcaggaaattcaaacagggaccaaatgatacaggtcttatcccaagaggtttggggtaagcactataaaataattgagatatcattctgagttttggctttgatggctactgaggcatatgtgtcatggatggccattgggcattctgtggtgccacagtgaacacttccttttggaaacaggctcaggacaccttggccttgacctcctcaaagcracaaccagagcccaaagcagtgtagagataatataaaggcccagctatttgaactatataaaattatattttctcttctctgaagtaactcctgattaagtagttatgatgtacagactcttaaaacagtcctaattaatatagttacatgtggacaaaggaggtgttattgcttccttggctcccaatcccctgctaggacattcagatgtgtcccctatgaatgaatgtgactgaggatgggtaggatggtcaggggccctc

SEQ ID NO: 370342 - DNA, 473 bp, Homo sapiens
tgccacagtgaacacttccttttggaaacaggctcaggacaccttggccttgacctcctcaaagcgacaaccagagcccaaagcagtgtagagataatataaaggcccagctatttgaactatataaaattatattttctcttctctgaagtaactcctgattaagtagttatgatgtacagactcttaaaacagtcctaattaatatagttacatgtggacaaaggaggtgttattgcttccttggctcccaatcycctgctaggacattcagatgtgtcccctatgaatgaatgtgactgaggatgggtaggatggtcaggggccctctcataataagcctgggctgctgttgtacctctgctaggtggcttatgtaagaaagtgtcaggatgtagggttatatctcaggatatcatccaatgagcaagaaagctcacctgaccactgccacccagtatgtgacaggtgcc

SEQ ID NO: 370343 - DNA, 473 bp, Homo sapiens
tgccacagtgaacacttccttttggaaacaggctcaggacaccttggccttgacctcctcaaagcgacaaccagagcccaaagcagtgtagagataatataaaggcccagctatttgaactatataaaattatattttctcttctctgaagtaactcctgattaagtagttatgatgtacagactcttaaaacagtcctaattaatatagttacatgtggacaaaggaggtgttattgcttccttggctcccaatccccwgctaggacattcagatgtgtcccctatgaatgaatgtgactgaggatgggtaggatggtcaggggccctctcataataagcctgggctgctgttgtacctctgctaggtggcttatgtaagaaagtgtcaggatgtagggttatatctcaggatatcatccaatgagcaagaaagctcacctgaccactgccacccagtatgtgacaggtgcc

SEQ ID NO: 370344 - DNA, 473 bp, Homo sapiens
tgccacagtgaacacttccttttggaaacaggctcaggacaccttggccttgacctcctcaaagcgacaaccagagcccaaagcagtgtagagataatataaaggcccagctatttgaactatataaaattatattttctcttctctgaagtaactcctgattaagtagttatgatgtacagactcttaaaacagtcctaattaatatagttacatgtggacaaaggaggtgttattgcttccttggctcccaatcccctgctaggacrttcagatgtgtcccctatgaatgaatgtgactgaggatgggtaggatggtcaggggccctctcataataagcctgggctgctgttgtacctctgctaggtggcttatgtaagaaagtgtcaggatgtagggttatatctcaggatatcatccaatgagcaagaaagctcacctgaccactgccacccagtatgtgacaggtgcc

SEQ ID NO: 370345 - DNA, 608 bp, Homo sapiens
caaatattattaataacacaagtgaagaaacaagtaaaaatattatcatctatttgagaatgaacaatttttctaagcccccacccagatgtatatcatttatcctataatagggattcacaaatagtaaatatattatttctgctttttttgttgttgtttccataggcagagaacaggaagtaattaatatctagaatctacggttctcccaaaatcatcatagaaagacccatatgtttaaatrttatctttttaatgctattaaggctaaagaaacaattttgattcaaattcaagattattcaatccttgacagtattaacattttaaaccttcctttcaaaatttggcttgtaatttaacacatcatcattatctccttgtaaactctctcaaaactgctctgaagccaccttgtaaagattccaaggtcctttagtggtagcaaggctggctatattcaccattggttgaattatggctattgataatataggatggctagcaggaccagctaagttaatgaccaagtctaactcttcgatagttttgcatttcttataagcatgaaaacaaaaatatttgaatggctcactaactcagat

SEQ ID NO: 370346 - DNA, 634 bp, Homo sapiens
agaggaatattaatctattaaaagacaatatcaaactttctgagagatgaaaatttttccaagaaaatatgaacaataaaagtagaaaactgggttatatccattaaaatgtaagaaatcggaaatgttgtcaaaaagtacatgccctcctccatcctccaaaaagggggccagactaattctctcaaactttcaggaaatagactcgcctgtaagttattttcaaagatgcattgtagttttatgattcatgagtgtgtccccaatacctgacatataatattgttcaataaaggtattattggaagaaaatagaaatgtcatttactatagaaaatgttcacagcatagagaaaagaatggagatgatcatagttattttaccaagctaggaaaactgacagaaaaacctaagaggattaccaagcaagaaaactatggaacaatatccttacttatgaatataaagtctaaagttttcaggcaaacattagcataycaatccctgagtatatgaaaggaaaaatgctcagtgacaaagtagagattatgctttgaatgcaagaataattcagtataagtagctctaattatacaaattgacttactatttctgcaaagactcataacatta

SEQ ID NO: 370347 - DNA, 608 bp, Homo sapiens
aatgtgtgcaaaaatgtgatcacaattttatggtatgtaatctattttctatttcttggcaacatagcaaaaactgtctatattatgagagttattccacatttatatctttaaaagtggcctaatattccactatttgatagtatcatagtatcacaactaaataatccctttttttgaagattgaaaagatttttaagcatttgtgactataaatattatactactagatatccttttcacaaagttcctaaagatttgtttagttaccttcttctaaatgtaatatcttgctcaagacgtatgcacattttaaagcttttgtgatttgttgccagattgccattcaaacawatagtgccacttttttatcaacctcatttatgacagtgtcacttcttcaaaccttctgcagcacttagtattataacttttaacctccaaattttatatataaaaataatacctgagtttttaaaacttctttattaaagaagttttgtcctataattatcattcaattgtgtacattctttaaactgcctatcttattggccttgttaatgctggtgatattttttatatttatttttaggggtttatctaga

SEQ ID NO: 370348 - DNA, 604 bp, Homo sapiens
tgggtcttggaggatgtaccaaaatttgttttaatgaaatatagcttgaacttgtaacaaaaccggcacagtacttaacatgtagcagcccaggtaatttgcatctagaaagtccaaagaaaaaggtttctccggatgcctttgctcttttctccctcctcatatttatttcttcaatttgttcttctaatttagtccagaaatctctcactatcttttactgcatgctgctaagtaagaaaaatttctacctgacatatgtactgacagattttgcttttatctatctatctatctatctatctatctatctatctatctatctgtctatgtcatctaatctaatctaatctatcatttaggggatgggatctgaaactcatcactacctcaacatttttctgttaatcaagagctagggtcattaaaattgccaatattcaaagtaacccattaagtttaaaggattttaaaagaaaggacagatattgtactaccrcactgctttcttgacattccaataccagttgacaaagtagactactcctttcttgaaatatcttctaagacatcacttctgctggttttcctggtacacactgta

SEQ ID NO: 370349 - DNA, 604 bp, Homo sapiens
tgggtcttggaggatgtaccaaaatttgttttaatgaaatatagcttgaacttgtaacaaaaccggcacagtacttaacatgtagcagcccaggtaatttgcatctagaaagtccaaagaaaaaggtttctccggatgcctttgctcttttctccctcctcatatttatttcttcaatttgttcttctaatttagtccagaaatctctcactatcttttactgcatgctgctaagtaagaaaaatttctacctgacatatgtactgacagattttgcttttatctatctatctatctatctatctatctatctatctatctatctgtctatgtcatctaatctaatctaatctatcatttaggggatgggatctgaaactcatcactacctcaacatttttctgttaatcaagagctagggtcattaaaattgccaatattcaaagtaacccattaagtttaaaggattttaaaagaaaggacagatattgtactaccgcactgctttcttgacattccaataccagytgacaaagtagactactcctttcttgaaatatcttctaagacatcacttctgctggttttcctggtacacactgta

SEQ ID NO: 370350 - DNA, 581 bp, Homo sapiens
gagttagaattccttggacccagagtcagctttgctgcatgatctgtgtgaccttcagaatttgctgcatgtctctgagcctcagttttctctataatgcctcaattaaatgagataatgtgtattaaatcactcaccacatactatggcacatagcagacacttattatctctaaggaaaatcctaaagcagtggctgcttcttcccaacctcaatccaaaccaaccgccaagaaattgcygatatgttttccatagttaacttctggaaattaagatgacagatattttctgggctcgatacttgtgttacaagtttgttcttgcaatgtaaacaagaaggttgtgtaatctgatccaggtggataaaagttggcttgacccactggggtaggccatatgtgctgggttgtgagatcctaacagactaacaaaagtgaggaagtgtgtgtgtatgtgtggtgtgtgaagcatagaaatacagttcaatctactttctggcatccttcacatttactatttaaagcctaaccttgctggtggtcatgcagtcctgattgtttcttgtaaagtaatgagaa

SEQ ID NO: 370351 - DNA, 610 bp, Homo sapiens
catttgtctcatcttgggaaacactttgcactttgtgctttttggttcatcacagcaccaactatattaataaccaaaagctgagctaccaagctgggttctcatggaatcattgcatttccttgaatagctttgttgaaaggaaacaaacaaaaaacagatcttcaagtgagaaaagaagcaatttgaagtagctttgctaactcaaagctagagatggatgggccaccaatttgttttgttcacttccattctcgtgtgcctggtttcaaacttggtagaatcattatcactaggtaatgatttaaaataagactgaggatctggatgattcttagaaccattctagcattttctttagtaactgattcactgtatgaaagaaagcaaaaagcctttaggcaggagtcatttgccccttcgccctctttctactctttaattcttattagaaacgtattaagaggaacctttacygagaccattcaactcacattataagaattctcctatcttgatatcaattccttgatatatcttattcttttttttcaaagaaaggaagtgtaggcatcctgagcctttttctaacataagtaaaatgcagcta

SEQ ID NO: 370352 - DNA, 536 bp, Homo sapiens
ctgctctcatccaccaccctcattttaaatccagaacacatggaaaagccacagtctacacaacaggactgggcaggttttcttctggtgagtcctgtggatttcaggtttacatctagcaagcttcacatgctaggggaagtcattcggacaatagcctgtcacatttacaccactagagctcatcaacttgaacatgagtttctgagccagggaatttatctgctccagcatcttccttccctatacactttccgcccattcatccctgaatcctagcactccctgctgtacccagcctggaagagaacatktttgtacactatagctctaggttctgtcctagtgattagagaggggaagccagaacatttgttgtgggacatactgtgcttttgatttagtggaaatgtattggtatgttcacaacagaaccttccttcttttgaaaaattagccacaggaatcctttgtttcatgagccaataaattcccatttgtttaaattagtttgggttgtgtttctgttactcgca

SEQ ID NO: 370353 - DNA, 524 bp, Homo sapiens
tttacagtgtactgtgattgtgtcactgcattctggtctgggtgacggagtgacactttgtctcaaagaaaaaaaaatcacagaggtagaagagacagctgtcttggcwgattcacagctgtcattgtggttatcaaagtgtgttttttggaacagcttctcattggatgttaatgtatcacatacaataaggatagttatttcatagtttgggaaagcctgactaatcatgtttcatttctatagtaatatagcttccccaagactgactatgctaacatgcatttggatctttcaaacttatttgaccctgtaaaatatgaaaatgtgaaagacatactttccttcagaattgttgcagaaattgtgtatcatggatcaaactttgggaaattgtttccaggaaaatgtggggcagcttggacttttgggacctgagatattgaagtggaaagagtcctgtagaatcttctagagtgagaaaagaaaaagattgagacatttttaggaactagcttttggtg

SEQ ID NO: 370354 - DNA, 565 bp, Homo sapiens
tgcttctttcttcattgattctattaagtgaaaagatgttatctttgggggtgaaaaatctccatgttattatatgttctaattcatcatgcaatgatcatattagctttgtcaccttcttgcattttgtcatctgagccccactgagaggtgaggctattacccttcacaggaaggtggkgacttactcatcacagggaggctacttcctgcccatactgctgtgtctctctggaagccttccaactgggacatccatcgtttacaaattaatttgcactgccttggccagcatttaattctaactcaaattttttctcttgaaggccttctgcaaaatttcaactattcccttctgagtttcccttccttgttgtccttttatttttagtttcttttcagttgtatttatttatttatttactttgacaacatctacctttaccaagtttatttatccttcaagcttatatcattttcaagctcttccaggaagcctaactgattactgtaactgacttaaaagttacaatatctagttatagtctgctaatttggtgattat

SEQ ID NO: 370355 - DNA, 519 bp, Homo sapiens
tacattactaaagcctgtgctttaccccatgccgcctaattaatggctcactatttaaaaaaactcttttattcaattagactctgctttcaataagataaacactcccgctatcaaaatcctgggaaaccaacattcataggctgccttcatgccaaggcatctgtttttctgtggcccctggcctcttgttccgtccagccttgctttggctgtttgattttgtaaaatctgaggacagtctccctggtaccttgttatgctgacagctatttctcctttagcttctamacaataacacagagtaaagagaatcatactattatttttattgattacaaagagccacagatgttatttaaaatgagacatggactgggtctcatattcatcactattacttaaacttttgccttttatgtgagttaccattactacattctttgctagattggatttttaggtgaaaagctggagagttctttattttagccttgtgtttctttacttaagttagaa

SEQ ID NO: 370356 - DNA, 520 bp, Homo sapiens
atcatactattatttttattgattacaaagagccacagatgttatttaaaatgagacatggactgggtctcatattcatcactattacttaaacttttgccttttatgtgagttaccattactacattctttgctagattggatttttaggtgaaaagctggagagytctttattttagccttgtgtttctttacttaagttagaactgcctcctggagatgattgcattcatgtctatttggttagttgtcagagttattacagcgtatttgacttgctttagagaatattgaaacaaaaaaaaagttttaaaagaattctatctagtatttaaggactctgtcccaaactgattctgttgtgtaactattggtttttaactgttgttaataataacgaagaatagaaaatgcccagtaatctctggtgaaaaacactcttttagtgaatgaattaaatctttctgatttataagtggtataatgtattgataaaatttaaaatagatttttgcattta

SEQ ID NO: 370357 - DNA, 520 bp, Homo sapiens
atcatactattatttttattgattacaaagagccacagatgttatttaaaatgagacatggactgggtctcatattcatcactattacttaaacttttgccttttatgtgagttaccattactacattctttgctagattggatttttaggtgaaaagctggagagttctttattttagccttgtgtttctttacttaagttagaactgcctcctggagatgattgcattcatgtctatttggttagttgtcagagttattacagcgtatttgacttgctttagagaatattgaaacaaaaaaaaagttttaaaagaattctatctagtatttaaggactctgtcccaaactgattcwgttgtgtaactattggtttttaactgttgttaataataacgaagaatagaaaatgcccagtaatctctggtgaaaaacactcttttagtgaatgaattaaatctttctgatttataagtggtataatgtattgataaaatttaaaatagatttttgcattta

SEQ ID NO: 370358 - DNA, 572 bp, Homo sapiens
gcatttttcaaggtagcaagagctgaacttttccttccagcattgaaattacttggccatctatatacaggtggaattaatgtaatgtacgcattcttgatcctatttatgttggatccaaatgattygatggacctggagtaaagcaaggtcaggctgaggactcttaaaatatttgagagagaggttgatttttactaatctctgcctctgagctcatattcatctcaactagaccagtagttctcagtcctggcttagagtcacctacctgtataatagttgtgtccatttgattttgattcttcctagctattgtagcttaaatatctatcatgaaataaaaaaagtaacactaatactcagcagaactctgatcaaatatttaaatggtttggggtggtgcctggtcatcaagtttgtttaagctgcccaggtgattctaaggtgcagctagcctgagaactacaaatttagaggtaagtggcaataaattatttaccagtatgtacacagtgcttaggtattcagctaggtgtggtttgactagcatgatttttgagtgagcactg

SEQ ID NO: 370359 - DNA, 612 bp, Homo sapiens
ttgttacttattaattggtattaatttgttattgatgacatctttctctggttagctgcatcttcataaaatcttactttttcttagactataagtttccttcaataggggatttctttttctttagttttataatttgttactacagactcagaaatcctgagagggtagattcgtgcagattttatggctgttgtgaatacttgaccttctgagggtagaagaaagatctgaatctattaacatttgaggtcacactctaattcgcttttgtaggaagcaacgtaatttgacatttcaacctttttgcaggacagattgttgggcatttttcaaggtagcaagagctgaacttttccttccagcattgaaattacttggccatctatatacaggtggaattaatgtaatgtacgcattcttgatcctatttatgttggatccaaatgatttgatggacctggagtaaagcaaggtcaggctgaggactcttaaaatatttgagagagaggttgatttttactaatctctgcctctgagctcatattcatctyaactagaccagtagttctcagtcctggcttagagtcacctacctgtataatagttgtg

SEQ ID NO: 370360 - DNA, 529 bp, Homo sapiens
tcctcctccaacctcctgagaagtagaaatggcatgagtgttttatgcacactttaatactctgcagggtcagctcggacttggaaagatgcttcggaaatcaacatgcgaaggaacactccacgccaataggaatgagagttacatttatgctctataaaataaggcatctcccaatttatttaccctggcatgattatttatctggcattatattgcagcggtaatccagggagttgctttgtagttactctgttactgctcttgttttgcagtaactctgtaaataacttgtgtcaccccttctatgtcccagttccagatggaagataagacgttatttctgcttcagtgcaaaatcttaacagctgatgtaaggaggtgttcagattcctatctaaattacatgccagatattctgcattagcattgttaggcrggttatttatctacaacctgaatatatttccaggatatcaaatgatgacttacaagctatctcctgtgatgtgatgtgcaagcgtagagc

SEQ ID NO: 370361 - DNA, 534 bp, Homo sapiens
actatctacatgtttggtatcattatcatcactttattggaaaaatttagtcaatagagcaccaaacagtaaagagttgcrtcttaaaaatcactttgtccttttcatttccattattcattcaaaaaatatttgttagcttactactatgacccagagactgtttggcgccagggatagagataaaaaaaaacaaacaaataaacaaaaagtgacccataccctagcattgcttttacactaatgcccctgtgaaaattaatcctattagaaaagaccaaatgaataagagcaactctattttatccatctaattgggagacaactaaagttcagaaagatgagattctcaggtcactctgcaactcagtccattttgcatgaaggctaaaacttgtgaatcctagttcacatccatgctctggccagttcattattttgtttttaaaggattaatggaaattctcacagagtccttgatcttacctcaagagatctcctagatcatcctggcctctaggcaggattgctctt

SEQ ID NO: 370362 - DNA, 534 bp, Homo sapiens
actatctacatgtttggtatcattatcatcactttattggaaaaatttagtcaatagagcaccaaacagtaaagagttgcgtcttaaaaatcactttgtccttttcatttccattattcattcaaaaaatatttgttagcttactactatgacccagagactgtttggcgccagggatagagataaaaaaaaacaaacaaataaacaaaaagtgacccataccctmgcattgcttttacactaatgcccctgtgaaaattaatcctattagaaaagaccaaatgaataagagcaactctattttatccatctaattgggagacaactaaagttcagaaagatgagattctcaggtcactctgcaactcagtccattttgcatgaaggctaaaacttgtgaatcctagttcacatccatgctctggccagttcattattttgtttttaaaggattaatggaaattctcacagagtccttgatcttacctcaagagatctcctagatcatcctggcctctaggcaggattgctctt

SEQ ID NO: 370363 - DNA, 559 bp, Homo sapiens
gatgacacattcaagtctacttaatatctgccaggatcatagaaaacaaaattaatcttttgaatgacatttgttggaaggggtatgtagaaggtataaaataccttctcctttccctagttcaagaaggctttacacagtagctaagacagaaacactgcttccaagtaggagttgtgggaaaggatcaaaaataaaaggttagtggagagaaagatacttaaggtaacacataaatagaacaatatctttgccagtaaccaacaatttttttaaaagtaaatttttaaaaatccaaagttttacctcttttttgtaataatatttgagaaactgataacctaaattgcaatgtgccatagaaaatctaatgagataaaagtaattaactagtggatattttatacattttataaattattttttaaaacaccagtggataagagagtgaytcataaacaaggaataccagtctttaaggtaatgagaaaatttcattttaagtcttaggtctgaagtattaacattagtaacaataacttaactacacaatagataa

SEQ ID NO: 370364 - DNA, 580 bp, Homo sapiens
ccagtctttaaggtaatgagaaaatttcattttaagtcttaggtctgaagtattaacattagtaacaataacttaactacacaatagataaaaccttgatatctatgtatttgcatgtatgtatacacatagaactgtgtgtacaaatgtacttgtgtgtgtgtgtgtgtgtgtatatatatatatatattcccacatacataatcataaaacatagttgcttggagaaatattcaaatcaagggacaaagtgacaaatctcttttgcagaaattatttgttaccatttcctaaatacatactcaataaagaaaatacgttattaaatacaatatgtttattaacatttccaagattgctccaggtataaattctctctctgggctgaagcattttktagttgctcatcatgaacaatcattcagttatgcagaaaagaaggttttgtgaaaaatatgcccagtcctttgttatggctataatcgtcaacaatttaagagtatccactgttgctggatcattctctgcttcatgaaaataggagaggcaaaggcggaagtctgtctttaaggtgatggta

SEQ ID NO: 370365 - DNA, 570 bp, Homo sapiens
tccaacccctacaaattcagtgaattkaaccacccttgacgttcaataacaaacctaaaaataattgatctataatttcagtttaaatgatctgacatagccaggctacttttaaatgacagcaaatgggattttttaatggaaatattgataggcccttaagtgtattggggaatcgagaacaatgacaatgatattgcactaataaacctaatgccatggagattgtctttttaaaaaatgcgtcttttctttatcacagcataatacctagcttgacaacagaaatgtcaacagttagggctctattcttcaaaccgtcatgctctattaatgctgtttttcagtgggatttactttgtcaaggaaggaaggaccaaagaggaaagtctatggtcttcctattcactaaatccctcttctcactgatgcacaaatgactaactactcccaatgccacaaaaagaatgagagttgaaaatgggccaaaatcgtctagggagcagggaaaagaaagccagccctgtacaagcaaaagtgtgtctagataagaaggaaaagaaaacagag

SEQ ID NO: 370366 - DNA, 566 bp, Homo sapiens
tgaccatactgtcaaaagcaatcacaattttcaagcaattctcttcaaaatactcccattattcttcacagatttagaaaaaaacaattctaaaattcatatggaaccaaaaaagatcccgcatagccaaagcaagactaaggagaaggaacaaatctggaggcatcacactacctgattttaaactatactgtaaggccatagtcaccaaacggcatggtactggtataaaaataggcacatagaccagcrgaatggaatagagaacgcagaaataagctcaaatatttacagccaactgatctttgacagagcaaacaaaaacataatgtggggaaagggcacccttttcaacaaatggtgctgggataattgactagccacatgtaggagagtgaaactggatcctcatctctcgccttatataaaaatcaactcaagatggattaaggacttaaatctaagacctgaaactataaaaattatagaagataacattggaaaaacccttctagagattggcttaggcaaggatttcatgaccaagaactcaaaagcaaatgcaa

SEQ ID NO: 370367 - DNA, 550 bp, Homo sapiens
gagctatacttatatcaaagtagagtttaagtaagaaaccataaaaagaggcaaaaaaggttattacacataatgaaggtgttagttcaccatgaacacccaacaattgtaaatatataggcacccaacatcatagcacctaaatatataaagcaattattgaatgatctgaagggaaagatcaatttcaatacygtaatagtagggggcctcaatatcctagtttcaaaaatggacagatcatcttgacagaaaatcaggaaagaagattagacttgagttgcactttagatcaaacagacctaatagacatacacagaacattctatccaacagcagcaaaacacccaattttctcaagtgcacatggaacattctccaggataggtcatatgttagtccacaaaacaagactgaacaaatataagatgatttaaatcatactaaatatctttttagatcacaatggcataaaactagaaatccataacaggagaaatcttggaagatacacaaatatgtggaacttaaacaacacgctcctaaacaa

SEQ ID NO: 370368 - DNA, 533 bp, Homo sapiens
acatttgagatggagcaaaagcatttctaagagagaaatttatggtgataaacatctatatcaaaaaaagaaggggccagatgcggtggctcacacctataatcccagcactttgagaggccaaggctggtggattgcttgagcccaggagtttgagactagcctgggcaacatggcaaaaccccacytctatcaaaaatacaaaaattacttggccatggtggtgtgtgccctgtagtcccagctacttgggaggctgaggtgaaaggatcacttgaacctgggaacttgaggttgcaatgagtcaaaattgtgccactgcactccagcctgggcaatagagtgaggtgtctcaagaaaaaaaaagaaagatcacaaataaacaatcttagatttaacatcacacttcaaggaactagcaaaaggaagaacaaactaagcccaaaattagcataaggaaggaaataaccaagatcagagaagaaataaataaaatagagatcaggaaaacaatagaaaaaaattaacaaagc

SEQ ID NO: 370369 - DNA, 503 bp, Homo sapiens
taaacagacagtccacagagtggcagaaaatcttcgcaatctacacatctgacaagggactattcagaatctatattcagaatctagaayaaactcaaacaagtcagcaagaaaaaccaaacaatcccattaaaaattagcctaagggcatgaatagacaattctcaaaagaagatatacaaatgaccaacaaacatatgaaaaaatgctcagtatcactaatgatcaaggaaatgcaaatcaaaaccacaatgtgataccaccttcctcttgcaagaatggccataatcaaaaaatcaaaaaccagtagatgttgacgtggatgtggtgaagagggaacacttctacactgctggttggaatgtaaactagtacaaacactatggaaaacagtgtggagattctttaaacaactaaaagtagaactaccatttgatccagcaattccactactggatatctaccaggaggagaagtcatcatacaaaaaagatatttgcaca

SEQ ID NO: 370370 - DNA, 504 bp, Homo sapiens
ggctaaaatcaatgagctaagtatacaactctaaaaaagaacagtaaattaaacccaaagctgaaagcagatattaatgaggtcgaaaataaacataaaatacagaaaaaccttaaaattttgattatttaagaagataacaaaaagataagtcctctaataagactgatcaagaacaaagagaatgccatatttagcaatgtcagatattcaaaaagggatgctactactagattctaggatattgtattaggccattcttgcattgctataaataaataactgagactgggtaatttataaggaaagaggtttaattggctcatggttctaaaggctgtacaggaagcataacatcagcatctgcttctgaggagggctctggaagcttacaatcatggcagaaggtaaagcgggagcttgcatgtcacmtgatgaatgtaggagtgagagagagggagtgaggtgccacagttttaaacactcagatctcacaagaagtca

SEQ ID NO: 370371 - DNA, 504 bp, Homo sapiens
ggctaaaatcaatgagctaagtatacaactctaaaaaagaacagtaaattaaacccaaagctgaaagcagatattaatgaggtcgaaaataaacataaaatacagaaaaaccttaaaattttgattatttaagaagataacaaaaagataagtcctctaataagactgatcaagaacaaagagaatgccatatttagcaatgtcagatattcaaaaagggatgctactactagattctaggatattgtattaggccattcttgcattgctataaataaataactgagactgggtaatttataaggaaagaggtttaattggctcatggttctaaaggctgtacaggaagcataacatcagcatctgcttctgaggagggctctggaagcttacaatcatggcagaaggtaaagcgggagcttgcatgtcaccygatgaatgtaggagtgagagagagggagtgaggtgccacagttttaaacactcagatctcacaagaagtca

SEQ ID NO: 370372 - DNA, 568 bp, Homo sapiens
gagggctctggaagcttacaatcatggcagaaggtaaagcgggagcttgcatgtcacctgatgaatgtaggagtgagagagagggagtgaggtgccacagttttaaacactcagatctcacaagaagtcactcactacagcaagaacagcaccacagggatggtgttaaaccattcatgagaaatcaacccccatgatccaatcacctcccaccaggccctacctccaatactggggattacaattcactatgagatttgggcagggacacatatccatactatattggatatttaaaaagatataaataatattctgaactactgtctgttaataaatcggacaatttggataaaatggacaaacttccagaaaaaaatacacttaccaagaatgacacagaaagaaataaaaatatrtaaaatttctgtatctaaaaaacaaaattaaatcaccaattaaagacatacctacaaacaaaaccctgggctttgctagtgaattctatcaaacatttaaaaataaaatcctaccaaacttgcacaaacacttccagaagagataacac

SEQ ID NO: 370373 - DNA, 568 bp, Homo sapiens
gagggctctggaagcttacaatcatggcagaaggtaaagcgggagcttgcatgtcacctgatgaatgtaggagtgagagagagggagtgaggtgccacagttttaaacactcagatctcacaagaagtcactcactacagcaagaacagcaccacagggatggtgttaaaccattcatgagaaatcaacccccatgatccaatcacctcccaccaggccctacctccaatactggggattacaattcactatgagatttgggcagggacacatatccatactatattggatatttaaaaagatataaataatattctgaactactgtctgttaataaatcggacaatttggataaaatggacaaacttccagaaaaaaatacacttaccaagaatgacacagaaagaaataaaaatatgtaaaatttctgtatctraaaaacaaaattaaatcaccaattaaagacatacctacaaacaaaaccctgggctttgctagtgaattctatcaaacatttaaaaataaaatcctaccaaacttgcacaaacacttccagaagagataacac

SEQ ID NO: 370374 - DNA, 563 bp, Homo sapiens
tttttatggggaaaaactaagttcaaaccatagcatcttctcaacagaaacatttgataaaaygtatcatgcattcacaataaaaagtcacattaactttaaaatcagatagaaagaaataaaaggtaacatttcttactattgaaaaatctattttattttaattactattaaaattgtcaccagaaccagatgaccagatgagttctagctaactttatatatgtcaaaaaataactatacatgtaattatatattttatatattaaatatgcacttaatagctttatattttagagcaattttaggttcacagaaaaattgagcagaaagtactgagagttctcatgttccccctacctccagaaatgcacaacctgccccactatcaacatcccacagtggtaccatttgttacaaccaataaagttacatgaacacataattatcactgaaagttcatagtttacattagagtttactcttgttgtacattttatcagtttgaacatatatatagtgacatatacccaccattacagtattatacaaaatagtttcac

SEQ ID NO: 370375 - DNA, 592 bp, Homo sapiens
caagtcacagaatatgagaagtatttgcaatatacacctgatagctaatttgtatcaataacacataaataactccaacaaattgattttaaaaaataaagccatgggggggaaaaaggcaaaagacttamaaaggcatttcaaggcccagtgcagtggctcacgcctgtagtcccagcactttgggaggccaaggcgggtggatcacgaggtcaggagtttgagacaagcctgaccaacatggttaaaccccatctctactcaaaatacaaaaattagccggttgtggtggcacaaacctgtaatcccagctactcgggaggctgaggaaggagaatcacttgaacccaggaggcagaggttgcagtgagccaagatcacaccactgcgctccagcctgggaaacagagtgggactccatctcaaaaaaaaagggcatttcaaaaagagtaccaaaatggccagtaagcctattaagagtattcaacatcattactaattaggaaaaggagattcaaaccccaataacaaaagggtaaaatttggaagctgattgtactaaatgttgataggaacatgaaacaacaggaat

SEQ ID NO: 370376 - DNA, 592 bp, Homo sapiens
caagtcacagaatatgagaagtatttgcaatatacacctgatagctaatttgtatcaataacacataaataactccaacaaattgattttaaaaaataaagccatgggggggaaaaaggcaaaagacttacaaaggcatttcaaggcccagtgcagtggctcacgcctgtagtcccagcactttgggaggccaaggcgggtggatcacgaggtcaggagtttgagacaagcctgaccaacatggttaaaccccatctctactcaaaatacaaaaattagccrgttgtggtggcacaaacctgtaatcccagctactcgggaggctgaggaaggagaatcacttgaacccaggaggcagaggttgcagtgagccaagatcacaccactgcgctccagcctgggaaacagagtgggactccatctcaaaaaaaaagggcatttcaaaaagagtaccaaaatggccagtaagcctattaagagtattcaacatcattactaattaggaaaaggagattcaaaccccaataacaaaagggtaaaatttggaagctgattgtactaaatgttgataggaacatgaaacaacaggaat

SEQ ID NO: 370377 - DNA, 596 bp, Homo sapiens
tctttatcaaaagacaccattttgaagaggcaagtcacagaatatgagaagtatttgcaatatacacctgatagctaatttgtatcaataacacataaataactccaacaaattgattttaaaaaataaagccatgggggggaaaaaggcaaaagacttacaaaggcatttcaaggcccagtgcagtggctcacgcctgtagtcccagcactttgggaggccaaggcgggtggatcacgaggtcaggagtttgagacaagcctgaccaacatggttaaaccccatctctactcaaaatacaaaaattagccggttgtggtggcacaaacctgtaatcccagctactcgggaggctgaggaaggagaatcacttgaacccaggaggcagaggttgcagtgagccaagatcacaccactgcgctccagcctgggaaacagagtgggactccatctcaaaaaaaaagggcatttcaaaaagagtaccaaaatggccagtaagcctattaaragtattcaacatcattactaattaggaaaaggagattcaaaccccaataacaaaagggtaaaatttggaagctgattgtactaaatgt

SEQ ID NO: 370378 - DNA, 592 bp, Homo sapiens
caagtcacagaatatgagaagtatttgcaatatacacctgatagctaatttgtatcaataacacataaataactccaacaaattgattttaaaaaataaagccatgggggggaaaaaggcaaaagacttacaaaggcatttcaaggcccagtgcagtggctcacgcctgtagtcccagcactttgggaggccaaggcgggtggatcacgaggtcaggagtttgagacaagcctgaccaacatggttaaaccccatctctactcaaaatacaaaaattagccggttgtggtggcacaaacctgtaatcccagctactcgggaggctgaggaaggagaatcacttgaacccaggaggcagaggttgcagtgagccaagatcacaccactgcgctccagcctgggaaacagagtgggactccatctcaaaaaaaaagggcatttcaaaaagagtaccaaaatggccagtaagcctattaagagtattcaacakcattactaattaggaaaaggagattcaaaccccaataacaaaagggtaaaatttggaagctgattgtactaaatgttgataggaacatgaaacaacaggaat

SEQ ID NO: 370379 - DNA, 545 bp, Homo sapiens
taacattgaataaatctcaaatgttttccaaagttatcagacatgatatacaacagatatcagccatccttgaataggttggcactcagcatcaaatgttgttgacaaattgagtgatctctcattcaaaatcattgattcatacattcagtcacaaatatttattgagctacttagtttgctagctttggggctaggtgttggaatcaatggtcagccaaaaaggaaaaaaagamaggtatagttcctgtcctcatggtacttataatctaatagagggtgatagaaatcattgaaagattggtataaataaatatacagctaaagcacatggtgatatacatgctattataagaggacttaatgagaattgacttggtgcggttagagaggatgactctgaggaagatatggttgagctgagatctaaaggttaagtaggaattaagtaaagccaggaggactcagggtcgggggacagaaagcatggctggtgaaagagaacatcatctgttaatgtcttgaagcagaagggagcatgataa

SEQ ID NO: 370380 - DNA, 586 bp, Homo sapiens
aggtaatatactgcatagtaccaaaatgtaacaagaatagtttctttcccaccttcattgcccttgcaccgtgttcccatcctcccacctacctcccagccaggtaatcactattattggtttcttatgtatgttttcagagtttctttatgtatatacaagcaaacacagtatgtatgtttgtttctgtcatatcacttatcataccactatttcacacctttctctttttacttaatatatctcgttgattttgccatataagttcatagagaacctctttatgttttaaacctcattaccttaataaattctcttactgttttcagtagtttttcattttattgtctttggcgttcacaggacaaaatgacatcatctgcaaatattgatggtttctaaatattttgtctctacatcatttatctctgccaattgttttggcttgtgcatccagcacatgttaaatattaatggtaatgaacatctttgtctctatccggccttattgagaatgcctttaatatttctcagtaagcatgatrctggcttttgggacaagataaatatattttattttgttaaa

SEQ ID NO: 370381 - DNA, 634 bp, Homo sapiens
tattttctgttgctgtaagagagtacccgagactgggtaattaataaagacaagagatttatctagtgkctgggaagtccaagattaggcatctgcatttggtcgccttctggtgagggcatcgtgctgcatcatcacatggtggagaaaggaaaaggaagcaggcgtgtgctaccatggcaaagcccgaagcagccttcctgcataacaacctgctctcaagataccaaatccggttccttgagagtgagaatgcactcacttcctctgaaaattaacccagtcccctcaggagcagcattaatccctcttaatgacctaatcacttcccaaaggccctacctcccaacaccaccacactggggacaaaatttccaacacatgcattatgggtgacacactccatgcaaagcagtatagaaattcatgagcctagaaattagaagctatgagtgacaaataaccaattgtttaaaattaagtggagcatattttatatttctgatcctaatctcatttttttgaaaatgtgttcagtaaatgtactgttattaagagtatctacatgttaacatttctcttgtatgcttttaaaggaaaaaaaaattctttaaaaacacttcattcttttatg

SEQ ID NO: 370382 - DNA, 478 bp, Homo sapiens
aaataaaaataagcatcatatttgtgattatttttaaattctcttcggcagatataatcacagtgcctatcagattcatagacatcaaaatcaaacgataacactcttcttattcaattatagccccattagaagcatctatttcctcaccatgtaatattcagactgccatagaaaaggcaggggcttcctatttttctgttgtcractctgaagccactctgcctgggtttaaatcccctctatgccatatactaactggggatcttaaacaagttacttcatcactctgggcctcagtccctcaattgtcaaatgaaattgttaatatctactctcagaggatttctgtgataattaaatagttaaaatttactgaaagtacttggaacagttccaaacacatagtaagtgctataaaagttgtacattgttgatgttatccctgctagtattaatattatccagatcatgggaa

SEQ ID NO: 370383 - DNA, 521 bp, Homo sapiens
gtgtcatcctctcaccaatgacttattccactcagtgtttctcaggtttagttttaaattatagaaatgttttatttttattccatctatattttgagttctcactccataattataaataattttttgagtcacatgaaatcaaagaaaacattttctaaatcttgttacagtaacagtcacattttgtttagaatactcttttagtgatatttttatacaattgataacctgcttaattttaactrctgtagtattatgctatttattttgataatattgtaatgttggtggagatataaacaagtcatggaatctgaaaatatctggtttgtgtactttgttttcagcccttgtatagattaaaccaatcttttttatttttttgaaaaaatctgcagacattgccatgtacttgagttcaagatcctgtacatagacctgttttttaaaaatttaaaaacaaaatatgtgtaggaatttgtttagcatgtattgtatttcattatcaattttagaga

SEQ ID NO: 370384 - DNA, 593 bp, Homo sapiens
tttactccagtatcagcaaaataacaagaaagaacaatctataaatcaaaagatatagggagaaaataggagctttgcatcatttatcaaagaaagtagttttcttggaatgctcaaatattagcaccaaattctaatactaaagtttttctttaaaataaatgaaaggcaagaaagagaaaagcagcatgtctctcattttctacagtgattttctggggcaagtgtgaacattattttacttccatatttgaacagcacctgctgtaattattgtattgcctgtgtaaactatcaaagccctgatattaaactgctattccttaaggcccacactgacttccagcatgtgcatggctaatgaatttagtatcattatactgctgtggaaatcaacaaaaagaaggagaagaaaataaaagcctgaaaactccattttcagcaaaagaaagagacagatataatccacaaactacagaagacacataagagctgcccatatcagcagccatcagsgagaagcaagcaggagaaagtacagagaagcactgagagtggccacatggcgagccgcatccccaagaagttaaggc

SEQ ID NO: 370385 - DNA, 567 bp, Homo sapiens
tgcttcctgtgctggccttgaaactagcaccagatgttcctcaaaaagcacttgtacacacatgatcatagcaactttattcataatagctccaaactggaaacaacccaaatgctcctcaacagctgactgggtaaatacatggtggtacatttatgcagtagaatactacagcaacaataaaaaggaatgaacaacttttcttaaagcaaatcagaggcctttgaaaataggactctgtattagttttctattgttgtctaacaaaataccacaaatagcagcttaaaaaaacactcacatattaactcatggttctgttggtcaaaagcccaaacatggcatggctgtgttctccactcaggcttttwgatggctgaaataaaggtgttgggctttctgaaggacatagagaagaatgtgctttcaggctcattcaggttgtgggcaaattcagttccttgcaattataggcccaaggtacctgtttatttgctgtcagctggaggcctattctcagctcctagagctgcccacatccattgccatgtgtccccctctatcttc

SEQ ID NO: 370386 - DNA, 395 bp, Homo sapiens
ccgcctcatgagagaagctgcacagggtgcaagttagaggaaaagagagaactttggagagaatggggggctcactagagggagaaaaggcatcccgacccccsagcttgactgttgccaatcttcaaaaactcagaaggcttcctcctcttgtaagagtgtagtgagagaacccttgggtgagcttgacctttgttccctagaactcaggggtacagaacgaagtgcctgcctgttgcctggaaaaggctgaagggtggccagaatgacctgctaggataaagcaaagaaagagggctctggttggaataggctgttcctccatgcttctgtggggcaatgatgccaagctctcccatgggctaagtgatcctcctggaagattgccaggctag

SEQ ID NO: 370387 - DNA, 589 bp, Homo sapiens
cacatgtatacctatgtaacaaacctgcacgttctgcacatgtatcccaaaatttaaartataataataaaaaagaaattaaaaaatgtaaataaaataaaaagggaatgcacataactgtcaactaaaattgcctacctaagtctaaagcagtcctttttcatcaaaaggctatgttccaatatataacagccgttaacagtcaaagattttcaagattacttctctcccagaagttttctctagttaagggagagcagtaagatttctattttactttggattctattcttgggcatctagcactaagttctatctgctcccaagattcaaattcctaattgacataatggaatatatgagtgcacatgtcaggaggcatggaggtagtgtgtaaatcaaggggcaaaaatataatttaaggccctccaaaagaaaacataaatcaaaggttagagttagcagagagacaggaactaagcaaggaagcagaaatcagatcatgtgaatatatggggaaacgagaagcaaacgaaggtaaaattagaggaaatctcaacactaacagaaagctcaggggtacaaagtt

SEQ ID NO: 370388 - DNA, 527 bp, Homo sapiens
gtttttttaaattgaaatttctattatagaaatctcttatgttttactgcctctgtgatgagcagagataagcttcgcatttgcaaaattaaattactttcccaaagtatttcttaattttcatgcagatgccactaaaaattctaagacagaaaaagttgttagctgcactttaaatatgagaaaatctctgtgtggaaaggggaagggaagagggtgaaattacttttactttaaaattaaacataggggtatttgtttygcaggatacacatctggagaataagtacctaaggggaaaacagtttcatagttcaaattttgaacatttttagtgtcaaacttttggatcaatgtaatctactaaggaatataaaaatggaattaaaaatgaaatgtgaaaatctggcacctccacaagaaaagaatcaatcctgtgcccatctcaagcttgtttcagagaatgagacttcccaacaattttatagatgcagtgagatctttcgtaacagtacctctctgatgtc

SEQ ID NO: 370389 - DNA, 348 bp, Homo sapiens
gaacttggggccgtcatggaatttgggggatttctttccatactattttgtattcagtttccaattatctaagacaccttccaaatgtacattataacaaatattagagaaaggatattagaaaataaaatatgaaggtaagtaaaagctagggctacctctgatagacacaattcatgcatatgtttaagttggtgctatttagcatcttttaacactgccattkccagccaccaggtctttatccctatcttttcctccctctggaatgctgcccattccttcttcaactgctggcttcttctcatctttcaggtctccacttaaatgtgacagctcccgtgaggt

SEQ ID NO: 370390 - DNA, 542 bp, Homo sapiens
accccttgtcatgtggcattttctggcaaacatgtagatcagtaacaaacatgggcaacataaagccttaatgagatgatttgcttcatagtgagcatgtaattatcgtgtgcatttagatttttcaccaagtttttgcctctgttataggaaaatgaatagattcactgttgatgctataatgaaagtcagcgattgaaagttgaattttkttcattgttcagtttggaattttttattagagactatatttctaaatcataatgaaaatcaatggcagaattaatcaatatataagattatcttcacatatattggagaaacaaatctaaaaggtaaagtaaaatcaaactctactgatattttgtcacatttataaggcaaaattgatagctttaggatatgtgggtttcttgcgagaggtatttatcaaagaaaagatggagatattgccagcgtaagtaaactttgctttttcttcatggttaaagcttcagcactggaatgataaacagcatgaggtccttctaataagttatcaa

SEQ ID NO: 370391 - DNA, 542 bp, Homo sapiens
accccttgtcatgtggcattttctggcaaacatgtagatcagtaacaaacatgggcaacataaagccttaatgagatgatttgcttcatagtgagcatgtaattatcgtgtgcatttagatttttcaccaagtttttgcctctgttataggaaaatgaatagattcactgttgatgctataatgaaagtcagcgattgaaagttgaattttgttcattrttcagtttggaattttttattagagactatatttctaaatcataatgaaaatcaatggcagaattaatcaatatataagattatcttcacatatattggagaaacaaatctaaaaggtaaagtaaaatcaaactctactgatattttgtcacatttataaggcaaaattgatagctttaggatatgtgggtttcttgcgagaggtatttatcaaagaaaagatggagatattgccagcgtaagtaaactttgctttttcttcatggttaaagcttcagcactggaatgataaacagcatgaggtccttctaataagttatcaa

SEQ ID NO: 370392 - DNA, 542 bp, Homo sapiens
accccttgtcatgtggcattttctggcaaacatgtagatcagtaacaaacatgggcaacataaagccttaatgagatgatttgcttcatagtgagcatgtaattatcgtgtgcatttagatttttcaccaagtttttgcctctgttataggaaaatgaatagattcactgttgatgctataatgaaagtcagcgattgaaagttgaattttgttcattgttcagtttggamttttttattagagactatatttctaaatcataatgaaaatcaatggcagaattaatcaatatataagattatcttcacatatattggagaaacaaatctaaaaggtaaagtaaaatcaaactctactgatattttgtcacatttataaggcaaaattgatagctttaggatatgtgggtttcttgcgagaggtatttatcaaagaaaagatggagatattgccagcgtaagtaaactttgctttttcttcatggttaaagcttcagcactggaatgataaacagcatgaggtccttctaataagttatcaa

SEQ ID NO: 370393 - DNA, 542 bp, Homo sapiens
accccttgtcatgtggcattttctggcaaacatgtagatcagtaacaaacatgggcaacataaagccttaatgagatgatttgcttcatagtgagcatgtaattatcgtgtgcatttagatttttcaccaagtttttgcctctgttataggaaaatgaatagattcactgttgatgctataatgaaagtcagcgattgaaagttgaattttgttcattgttcagtttggaattttttattagagactatatttctaaatcataatgaaaatcaatggcagaattaatcaatatataagattatcttcacatatattggagaaacaaatctaawaggtaaagtaaaatcaaactctactgatattttgtcacatttataaggcaaaattgatagctttaggatatgtgggtttcttgcgagaggtatttatcaaagaaaagatggagatattgccagcgtaagtaaactttgctttttcttcatggttaaagcttcagcactggaatgataaacagcatgaggtccttctaataagttatcaa

SEQ ID NO: 370394 - DNA, 604 bp, Homo sapiens
ggatggcataactgtgactggcttaaagccatcaacattttcctcctgggactgggatgagccattttcatggattacatggagacatacacatgtgaactaaagcagacaagggaatatgagggaggctacccaatccgctcccacaygtctgctgtcccacggagctagagtagcctcctcctgttactcttcctggcatctcccaactcattcctttcctagcaccagaaatcctctgtacttatttgttcattattttttgaaattttcttgccaaaatggaaactctatagaagtagggatcttcttcactgcgtatcattagtacaaaccaccatggagatgattagccaacatttttattgatcaaagaattataaacatataattataaaattcacagtatcaaacattagcctctttaattaggagaaataaagccttcccttataccaagatataaacatttttagctcataaaagaagtattttgtagtaatatctaactgagagtatgttattcccaaagtcttggatcacactgtttacagctgacttgctattcacagcctcaacaactgtatcagtcagcctcctggta

SEQ ID NO: 370395 - DNA, 539 bp, Homo sapiens
gaggaaagtggcatttggcagattgtgactttacagggaggaaatactaagggagcctttcccagaactgtacagcgctgatctccccaggtctcacacactgcttggtaactgggagtgattataagtcttgcagtcttacagaaataattgcaaagaagtgaatgagtgaggaaaagccacaacatcgtgttaagcaaatcagtgagattttaagggagaagatgaggtctcctgtgcccataaagcagtggttctcaaaccctcgttgttcattaaaatgacctggacaactttaaaaaatcttgattcccaggccactaccctgactaattaaaattaaatcataatcttagagggtggaacctagcatcagtacttttaaagctccccaggtaatttcaaggtggtttaaatgctaatgaaattagaaattaccagcaatcaatattcatgagtmacaaggaattatagttatggattttgccagtcatgttcagatctggaatatgccctcaagttatatagcatttagcaaa

SEQ ID NO: 370396 - DNA, 593 bp, Homo sapiens
atggtatatatttactgagtaagaatccattgcaaattgcaaatggaataactggttcccrttagcagtatttgtcaaatgtgcttttccttgggttttgcttttgggtgtgagatttccttgcaatgtcatagtgatgaaagcattagcatttcacatatggtgtccttgcctctcagtataattcatcatctaaggtggggaactgccttgcgttcacctgcaattatttcttgtaattagagctgcccccacatgtaatgctctccccgtgagatcccagataatacatttcagggcaaggattatttaattcttccctggtaaactgatccatcaccaaagtgtttcaatttgtattgaaaaatgctacatggggtcagttcctagatgagtatatcttgttctgtcattttgctgtaaaaaattcctataaaaatttcctttaagaaagttggacctgtggcaattaaggaatgagaaaatacctaaatttttttttctgacgtctattttccttcaaagcaaacttcaccaagttttacacataacgttcccttaatttattgtcagagagattgcgtgcctattat

SEQ ID NO: 370397 - DNA, 593 bp, Homo sapiens
atggtatatatttactgagtaagaatccattgcaaattgcaaatggaataactggttcccgttagcagtatttgtcaaatgtgcttttccttgggttttrcttttgggtgtgagatttccttgcaatgtcatagtgatgaaagcattagcatttcacatatggtgtccttgcctctcagtataattcatcatctaaggtggggaactgccttgcgttcacctgcaattatttcttgtaattagagctgcccccacatgtaatgctctccccgtgagatcccagataatacatttcagggcaaggattatttaattcttccctggtaaactgatccatcaccaaagtgtttcaatttgtattgaaaaatgctacatggggtcagttcctagatgagtatatcttgttctgtcattttgctgtaaaaaattcctataaaaatttcctttaagaaagttggacctgtggcaattaaggaatgagaaaatacctaaatttttttttctgacgtctattttccttcaaagcaaacttcaccaagttttacacataacgttcccttaatttattgtcagagagattgcgtgcctattat

SEQ ID NO: 370398 - DNA, 593 bp, Homo sapiens
atggtatatatttactgagtaagaatccattgcaaattgcaaatggaataactggttcccgttagcagtatttgtcaaatgtgcttttccttgggttttgcttttgggtgtgagatttccttgcaatgtcatagtgatgaaagcattagcatttcacatatggtgtccttgcctctcagtataattyatcatctaaggtggggaactgccttgcgttcacctgcaattatttcttgtaattagagctgcccccacatgtaatgctctccccgtgagatcccagataatacatttcagggcaaggattatttaattcttccctggtaaactgatccatcaccaaagtgtttcaatttgtattgaaaaatgctacatggggtcagttcctagatgagtatatcttgttctgtcattttgctgtaaaaaattcctataaaaatttcctttaagaaagttggacctgtggcaattaaggaatgagaaaatacctaaatttttttttctgacgtctattttccttcaaagcaaacttcaccaagttttacacataacgttcccttaatttattgtcagagagattgcgtgcctattat

SEQ ID NO: 370399 - DNA, 593 bp, Homo sapiens
atggtatatatttactgagtaagaatccattgcaaattgcaaatggaataactggttcccgttagcagtatttgtcaaatgtgcttttccttgggttttgcttttgggtgtgagatttccttgcaatgtcatagtgatgaaagcattagcatttcacatatggtgtccttgcctctcagtataattcatcatctaaggtggggaactgccttgygttcacctgcaattatttcttgtaattagagctgcccccacatgtaatgctctccccgtgagatcccagataatacatttcagggcaaggattatttaattcttccctggtaaactgatccatcaccaaagtgtttcaatttgtattgaaaaatgctacatggggtcagttcctagatgagtatatcttgttctgtcattttgctgtaaaaaattcctataaaaatttcctttaagaaagttggacctgtggcaattaaggaatgagaaaatacctaaatttttttttctgacgtctattttccttcaaagcaaacttcaccaagttttacacataacgttcccttaatttattgtcagagagattgcgtgcctattat

SEQ ID NO: 370400 - DNA, 674 bp, Homo sapiens
aggttggatttgacttgactgtcaactataggacaaccagtgatggtttccaaaaagtcacaactttgaagttcagaatttttaaaccccttattgtgatacaaagttctcagtacttggaaacacccatcatcgaaaactttccctaaacctacactgaggatatctgcaccttttgtagtttttctctctaatcgtgaaggtagaaatcgaaggtttcttctaaatttgttaaaagaaggacagctgagaggaggtggtgaggaggagcaaacttagaataagctggaaagaggccagttagatggggtatgtgactccttgaatgagtgcctgcgggcaacacccttcattacrgcggtaactggactgaactgccttcatgtcaacataacgatgtctccagacctcagtaagaaggcctctgggtgccatttgtcataatattctctcttctcagcctaacccttttgagtgcccacgtttagacctttccccacaaatcaactttccttccacttcccaagatacttgggtagaagtttcccaagcaattactttatcaaacagtgcctaagtgtccagtttccatgacttgtaccctcagttgtcctttcccaaaaatcacctctttgcaaattgcttggtcttttgtctgtctataaccaagaggt

SEQ ID NO: 370401 - DNA, 603 bp, Homo sapiens
cagtgctaggactgaggaagacaggctcctgaggatatgggttgtatgagaatgtgtacatgaagaggaaggaagggggagggaaacagagtgttaaactaagctctgctctttggcaggcaaagttgccgtaacaaagtcaagaagtcatttactgactctgatggaccgggaaatgttataatggggaagagagcagcagcttaggatggtgtctaatacctttttggtgttcatcaaataatgtagttatgggtcaacttgaaactgttagaacaaggtggaggccacataattcctttaaaggcatgtgcatcttgctagatggacggggcaaactgggcatgatttttcttttcttccacattccctaacaaacaataacatcttctgcagtacagcaaagtacagaatgtaataaatacccaaacccaacaaactcctcttccttaccttcagcagcattgatctgagcacagctgccatggggaatttgcggcccaatggcaatgcytgtcaatataaaagcccgagtcattttcctgctgacacatgccccactttctaccttcttgtagctaggaggaggggtagatgagaaaa

SEQ ID NO: 370402 - DNA, 531 bp, Homo sapiens
caagaattgatagttgatgaagcatcctaactacagttaattcttagaaaaagaatattctttagaaaaatatttattatccacctactgacttcatggggtggcttaaggctttcgcatgatagaatagcagtgaarataatgttttgggaaatgtcaagcactgctaaatagtaatccaagcattgaattattatacaacctgatgtttcagagtcaggcggggattttaaattaaaaaaaaaaaagagtaaaagacatgtcatcatggaaaattctcttactttccctgaccatcaccaacatttttctaataacagctgaaataattgacctttccaagacttatcggcacttccaggtgctaatataattgcactgagaaacttacaggtttcttttcatattaaagttagcttgcaggttcatgagaactcagctcatgaagtgtccaccctcatcgctagcaagtattgatttctctgtttcaaagaacagttattaaagtgtggactctcttactataaactt

SEQ ID NO: 370403 - DNA, 556 bp, Homo sapiens
gacattcctctttggcgtgtggaaaaatgcaagtgaaaaaacaatttattttgtgctccctacctcctatatacctggcagtgtgagaggagtatgagatacaaaaatayacatttcaataaaacatcatcctagtcatcaaggaatgcattgccaaactggggccaaaagcctaaaaagagggcatttcaataaaggaaggtctatgttctgaaaggaataacaggatactttgttaagtgaatggtggtcagaaaaccccttcctggagaagacgtttcctgaaccaaagctgtaaggccgagtagacaaatggcattggtgaattaaggttatgtcctaaataagcacgttttcccccaggaaaattctagacacttttgttcctagcatcaggttaagaatgctatttcttcagagtcaataataaatgagtactttttttaaaaaattcaagttgatgtatgaaaacgttatcttacttggagttttaatatgcaaatacagaacttttaacattagtggtgacattgccttaggagagtctgaagaaaaa

SEQ ID NO: 370404 - DNA, 556 bp, Homo sapiens
gacattcctctttggcgtgtggaaaaatgcaagtgaaaaaacaatttattttgtgctccctacctcctatatacctggcagtgtgagaggagtatgagatacaaaaatatacatttcaataaaacatcatcctagtcatcaaggaatgcattgccaaactggggccaaaagcctaaaaagagggcatttcaatraaggaaggtctatgttctgaaaggaataacaggatactttgttaagtgaatggtggtcagaaaaccccttcctggagaagacgtttcctgaaccaaagctgtaaggccgagtagacaaatggcattggtgaattaaggttatgtcctaaataagcacgttttcccccaggaaaattctagacacttttgttcctagcatcaggttaagaatgctatttcttcagagtcaataataaatgagtactttttttaaaaaattcaagttgatgtatgaaaacgttatcttacttggagttttaatatgcaaatacagaacttttaacattagtggtgacattgccttaggagagtctgaagaaaaa

SEQ ID NO: 370405 - DNA, 556 bp, Homo sapiens
gacattcctctttggcgtgtggaaaaatgcaagtgaaaaaacaatttattttgtgctccctacctcctatatacctggcagtgtgagaggagtatgagatacaaaaatatacatttcaataaaacatcatcctagtcatcaaggaatgcattgccaaactggggccaaaagcctaaaaagagggcatttcaataaaggaaggtctatgttctgaaaggaataayaggatactttgttaagtgaatggtggtcagaaaaccccttcctggagaagacgtttcctgaaccaaagctgtaaggccgagtagacaaatggcattggtgaattaaggttatgtcctaaataagcacgttttcccccaggaaaattctagacacttttgttcctagcatcaggttaagaatgctatttcttcagagtcaataataaatgagtactttttttaaaaaattcaagttgatgtatgaaaacgttatcttacttggagttttaatatgcaaatacagaacttttaacattagtggtgacattgccttaggagagtctgaagaaaaa

SEQ ID NO: 370406 - DNA, 556 bp, Homo sapiens
gacattcctctttggcgtgtggaaaaatgcaagtgaaaaaacaatttattttgtgctccctacctcctatatacctggcagtgtgagaggagtatgagatacaaaaatatacatttcaataaaacatcatcctagtcatcaaggaatgcattgccaaactggggccaaaagcctaaaaagagggcatttcaataaaggaaggtctatgttctgaaaggaataacaggatactttgttaagtgaatggtggtcagaaaaccccttcctggagaagacgwttcctgaaccaaagctgtaaggccgagtagacaaatggcattggtgaattaaggttatgtcctaaataagcacgttttcccccaggaaaattctagacacttttgttcctagcatcaggttaagaatgctatttcttcagagtcaataataaatgagtactttttttaaaaaattcaagttgatgtatgaaaacgttatcttacttggagttttaatatgcaaatacagaacttttaacattagtggtgacattgccttaggagagtctgaagaaaaa

SEQ ID NO: 370407 - DNA, 523 bp, Homo sapiens
tgataactaatatgttacataaaaaatggagaagtttataatggatggatcaagctgacatcactagaatttactcattaaatatcatgaaagaggaagccagacattaattgtcccttgatgtgttacaatagaaggtgccatgatgccacctataggatgctcttgccaaaacattggccctaaatctcatcaagcctttagatgtaaccacagtttatataacacaccaaggagagcgggacatgccaactaaaaccatgatattgcaatcctcaawactcagaatgtggaatattccacaagaccaacaatcttgactcctcaacaaataaattacagaaaaataataaatacggaaacctattgattaatacatccttaaagacatagccaaattcagtgggttgatcttacttgaattttgatttaaaacatattatatatgcatataatgatagctgggtgtatagttatggtcaaaatgataagtcatagatttcagacattatagatgttgcag

SEQ ID NO: 370408 - DNA, 634 bp, Homo sapiens
cttataatccataaggtcctgcaaaatttggagaaagtcctgggagacaaacaaagttgaccaatctagcaaaacttgccaagtctaccatgaactaaatgccaatacctatggtagcaaactctctccctctttctctctctcccatcttagcacctaggaatgttgtctcaaaaaaaaaaaaaaaagaaaagaaaaaaaagggaatgaagtcaccactacagtcctttgtaatctgatatcaaaattttatgttctcgttcacttcatgccagctttaaatgtaactgctagcaagggaacattatacgtctgtctgcatgaaaaattgaccacgtctcctttataatgcattccgaagctttctcacctaagagttatttctttattattaattctgagtctctggttgccagtcatgccatgggaatgggaaataataaggcggtatgtcctcttgccctgaatatcttcttatatgaggcaggctgtgtactttcagccattcttttttcccccccattctactccggagaacagtgcattgaaatagaaaatawgtgttgcttatattatacctcatctcatttccagaaacagacacccctgctagttcccaaaagtttttgagaca

SEQ ID NO: 370409 - DNA, 584 bp, Homo sapiens
tacattcagtctttagtaattgctaaaatatctttgcatctatttataaaaagagataaatctttccataattcatcagagagtagtgggttttagtaactgtagtataacgtgyaactcatttgctccgtgaagcactaacttccatacaagtaattttttgtatgtgtgttgtgtatgtttatgtgtgttgggagaaagtctagactccttacccacaaaaagaaagtgaattccagaaaaggtttaacttatctaggaagagaagaaaactaatgcaaatcttgctattaacttaatgcatcacgaaaatgacttcacctaagtgttttgtgccatattttctagcatctgtagtatgattataataataaccttcttagagaagaaaatctttttttccaaaaattacactgccctcaatcacgaatattgcttcaaaattcatatttacattctgttttataaggttatttttctaaatactttttcaacccaaatgtcatgcaaatgttttgaaatcatcacaatgaaaagcacaatgttcaagtctgtaagaaggcaacattccattgtagatgttc

SEQ ID NO: 370410 - DNA, 593 bp, Homo sapiens
aatgaaatttaagcttggagaagtttattcaggtagaagctatctgtcattgttgcaaatagttataaattcattaaaattcatttttaagaaaacattttgattttgtagcaataatgcagtcagaaattttagtggagcatagcattttggtaaaagccacattcttaataaattaagmaatgttaagatgagaaatgtacttaaatttggccatgtggtacatatcatttatccatggcaacctaacaagctgaagctttagcagttttggaaattttcaagaacttgcaattatcgatgcaaattttacaaagagaataatcaccttcacaaaataaaagacccaaaattattgacagatgagagctaaaatggtgtatgagatttagttctgtacttctataatcgtgtttgagaatattgcaagttcctatttataactggataaattttatattctgtgctggaactatattgagaaagcctataatttggtgaactatgtgagtttgacaaaatattcaaaataatcacaagtagaaacaacttgttgacaagttttgtctgtaaacatatttgaccaacaaaca

SEQ ID NO: 370411 - DNA, 605 bp, Homo sapiens
gggtagacccagggtagtacactgtgcacacttcaaaagcacactgatgtagagataaccttgaatccactctgattttggtatgtttgacctggctgatgatcagtgggtcagcttcacaataamcacagtggcttccataactaacacgtggtggccagaggcatctgtgttcagctgctattatccctgttggaggtgtgccatccagagccaaagtcaggcattcccatgctagaaggaaaaaatccaactccttattgttctctctgcattgttcttacttaaaggaagcctgccccagggtttggtaaataccattcaggctatccctatgtctgaaatctctgaaaacatgcagaaggggaagaagagggaaataaaagactcgtatccatgaatggaaataccttgggggaggagcaagaaaccgtgtgtttgctaagtgtgggagaggtcactgtcccaggtagccccatgctgtttcctgtcatcttgggattctcgcaagtcctaccctgaccagccagggaactgcgggacctgcctgtgagcagacctgagctgtgcaaagaagcactgttatgtgagcatgttcacaccag

SEQ ID NO: 370412 - DNA, 605 bp, Homo sapiens
gggtagacccagggtagtacactgtgcacacttcaaaagcacactgatgtagagataaccttgaatccactctgattttggtatgtttgacctggctgatgatcagtgggtcagcttcacaataaccacagtggcttccataactaacacgtggtggccagaggcatctgtgttcagctgctattatccctgttggaggtgtgccatccagagccaaagtcaggcattcccatgctagaasgaaaaaatccaactccttattgttctctctgcattgttcttacttaaaggaagcctgccccagggtttggtaaataccattcaggctatccctatgtctgaaatctctgaaaacatgcagaaggggaagaagagggaaataaaagactcgtatccatgaatggaaataccttgggggaggagcaagaaaccgtgtgtttgctaagtgtgggagaggtcactgtcccaggtagccccatgctgtttcctgtcatcttgggattctcgcaagtcctaccctgaccagccagggaactgcgggacctgcctgtgagcagacctgagctgtgcaaagaagcactgttatgtgagcatgttcacaccag

SEQ ID NO: 370413 - DNA, 586 bp, Homo sapiens
ttaacggtggtatcattcaaacctaggtcttcctctttggggattttcaaggtcatggtggtccacactttaaagaattcagaatagtgatgaattctgcatttcaagccacataaaaattggtgttagtaactaacagaacatgaagactctcactaagtaactaatcccaattcaagcactttgaaactagctataatgaaaatcacaccaggagaaggacatcagaygtccgttagcaaaacaaagcataatgaaaccctttactttactctattatgagtacccaaatcacagggtactgaagagactttatagaacaccatttctttctttcttcctttttcaagaatgttattgatgtaacaacacaaaggaaatgtcaaaaatagaaaatgtgtcctataatccaactcttcaatatgcatcattactgttcaagccttgtgctaaagattatatatttttgagtaggtaggcataaatctttcacgttctgttttaataaataatattttttccttttggaagcacggttttcaaatggtaatttaaaaataactgcatgtcaatacaactaattaac

SEQ ID NO: 370414 - DNA, 624 bp, Homo sapiens
cttggctggctgccccccatcccctatctccagcaatgggtagcaggaaaaagaagttaaaatacagtgatgggattactgggcagggaaattaaaaccaataataagctgataaaggaaaccaagtgaggttgaatttcatgaataaacctagatttatatattttaaacctagattcttaataactgtcttgattataaggagtatcagctttatgatgggatttcatttttgtttacagttacatagaacattttgtttatccagttaactgttgatggacacttaggttgattccatgactttgccgttatgaagagtggaggcttttgtttagagatcataagcttctccaacccgtaggttcatattttttgctaaatttgtaaaaytttcagctaatatatttgtgtgtgtgcgtgcgcatgcgcaatatacgtgtatgtgtactgccttctgcattccctctcctctccttctggaatcattagagctattggtactgtccaatggttttctgtgactttattcattgttttttggtcaatctttgtttccttctgttgttttaactggacaatttttgctgaactatggtgaagctcactgactcttctttgtca

SEQ ID NO: 370415 - DNA, 520 bp, Homo sapiens
acaactatgggtctattaataaagtacttaagactatatacaattaaacatgaaattcctcagttacagaacacacaattcaagtgctcaatggctacatgtctagcggtgattgtgttgcacagcacagatacaggacatgtccatcatcacacagaacgctatttgtcagaaatattccaaattaacaaacaaacccaagtggaaaaattactsttaaatacgtccaaatagttgcaaacaggctttgttttccaggcagaagaatttggaaaatgctagaaatcgtatctcacacctatctgcaaaattgcaatgttatttagagtaaggatgttctgacttcctcttcgtgacaagcagacagacatctcaggaagcactcaggtagccggctgcttctgggaaggagtggggcagggctcctctcacatttacaggactgttcattcacatcatctcttatggatcatggtgcctcaactccacctgccaacattaatagaaaatgacagttgcc

SEQ ID NO: 370416 - DNA, 404 bp, Homo sapiens
gacagcacctcccaacctgcaaacacaccatcctccattagcataatataaagactgagggtgggcgtggtggctcactgctgtaattccagcactttgggaggccaaggtgggagggtcctttgagcccaggagttcaagccccaggcccagcctaggaaacaytgtgaaactttatctctacaaaaatacacacacacacacactcttagcctagtgtgaccgcatgtgcctgtggtgccagctacttgggaggctgaggcagagggatggcttgagcccaggaggtcaaggctgcagtgagccatgatcacaccaccgcactccagcctgggtgacagagtgagaccctgtctcaaaataaaaaaagactgaagtgtgtgtttggctgatttttataaaga

SEQ ID NO: 370417 - DNA, 567 bp, Homo sapiens
ccaccccaccctaccttccttcctttttaggacatcctttctctggttagaagagatgaagtccctgagatcagtgacatattattgcacacgggaggaaatgtttagttatgaagcaactccactttacagctctatctaatcttttctgggaagctgtatttcataaatctatagattttgggactatttactayatgcaaccctgaaccatggacatcctattaaagacactcttagttgcacatatggtaataattatgcccctgatatataacttattttatttcattcatgcaataatcatgtgaagtagactttgtttacccattttaatgagaaaatgcaagtgccagtaacttaaatgatctggccagagtctgcagagttcagccctccccacagggcagggctggggtttgaaggagacttgtcttcgattcacatcacagttttgccgtgactgcacagctgtctgtgtctgctgtgtcccatctgctctgctgtgggaactgaggagtgagttctgtagaactggcccttgactgaccaacgactgtgaggcct

SEQ ID NO: 370418 - DNA, 567 bp, Homo sapiens
ccaccccaccctaccttccttcctttttaggacatcctttctctggttagaagagatgaagtccctgagatcagtgacatattattgcacacgggaggaaatgtttagttatgaagcaactccactttacagctctatctaatcttttctgggaagctgtatttcataaatctatagattttgggactatttactatatgcaaccctgaaccatggacatcctattaaagacactcttagttgcacatatggtaataattatgcccctgatatataacttattttatttcattcatgcaataatcatgtgaagtagactttgtttacccattttaatgagaaaatgcaagtgccagtaacttaartgatctggccagagtctgcagagttcagccctccccacagggcagggctggggtttgaaggagacttgtcttcgattcacatcacagttttgccgtgactgcacagctgtctgtgtctgctgtgtcccatctgctctgctgtgggaactgaggagtgagttctgtagaactggcccttgactgaccaacgactgtgaggcct

SEQ ID NO: 370419 - DNA, 519 bp, Homo sapiens
aactggcccttgactgaccaacgactgtgaggcctcagtacaaaaggggtgcatagaggtgttagaggaattgcggttcaccctttcggaataatttggcattctcacgaacataatggttctggtaggcctaaaagagttaatacacacattccccatccccacccacaatgggtttgaacactgaggaaatcagcattagtgtttttttcccttgacatgctttatctaagtaggaaggaaattcgttaatagtcattgtctattaaagtacaagactggggctactagccttaattttatttagtaagtcttgacatgaattttggaaccacgagatataagtaataaagaaaaggtcatatgatcttccagaaaagaaaaaatcatgcaaggttagggctaattttgtgatgccagtctttaacagtctcggagctattcacygtgtggagaactctgtgggacttattttttctccctttgatgtggaccatttcattctgtgctccattttcc

SEQ ID NO: 370420 - DNA, 572 bp, Homo sapiens
gtggaaatattacttgaatttggatctcctggatagatttttaaatttccttgtcttttctattttctatttctttggtattgttattgttgttttactatcttaatggaaagttcctttggtttatctttcaaacttctttttgcgttatttctattatcatattataatttccaagaggtatttagtgatttacgtattttttaaatatattctcctgttcttgtttcatcaataaaatatcccctccaatagctttgaggatatcaatgacattgttttttctacttttcttctcgaagcaccaattttyttcttgtttcggttttgtctctgttgttatgatagaagctttatctgaatgtccactggtattgcctatctactcacacttacgagaaagttacttaaaaacatttggaagctcgggagtggggataacatgagcattgttccctagtggccattgttccctagtggccctcgttttatggtaaaccaacagagatacttcacaagggactcccagctgtctgcatcttgacttggtgtaacttccagtggtgttacta

SEQ ID NO: 370421 - DNA, 572 bp, Homo sapiens
gtggaaatattacttgaatttggatctcctggatagatttttaaatttccttgtcttttctattttctatttctttggtattgttattgttgttttactatcttaatggaaagttcctttggtttatctttcaaacttctttttgcgttatttctattatcatattataatttccaagaggtatttagtgatttacgtattttttaaatatattctcctgttcttgtttcatcaataaaatatcccctccaatagctttgaggatatcaatgacattgttttttctacttttcttctcgaagcaccaatttttttcttgtttcggttttgtctctgttgttatgatagaagctttatctgaatgtccactggtattgcctatctactcayacttacgagaaagttacttaaaaacatttggaagctcgggagtggggataacatgagcattgttccctagtggccattgttccctagtggccctcgttttatggtaaaccaacagagatacttcacaagggactcccagctgtctgcatcttgacttggtgtaacttccagtggtgttacta

SEQ ID NO: 370422 - DNA, 572 bp, Homo sapiens
gtggaaatattacttgaatttggatctcctggatagatttttaaatttccttgtcttttctattttctatttctttggtattgttattgttgttttactatcttaatggaaagttcctttggtttatctttcaaacttctttttgcgttatttctattatcatattataatttccaagaggtatttagtgatttacgtattttttaaatatattctcctgttcttgtttcatcaataaaatatcccctccaatagctttgaggatatcaatgacattgttttttctacttttcttctcgaagcaccaatttttttcttgtttcggttttgtctctgttgttatgatagaagctttatctgaatgtccactggtattgcctatctactcacacttacgagaaagttacttaaaaacatttggaagctcgggagtggrgataacatgagcattgttccctagtggccattgttccctagtggccctcgttttatggtaaaccaacagagatacttcacaagggactcccagctgtctgcatcttgacttggtgtaacttccagtggtgttacta

SEQ ID NO: 370423 - DNA, 621 bp, Homo sapiens
tttaaaaatgtgtttaatcattcatrtaatgagagcttattaattaaattctctatttttagcattgctaaacgccagggagtgcaaaagatgaccaggatggtgaccgccctcacagagatatcaattaattatggagacattttttactcagaaaacaagttgagaacaattcagggcactaattaattacagctgacttttcatagtaaccagggaaatgatctatagtggggttaggctggaagtgaaaggttatttctaattatttttggttggaaagctctaacgtgcatggggattcttccaatcttttcctaaatatctcttccttcagaatgactttcctgactctccctggaaacatttcattcccttctacctgcccaactccttgagattatgtcatgtgtccttgttttgattctctatcaaactctcattataccctaatgcagactttacaatactgaaatttctgtttttgtttgctgtttttgagggcaggaacagagactgccttgctctcatggtctccctgtgccccatgcagtgtctgctcacaggcaagccagctgactcatgatgactggtcctgcttcacctgtccattctgtgccc

SEQ ID NO: 370424 - DNA, 272 bp, Homo sapiens
acagtcttaggatcataggtcttgcttcaaaatccattctactgaaatttgttattgcaaatggtaatttttttctaatgtttttgaatatggtggtcttggaccaaatcaggaaactgtttaaatctcaaaaggttagagtttgaaaaatttctgcttgttttactattaaagaccctacatcctttattrtcacaaaccacaaacaagtcaacaattttgaagcttagtagttgttagagagattatgttggcaattcataaaggattat

SEQ ID NO: 370425 - DNA, 556 bp, Homo sapiens
acatggttgaacatcagactgtaagactgacaaggctgcaatgatgaaagctatgaattaatgagtcaatgctttgcaagcatctccctccatgtgcacatttcccagggcagtcagggatagtttccccacctcattatcttggtgaatatcactgttgctttggtaactaagtaccaatcttgccctctacctgaccttcacctcacattaccaacaatcttggattgagtaacagtgatggccctgcaggccacagatttccaaggtctattttccccttcgaggaggaattctctgcattgatgaaatatatgacatctctatcctgtyatcttacttggaaggtgtgctttgggactacctctggtactcattgctcaaacaatcagggctttctgcaggatacagttatcacaatcagactccattgaagagagcttgaggatatgctgttaaatcaccaaagggactagtaactgcagaaagaactgcagaaagctacctccgtcaggcctgaagatctgtggaggggaagctgttactggagtgagaa

SEQ ID NO: 370426 - DNA, 619 bp, Homo sapiens
atgatgaaacggatcactgccacagcatgttctgaatcctcaggggtccctaaggaattgatcaggaaagagggttggggggcttggcaaggtggctcacgcctgtaatcttagcactttgggaggctgaggcaggcggattgcctgagctcaggagtttgagaccagcttgggcaacatggtgaaaccccgcctctactaaaatacaraaaattagtcaggtgtgctggtgcgcgcctgtaatctcagctacttgggaggttaaggcaccagaatcgcttgcacctgattgcagtgagccgagatcacaccactgcattccagcctgagtgacagagtgagactctgtctcaaaagaaaacaaaaaaaaaaaaaaaaggaaagagggttgtggtattttgggaatgtgcacaaatctagcccatgtagttcaattctcttgtacttagtttttataaaaggttatatctgccatggacaactgcaggcgattttgttggagacagagtgtaagacttaagtgagtagagattatatttatttgatagtgagaaagaatactacaattaaatagaattcatatatatcaaagacgtggactcaacctaaatgcccaaca

SEQ ID NO: 370427 - DNA, 619 bp, Homo sapiens
atgatgaaacggatcactgccacagcatgttctgaatcctcaggggtccctaaggaattgatcaggaaagagggttggggggcttggcaaggtggctcacgcctgtaatcttagcactttgggaggctgaggcaggcggattgcctgagctcaggagtttgagaccagcttgggcaacatggtgaaaccccgcctctactaaaatacagaaaattagtcaggtgtgctggtgcgygcctgtaatctcagctacttgggaggttaaggcaccagaatcgcttgcacctgattgcagtgagccgagatcacaccactgcattccagcctgagtgacagagtgagactctgtctcaaaagaaaacaaaaaaaaaaaaaaaaggaaagagggttgtggtattttgggaatgtgcacaaatctagcccatgtagttcaattctcttgtacttagtttttataaaaggttatatctgccatggacaactgcaggcgattttgttggagacagagtgtaagacttaagtgagtagagattatatttatttgatagtgagaaagaatactacaattaaatagaattcatatatatcaaagacgtggactcaacctaaatgcccaaca

SEQ ID NO: 370428 - DNA, 619 bp, Homo sapiens
atgatgaaacggatcactgccacagcatgttctgaatcctcaggggtccctaaggaattgatcaggaaagagggttggggggcttggcaaggtggctcacgcctgtaatcttagcactttgggaggctgaggcaggcggattgcctgagctcaggagtttgagaccagcttgggcaacatggtgaaaccccgcctctactaaaatacagaaaattagtcaggtgtgctggtgcgcgcctgtaatctcagctacttgggaggttaaggcaccagaatcgcttgcacctgattgcagtgagccgagatcacaccactgcattccagcctgagtgacagagtgagactctgtctcaaaagaaaacaaaaaaaaaaaaaaaaggaaagagggttgtggtattttgggaatgtgmacaaatctagcccatgtagttcaattctcttgtacttagtttttataaaaggttatatctgccatggacaactgcaggcgattttgttggagacagagtgtaagacttaagtgagtagagattatatttatttgatagtgagaaagaatactacaattaaatagaattcatatatatcaaagacgtggactcaacctaaatgcccaaca

SEQ ID NO: 370429 - DNA, 523 bp, Homo sapiens
tgctacagttaaaagtataaggtctgaagtctgatggcstgaattcaaactctctctctccaaactgtaggaatttgggaaagttgcattccttactttccttgaatataaaagtggaggcagtgataaaatctacttccctggatggactcttggcagaaatcagtgagacagcccatgcacagtaagtagcaatgtccctagtattttgtgtgtagttactaatataaaaacaaataaataaaaacaacaaaaaccagaacaaaaaacgctgtaattggtttaaataatctaggagatgtattgacttatatagctgaagtatttgaaagtaatggaattcaggcatgacttgatcaaggctctatattcatttttctgtgatctggttgtttttgacccctgtgtaccaagaggatgttagactgtttccatgctgagttccatgccaggattacaagaaggaatttaagaatcatgattgctcattcatttatcttttagagaaatggaattttatttt

SEQ ID NO: 370430 - DNA, 518 bp, Homo sapiens
ttgctcacagggcaggttaatattcctggctttgtatctgtatgccagagggcaaaaagttacaatcttygctgatttctttgacttccagatcatgttgtgtattgtggtgtaggcattcatatgtcatagtatgatcttttggggagttaaagcgaattaaatatagcctgagaaggactctgtacttctgtatttgaatatttgtggacaaaccataacctaacttaacaggcagataaaattgaaaacctaatttaggagtacgtgcctataacaatagctaagtcttggccaatctcagcagccatacttcaaccactcatacactgctgagtgttcaaagtgtgttcaaataaggcaaatgccaacctgtaaccaatccagctgtttctgcccctcacttctgatttctgtgtgtcattccctgtctttgtctataaatttgttctgaccacgaggcatcccaggagtctctgaatctgctgtcattctgggactatctgattcgtgaatca

SEQ ID NO: 370431 - DNA, 600 bp, Homo sapiens
ttggtatttgccacttctaatttgtaactgctgtgttatttggtcttggaaaccaagtaacctttattgcacttgcatacacaataaagtcaattaaattttagcgagaaggtctttccactgagaaaatactcatgaacctaagggcaatgcactttgtaatcttatgtttctgaccatgtgtgggaagtcaaatcacttgtttaaacagatgtgcttaatgaatgtggagtcacttcatggagtccccagaaccatctagttttaatatcaatttctttaattccattgtcatgggctctctttaatcaaacaaattatgtctttggtaggcagaattatggctccctgacatgctcaagtcytaatccacagcatatgttaacttacaagagaaaaagaactctacacatgtgattcaggttaagagctcgagacacataggttactcaggattttcaagatgggctcaatctaatcacatgagccatgaaaagcagagaattttctccatcaaggatcagttggggaaatgcgatggaagaaacgcaggagagatgaggtgtgagagtgattgtcactcaccattgctggttttga

SEQ ID NO: 370432 - DNA, 600 bp, Homo sapiens
ttggtatttgccacttctaatttgtaactgctgtgttatttggtcttggaaaccaagtaacctttattgcacttgcatacacaataaagtcaattaaattttagcgagaaggtctttccactgagaaaatactcatgaacctaagggcaatgcactttgtaatcttatgtttctgaccatgtgtgggaagtcaaatcacttgtttaaacagatgtgcttaatgaatgtggagtcacttcatggagtccccagaaccatctagttttaatatcaatttctttaattccattgtcatgggctctctttaatcaaacaaattatgtctttggtaggcagaattatggctccctgacatgctcaagtcctaatccacagcatatgttawcttacaagagaaaaagaactctacacatgtgattcaggttaagagctcgagacacataggttactcaggattttcaagatgggctcaatctaatcacatgagccatgaaaagcagagaattttctccatcaaggatcagttggggaaatgcgatggaagaaacgcaggagagatgaggtgtgagagtgattgtcactcaccattgctggttttga

SEQ ID NO: 370433 - DNA, 484 bp, Homo sapiens
ttgttcatctgggtttacagaataggtgtttccattcaaagacatgggcttgctcttatctgggttaccaaagacccaccctaactccctgcctgactggtttcttccttcctcctctctcaaaagggtgttcactctcttgtgctttcctgcttycccatttttatatgtgatgtagcagttatcactttcaaaaacaccacacttactcttatgtcagatccaacagttgttcatcttgcctgtggataatctttaatcaatcgaagaaacatattaaatccaaccattcatatacataccccaactcaactttttccaagtacccaaaacaatgtttctccataagtacttcataatgcatgtaaagctcttttcctctgataccgttctacgagaagaggctgcagagtacagtcactgatatataggtattttttttaatctagttggttttcctattctttagcttcaattccaaata

SEQ ID NO: 370434 - DNA, 470 bp, Homo sapiens
agtatctaatactcatccaaaataatttcttgactaagtgcaaaattttaaagccccaaacattaaaatagatttgctaaaaattttatgaacctaaaaacatcctcattcccaccagtcagatgagtcctttgttctcagccaggccatgattcatctaactgaaaggaaatcaggggcacaggatgttcaagcctcaaaccttcaggctctattctacttcttatccgttcagtgacccatcaagcaaattaacacagccgtatttttaaagcatgctycaacaataattactttaaaacatgagaggtgtcttatataggtactatgaggaagaccaggtcatatgtggactgtctccttggccatggacaaggcaagggtgagaatcacaaatcaaaaaccacaagtttcacaaagaaacatcagagtaaataaatctagggcatggcggtacaggatgggtgggt

SEQ ID NO: 370435 - DNA, 486 bp, Homo sapiens
ggatgaccagaggtcgctctcgtggtcatcttggttttagtgggttttggccagcttctttactgcaacctgtttttattagcaaggtctttatgacctgtatcttgtgctgacctcctgcctcattctgtgacttagaacgccttaaccatctgggaatgcagcycagtaagtctcagcctcattttacccagctcctattcaagatggagttgctctggttcacatgcctctgacacaaccattatggaaagtagtatgaaggttctgcaatatgtatactgtcatgtgatccagtagtcccacttctgggtatatatccagaggaattgaaatcaggatctcagtgatatgtgggaaatttggtttatacatacaataaaatattattttgccttaaaaaagaaggaaatcctggcatttgcaacaagatgcataaagtttcaggacattatgctaagcgaaataaactggaaacagaaagaa

SEQ ID NO: 370436 - DNA, 486 bp, Homo sapiens
ggatgaccagaggtcgctctcgtggtcatcttggttttagtgggttttggccagcttctttactgcaacctgtttttattagcaaggtctttatgacctgtatcttgtgctgacctcctgcctcattctgtgacttagaacgccttaaccatctgggaatgcagcccagtaagtctcagcctcattttacccagctcctattcaagatggagttgctctggttcacatgcctctgacacaaccattatggaaagtagtatgaaggttctgcaatatgtatactgtcatgtgatccagtagtcccacttctgggtatatatccagaggaattgaaatcaggawctcagtgatatgtgggaaatttggtttatacatacaataaaatattattttgccttaaaaaagaaggaaatcctggcatttgcaacaagatgcataaagtttcaggacattatgctaagcgaaataaactggaaacagaaagaa

SEQ ID NO: 370437 - DNA, 629 bp, Homo sapiens
ataattaatttaagagctccaggcatcattttcctctcataaggtacaagaggaattttcctctcataaggtggaacacttagcttcctaagttctcttatacttctataacttcatgctgatatgatccgtcgatggttctcagtgcttcagaagagtttcataaggaattatggaacaatgaaggtcaaaagtgacatcagctcagtcaacaagagragctgactcagccacagcctccaaattactctcaggccaaacagcaaatcaccacttagaggcttttgctgggcaatgcggctcatgcctgtaattccaccatttctaggaggctgaggcgggaaaatagcttgaggccagaagtttgagaccagcctggcaacatagtgagaccatgcctctccaaaaaatttaaaaaattagccaggcaagaaaataggctcccatacttcatgaaattaaagactttatggttctagctcagctaaagctggaccagagaactaaccatcaccccaaaaggtttctaaccaaacaaaaatattcttgcctatcccccaaatctctgataaatgtttagatgagtcattctgatacgattataactccagagtcaggtttgtttttgc

SEQ ID NO: 370438 - DNA, 553 bp, Homo sapiens
gttcttgtgcacttagccattttgctttaaggttaaattataaataaattacccactatgttagcttgacctacacctaagaatgaacaaggacagcttggaggttagaagcaagatggagccagctatgtcagatttctcttactgtcataattttgcaaaggcattttcactaatatgackattcaactgctgggtatagagaagactgatatgtaattgaactaaatcattctctacttgagttaattttctgttactgctgtaacaaccaaaaacttaatgactaaaaacacaaaaatttctttcctagaggaaatagcttaagcatttaaaacaaaaaacataaacttattatcttacagttctgcagatgagaatttcaaaatgattttcagtaggttaaaatcaaggcataggcagggctggattcctttctggaggctgcaaggaggaatccatttcctccccgttcccgaaatgtagagaccacattctgtggctcatggtcctccctttttcatcttcaaagacaatggcattgtatctttct

SEQ ID NO: 370439 - DNA, 553 bp, Homo sapiens
gttcttgtgcacttagccattttgctttaaggttaaattataaataaattacccactatgttagcttgacctacacctaagaatgaacaaggacagcttggaggttagaagcaagatggagccagctatgtcagatttctcttactgtcataattttgcaaaggcattttcactaatatgactattcaactgctgggtrtagagaagactgatatgtaattgaactaaatcattctctacttgagttaattttctgttactgctgtaacaaccaaaaacttaatgactaaaaacacaaaaatttctttcctagaggaaatagcttaagcatttaaaacaaaaaacataaacttattatcttacagttctgcagatgagaatttcaaaatgattttcagtaggttaaaatcaaggcataggcagggctggattcctttctggaggctgcaaggaggaatccatttcctccccgttcccgaaatgtagagaccacattctgtggctcatggtcctccctttttcatcttcaaagacaatggcattgtatctttct

SEQ ID NO: 370440 - DNA, 553 bp, Homo sapiens
gttcttgtgcacttagccattttgctttaaggttaaattataaataaattacccactatgttagcttgacctacacctaagaatgaacaaggacagcttggaggttagaagcaagatggagccagctatgtcagatttctcttactgtcataattttgcaaaggcattttcactaatatgactattcaactgctgggtatagagaagactgatatgtaattgaactaaatcattctctacttgagttaattttctgttactgctgtaacaaccaaaaacttaatgactaaaaacacaaaaatttctttcctagaggaaatagcttaagcatttaaaacaaaaaacataaacttattatcttacagttctgcagatgagaatttcaaaatgattttcagtaggttaaaatcaaggcataggcagggctggattcctttctggaggctgcaaggaggaatccatttcctccccgttcccgaaatstagagaccacattctgtggctcatggtcctccctttttcatcttcaaagacaatggcattgtatctttct

SEQ ID NO: 370441 - DNA, 583 bp, Homo sapiens
attctgacaagtcattttaatatcatcatgaagggaaataggttgggaataaatttgtaccatttgattaatctccctaacttcaagtctatgttaagtaaaataatagattctaaggaaagctggggaaaaaaaccctttctatcaggttggatgwtcaattttaggatacgaatcaggtaggttctatcctcaggacaggatataaccaacttcctttcaggttcaagacatcattttatgcatcatccttttttaaaaaaaacaaaaagtctatagaaatactaataccagtttctaactgctattgaaatgcgtaaggtaaaaccatgaaaagcaggtgtttttgctgaagaactcttgtgcttttctcttcctaaacttgtacagaactccatagtacaaattaactggtattctcccaaaaagagaaaatatttttcaactattttgttttgggatggttgatgacaaatggggccgttttgccaaatttctacctgcttctgtgtttctctttggtgcgtaaaaagtcgatttacctctcaagcaaaatctttttagggttttatcttttatgtga

SEQ ID NO: 370442 - DNA, 557 bp, Homo sapiens
gaatttgtaaaatctgatagcaaactcagaaacattcagtatgtggccttaggtttttacataaaagataacattgtgatgaggttttggaagccagcatgctyaattatttagccaaaatgaaattttctgaagacaccctagactttcccgctttgagagtgttttgacattcagaaggtccctatctccatacaactcttcatttccacctgtcatggtttccatgccatggatttgagttcaaatatcacattcagcttcaaatctctgatccttccaggggagctaattttaccatctcttctgcttcatgctagttgccttcttgcttcagaggacactagaatgtaagctccatgaagtcagcgacatcagctgttttgttcattcctctttccacagtgcctagaacaatgcatggccaagagcagttttgcagtacatgttatagatgaatgaagtgtagcactttttacaatccactttgcatttctatcgccataaatactaagaaaatgtctatatcttggtcaaccttttatcctcacagagcc

SEQ ID NO: 370443 - DNA, 627 bp, Homo sapiens
tcaaatatcacattcagcttcaaatctctgatccttccaggggagctaattttaccatctcttctgcttcatgctagttgccttcttgcttcagaggacactagaatgtaagctccatgaagtcagcgacatcagctgttttgttcattcctctttccacagtgcctagaacaatgcatggccaagagcagttttgcagtacatgttataratgaatgaagtgtagcactttttacaatccactttgcatttctatcgccataaatactaagaaaatgtctatatcttggtcaaccttttatcctcacagagcctcacacagtgatttgaacatacataaaaaatgttgattaacaattgtcctaccaattaaattgtctgtttaccaattggcctattagatgtatgggaacaatattaaaagatcacagaccatttctaataccatttttgtaaatacatctagtgaattcaagaaatgaatgcttcctgactctaaatttttctagctctgtgatgatagtcattcaaagcactgtaaattctagatgtttggctgcatttatactgaaacaccatattcctttggctgttcttcagtatgtctcactctttgtgttggacttg

SEQ ID NO: 370444 - DNA, 523 bp, Homo sapiens
aataacaaaaggatcagaggctgttccctttgcaaccccacccacctttgtgcatagcaggtaaaaatggaaaatgcctctgattagtcccctctggcaaacagtcagactggttgtaggcctagtcttcatttgcatagaggtataactttgtaatttcacttcagcctctgattggtcaccttgtgcaaccaagcagacgggtcaagggtcattccttcaggtacccagagtgtaaaccaggtaatcaatgggaaacctctagagagcatttaaaccccagagaattctgtaaccagggctcttgagccgcttgctcaagcctgttcctactccgtggagtgtactttcgtttcagtaaatttctgctttcgttgcttyattctttcattgctttgtgtgttttatccagttctttgtttaaaatgccaagaacctggtcaactaatagtcaagaccctccacagtaacaacagtactatggttagacatcaatgaatgaaaattaagtcctaatggtata

SEQ ID NO: 370445 - DNA, 523 bp, Homo sapiens
aataacaaaaggatcagaggctgttccctttgcaaccccacccacctttgtgcatagcaggtaaaaatggaaaatgcctctgattagtcccctctggcaaacagtcagactggttgtaggcctagtcttcatttgcatagaggtataactttgtaatttcacttcagcctctgattggtcaccttgtgcaaccaagcagacgggtcaagggtcattccttcaggtacccagagtgtaaaccaggtaatcaatgggaaacctctagagagcatttaaaccccagagaattctgtaaccagggctcttgagccgcttgctcaagcctgttcctactccgtggagtgtactttcgtttcagtaaatttctgctttcgttgcttcattcttwcattgctttgtgtgttttatccagttctttgtttaaaatgccaagaacctggtcaactaatagtcaagaccctccacagtaacaacagtactatggttagacatcaatgaatgaaaattaagtcctaatggtata

SEQ ID NO: 370446 - DNA, 611 bp, Homo sapiens
gtatgtgtgaacaacactggaactgcaagtgtayatacaacactagaaatgtggctgtttgtgtgcagaactctattttgtgtattcaataggggatatgtgtgtatgtgttgtgtgtgtgtgtgtgtgtgtgtgtccacttttggagaatgactatgctgaacttagcatagtctggcaatgtgtgattgcaaaaatgtgttacagaactgcaaatgtaggcaaagttgtgtgagatatatataaatatatatatgcacacacatatatatacacacgtatatgaagcttcatgcatttatcaaatatttcagagaccatatgtgtccaaacgtaagaaaattgtcaacatatatattacattgccattctacagatgtatatgggcatttttacaacatacagaaattctatgtggatgtatgaaaatggtgtgtggatattttatatgtaatgtgtgtgttgtatgtatatatattatgtaaatattcaatatacagtgatacaaaatattttatgtatacaatgaaaatacattatatataatacattacaacataggtgtgaatatatcccgtgatatacaggtatatccataaaatatttgtgag

SEQ ID NO: 370447 - DNA, 611 bp, Homo sapiens
gtatgtgtgaacaacactggaactgcaagtgtacatacaacactagaaatgtggctgtttgtgtgcagaactctattttgtgtattcaataggggatatgtgtgtatgtgttgtgtgtgtgtgtgtgtgtgtgtgtccacttttggagaatgactatgctgaacttagcatagtctggcaatgtgtgattgcaaaaatgtgttacagaactgcaaatgtaggcaaagttgtgtgagatatatataaatatatatatgcacacacatatatatacacacgtatatgaagcttcatgcatttatcaaatatttcagagaccrtatgtgtccaaacgtaagaaaattgtcaacatatatattacattgccattctacagatgtatatgggcatttttacaacatacagaaattctatgtggatgtatgaaaatggtgtgtggatattttatatgtaatgtgtgtgttgtatgtatatatattatgtaaatattcaatatacagtgatacaaaatattttatgtatacaatgaaaatacattatatataatacattacaacataggtgtgaatatatcccgtgatatacaggtatatccataaaatatttgtgag

SEQ ID NO: 370448 - DNA, 611 bp, Homo sapiens
gtatgtgtgaacaacactggaactgcaagtgtacatacaacactagaaatgtggctgtttgtgtgcagaactctattttgtgtattcaataggggatatgtgtgtatgtgttgtgtgtgtgtgtgtgtgtgtgtgtccacttttggagaatgactatgctgaacttagcatagtctggcaatgtgtgattgcaaaaatgtgttacagaactgcaaatgtaggcaaagttgtgtgagatatatataaatatatatatgcacacacatatatatacacacgtatatgaagcttcatgcatttatcaaatatttcagagaccatatgtgtccaaacgtaagaaaattgtcaacatatatattacattgccattctacagatgtatatgggcatttttacaacatacagaaattctatgtggatgtatgaaaatggtgtgtggatattttatatgtaatgtgtgtgttgtatgtatatatattatgtaaatattcaatatacagtgatacaaaatattttatgtatacaatgaaaatacattatatataatacattacmacataggtgtgaatatatcccgtgatatacaggtatatccataaaatatttgtgag

SEQ ID NO: 370449 - DNA, 656 bp, Homo sapiens
ttcaaatccaaactctatcatctaaatttatgagcatttgggcaaacaatggcctctgtggatggttcctttatatggaagatcacattagatcgtcttaataaagttcctagcagtggtatctggcacattttgggctttgttaatgagaattatgattttgtggtaaagcatataaaatctgaaatcaggtcgtctctaccccttgttctttaacaagacagttttctgctttgcrtctccagtttttttctgtataaaatgaggatgatagtagtaccaatcccacgggaaagttatgattactgaatgagttaatatatgcaaaagacttaaatggtgcttggcttgtaactaatgctggttgagtgttttctatctcttttaaaaataagaatagttaaaaataacaattctcattattgttattacatatgatctgtatacaaatgactataacgcaaaacagaaaatagtgattcaattagagatctataaataattataagactttttaaagtaatattttaggctgagaggtggtaaaaaatttccaggaactatgatagtattaggcatgctaagttgagaggtcaagagaaaatcctatggataaataaaagaatgtaagcaaaatgatgtgtaaactgtggata

SEQ ID NO: 370450 - DNA, 591 bp, Homo sapiens
atattttctcttgattttgatctttacctttggagaaccaaatgtcacattttggacgtttcatagttacagaaaacatgcagtgagcacatctagctgatgacgatcacaccttttcccccatcttttttgaaaaattgtaaawctgatcatatcaacatgtatgaacttaaaatatggagaatattatggaagaaatagtttataagtttgttaagtacttataacatggtgtatctttttgattattaattttttatgctaaccattgtttctgtagttaaaattgttttcttggtgttatcttttctcaaaataaaattagaaacttttgatgggaaaaaaaaaacttttttaaccttgtgttttcaggtttggataaatggtaccaaagcaatcctttgggcaagcaaaatgaacttctcaattgttacatattattcattagactgtttctatttaaataaaatatcgcttgaaagcaaaagtgattcagatctttctttcagggtttagagaagttacaggccattttaatgcttgataaaaatgaacaaccattatgaaactttaaggaaatggccaacatcc

SEQ ID NO: 370451 - DNA, 515 bp, Homo sapiens
gacatatacacacacattttgatctataggatgcatttagagggaattttctgaaaaatcattttacaaccttttgagcacagaaagtgaatgaagaagagccataaaaaggcagccacaaagaaaagcaaatggttaatttctggaaaagagcattgcgttttgtggaatttaaaactgcttcttctgcctgaggctatttaaaataattttatattttagaagcttgaagagatttaagtacagcaatgtgccccttatccatagctttgtttttcatygtttcagttacaataagaattctgagagaaagacagaaattgctctatcattattgttataattgttctattttgttattagttattgttatcaatctcttattgttcctaatttagaaattaagttttatcataggtatgtatgtataggaaaaaaagcatatatatagggttcagtactatccacagtttcagatatccactgggggtcttggaatgtatccgctgaagata

SEQ ID NO: 370452 - DNA, 609 bp, Homo sapiens
ctagatatggaaaaactaggaacttaaacattttctttgtctgcttcatactgtgctaggtactctgactcatttttcatagaaaacatatactatagaaaagacaaaatataaagagctatgtgagttcagtggatagaaaaatggtttttacttatcaggatcaagaaatgcttcctgaagcagagaattctaggtgggccttgaaagcaagaagggatttctatggacaaakaatggatgggaaggcattgacatatttgctaatcaagaaacttatgtttgaaactcatttttttgttgctgtttctcttgtataaaagtgctttgatgccctggaagttgaggctgcagtgagctgcgattgcatcattgaactccagtctgggtgacagagtgtgactgtcttaaaaaaaaaaaaaagcctagctgtaagctaggtacagaatgaattttaaaaatattgcttgtccagctaaagactttttattaaatataaatgctgttaccaaagttacagaatcacaattaagtattgagtataacttctgtccataaaatgtggggaaacttaaagacaaaatggagatcacatggattttgtagcta

SEQ ID NO: 370453 - DNA, 609 bp, Homo sapiens
ctagatatggaaaaactaggaacttaaacattttctttgtctgcttcatactgtgctaggtactctgactcatttttcatagaaaacatatactatagaaaagacaaaatataaagagctatgtgagttcagtggatagaaaaatggtttttacttatcaggatcaagaaatgcttcctgaagcagagaattctaggtgggccttgaaagcaagaagggatttctatggacaaataatggatgggaaggcattgacatatttgctaatcaagaaacttatgtttgaaactcatttttttgttgctgtttctcttgtataaaagtgctttgatgccctggaagttgaggctgcagtgagctgcgattgcatcattgaactccagtctgggtgacagagtgtgactgtcttaaaaaaaaaaaaaagcctagctgtaagctaggtacagaatgaattttaaaaatattgcttgtccagctaaagactttttattaaatrtaaatgctgttaccaaagttacagaatcacaattaagtattgagtataacttctgtccataaaatgtggggaaacttaaagacaaaatggagatcacatggattttgtagcta

SEQ ID NO: 370454 - DNA, 599 bp, Homo sapiens
tgaataagttcatgtattgagactgtttagaatagtgtctggcacatgccctgtgtgtgtattcctctacagaacctccaggctccaggtacagcctagatgtaaggaaaagaaaaacaaaaatttgaagcttgtctgtggtgcttattatagagaacatttacatgtgctcagaaaatgtaatgtgatgctataaaaagggaaggaagcagaaaaccatttaatggaggagggacatgggcttttggccttsaattttcttgtcaagcatagttgtgcttctcagctttcagttatcatctagaattgtgaggcaaaatgtgctttttatttattgtctatttctttatgacatctttacttggtgttaaaatataatggcctgtctcaaatcaggtgaaaaagcagaggaagataaaatacaaagaaacacattcagtgagactctcggttttctcctcttcctctttgatgctgtaaaatgttttcagagataaatgtcagataaatgctgcagcatcctcatttacccacacagcgtttatcgctcatccaccaactcaaattacctttctccaagagcggtattcagtaagaga

SEQ ID NO: 370455 - DNA, 592 bp, Homo sapiens
tttatgcaaagtcagggcaagactcgagccaggcagcgggagaggtcacttgtgaagaaggttccagaaaggggaagacctaactgtttgtagtgtctaaaagattgtggaggaaaggagaaatatggaaggtgatgcccagagaagaacttttgggggaaagtggggaggggggaaatgcttagataagtttttatgatgttttgccatatagtgataattccctttttccaattgctattttttccagtacacattaaaataaataccgtgttaaaattttttttttaaattccaatcaaagcaaaagctatcgttgtatatagacaaaatcgtacaagcagtccattcttcacagcatgtccacactgtactgtgcagcacaactgtacaacaggcagcatgatcctcctcaaattctggtagctaaacactgcagtacaggtgatrctttaggatacacaacaggacactttccatcactttaatgtgcgctatttggaaaagcattaggctttttaagttctaacgaataaatcacgaaataacattgaaaagatctatacagaagaagccctaggcctgtagagaa

SEQ ID NO: 370456 - DNA, 592 bp, Homo sapiens
gccaatagaactgtcctcctaaatcttcaaaacgtgagccaaatgatgcaaaactagaaaaaccggtaagaattcaatcattccagatagtcaaatagaagatattctattctaatcaaatagctattcttgatttctcgattccttttccaaggctggctctttaggttttccatccacattcttcaaatttaaattccttctttgtttggactaaatgattagtttctcttgttggtaacaaagaaccctgactgattgtctctcttggacatgactgagtgccttaagacccatgtttaatagagttctgcaccatttcaaaatactccaaggagggcaaattcccaataaatccttgttagtaaatagtaggccctcataaawgtttgtaaactcaaaggaggataaacatactgaaattgttcaggcagatggaacagaaaatctacaagactcccaaattctctttttgttcttagtaaccaatccgagtgggccttagagaacacttcgggaacagggattattaactttgtaaaaaatagatggatgacttaataggcctcaatatgactaaattgtccaagct

SEQ ID NO: 370457 - DNA, 564 bp, Homo sapiens
aaagaaccagcttatggttgtaatgatgtttttctrttgtttttatgtttcatttttcattgatttttgctgttatctttcattttgttcctcatgcttgctttgcatttaattgctcctttttctaatttcttaaggtaaatgcctaattatttatgtgaggtctttctcattttcaaatatgagtttaatgctataaatttcctctaagcactgcttagctatatcccccaaattgtgtttttatttttaatcagtccaaaatattttctaatttcctttgtgagttcttctgtgatctgtgagttactatgtagaagcgtattgtttaattaccaaatgcttgggagattttctaaatttccgcttgctgttagtttctaacttcattcaaaggacatagtttgtgtggtttcagttcttttaaatttactgagaaatgttttatgacccacagtatgatatcttggaaagtgttccaagtacatttgaaaagactagtagttccccacatggacacgcggaggggaacatcacacaccagagactgttgatgggtgggag

SEQ ID NO: 370458 - DNA, 574 bp, Homo sapiens
gaggaacctggggcacagaagggttaagtaacttatccaatgtcaaacagttggtaagaggtagggcctggatttcaaggcaagcattctggccccagtcttatctttttaacattgcatgttagttttctatggctgctataacaaattatcactgacttaaytgtttaaaacaacaaaatttatcatcttacaattctgaaggctagggtgcaacatgggtgacactgagctaattaaggtatgtcaaggctgcactcctttctggaggagaatctatttctttgccttttctaatttctggaagctactacattccttagcccatggcttcttcctttatctttaaagccagcaacggtagttgagtccttctcacatcacatcactctgactttgcttctgtcttcacatctttttcttctctgactcttttgctttcctcttccatttttagggacccttgtgattatattgtacctatctgaataatccaggtaatctccctgtcttaaggtcagctgattagcaactttaattccatctgcattattaattcctctttgccatattg

SEQ ID NO: 370459 - DNA, 574 bp, Homo sapiens
gaggaacctggggcacagaagggttaagtaacttatccaatgtcaaacagttggtaagaggtagggcctggatttcaaggcaagcattctggccccagtcttatctttttaacattgcatgttagttttctatggctgctataacaaattatcactgacttaattgtttaaaacaacaaaatttatcatcttacaattctgaaggctagggtgcaacatgggtgacactgagctaattaaggtatgtcaaggctgcactcctttctggaggagaatctatttctttgccttttctaatttctggaagctactacattccttagcccatggcttcttcctttatctttaaagccagcaacggtagttgagtccttctcacatcacatcactctgactttgcttctgtcttcacatctttttcttctctgactcttttgctttcctcttccatttttagggacccttgtgattatattgtacctatctraataatccaggtaatctccctgtcttaaggtcagctgattagcaactttaattccatctgcattattaattcctctttgccatattg

SEQ ID NO: 370460 - DNA, 574 bp, Homo sapiens
gaggaacctggggcacagaagggttaagtaacttatccaatgtcaaacagttggtaagaggtagggcctggatttcaaggcaagcattctggccccagtcttatctttttaacattgcatgttagttttctatggctgctataacaaattatcactgacttaattgtttaaaacaacaaaatttatcatcttacaattctgaaggctagggtgcaacatgggtgacactgagctaattaaggtatgtcaaggctgcactcctttctggaggagaatctatttctttgccttttctaatttctggaagctactacattccttagcccatggcttcttcctttatctttaaagccagcaacggtagttgagtccttctcacatcacatcactctgactttgcttctgtcttcacatctttttcttctctgactcttttgctttcctcttccatttttagggacccttgtgattatattgtacctatctgaataatccaggtaatctccctgtcttaaggtcagctgattagcaactttaattccatctgcatyattaattcctctttgccatattg

SEQ ID NO: 370461 - DNA, 621 bp, Homo sapiens
aattccaaacacgtccctcaaacacttcttctcaaccctcctcatctagttagacttcgtggtgtatcacttaaatacactgtcaaactggcagcctcagtatccttgatccctcattcctccactgtcatccatcaagaaatccctcttgaatcaacgtaaccaacaggcttctcagaccctagttgcaggctatggaacaaaaaatacaattacaaagactggtcataatccaaataaaacagagacacagagacagggaaaggcagggggaggggaggaggtaggtggsggggaggggggaagagacagatgtgggagtggagagagaggttgtgtgtgtatggggtggggagagagagacagagacacacacaaagaaaatatcaatgtaaaccttcactattcttcccaagtcccttccactagaactatcattaatgacaccatctcttccttccaagaaaactctatcaaacttcaactccttcttccccagacatctatttctgtacacaccttcagagatatacacaccttcagagattctttacttcagcatgaggggaaaatattactactggggtttgttttttttgttttgttttgttttttgagatg

SEQ ID NO: 370462 - DNA, 505 bp, Homo sapiens
gaaaagttacatgtgttcagctgagggtgtggaaagaatgtgttctaagaaccaaatgctctgaggtgtgttggattacgcattccttgggtctgtgagtgacagtgaaacgcaggacacaggagagatgaagtcactgggcttatcagtccgcagtcgctgctgaggaggaaaaggtcctcggtgctagataacagcattgctgggtgactgcattgctgggcatgacttgcctgactgcaccggcacatttaayatttgccaggctgccagggaagcaggagctccagggaggacaggtgtgccttctgagaaatctgattcatcgtctgcccttgtgcctgctgcagtgcctggggcatggtaggtgctcagaaatggaacaggaaatgccagagagatggtcagggcatgatcgtggctttcaggtaaacaaggaggaggagatttgttattccttgagccattcgctgttatttaaggaacacgcactgctggtgcttcc

SEQ ID NO: 370463 - DNA, 569 bp, Homo sapiens
agaacggggtcccattctgaaagtcaggctccatcacaagtacccactgtgcttrcatctccgtggagaggcaggaggccaggcgtaggcagctgagcccctgggggagtggaatggtgtcggctctacccccagtagccccgtggcctgggtctagtgactcggactccccagccccagttgctcctctctgaaatggaaatcttctctggaccagcttcctggggtacctatgaggaggcagtgagctgcttcctatcaaggcttaaggcagcacctgtcaaatgcttagtcagcctcggctcttgttagccttttgattatttgcttgccttgattatcagcttgtattactgtgtgcctgacactgacatgtccccaaactcctccccacaaatgtcacattccagtgcctctccttattgtgctctctccctccatttatattgcatttcaacaataataaccgctactcatcactgagcacttatttggtgcttggtattgccatcaacgcttccaagtgtgttatgacatcatcctcatcgtgccttgggaagcgggaactc

SEQ ID NO: 370464 - DNA, 569 bp, Homo sapiens
agaacggggtcccattctgaaagtcaggctccatcacaagtacccactgtgcttgcatctccgtggagaggcaggaggccaggcgtaggcagctgagcccctgggggagtggaatggtgtcggctctacccccagtagccccgtggcctgggtctagtgactcggactccccagccccagttgctcctctctgaaatggaaatcttctctggaccagcttcctggggtacctatgaggaggcagtgagctgcttcctatcaaggcttaaggcagcacctgtcaaatgcttagtcagcctcggctcttgttagccttttgattatttgcttgccttgattatcagcttgtattactgtgtgcctgacactgacatgtccccaaactcctccccacaaatgtcacattccagtgcctctccttattgtgctctctccytccatttatattgcatttcaacaataataaccgctactcatcactgagcacttatttggtgcttggtattgccatcaacgcttccaagtgtgttatgacatcatcctcatcgtgccttgggaagcgggaactc

SEQ ID NO: 370465 - DNA, 569 bp, Homo sapiens
agaacggggtcccattctgaaagtcaggctccatcacaagtacccactgtgcttgcatctccgtggagaggcaggaggccaggcgtaggcagctgagcccctgggggagtggaatggtgtcggctctacccccagtagccccgtggcctgggtctagtgactcggactccccagccccagttgctcctctctgaaatggaaatcttctctggaccagcttcctggggtacctatgaggaggcagtgagctgcttcctatcaaggcttaaggcagcacctgtcaaatgcttagtcagcctcggctcttgttagccttttgattatttgcttgccttgattatcagcttgtattactgtgtgcctgacactgacatgtccccaaactcctccccacaaatgtcacattccagtgcctctccttattgtgctctctccctccatttatattgcatttcaacaataataaccgctactcatcactgagcacttatttggtgcttggtattgccatcaacgcttccragtgtgttatgacatcatcctcatcgtgccttgggaagcgggaactc

SEQ ID NO: 370466 - DNA, 570 bp, Homo sapiens
tggccccatatctcctgcgcgaacccttggacctattctctcgatcccagtccctcctctgtttaccacagctcgttttctttccccmaaaaaacttaataaataaaccccctgtaagcagttgaatgaatcgtgccacccaataggtacatccaagtccttaatccttggttctgtgaatgtgaccttccttatttggaaatagggcctttgtggatgtaagtacgttaaggatcttgggatgtgatcattctgggtttagggtgggcactaaatccataactggagaaaggagaaggagatttgagacacggagatgcagggagaagactgtgtgaagatggaggcagggattggagtgatgcagccgtgagctggggccacctggagccaccagaacctgaaagaggcagcaaggaccctcccctagatcatttggagagggcatgaccctgtggacaccatggtttcagacttctggtctccagatctgctcaagaataaatttctgctgtttgaaaccacctagtttgtggtggtttgttatggcaggaaactcacacacgtctc

SEQ ID NO: 370467 - DNA, 518 bp, Homo sapiens
tgttgggcatgaatctttgatataaaatgcttcacttgttagaattttatttcactatgtttgcttcctcaccctaaatgtgaatggaacaggccattaagaataaaatattcaagcaataaayaattttcctggcctgcatgttctttctggctcagttaaggctgcattctaggggaatgctgccaagcagcaatggaatgaggcagtcatttgggatgtctcagtcttggaggttcaacgagacaggtggctaatttgggtcaatcagtggactgaaggggacagaacttggtctggcagcaagcaagctgttgaggcatctctgaccgctgggagaactgggccagacctcagctgctgggtagcctttcagccttctctggtcttgtgaaaactgatagggataaggttggcatccagtcatagggaatagcactggacaggttcatggttagacatggaggactgttatggggatgtgtttattgaaaatgagatttaagtgcagaaatata

SEQ ID NO: 370468 - DNA, 581 bp, Homo sapiens
cttctgcgtacttccaaattgtagctatcaaacacatttctaaaatactcaatataaacactaaagtagtatgttaccaaggattttcatcacccactgcaggtattagataagtccaatcttacctctgtactttrgaaaaatgtagttgaaaaagtcatattttgcatttatatagtattttctatgttcaaagacataactgattatttgctttattatatcgcggtcacataacatttagggctatagagacacttatcagttaatcctcatgccacaaatgtgaatagatcactgactttttaattgaataaaaacttcttcacacagaaaagtgataactgccaaacaaggtttaaagtttactgcttttatatctgaggagacggtgactacataagtaagcgatgtcataacatctaccagcagaataattaataacagagcaatttcctttttaaacactagtgggcttaacaaaatattgatttccagttgagaatgccttatgtctaacaagtaaatgaaaagagaattataatgatgctatattttgatttaattagtatattgaattt

SEQ ID NO: 370469 - DNA, 616 bp, Homo sapiens
aaaaaacgtgatgcaagcccttggtactgacttcatatatgatctcaacacaagctctaggcaggacctctaaggtctctcctaactcttaaacgttatctctgagttgatatttgggttataagttatcccactttaagacacgtattaaacacacatgaacctagatgaatgctaaatggagtacacaaaaacataatataaagtcgctggcttcaaagattttattttccttatgatgtaaataagaatctgcagctactgaacaaaactgtattttagaaaatcttttaaagagcctattataaattaagaagagagaattcagaaggatattaattttgtagtaaaagcaataaatgcagaggatggagaaacagagagacagaaagagagagagaacgcattggctkgaatcattggaaaagcttcagagacagagggatatgaattaagccttgaagaaatgggctaaagaggggtttggagaaaaggaaatcttccagatgggaaaacagcatgagcaaaggacaggagtaggagtattccctaaatgttatttcaagttccccctcttagaagccaacaatgactaccaatcattccttgaatataa

SEQ ID NO: 370470 - DNA, 615 bp, Homo sapiens
taatagtgcctacaggaaaagactgtggggtcaaatgccattttctctttctgatctcagagaattttgggaggtggaaagaaaagttgaagagccatttcagcaggggtgtgttcagatttgtccagcagatagggaggggcattagggaagtcagaggaactctacaagcagattggggctgcctcctccattacccaagtctctgtaacttcccaggggaagcctccttacaagatacctcacacagtcttgtgacaagagcaatctcatacccttagaagcaaaagtagtcagagggggtgatgttgggtttgatttcgccatgctgcaagcacagtcccacatgtccaggatattgagttgagaacaagcagggcagtagtacagtccaccagcataatctagaggaatactttagaggctggaggtgactcaggacataaaggaaggtctgacttttatggagccaaatgggaccaaggcagccagtaagagcagatctgggtctaccagagtaggacataamtgacattagcggcagatgttagccataaattattagtacacccaaatggaaggtgactaaatgcagacactaaatgtgacaacagg

SEQ ID NO: 370471 - DNA, 615 bp, Homo sapiens
taatagtgcctacaggaaaagactgtggggtcaaatgccattttctctttctgatctcagagaattttgggaggtggaaagaaaagttgaagagccatttcagcaggggtgtgttcagatttgtccagcagatagggaggggcattagggaagtcagaggaactctacaagcagattggggctgcctcctccattacccaagtctctgtaacttcccaggggaagcctccttacaagatacctcacacagtcttgtgacaagagcaatctcatacccttagaagcaaaagtagtcagagggggtgatgttgggtttgatttcgccatgctgcaagcacagtcccacatgtccaggatattgagttgagaacaagcagggcagtagtacagtccaccagcataatctagaggaatactttagaggctggaggtgactcaggacataaaggaaggtctgacttttatggagccaaatgggaccaaggcagccagtaagagcagatctgggtctaccagagtaggacataaatgacattagcggcagatgttagycataaattattagtacacccaaatggaaggtgactaaatgcagacactaaatgtgacaacagg

SEQ ID NO: 370472 - DNA, 563 bp, Homo sapiens
atttcaactctatttcccagaaagataataccagcactcactaaaagcagtgttttcaaacacacagtgcatgaagcagtatttatgccatgggrggaagaggaagaggaaggaaggaggacttgaaatgtgtaggaatgatagtttcttccactgagacaacaacgggataaaaatgaaagcaaagcaaatcaaattagatctctgtattttataaggagcaaaaaatagattcttatacatcatttataaatacatgccagctgcattttaatactaaatgggagaaagaaatatttaaatttattttttaaaactaaccacaaaaatgcacgctgtatacagaatgtcctatgatgaaaagcacggttttaataacttttaacagttgcaaaaccagcaacttacatgacaatttaataaaaatctctaaatagtctctcatgctggagtaaactccttacattacaatagctttggtggctttcttcaactaaagagatatctaaatttgatatgaacctcaggtttcaacatccatgatttgctagtatataattcat

SEQ ID NO: 370473 - DNA, 564 bp, Homo sapiens
gtattttataaggagcaaaaaatagattcttatacawcatttataaatacatgccagctgcattttaatactaaatgggagaaagaaatatttaaatttattttttaaaactaaccacaaaaatgcacgctgtatacagaatgtcctatgatgaaaagcacggttttaataacttttaacagttgcaaaaccagcaacttacatgacaatttaataaaaatctctaaatagtctctcatgctggagtaaactccttacattacaatagctttggtggctttcttcaactaaagagatatctaaatttgatatgaacctcaggtttcaacatccatgatttgctagtatataattcattgacacctcaggtaacaatttaaaagacttgacccatttatgcctggtgttccattattggaacactaagcatgtgggagttatttatatcctactgctcaaggtcatcgccaaggtctgattgcaaaaattcacaaaattccaacctcaggcataatgggttaacccaattatttaagttcttaggtatggaaaatcatggcttat

SEQ ID NO: 370474 - DNA, 563 bp, Homo sapiens
atttcaactctatttcccagaaagataataccagcactcactaaaagcagtgttttcaaacacacagtgcatgaagcagtatttatgccatggggggaagaggaagaggaaggaaggaggacttgaaatgtgtaggaatgatagtttcttccactgagacaacaacgggataaaaatgaaagcaaagcaaatcaaattagatctctgtattttataaggagcaaaaaatagattcttatacatcatttataaatacatgccagctrcattttaatactaaatgggagaaagaaatatttaaatttattttttaaaactaaccacaaaaatgcacgctgtatacagaatgtcctatgatgaaaagcacggttttaataacttttaacagttgcaaaaccagcaacttacatgacaatttaataaaaatctctaaatagtctctcatgctggagtaaactccttacattacaatagctttggtggctttcttcaactaaagagatatctaaatttgatatgaacctcaggtttcaacatccatgatttgctagtatataattcat

SEQ ID NO: 370475 - DNA, 564 bp, Homo sapiens
gtattttataaggagcaaaaaatagattcttatacatcatttataaatacatgccagctgcattttaatactaaatgggagaaagaaatatttaaatttattttttaaaactaaccacaaaaatgcacgctgtatacagaatgtcctatgatgaaaagcacggttttaatawcttttaacagttgcaaaaccagcaacttacatgacaatttaataaaaatctctaaatagtctctcatgctggagtaaactccttacattacaatagctttggtggctttcttcaactaaagagatatctaaatttgatatgaacctcaggtttcaacatccatgatttgctagtatataattcattgacacctcaggtaacaatttaaaagacttgacccatttatgcctggtgttccattattggaacactaagcatgtgggagttatttatatcctactgctcaaggtcatcgccaaggtctgattgcaaaaattcacaaaattccaacctcaggcataatgggttaacccaattatttaagttcttaggtatggaaaatcatggcttat

SEQ ID NO: 370476 - DNA, 563 bp, Homo sapiens
atttcaactctatttcccagaaagataataccagcactcactaaaagcagtgttttcaaacacacagtgcatgaagcagtatttatgccatggggggaagaggaagaggaaggaaggaggacttgaaatgtgtaggaatgatagtttcttccactgagacaacaacgggataaaaatgaaagcaaagcaaatcaaattagatctctgtattttataaggagcaaaaaatagattcttatacatcatttataaatacatgccagctgcattttaatactaaatgggagaaagaaatatttaaatttattttttaaaactaaccacaaaaatgcacgctgtatacagaatgtcctatgatgaaaagcacggttttaataacttttaacagttgcaaaaccagcaacttacatgacaatttaataaaaatctctaaatagtctctcatgctggagtaaactccttacattacaatagctttggtggctttcttcaactaaagagatayctaaatttgatatgaacctcaggtttcaacatccatgatttgctagtatataattcat

SEQ ID NO: 370477 - DNA, 584 bp, Homo sapiens
attcaaactgaagcaaagaaaaaacattgctaaaaaatgaaagagtttagtgcctgtgacatgatattaactactttagcatgtaagtatttggaatacaggaggagaggatatataggatggggttgggggggcaaatgaggaaatagtgaccagatgttttccaatcagatgaaaaatgtgcatttacagacataagaaagtcaacaaaccacagtaggatgaacasgaagaaaatcacacttagggatacaatattcaaagtgatgaaaaccaatggtatatagaacatcttaaaaagcaagcagtgaaaaataatattacaattaggaaaataataattagaaaataacatctgatattctatcagaaataatacaagtaagaagacaatgcaactgtatctttaaggtggagaagataacatctgatattctatcagaaataatacaagtaagaagacaatgcaactgtatctttaaggtggagaaaggggaaaaaagaatatttgttaatccaaaattgtatagacagcaaaaatacttcaaaaaataaattttaaagacatttttacataaataaaa

SEQ ID NO: 370478 - DNA, 584 bp, Homo sapiens
attcaaactgaagcaaagaaaaaacattgctaaaaaatgaaagagtttagtgcctgtgacatgatattaactactttagcatgtaagtatttggaatacaggaggagaggatatataggatggggttgggggggcaaatgaggaaatagtgaccagatgttttccaatcagatgaaaaatgtgcatttacagacataagaaagtcaacaaaccacagtaggatgaacaggaagaaaatcacacttagggatacaatattcaaagtgatgaaaaccaatggtatatagaacatcttaaaaagcaagcagtgaaaaataatattacaattaggaaaataataattagaaaataacatctgatattctatcagaaataatacaagtaagaagacaatgcaactgtatctttaaggtggagaagataacatctgrtattctatcagaaataatacaagtaagaagacaatgcaactgtatctttaaggtggagaaaggggaaaaaagaatatttgttaatccaaaattgtatagacagcaaaaatacttcaaaaaataaattttaaagacatttttacataaataaaa

SEQ ID NO: 370479 - DNA, 560 bp, Homo sapiens
tcctaagattagacacatcagtccttactaaaatattagcaaatggatggaaccacataagaaagattccattggtaaagtttattcagtaagtccaaggaggcttaacattaaaaaatcattcaatataattcaccagttaaaggacagaagtcatacaaccatctcaattgatagaggaaaaaatacttccaaaatgttatgcccattcatgattttaagatatatttcacaaaccaacaataatgaatttccttcatctgataaaaacttacttctataatatattaagaaatcaacaatacatagctaaacagctcaataaaaatgggcaaatatttgaaaagataactcattaaataagacatatacatggtcaattagcacacagaatggtgttcaacatctttagtcattggagtaatgcaagttaaaaaccacaatgagatacaatttctcatcccctagaagggstaaaacaaaaaagccaaaaaataccaaatattggcaagataatggagcaatttgagctctcacacatacagtacttatgagaatat

SEQ ID NO: 370480 - DNA, 558 bp, Homo sapiens
taacattaaaaaatcattcaatataattcaccagttaaaggacagaagtcatacaaccatctcaattgatagaggaaaaaatacttccaaaatgttatgcccattcatgattttaagatatatttcacaaaccaacaataatgaatttccttcatctgataaaaacttacttctataatatattaagaaatcaacaatacatagctaaacagctcaataaaaatgggcaaatatttgaaaagataactcattaaataagacatatacatggtcaattagcacacagaatggtgttcaacatctttagtcattggagtaatgcaagttaaaaaccacaatgagatacaatttctcatcccctagaagggctaaaacaaaaaagccaaaaaataccaaatattggcaagataatggagcaatttgagctctcacacatacagtacttatgagaatatataacttcttcataataaatgaacctaaaattattatgaaaaacagtttgagagatttctgtagttacacatytaccctaaaaaccagaaattccactcctag

SEQ ID NO: 370481 - DNA, 600 bp, Homo sapiens
taaatttctcctccaggggattaggctcacatactgcagaaattttctcatgtgtgatagtatgactattctgcaataagtctatttcaatatggaggaagtaattttctcttctcaaaggaggagatcattcatttcttaacagtagccagctcctgaatggcttacaaagagtattttctatcacttttgatatatttgttttacttagtttcctactatttactaataggtgcctaggagccaaatagcagccactacaactatttttgagtgtccacctcatgtaaagttttggtgtcagccaggcttacagaattctgaagaagtaggtacaatagttaccattatatgagtgaaaaaacrtaagttcagagatgtgaagtagcttgtgtgggggtcacatgagtagtaaatgggtaacctggaatatggagccggatgatttcggtaccaagatcacaatgcaaccctgcctgcctttgaaagaaatttcacattactccataaaaagttttctcttgaagcaagtaattataataatccttaaaattaaaggattccatcatagtacgttcggagtacatgtaaaagaaaaaa

SEQ ID NO: 370482 - DNA, 600 bp, Homo sapiens
taaatttctcctccaggggattaggctcacatactgcagaaattttctcatgtgtgatagtatgactattctgcaataagtctatttcaatatggaggaagtaattttctcttctcaaaggaggagatcattcatttcttaacagtagccagctcctgaatggcttacaaagagtattttctatcacttttgatatatttgttttacttagtttcctactatttactaataggtgcctaggagccaaatagcagccactacaactatttttgagtgtccacctcatgtaaagttttggtgtcagccaggcttacagaattctgaagaagtaggtacaatagttaccattatatgagtgaaaaaacgtaagttcagagatgtgaagtagcttgtgtgggggtcacatgagtagtaaatgggtaacctggaatatggagccggatgatttcggtaccaagatcacaatgcaaccctgcctgcctttgaaagaaatttcacattactscataaaaagttttctcttgaagcaagtaattataataatccttaaaattaaaggattccatcatagtacgttcggagtacatgtaaaagaaaaaa

SEQ ID NO: 370483 - DNA, 600 bp, Homo sapiens
taaatttctcctccaggggattaggctcacatactgcagaaattttctcatgtgtgatagtatgactattctgcaataagtctatttcaatatggaggaagtaattttctcttctcaaaggaggagatcattcatttcttaacagtagccagctcctgaatggcttacaaagagtattttctatcacttttgatatatttgttttacttagtttcctactatttactaataggtgcctaggagccaaatagcagccactacaactatttttgagtgtccacctcatgtaaagttttggtgtcagccaggcttacagaattctgaagaagtaggtacaatagttaccattatatgagtgaaaaaacgtaagttcagagatgtgaagtagcttgtgtgggggtcacatgagtagtaaatgggtaacctggaatatggagccggatgatttcggtaccaagatcacaatgcaaccctgcctgcctttgaaagaaatttcacattactccataaaargttttctcttgaagcaagtaattataataatccttaaaattaaaggattccatcatagtacgttcggagtacatgtaaaagaaaaaa

SEQ ID NO: 370484 - DNA, 512 bp, Homo sapiens
taaatataagccttcttaggctcagagatcattaacaagaattgatgtcaaacacaatatttaaaaaacatgaaacaattgctccagcttttaagctatttaaagctcacatattaactaagtggtaaagagtatacaagcaatttaatgaatccataatacagatattagcagaatccataatacagatattagctyctgcctgtagcttacacatcgagctgctttagttttgtggtttgttttctaaaatatgatgacctttaatttcaactctatttttgcttgttatttggaaaaacttttagcaagatcctgaaaattacactatttatcactaagattcctctaatttctgtgacaaatcacctcaccttatttccacaactccagtccaacttaatctgtgacttctccaccgttaaagttatcaatgaaggtgagacaagattagaagtgattagaagaaccagaatgagctttctcaaataaggtgataatgcagtaaaggc

SEQ ID NO: 370485 - DNA, 607 bp, Homo sapiens
aatcaaatccagttagctgcaggtctatatcctagaaaaaatgaaaataaatcatgagctggaacaagctaacatagacagtgtgataactagatgttttacaatctacagaartacattaataatgactagcatcaggtaagttaaatgttaccataggaaaatcatcgattgaagtgagatgacaagtaaactaactgattataagattattgagaaatgcatctgctgactttatatacatttacatggaagcaggctttattaaaatacacagttttagaaacatgtcacagtaaattatttaaaaatactgaatgttaggtgtgaaatttatactttattaatagtcttcaatcacttcaagcaatagaagattaatctgtttcagttttaaaacccaatagcagaaaatattttaagaaactggcagtaaactagcagaacagatacaaactctgtaagaatgattgtatgcattggaaaacaaacaaaaaggtggctcccaatcccatgcttatcaaaaaaagcaagataatatgaggacaagaaaattcatatgagttcagctatgattattcagatgaaactacctcacttccttgct

SEQ ID NO: 370486 - DNA, 607 bp, Homo sapiens
aatcaaatccagttagctgcaggtctatatcctagaaaaaatgaaaataaatcatgagctggaacaagctaacatagacagtgtgataactagatgttttacaatctacagaaatacattaataatgactagcatcaggtaagttaaatgttaccatakgaaaatcatcgattgaagtgagatgacaagtaaactaactgattataagattattgagaaatgcatctgctgactttatatacatttacatggaagcaggctttattaaaatacacagttttagaaacatgtcacagtaaattatttaaaaatactgaatgttaggtgtgaaatttatactttattaatagtcttcaatcacttcaagcaatagaagattaatctgtttcagttttaaaacccaatagcagaaaatattttaagaaactggcagtaaactagcagaacagatacaaactctgtaagaatgattgtatgcattggaaaacaaacaaaaaggtggctcccaatcccatgcttatcaaaaaaagcaagataatatgaggacaagaaaattcatatgagttcagctatgattattcagatgaaactacctcacttccttgct

SEQ ID NO: 370487 - DNA, 640 bp, Homo sapiens
ttttaaattcagtttaatgcatatccttcttctgctgttgccatactgtattctttgcctgtaataaagctgtccaatgtatataaactgtttgacgcctttcagcaaatgaatacttaaagtaactaatgtgtaattaactcacatagtaagtacttaaaatgggatgaataaacaaatgaacacaattttacaaaatgatattaggcttcaaaagaagagacaagtctacctccagctagtaaattagaaacgagttcatgaatccagggaaatttaagatgggcttaaaagaactacgatctggacaaacactgttggtcacagaagggatcccacagcagaaagaatgttcagtagatactgtgctgctcacccttcctgagggcagctcacattttaatgactggttcctgccagtattcaaaggcctggcctccttttctcaatacagaataatcagaggagccccaaagctccccatgaaaatgggcagagggaggagttggttgagattctcctactcccttacmggaattgtttccaatggcacatcccaggaaacttcttgtagacaaaccttcatctcaaagtcttattttttcctttggaagcctgacttatgacagaaagaaaagta

SEQ ID NO: 370488 - DNA, 630 bp, Homo sapiens
agcgtgttcataccccaccacaagatgattagataagggaactaaatggttgaacttctatttgccattttttatgtaaaacaaaaagagaaagcaattaaagtttgctaatatgaatatatgatgtaacagcagtgtcatcacaaggctattgatgcatatagcacttacagtgttcctgggaaggtagattggtctgtagtgcagttggttaaccaccaatagcactttgtttttattaattgttcattttcaatgtgcagtgatgcattagagtttacatcattggataaataaatttacacatttgtatcaagttgtaattaaagtaacccttaaaaaacaaactactggattaactttttatcaaatatcaaygaaagggagtactagaaatacaataataaataaagaactgtaaaaaggcaaaatgaaatttctacttttaggacaagctcttcttcagctatatcacaagattaaaaataatggccatctaatcagatataataacaaatcagaaaaaaatgtttgaaaacctcaagaagataacttgaagtctgaattaatgcccattttagtagctgggaactgtgccctaaaaatctctgtgccttgagatattagtga

SEQ ID NO: 370489 - DNA, 593 bp, Homo sapiens
tgaaaattgtcatcattatcctgagaacataggtgcctggtgccttgttgtgattattaatatcacatctcaaatgtggcatgaagaaaggatagagcattggactatgttactgcattctttccatttttattttaactattggcccattgcttgatgccaagagagttaactttaacctcacttagtcaccttttaacttatagtaaggacaaaaacagtgatgtgtcattcatttgtttacaggaggattatgaagtrtcatgtcaggttttgttctagaaaaacatttttggactcaaaaatgctatgcttttgagtgtgatgagatgagaaatagaagtgtgccatttgctaattataagttattggtggttttttttcagaagttctataagtagctctgtttaaaaatttcaaaatggacaaagggcatgaagctattttgggaacaaaatgtcagtactgaaggtatactttttcatatattgaactaatgcgtggttcagaaagttctttgctaatttatcaaaatgtcatcttcaggtactgggttggaaaattagtaactgctagagtgtgtgaccattgaa

SEQ ID NO: 370490 - DNA, 572 bp, Homo sapiens
caatggtttaaaactttccatccatctgttttttttttttttttttaaagcctaaagtgtacctatacaaatctytttaaagctggggaatgctttggctactgatacaacagctgctggattacaggctgttgcttccagaagtaaaaatgaacagctgatgttctagggctttttctcacttttgttggaagtcttctcagtgcagagccctggggtaggtcctggagatactgagataaaaaaaggcattaaagagctgccctcaaagagttcactgtcttgtgggggaggcagatacagaaagagaaaataacaatgtagtaagcaccctgaggaaaggaggcaaggggcattgagggaacacacaggagaggtatctgtggtttgagattttgaaatagaagttaccccttacatgagcactcacggataaatactgtagtctctcaataccttcaaaggctaatgtagtctatgggaccatatttcagatattaaaatatttttgagtgctttttaaaaatatgtgtgtgttctctttttttgcatggatatcagttgtctcttct

SEQ ID NO: 370491 - DNA, 566 bp, Homo sapiens
ctccatcctacctcaggacccttgcacatgctgatccttctacttttaatgtacctctacctcttttcatgtcagactaagttttataattcaagttttggaaaaatgccaccttgtcaaaacagcctttgctgatcaacctatcaagataaccctacccttttcctccagttattctttgatatctttgtggttattttcttcattacatttgtatcttcatatgaaattattttgttcatttatgtgctgatatttactctctcactgccccagaagaacgtttctcttgctcactgctatatctatagcattcacaaggaattcaataaacattcattgaaaacataatcaaccttaagaaacaatgcaatttgttggagagagccttcatctcccaccatctgcatttatttgagtaatactacacctgcagtaattcctcaccagacatagtaaattctgttcctttctgctatgccatcactrtttgtttatggcgcagtgctccccaaatgaagtaaatttcaaagccaacatcagagtctttaactaagaaataacag

SEQ ID NO: 370492 - DNA, 617 bp, Homo sapiens
ctggcagggctggcttcatgggctggtagtctgtgcagtccggctgatccctgagctcagaatggcctcacmcttggttaaacaatcttttttcaccgtcttgaaattcataatactttttgaacaaagtatcctgcattttcattttgtactggatcctacgaattatttagccaatcttgtttcctggttttgctggcattttccccatggtgcacatcagtaaatgttcatgtaattatgagagatgatagaatagaaaccctctgtgcacactgaataattagattaaaactctcaactaaaacactatgaccacttgtatttttacccttacagttagttcccttcacatctaaggggagcaatgaaaaaaagacatgttgtaactttgggaaataaaagatctgttcctctattattctgttattcttgttttaacgcacttgttcattatctgatcaaacaattattgagtgtttaatgagtcctaggggctatgctggaccccgaagataaaaacaggaagacttggtacttgtcataggggacaatcaagcaaggactcacaaaaatcattattataatagctacaatttgtatagtgcctaccacag

SEQ ID NO: 370493 - DNA, 617 bp, Homo sapiens
ctggcagggctggcttcatgggctggtagtctgtgcagtccggctgatccctgagctcagaatggcctcacccttggttaaacaatcttttttcaccgtcttgaaattcataatactttttgaacaaagtatcctgcattttcattttgtactggatcctacraattatttagccaatcttgtttcctggttttgctggcattttccccatggtgcacatcagtaaatgttcatgtaattatgagagatgatagaatagaaaccctctgtgcacactgaataattagattaaaactctcaactaaaacactatgaccacttgtatttttacccttacagttagttcccttcacatctaaggggagcaatgaaaaaaagacatgttgtaactttgggaaataaaagatctgttcctctattattctgttattcttgttttaacgcacttgttcattatctgatcaaacaattattgagtgtttaatgagtcctaggggctatgctggaccccgaagataaaaacaggaagacttggtacttgtcataggggacaatcaagcaaggactcacaaaaatcattattataatagctacaatttgtatagtgcctaccacag

SEQ ID NO: 370494 - DNA, 589 bp, Homo sapiens
tataatgcttcaagtttattaatggcttactgcaatgtgtctcaataaaaggtgactgatgttatccacgtttttcagatggataagttgaggtcaaagaagataaatacctttcctaacattccatggctcataggtgggagcatttggatttgactgtacatctgtctgacttcaaagtccaggttctcagcactgggtgaagaagcctcccaaattgtggtaaaggtacctagttattattacaccacatagtggtaagcgagattatagagcaggaataattccccttaggatactgagtttaccttccaccatttgaaaaaagaatttcttctttgattaggtatttggcctgtgtcttgctaaagctgtttcatcagacataagtttatgttgtgattagagaaatgtgtactattccttatcttaagctatctcttaataaagttacaattcataactataaacaatatggaatcattagtaaatagcataatctggcattttgggccacttagcgaaagtcgttagaataccatttcattgattaaaagrtaagtttacccatatcgttaatataaatagc

SEQ ID NO: 370495 - DNA, 597 bp, Homo sapiens
ttattcataatttatccatttgaagtatctgtgtatttcaagatggctctgttgttttctattcttactccttttgaaataatagatgtttgattttctgtgaatctttggaaggattccagatgttttcattsgggtctttcttagccattagcatatgatttcatcaatttcctttaactcatatcagtggttctcaacttaagacattttggcattctcaaaataagacatttttggttgtcacaaattgggagatgctactggtatctctattacataaagactaggaatgctgttttaaatctcacaattcacaaggtaactccataaccccaacacaaaattttcctgcccaaaatgtcaacagtatacttttccataggtatttggagaaatcctaaactaactatgcacattaaagtacagaggaactagcctgggagtcttatttttataccaagtataaagcacactgcagggaagttgtaagtcagtttattatgcattttaaaagcatcatttgatacttaactataaataattattttccatttcaaaattcagtgggatagatggtaaatgcatggactttgg

SEQ ID NO: 370496 - DNA, 597 bp, Homo sapiens
ttattcataatttatccatttgaagtatctgtgtatttcaagatggctctgttgttttctattcttactccttttgaaataatagatgtttgattttctgtgaatctttggaaggattccagatgttttcattcgrgtctttcttagccattagcatatgatttcatcaatttcctttaactcatatcagtggttctcaacttaagacattttggcattctcaaaataagacatttttggttgtcacaaattgggagatgctactggtatctctattacataaagactaggaatgctgttttaaatctcacaattcacaaggtaactccataaccccaacacaaaattttcctgcccaaaatgtcaacagtatacttttccataggtatttggagaaatcctaaactaactatgcacattaaagtacagaggaactagcctgggagtcttatttttataccaagtataaagcacactgcagggaagttgtaagtcagtttattatgcattttaaaagcatcatttgatacttaactataaataattattttccatttcaaaattcagtgggatagatggtaaatgcatggactttgg

SEQ ID NO: 370497 - DNA, 597 bp, Homo sapiens
ttattcataatttatccatttgaagtatctgtgtatttcaagatggctctgttgttttctattcttactccttttgaaataatagatgtttgattttctgtgaatctttggaaggattccagatgttttcattcgggtctttcttagccattagcatatgatttcatcaatttcctttaactcmtatcagtggttctcaacttaagacattttggcattctcaaaataagacatttttggttgtcacaaattgggagatgctactggtatctctattacataaagactaggaatgctgttttaaatctcacaattcacaaggtaactccataaccccaacacaaaattttcctgcccaaaatgtcaacagtatacttttccataggtatttggagaaatcctaaactaactatgcacattaaagtacagaggaactagcctgggagtcttatttttataccaagtataaagcacactgcagggaagttgtaagtcagtttattatgcattttaaaagcatcatttgatacttaactataaataattattttccatttcaaaattcagtgggatagatggtaaatgcatggactttgg

SEQ ID NO: 370498 - DNA, 618 bp, Homo sapiens
gaaagaactacagaagtacttcttaggtgtttttcccctttagcaaaatgttgggaagatggaggagtattyagcatgaggtatgctgtcattatatttattctgggcctttcagcactgtaatttatttctgtgccaaaacaatatgaattgttaaaaaatgtgcttctccaaaatatgaaacagttggactggatccctattgaattatgcacatatcttagctaaaagaatggtattttctgaataataaaaatcatacttttttgcagaaacaaaaaactcaaaatatttatcagtacattttaagggctattctcccaattggacctaaaatgaactttaaaaaaattcaaatggttctcagaaagcccacaacatttatttagaacagattgtatctaccatctcttatctttttactgagatgattcttcctagtaatgaagaatcctaaatggaattggcatctaaattttagaaatacaaaatcactttattgtgcatgaagatacttctagaataaatatagtcacatcatctgtttatgataaggaaattggtagcttgagtgagggaacaattaaaagtgttaaaaaaatgagcactggacagtgt

SEQ ID NO: 370499 - DNA, 600 bp, Homo sapiens
ttgtttccctaatatgaagtttgtcataattattcatgtttttttggatttgtaattggtattaatttcggccttccattggcattataacttagtgcttccaaaatgcattttctttatatgcctgacacttttcctgaacacatgaaggacagaaaatggctattcatccttgtgtccctgcaggcatctaatgggtgaattcatactttaccatactgttgtatgtgattgaggatataaattgtgatatacttggagaaagcatcatgcctgtcatgaaagctctgaccttacatcttctcttatatgtcaattgactttgagttcctgataagtgatatcataatgttgtagtaaatatatatatatataattttgagttcctgataaaatcactatgacactatcagcttttcccacctctgaccattgatgtagataaatataagcytaagtatcctcctttagaaaatgaaatgtcctattgataggatacaatcgatgtaattctggaccaaaccattagctcagatgtattttccccaaaatgtatgtcattttatatgcaatttatacagtcagagttaaaagctacac

SEQ ID NO: 370500 - DNA, 456 bp, Homo sapiens
ttgtatgtgattgaggatataaattgtgatatacttggagaaagcatcatgcctgtcatgaaagctctgaccttacatcttctcttatatgtcaattgactttgagttcctgataagtgatatcataatgttgtagtaaatatatatatatataattttgagttcctgataaaatcactatgacactatcagcttttcccacctctgaccattgatgtagataaatataagcctaagtatcctcctttagaaaatgaaatgtcctattgataggatacaatcgatgtaattctggaccaaaccattagctcagatgtattttccccaaaatgtatgtcattttatatgcaatttatacagtcagagttaaaagctacactatgaagggagttgaaaaaaygcctaatgtattggtgttaaaacaagttattgtttttgaagggaaattgtgttgtt

SEQ ID NO: 370501 - DNA, 584 bp, Homo sapiens
tgaggtttaaattataacattaaattggttgtcatgatggtatataacagcgtcttttgaaaacatttattttttattgttgttatattgtcacctcagctgagaaagtcttggaattggaaatgggctctgaaatacatttggtgttcaaaatgtatttccatcattggtagctacgattctggttaacctctctgcttcttgattttctcatctaaagttggggccactactatgtctactgcaaaagtctttggagggttaattgggtaatgcagataaagggcttagaactgtgcttgacaccatatttgccttccttaagtgtaactattattatattggattaattcttaggctaggagaaatggtgatgaaaaaggcactgttcttggtctcatgcagatcagaagtcaattgaagaagacctaaagagtgaacaggctcttatgatacagcttraaaattgtcctgaagctgctagaggtacatacaggttgctgctagagcagcaagttaaggggaacccatttattttagagaatgaactatgcctttctggagcaagtgatctctaaactgga

SEQ ID NO: 370502 - DNA, 540 bp, Homo sapiens
tttataaacataccagaaactttcctgtttttaaacaataatgtgtaggttttatgattggtgaactgaatgtgaaaaattttcttgaatcactaaataaaatagtttcttatattgctgagctatagttgaaaggaactaacataatgaaatccacttttcataccactgccattttccttgcccccaaagtaaatcagactgacatggaggctttctgaggacaggcaccattcatgttgttcagccatattgatccattgtttcctcaaagcaaagcactattccaggcccagtcccttgccacttgttagatatgttattgattctatgaatataaatgaatggatggatggatcaatcagttagtgttagtaagacttgctctaggtaactgaaaaatggcaaaaatttatttygatctctgattttcctctctttttgtctttcctggacttagtttccttagtcagtaaatgtgcatagtctgatacttattttccttaaactcctttttgtgagtaccttctttcctgccct

SEQ ID NO: 370503 - DNA, 612 bp, Homo sapiens
tggtctcttcttgaccacactcagacacttaggtagaaattagcctttcccttcttatagatcgtttttaaatgacaataataccccctccaaaaaaaaaattatcaatgtggaattctctatacccaacaaaatatattttaatagctacagtgaaattaagaccttttggaggctggaataatwaatcaccagtagaaagtaggactaatcgtttcctgctactgaagcaagagcttcctaagtacactaccccatgcctcacgaattaagagttcaccactttctctggttaggaatgtgcattggttatagtcctgtgtgtgtgtcacacactgttcactttaattcttttgaataattttttcctggatgctagaagaaaagatttgaagtgtttccaacacaaaaaataataaatgcttgaggtaatatatatcccagttaatctgattgtatcattacacattgtgtgcaagtatcaaaatatctcatgtgccccataagtatgtacaattattacatatcaataaaaagatgtccactataaaccctaaatcaatgactaaaatatcaaaacaaagagttacacctaataagccaaaaaaggat

SEQ ID NO: 370504 - DNA, 612 bp, Homo sapiens
tggtctcttcttgaccacactcagacacttaggtagaaattagcctttcccttcttatagatcgtttttaaatgacaataataccccctccaaaaaaaaaattatcaatgtggaattctctatacccaacaaaatatattttaatagctacagtgaaattaagaccttttggaggctggaataattaatcaccagtagaaagtaggactaatcgtttcctgctactgaagcaagagcttcctaagtacactaccccatgcctcacraattaagagttcaccactttctctggttaggaatgtgcattggttatagtcctgtgtgtgtgtcacacactgttcactttaattcttttgaataattttttcctggatgctagaagaaaagatttgaagtgtttccaacacaaaaaataataaatgcttgaggtaatatatatcccagttaatctgattgtatcattacacattgtgtgcaagtatcaaaatatctcatgtgccccataagtatgtacaattattacatatcaataaaaagatgtccactataaaccctaaatcaatgactaaaatatcaaaacaaagagttacacctaataagccaaaaaaggat

SEQ ID NO: 370505 - DNA, 516 bp, Homo sapiens
tccactgggccaaaatatctttgcatgttctataatgtactttataatctattcatacagcactacatttgtatggtttatacacatgcatggaatggaggttcatcctcaaaatgtttgtaaaactatcccataaaataagaaaattattcgaagagtacagttaaccttatctgatgcttctgtgaagataagcacacaattgttttggtcttctctttaacagagaagtgtaactccagaagcttgaagccttgcattatctcattaggcaggtgagtcccctaacttctattgccactactcatttttaccaaaaaattttgtcttaccattagcattattgagagcaataaccagtgcgagtaataataaaatatccagtgaaaataaaacctaaatrtagaagaattttagagtttaggaaggtgtcaaatttagaggtatgcattctcattcttacattatactcaatggtgatgtataagctattaaaaacaaaccatattaaagaaa

SEQ ID NO: 370506 - DNA, 461 bp, Homo sapiens
  misc_feature (1)...(461): n = A,T,C or G
tagtgtaaactgtgaaggttaaaaagattataatatttcattcattcacttattcaacagaaggtaccagccaccacactatgccctggtgacagaacatcacttttatntttcaaaaacctagtggataatattgagacgtgtatagatgcttgtagtaaagtatcttaaatagtggtaaggtgcccggcccgctattctcaagtgtagagatagaataaggagaaggaattcaggagaggtttctctgtaggtaattggagtaagattatttttcttggtaattaarattatatatattttaataagattatatataattttaattagattatatataattttaatatatatataattatagcttacctaagtattcaaaaatgaagtggaaacaatagctgttattaaagtaattgaagtcagtaatgtgaattaggatcctttaccacttgatagtg

SEQ ID NO: 370507 - DNA, 574 bp, Homo sapiens
gatgcacctgggagacagacctgggcatttctccaaagatgattttgagggcttcaagatttaaaggagaaaagcaggctggatggaaaagtgggaatgtatggtcacattactgaatccacgtgttgccacagaaaaagcaggtaagggaatagtcaatcatttatttgccttgggctcagtaaattggcactttacacaaagtaaggtaaacatagagtagctacctgtggaaatatttaaccttttatctgtagctgtatgcttaggaacaaaaggaagactacttcttgcaggactcagcttttagtttaattttgtttctgcgggcrtagtgaattggagtcccaagtttttatttttctttatgtttctgctcccttttctgtaaacaaatataaaaaaagcattttagaagaaaaaataggaggaggaagagagaaaaaaacaacaaagaaataacaaaatggagaacaatcttggtaaactgatataggcaatattactctgaagtctattgtcagtaggcaattagaaggtgatttatgtctataaatagggtcttgttattgtc

SEQ ID NO: 370508 - DNA, 535 bp, Homo sapiens
gaggaggggcctggtgggagatgactggattatggggggtggatttccccctttctggtctcaagatagtgagtgagttatgagatctgatggtttagaagtgtgtggtacttccacttttgcgckctctctctctctctcctgttgccatgagaagatatgctttgtttccccttcgccttgtgccatgactgtaagtttcctgaggcctcccagtcatgctacctgtaaagcctgttgaactgtgaatgaattaatcctgttttcttcataaattacccagtctcaggtagttctttatagcatcctgagaatggactaatacattgatgactaatattccattgtatgaatgtaccacagttcaattatttgtttacctattaaaggacatcttaaatgcttccactttttaacattcaaatgcagggtttttttttgtggacatgtttccaattaatttaggtaaatatctgggagcatgattgcttaatcatacagtaaatctatcttttgcttttaaaaaactttgact

SEQ ID NO: 370509 - DNA, 535 bp, Homo sapiens
gaggaggggcctggtgggagatgactggattatggggggtggatttccccctttctggtctcaagatagtgagtgagttatgagatctgatggtttagaagtgtgtggtacttccacttttgcgctctctctctctctctcctgttgccatgagaagatatgctttgtttccccttcgccttgtgccatgactgtaagtttcctgaggcctcccagtcatgctwcctgtaaagcctgttgaactgtgaatgaattaatcctgttttcttcataaattacccagtctcaggtagttctttatagcatcctgagaatggactaatacattgatgactaatattccattgtatgaatgtaccacagttcaattatttgtttacctattaaaggacatcttaaatgcttccactttttaacattcaaatgcagggtttttttttgtggacatgtttccaattaatttaggtaaatatctgggagcatgattgcttaatcatacagtaaatctatcttttgcttttaaaaaactttgact

SEQ ID NO: 370510 - DNA, 535 bp, Homo sapiens
gaggaggggcctggtgggagatgactggattatggggggtggatttccccctttctggtctcaagatagtgagtgagttatgagatctgatggtttagaagtgtgtggtacttccacttttgcgctctctctctctctctcctgttgccatgagaagatatgctttgtttccccttcgccttgtgccatgactgtaagtttcctgaggcctcccagtcatgctacctgtaaagcctgttgaactgtgaatgaattaatcctgttttcttcataaattacccagtctcaggtagttctttatagcatcctgagaatggactaatacattgatgactaatattccattgtatgaatgtaccacagttcaattatttgtttacctattaaaggacatcttaaatgcttccactttttaacattcaaatgcagggtttttttttgtggacaygtttccaattaatttaggtaaatatctgggagcatgattgcttaatcatacagtaaatctatcttttgcttttaaaaaactttgact

SEQ ID NO: 370511 - DNA, 590 bp, Homo sapiens
aaacaatctctttatcttgttgtctatattattgagcatatataaaaaaactgagcactatttaggatttctattagagtaaaccaatgtcacattggtgctattcaagaggacacacattttttagccattgartataaaaaatattattctagacttgagcccaagagaactagaaagagttgagaaaagaaaagtttctatcatgcaaaatattttagaggactctgtcataaattcctgtcaaattagcataaatgccatctataatcagatatatataaaaatgaataaacagtgagataccactttggaataaattattgaatactgaaaaaagctgatgtctgataaatatgaacaagcaggggcaatctgtctagaaaaactattttttggtaaaatctttttgaaaagaaacttgaaaagtgaacttcaaaaagtttaaattctttgatccagtaattttggttccaagatgatttactgtagaaaactacagatgtattcaaataattacataaaaagatgtttattacagtattgtctatactttgataaaaactattgacagatacaatgcattgaat

SEQ ID NO: 370512 - DNA, 578 bp, Homo sapiens
ttccacgttgtaaaatataccaaaacagtcttgaataatcagaacacttctgccagattgtctaatgtcaatttgtttctgacactgattcttctatgttttttcctcatcatctgagactggttcagcacttatcttcatcaagttgtcttctgccgactcctctgatgtggtgccamttagctcttgaatgtctccaagatccatattttgaaattcttcacatctttgtttgccatatccacaatctctttgtaatttccttgaatgaccatgttgtgaatcctatgaagttatgcactacatcaggacagttttctccagtagaaatttgtttcctgcttgacggctttttgtggctttttctataaagatgatggcaacttcaacggtgtaatcctttcagacttttataatgttctctctataggggttctcttctacagtattgacaatcctttttttttgtggtttacataaaacaaactttatttttttattttattttattattattatactttaatgacaatcctttctatagcgtaacatgcaatgagccttaaatgtccttataa

SEQ ID NO: 370513 - DNA, 578 bp, Homo sapiens
ttccacgttgtaaaatataccaaaacagtcttgaataatcagaacacttctgccagattgtctaatgtcaatttgtttctgacactgattcttctatgttttttcctcatcatctgagactggttcagcacttatcttcatcaagttgtcttctgccgactcctctgatgtggtgccaattagctcttgaatgtctccaagatccatattttgaaattcttcacatctttgtttgccatatccacaatctctttgtaatttccttgaatgaccatgttgtgaatcctatgaagttatgcactacatcaggacagttttctccagtagaaatttgtttcctgcttgacggctttttgtggctttttctataaagatgatggcaacttcaacggtgtaatcctttcakacttttataatgttctctctataggggttctcttctacagtattgacaatcctttttttttgtggtttacataaaacaaactttatttttttattttattttattattattatactttaatgacaatcctttctatagcgtaacatgcaatgagccttaaatgtccttataa

SEQ ID NO: 370514 - DNA, 590 bp, Homo sapiens
ggtgtcctgcacttaaaaagcactatcayggtacctcgttccgattgtacttactcagatccacatatccgatatccacatacattttagcaaacagagatcccagcataaaggcaaaaactagaccagtcattcccattacattcacagtacctgtcggtattacaaaacaatttaatcagataccgcaaatacttggtttttattcaacatgtttttaaaagtaatattacacaatacatttctccaaatatttattctaataaagaatacagttaatgatactattattccaaaggtagacctaaggattaaccatgcaatttaatattttctgtttattacctaaatacaaggaagaatgtccttcttttgcaaaatcatcaatgtaagaaatccccaatggtactatgggggtttcccctatgccacgaagcatattacccatgaagacatagatccacatgtgtgacccagattccttcacacaacctatcgagacaagagagtgttttattttaaacattatttttaacattcttattagaaatttaactactttaagccctttgctattctatttttttcta

SEQ ID NO: 370515 - DNA, 590 bp, Homo sapiens
ggtgtcctgcacttaaaaagcactatcatggtacctcgttccgattgtacttactcagatccacatatccgatatccacatacattttagcaaacagagatcccagcataaaggcaaaaactagaccagtcattcccattrcattcacagtacctgtcggtattacaaaacaatttaatcagataccgcaaatacttggtttttattcaacatgtttttaaaagtaatattacacaatacatttctccaaatatttattctaataaagaatacagttaatgatactattattccaaaggtagacctaaggattaaccatgcaatttaatattttctgtttattacctaaatacaaggaagaatgtccttcttttgcaaaatcatcaatgtaagaaatccccaatggtactatgggggtttcccctatgccacgaagcatattacccatgaagacatagatccacatgtgtgacccagattccttcacacaacctatcgagacaagagagtgttttattttaaacattatttttaacattcttattagaaatttaactactttaagccctttgctattctatttttttcta

SEQ ID NO: 370516 - DNA, 503 bp, Homo sapiens
ttcagggagagggtctaagtgctgcttccttaagacaggaaagcgctggtgtgtttgaagaccaaaaagaatccagttcattggaacatrctgagtgagaggggtgtggtataagagaagtttggaaaattagggaggaagcagataatgtgtgccctactggccaatataataattcaatcacctaaaactgtaaacatgtaaagacaggcaagtagatgttaaaaatatacatgataagtagaatgacctgggttaacatctaattatacttttaaaacatactacctgatcacagtcatggtcagccaacagcatgacgtggtagaaaaaaaaatgtgtttttaaattttgttaacatgaaaataaacctgtaaactaaatttacagttgttaaattttgactctgactgcaagttttatcaaattatttatagtaaatattccacaaatatatcttcatcttcaatataaaatgtctactcagagggagaagcatatat

SEQ ID NO: 370517 - DNA, 595 bp, Homo sapiens
ggcaaaatcacccctctacaaaatatacaaaaattagactggcatgktggcatgctcccatcacttcagctacttggagggctgatgagggagaataacttgagcctgggaaattgaggctgcagcaagtcataatacatgccactgcgttttagcctaggggacggagccagaccctgtcacagtgaagaagaagaggaagagtaggaggaagaggaagaaggaaaaggagaaggagaagaagcaagaaggataaggaggaggaggggaagaagaagaaaagaaaagaaatgtgatgtcccttatgtatcagcacttaataatataattattacattaaaataaaattgttaaatataatttaaattaaagacagcataatctgagatacagaaataaaatctctgatgttcaaaaattttaaagacaaaattagtatgagggctcagacttcttttttccctggtatacagcttttgtaccataaaatactgcctcagtaaatctggcagtattataaatcacctgtgttaagacgcaagaaggagaggcaggggataaaaatgttggtcccaagggacattatgacagtaat

SEQ ID NO: 370518 - DNA, 577 bp, Homo sapiens
ggacccattgggaggtaattgaatcatggagatggttacctccatgctcttctcatgaaagtgaatgagttctcacgagatcagatggttttataaggggctcttcttttccttcactctgcacttctccttgctgctgccaygtaaagaaagatgtgttggcttccctttctgccataattgtaagtttcctgaggcctccccagacctgaagaactgtcagtcaattaaacctctttcatttataaattacccagtcttgggtatgtctttattagcagtgtgagaatcgactaatacacttagaaacacatttttttcttcctagataattaaaagaaatcctatgtgagtagttctaatacttataatttcacatgtaaaatttgtgtatttggtcaatatataaatttcaaactaatgtttctataattagtaaggcacacttgcagcagcttgttttcctccagatgatcatccagttatcttaatgtcactaagagaatacctttgcctatgaagagtatggaaacattttttcccatattttcctcaatgaccatataaccagagccca

SEQ ID NO: 370519 - DNA, 577 bp, Homo sapiens
ggacccattgggaggtaattgaatcatggagatggttacctccatgctcttctcatgaaagtgaatgagttctcacgagatcagatggttttataaggggctcttcttttccttcactctgcacttctccttgctgctgccatgtaaagaaagatgtgttggcttccctttctgccataattgtaagtttcctgaggcctccccagacctgaagaactgtcagtcaattaaacctctttcatttataaattacccagtcttgggtatgtctttattagcagtgtgagaatcgactaatacacttagaaacacatttttttcttcctagataattaaaagaaatcctatgtgagtagttctaatacttataatttcacatgtaaaatttgtgtatttggtcaatatataaatttcaaactaatgtttctataattagtaaggyacacttgcagcagcttgttttcctccagatgatcatccagttatcttaatgtcactaagagaatacctttgcctatgaagagtatggaaacattttttcccatattttcctcaatgaccatataaccagagccca

SEQ ID NO: 370520 - DNA, 577 bp, Homo sapiens
ggacccattgggaggtaattgaatcatggagatggttacctccatgctcttctcatgaaagtgaatgagttctcacgagatcagatggttttataaggggctcttcttttccttcactctgcacttctccttgctgctgccatgtaaagaaagatgtgttggcttccctttctgccataattgtaagtttcctgaggcctccccagacctgaagaactgtcagtcaattaaacctctttcatttataaattacccagtcttgggtatgtctttattagcagtgtgagaatcgactaatacacttagaaacacatttttttcttcctagataattaaaagaaatcctatgtgagtagttctaatacttataatttcacatgtaaaatttgtgtatttggtcaatatataaatttcaaactaatgtttctataattagtaaggcacacttgcagcagcttgttttcctccagatgatcatccmgttatcttaatgtcactaagagaatacctttgcctatgaagagtatggaaacattttttcccatattttcctcaatgaccatataaccagagccca

SEQ ID NO: 370521 - DNA, 407 bp, Homo sapiens
ctatccaaaagcacatgcattgttctaagtcctctgccatgccrggaaagcctgggtgcacccattcagcataggctccaggcacagccctggcatctgatccccttttctcccttcaaggccaaggaaaaacgaggctggaccctgaacagcgcgggctacctgctgggcccacgtaagtgactgacagcatggcctccccactcctgaccccacctgcccctcgctttgaaccctggctcctgcccctccgcctgcggctgggcagaccctctggcctccctcttgacctcattgcccgtctccattgctctgcacacttgatctgtgtacggttctttccagaagcttctcctgccccggctctgcgccctgtcccggggtgagattcccaccctgggctttgc

SEQ ID NO: 370522 - DNA, 602 bp, Homo sapiens
aaaggcatttacataaaaaagtagaagtataatcatctctgcaatccatacataattatataatggtcatgaccatgccatagatgatatagatggattcacatgccaatctgaacttagaaaacaagtttttttgcagaaaggaaaaggtgttcaagatgatactgctcagagctggcagatgactttgaatctactccccaaatttaatatctcagatgttgatgtgggaggagcacagtgaaatttttagcactcagcaactttgaagaatgaagttctcrgaatgattaagcattctaattaatatatatggcatagatatcatgtgtggaataccagttttttagagaactgaaatagtatagaatctatttttaagtaatatcaaataatttagtatttatttgattactcagaagacacatgaggttctcaaagaatctgcataaataaattttagttattattctgaagatttagaaaaacatagtttaaaaaatattttcagtaattaaaaggtgtcattttttatggtataatgcagtccacagctcacattctaacagtgtctcttacttgctaaatattataagcaattt

SEQ ID NO: 370523 - DNA, 480 bp, Homo sapiens
gttggcattgactgcctgcagcttttccaggttcacagtgcaagctgtacatgcatctaccattctggrgttggaggagagtagccctcttctcacagctccaccaggcagtgcccactggggactctaagtgggggctccaaccccacatttcccttgtgcactttcctagtagaagttcctcatgagggttccattcctgcagcaggcttctgctgatcatccatgtgtttctatacatcctctgaaattgagatggaggctcccaaatctcaactcttgccttctgcacacccacaggtctaacatcatatggaagccaccagggcttggggcttgcaccctctgaagccatggcctgagctatattttggccccatttagacacagctggatctggagctgctaggatgcagggcacgatgtcttgaagctgcacagagcagcggggcattgggtctgacccatgaaaccatgttt

SEQ ID NO: 370524 - DNA, 480 bp, Homo sapiens
gttggcattgactgcctgcagcttttccaggttcacagtgcaagctgtacatgcatctaccattctggagttggaggagagtagccctcttctcacagctccaccaggcagtgcccactggggactctawgtgggggctccaaccccacatttcccttgtgcactttcctagtagaagttcctcatgagggttccattcctgcagcaggcttctgctgatcatccatgtgtttctatacatcctctgaaattgagatggaggctcccaaatctcaactcttgccttctgcacacccacaggtctaacatcatatggaagccaccagggcttggggcttgcaccctctgaagccatggcctgagctatattttggccccatttagacacagctggatctggagctgctaggatgcagggcacgatgtcttgaagctgcacagagcagcggggcattgggtctgacccatgaaaccatgttt

SEQ ID NO: 370525 - DNA, 634 bp, Homo sapiens
gttttactttctgtaaaaatggtacctaaagatatgtagaaaaagaaagcattttatttctgaattgcgcttttgatacgagcaaaccctgttatactcctcatcaaatgcattagacataccatcctggcttagcagaggtgctcttgtaatctatgttcaggctcctccttagagtgacatcttctccactagaaactgacataaagagatagaaaataatgtattgttttcattattgtgtacctgatttaagttttatatacaaaaagtgtttagtataatggtctagtaataaatagaatgtcagtgtgtctttgtcttttaacagggaagaggtagatggagagatggagatgtggtacaacactgcttcacaatcttcatgaatttctgtagagcttaaggaaaccatctaggctacagtatttaacaataaagatcaatagcacagagtccctatgatacattgcatagcttcatacaggaagtgttttaacctaaagcttttwaaccaattttataaaattctatgtgcatgcgtactaaattttctccactgtcttggtgttttaaaagactctggtaaatagcatcactgtccaaagaaaataaaaatactggagaaaacaaa

SEQ ID NO: 370526 - DNA, 592 bp, Homo sapiens
tatcttgaaggtttgaagaacaaccaaagaaagggagcaaggactagggctgtgtatcttctgcttacccagctttggagcagagatgtgtcagctggtccaggttggcctccttccagtccagcctccaggagtctgcttgtcacctgtgattattgaggtgcctggcagagagaaggccattccatgagtgccacccakctgacaagaagagtttctgtgcatgccctatggacaaaggcacagctcacctgccttcctcagccttgacaatcccatgcagctgacttggaccctggccttgggaacaatgtttgagagaatacccgtgacctgactgtaggagccagtaggggatccaggtgtgcatagctatctgtagacatctttacacaaatctgttggtaatgctccccacttggtgctcaagagaaccttgggagtctaacaaggaacctggctgccttacctggccacatcctccatgccagatctgcacattgtcttaatccagagcagctctgtgataagaaggaaattgggccctatgtaagagggagctagccctgggcctagcaggcaaaagaatgtg

SEQ ID NO: 370527 - DNA, 592 bp, Homo sapiens
tatcttgaaggtttgaagaacaaccaaagaaagggagcaaggactagggctgtgtatcttctgcttacccagctttggagcagagatgtgtcagctggtccaggttggcctccttccagtccagcctccaggagtctgcttgtcacctgtgattattgaggtgcctggcagagagaaggccattccatgagtgccacccatctgacaagaagagtttctgtgcatgccctatggacaaaggcacagctcacctgccttcctcagccttgacaatcccatgcagctgacttggaccctggccttgggaacaatgtttgagagaatacccgtgacctgactgtaggagccagtaggggatccaggtgtgcatagctrtctgtagacatctttacacaaatctgttggtaatgctccccacttggtgctcaagagaaccttgggagtctaacaaggaacctggctgccttacctggccacatcctccatgccagatctgcacattgtcttaatccagagcagctctgtgataagaaggaaattgggccctatgtaagagggagctagccctgggcctagcaggcaaaagaatgtg

SEQ ID NO: 370528 - DNA, 609 bp, Homo sapiens
aacgttagaagcttaaacaccaaaacctttaccctacctaaagcaatgaacatatagttgaatcaataaaaagaaaatgattkctgtgtaattccaactgtatattagtaattatttcaacaagctttattgactatctaatcaaaaaccatcaatatgtcaaagggtggttgtgctgcatagccttcataatagacagctgaggacacaatctatagccactatgtggcagtagtaacagatcaccacagcccttgatctccaaacacttttgcttccacctgacttcattgaatgtcacatgcaaatatgcatgctaccacatactgtggattattcatccccatttctccatagcaaaaaggttatctatcatttctcaaatatatgaaacatgcaatcccagaatctcacttaaggtttttcttggtgttgcccctaataccacttactgtatgctatggttttaatgtggcccccaaagttcatgtattgaaaatttgatcctctattcagtggtattgggaattgtgatttaatgggaggtttttgagtcatggaacatcacctttataagtgtcttggtgccattatcatgagagtgaattt

SEQ ID NO: 370529 - DNA, 609 bp, Homo sapiens
attgtttaacatttgtgtgtctttatcattagttactgaattttctttattgtttccattcttgtctaattttggaatcaagtttacactggcctcatttaatgagctagagaatcttcccttattgtctgttacatagaataatgtataaattgaaattatttatgtcttgaaaatttagtagaaattatttgtaaaactgtctgggtcagatgtttgatttgtgaaagtatttaaaaatttctgtttcttcagacttcctatctcttaagtttcactaacatttttctgaatattcactcatttcgtcyaatttttagaatttaagtgacaaaagttgttcttaatactcatttttaatcatttgcatgtgtctagttatgtgccctttttgttataaatctatttatatatgcatttttaaaaatttagtcagctagataaatttcgttactctttcacttaccttgttaatttttcaaataaccactattgacttcgttgagtctctgtattctataagtttttattttattttattaaattttgctcatatctttaatatgtttttctttatgatttctgtgatttcctttctgtgacttcctt

SEQ ID NO: 370530 - DNA, 591 bp, Homo sapiens
aacttttgtatcttcagtagagacagggttcaccatgttggccaggctggtctcaaacttttgacctcaagtgatctgcctgcctcggcctcaaacttttgacctcaagtgatctgcctgcctcggcctcaaacttttgacctcaagtgatctgcctgtttcagcctcccaaagtgcagagaatataggtataaaccatgaaggctggcacttttgcctgccttttaatcagacctttaaaaattttcctgtagagtttgagctccttatatattctggttcttaattccttgtcagatagtagtagtttgaaaatatttttcccattctgtcggttgtctcttccttttgttaattgtttcctttgctgtgcagaagttttttaacttgatataatcccatttgtccatttttctggctctgtgtccctactcaaatctcttcttgaattgtartccgaattgtaatccccacatgttgggggagggaccttgtgggaggtgactgaatcatggaggcagttcacctgtgctgttcttgtgatagtgagtgagttctcatgagatctaatggttttgtgaggggtttttc

SEQ ID NO: 370531 - DNA, 442 bp, Homo sapiens
gtctttaggtttttccaaatataagattatatcgtctgcaaacaaggataatttgacttcttcctttccaatttggatgtcctttattgctttctcttgtatgattgcattaactgagacttctaatactatgttgaataactggtgaaastggacatccttgtcttgttccagatattagaggaaagtcaactagtattttaaaatgagcacctgaagctgggcacagtttctcacacctgtagcctcagcactttaggaggccgaggaaagaggattgtttgagcctaggagttgaggaccagcctgggcaacacagtgagactaagtcactacaaacaagacaatattagctaggcatggtggcacgcacttttagtcttagttgcttggaaggcggacatgggaggatcacttgagcccaggaggtggaggctgtggt

SEQ ID NO: 370532 - DNA, 616 bp, Homo sapiens
tgactgactttccaactgagcaaatgtttctcttggcctgaacacagaccttcatttattttcattgtgagtcattttcctagaagtcactgttgcataaatggtgcttccctgacttccgatcaactcagacagccaaaatcagtaagtgtacaaatgagctcaacaggaacattttttcccaagatatttcctgtcaattttctcatcctggaatgtgaaatggtcttttcctaaagatccccagatagtagtcatggaattaatctttattatctgtcagtattgtatttattactcatataaccctgtattccagatctcccttgaatgtggtgggaagatctcattcaccctgtgatctgacagcttstgtttttccttctactcttttcacccaaaggcagaacctgaaaggatgccaagaacttctagagaaatgcagaaaaaaaattaaaaaccactacacaaacttgagggccagacagagatattagtacagccaaaaaacaaaagtattttgttattttattataaacatttcttattacattttatttctcataaaattacagaacaaggggtgagggcaaaagactgaattgttgactaacca

SEQ ID NO: 370533 - DNA, 575 bp, Homo sapiens
gggccttctttcttccagctggtgcatgatcagccatctcagctttcaaattacttcgcaaccacaaaagacacccaaactgggaaggaatggatccaggacccatttgtgaataagccaggttaatcaactttgtctatgctagaagaagatcacctgcacgagatcacaaatgctggtagctttaaaagtatgtttgagacaacttcaaatatccatgcattctagrctaaagaaaaggtgcaatatcctgagactgccacaaaagcagtgaaaagcctgcttccatttccaacaacctctatctttgtaaattaaggttctctgcagtggcagcaaccaaaaagacattatggagtagactagtcataagcacatgcttcagccgtcactgcctcccatcactccagataggaccatctagttcagaaaacaaactcagggttcccactgattctacatcatggtgagttgtataatcatttcattatatattgtaatataagaataatggaaataaagtgtgcaataaatgtaatgcacttgaatcatttcaaaaccttcccaccctcccc

SEQ ID NO: 370534 - DNA, 647 bp, Homo sapiens
ttaaaaataatggataagacaagatacactgggcaaatacaaacgaaggttagctgctgtgcttatacaaatacatctttaaagacataattaaggatgaagtattcttataagggacataattataaaataaactacttaccagaagaatatcacaattcagatctaatctttatctaacagctaaaactcaaaactaaaaacaaagacaaaattacaaatcgatttttataaatctatagycagagacagggatttaaacatctgtccctcagaaattaacataaattgtaataatgaataatagtttgattttgtaaatatatagactcatattcaacaattaaagcttatatttatatctatgtttaaatctctatctttatatctacatatacattccattcaattcaaaggcacatagaagttttattagaattaacagcatacagacccacttaaataaaatgagtaataccttagaaagataacgaacgtgcaaacatgactcaagaagaaaaagaaaaccaaaaaggtataataattaaaggaattaaataaataaactaaaatttggtacaacttaccccttcatacatacacaagcatcaggcacaaattgttttacagataattttatccaaagc

SEQ ID NO: 370535 - DNA, 647 bp, Homo sapiens
ttaaaaataatggataagacaagatacactgggcaaatacaaacgaaggttagctgctgtgcttatacaaatacatctttaaagacataattaaggatgaagtattcttataagggacataattataaaataaactacttaccagaagaatatcacaattcagatctaatctttatctaacagctaaaactcaaaactaaaaacaaagacaaaattacaaatcgatttttataaatctatagccagagacagggatttaaacatctgtccctcagaaattaacataaattgtaataatgaataatagtttgattttgtaaatatatagactcatattcaacaattaaagcttatatttatatctatgtttaaatctctatctttatatctacatatacattccattcaattcaaaggcacatagaagttttattagaattaacagcatacagacccacttaaataaaatgagtaataccttagaaagataacgaacgtgcaaacatgactcaagaagaaaaagaaaaccaaaaaggtataataattaaaggaattaaataaataaactaaaatttggtacaacttaccccttcatacatacacaagcatcaggcacaaattrttttacagataattttatccaaagc

SEQ ID NO: 370536 - DNA, 591 bp, Homo sapiens
acagttgcaggaggacattactgagttacagcaaatgtagaactattactgtatttgagataaatttagccctgggaatcctgaaggccaaggtcaaaaggaaattttgaaaaatcacctggctttcattgcttaataaaagaaagctgtgatattgtgatataataagaaatatattcttgatctccgccccctagtttctgacacagacctcctaggaactttgtaatttcctgagtaataggaacatctgacacagagctcctaaatcccttgaaatttcctgggtgatagccccttttgttctaatgaggtgactcttgctaagctcttggattgcctcaggataaaggctggttgtcaggaaaaccaaccacttgattaaagggttggaaattttagccccaccccaaactctgagaaagaaagagaggctgaagtttgagayattcatcaatggccaatgatttgattgaccatgcctacaaaacagcctccatagaaacgcaaaaggattgggcttgggagcttctggattgctaaatgtggagatttctggagggtggcacacctggagagggcatatcacat

SEQ ID NO: 370537 - DNA, 578 bp, Homo sapiens
ctattatctatgttatttttcaaagatattttatctatgtccatattaactattaatattcatacatgaatgactcacaaaattctattctttatgcagatttatcttctaagattttaggcccatatttcaaaatgtctactcaacatctcatctcaaatgatttatgacaccttagacttgacatatctgaaatcaaactcagatttttacaatcaaaacttggtttattccaaggatttcttatatcactgartagtagcattatccatccagttattccagacagaatcttgagaataattgctgagatatttgttattcttacaatcatttctcagtgtccctttttttctcaatttagagactatatttttaatacttttaaattcacagcaaaattaagagtaaggtacagagatttcccatttatctccctggcccacatggataggttccatgattattaaaattcccctccagggttgtaaatttgttatagttgatggacctatattgacacctccctatcacccaaagaccatagttaacattagggttcactcttggtgttgtat

SEQ ID NO: 370538 - DNA, 474 bp, Homo sapiens
aactactctactttttattgtctctatagttcttacttttccaggatgtcatatggttgkcatcatacatgctgtaacctttatagattgacttattttatttagtaatatgcatttaagtttcctttatgtgttttcatgacttcacagttcttttcttttagcactgaattatttttcattgtctggatatgccacagattatttctctattcacccactgaaggacatcttggttacttccaatatgtggtaattataaataaaaatgctataaacattcatttacaggcttttgagtggacataagttttcaactcttttgagtaaataacaaagcgacgggttgttggatcatagggtaagagtatatttagttttgtaagaaacagacaaaatgtctcccaaagtggctgttcctttgcatccgtgctagcagtcaatgagagttcctgttgctccacatcctcacta

SEQ ID NO: 370539 - DNA, 626 bp, Homo sapiens
aaaaaaaaacttgctcctgtgaactatatttaaaacattgcaccacctattcctgagacatgaagtgcctttcaaggcttatataatattctctgtgatactcactgtctgttttcacttattacaccagtaaacccaaaagggtcatgtttgctaagtggtgacttagtaccataccctgtccttaaacatatcttatatcaaagcaacaaatttgctcaacatggtgtagcaattagttgtaataggaatagatgagacaaaagagtgttttgaatggtttaattttgttttgctggggtgggaagaatagaaataaaatatttggttttggacatattgagtttgcaagtgctatatgacagaatgaaagaagacattatatttaatattagaaaaaaagatcaaataatcaggagaggtatkcaaaaaaataaatgagttgaagcatagatagaaatatttatctctccaaagactgttttcttaatttcgaagtaaaaatcaacattgtttttactccagccaaatagacactacacaaaggataaaaactcaccatagagaattaaaatgaaagcattagaaatatcctttcctttcccaccttttctagcgatagtgac

SEQ ID NO: 370540 - DNA, 633 bp, Homo sapiens
caaaattgttaacaatggataaactaggatttccacacacacagacacacacacacacaggcacacacgcatacacacagggataatcaatactgccaaatgaagttaagaggtcaggtagatttaggattaaaaataattcatgaratctggtaattactaaataataagtgatcattgaaagaaaacgtttattagaacagtgtttctagaaattagattatgacagttggatgagatgatgggagttgaataaatgaaggttatgatgtcaattttcaataatattggttctttctttctagaatatgcttctcctattgctcttcctaggaaagttttactcatatcaaaactcagaggaaaatggagtgaagaatatacgtgtccctgatatatgtatacgtgtgtatgtgtgtgtttgtatatatgtgtatgtgtgtgtatacatacacatgtatatatgtatatgtatttgtatacacatatgtatatttcactggtatgtaaccatatatatctagattaatctagacaaaagctcatactgatgtctcaatctgcaatacattacctcatagttcattccacccttctcctctctcttatctgtaaccttccactcaaatagtg

SEQ ID NO: 370541 - DNA, 633 bp, Homo sapiens
caaaattgttaacaatggataaactaggatttccacacacacagacacacacacacacaggcacacacgcatacacacagggataatcaatactgccaaatgaagttaagaggtcaggtagatttaggattaaaaataattcatgagatctggtaattactaaataataagtgatcattgaaagaaaacgtttattagaacagtgtttctagaaattagattatgacagttggatgagatgatgggagktgaataaatgaaggttatgatgtcaattttcaataatattggttctttctttctagaatatgcttctcctattgctcttcctaggaaagttttactcatatcaaaactcagaggaaaatggagtgaagaatatacgtgtccctgatatatgtatacgtgtgtatgtgtgtgtttgtatatatgtgtatgtgtgtgtatacatacacatgtatatatgtatatgtatttgtatacacatatgtatatttcactggtatgtaaccatatatatctagattaatctagacaaaagctcatactgatgtctcaatctgcaatacattacctcatagttcattccacccttctcctctctcttatctgtaaccttccactcaaatagtg

SEQ ID NO: 370542 - DNA, 633 bp, Homo sapiens
caaaattgttaacaatggataaactaggatttccacacacacagacacacacacacacaggcacacacgcatacacacagggataatcaatactgccaaatgaagttaagaggtcaggtagatttaggattaaaaataattcatgagatctggtaattactaaataataagtgatcattgaaagaaaacgtttattagaacagtgtttctagaaattagattatgacagttggatgagatgatgggagttgaataaatgaaggttatgatgtcaattttcaataatattggttctttctttctagaatatgcttctcctattgctcttcctaggaaagttttactcatatcaaaactcagaggaaaatggagtgaagaatatacgtgtccctgatatatgtatacgtgtgtatgtgtgtgtttgtatatatgtgtatgtgtgtgtatacatacacatgtatatatgtatatgtatttgtatacacatatgtatatttcactkgtatgtaaccatatatatctagattaatctagacaaaagctcatactgatgtctcaatctgcaatacattacctcatagttcattccacccttctcctctctcttatctgtaaccttccactcaaatagtg

SEQ ID NO: 370543 - DNA, 620 bp, Homo sapiens
gttttaacttcagacagatacataaatatgtcagttatttgcacactgactgttccaaatctcaagtcctgaaaagtattaacctttgattcatcttgatttctgcaaagaatgtaaataactttagaaagaagacataccacactgatcaaaagttaataaattaactaaaattttttctaaccttaaagtaactgaattattacctattaaagataggaatcatgataaaaaaaataaatgaatgctttctgcaatccaaaactgaaaaattaagtaagttatttaaaagaaacctcttctaaaaaaacttttattttcaatcaaatagctcagtgagcttctcaaaaaatatgtatcatctctatctgtgattttggttgcatttttgcctttgtatgcatgaaattctatttacttacattaagttaagcttcttgaatttgtctctttactaccatttttggctgaaaataatacacagacttcatttattcttggatgattataataatgataagcagatagcaattamaaatgaaagaaaacattctcaattattattactaatgcactgaatttacattacattacaaataacatttttacaagatttactt

SEQ ID NO: 370544 - DNA, 585 bp, Homo sapiens
tcaatttggtggtttcatattgtgtgtttaagaagtgttggtccagaaaatcaggccaatgataaaataatttaacacttaatgattgcctttcaatatgtatttaraatgtatacaactctaaaatagaaaaattgcatcgtttccatcaggaattaaaactcatttcctagtagcatccacaacagtaaattctcaatttgctggaaccaaaatttccggaaaccaaattttatttcttagcactcagcattaggatagtcatgcacatcaaaagaaaatgggattagtccaaaaactgtttagtgtttaactgtcttcaaaaacatttagccttctgatcagatctatatgtacatggttatataatgaaaacaactgctcagtacactcccttttcctccccaataaactaagaaaattgatattaggcacgtatcataataaaatggacatgagaaacaaaaaatagaaaacctcaaagttatacacctactgtgtgcaataaagtgtgctaagtatttttaggcgttttagacttcagagaatatagatttttttctcaagcaacctaagagattagat

SEQ ID NO: 370545 - DNA, 561 bp, Homo sapiens
ctcaaatttaacagtgtatattttattcttgtgtttattttatataaaatgttgtattttctacattgatttttttttgctgagatattatttgttttatttatacgttcactatctrtcttactccaatagggtggaagctctaagtgttcaaatgcctttgtctgttaattaactgttaaatctctggtgccagaataatgcctgacagaaattaagtattcaacaaatttggattcatatacgttgttggtaaatctgaaaacttggttgccagtaataaatcatttctaagtgactaaatgtttactatgcaaacttacttatacccaatgtttgcaacaggagtaatttttgaataaggaactacttctgttatggcatttaaataaatgttgataaaagaatgatggaagaaagccagtgcaatctacttttagtttgcatattcccctgttattctgtgttaattatttgtacaaatacagttttaaactcctacctaataggacattttctgatgagaaagaacatctattacaaaagagaggagagcagttg

SEQ ID NO: 370546 - DNA, 561 bp, Homo sapiens
ctcaaatttaacagtgtatattttattcttgtgtttattttatataaaatgttgtattttctacattgatttttttttgctgagatattatttgttttatttatacgttcactatctatcttactccaatagggtggaagctctaagtgttcaaatgcctttgtctgttaattaactgttaaatctctggtgccagaataatgcctgacagaaattaagtattcaacaaatttggattcatatacgttgttggtaaatctgaaaacttggttgccagtaataaatcatttctaagtgaytaaatgtttactatgcaaacttacttatacccaatgtttgcaacaggagtaatttttgaataaggaactacttctgttatggcatttaaataaatgttgataaaagaatgatggaagaaagccagtgcaatctacttttagtttgcatattcccctgttattctgtgttaattatttgtacaaatacagttttaaactcctacctaataggacattttctgatgagaaagaacatctattacaaaagagaggagagcagttg

SEQ ID NO: 370547 - DNA, 561 bp, Homo sapiens
ctcaaatttaacagtgtatattttattcttgtgtttattttatataaaatgttgtattttctacattgatttttttttgctgagatattatttgttttatttatacgttcactatctatcttactccaatagggtggaagctctaagtgttcaaatgcctttgtctgttaattaactgttaaatctctggtgccagaataatgcctgacagaaattaagtattcaacaaatttggattcatatacgttgttggtaaatctgaaaacttggttgccagtaataaatcatttctaagtgactaaatgtttactatgcaaacttacttatacccaatgtttgcaacaggagtaatttttgaataaggaactacttctgttatggcatttaaataaatgttgataaaagaatgatggaagaaagccagtgcaatctacttttagtttgcatattcccctgttattctgtgttaattatttgtacaaayacagttttaaactcctacctaataggacattttctgatgagaaagaacatctattacaaaagagaggagagcagttg

SEQ ID NO: 370548 - DNA, 627 bp, Homo sapiens
gtctgatgtgggatgtaatggttaggattcattcaaataatcagaactattatcatcaatatgaaataagagatttattgtggagattmgcccttatgcaattgtgcgaactggtgaagaaatttagggaaagctgttgcatctttgtctaatggagggtctgacgtttctaaaggtcaagaaaatcagtcacaggaagaaatggtgtacatgagccacagaagtgtgaggacaaactgattggtgtgaggataaactcaaagcctcatttgtcttcatggtctcccctgcagatactggtggtgatgaacagaagctagtacccttggctgtagaggtacacatgagcctatcctaggttcctaaaagttaaatgggatatcttggaatgtgaggagctacagggacagttgctgcactatccctagaaagcaaaccaacagtggagaacttattctctgtaagctgcaatagtgtatggttccccattctgaccttcagtgtataaggggttctgctgcactttagccataaaaaggctcatgctaatttcgcatgaaccaatcgtaacctggaatcaaatagagaaggaatttctaggaaacagttccagcttagataagttca

SEQ ID NO: 370549 - DNA, 553 bp, Homo sapiens
tattttgtcaaagatagagagatgaaaaagaaacctagaagaatgtccttagtcaatgtggaacatttgagaaagatatagtgatgacaacaacagtaaaaaactatcatttattaagagggagacagagagaattggtaaattttaacaatcagaaaagctatgaatagaataatttatcttaatttaagattttaatattaatggctatctatttcagacagagtatttttggagtttcccttagagatttatgaatttatggaattatcctttgaaaattttagtcagagttagctgtactgaaagacaacatgtcaaaaaacrtgaaactttatgttagttattgcttattttcttcagatttcaactgggattcagagtccagatgattgccagcatgcctagaatgccaatatattactgacagtgacaatctccagtgaagaaatatctctttgcatctttttacatgtccattaatttacagaataagtgtagatgggggcctatcttgttctagaccccagacaggtgttggatacaaaaagcc

SEQ ID NO: 370550 - DNA, 483 bp, Homo sapiens
tttattcctttgaagcatggcttgggcctataagaacaaaactcaaatcaatggcaacatagattcagtgttacaataactgaacaagtggttatcatattttacctcttatatacaaatctgactccacaaaatgcatattataatttttataattattatgctttatatgactgtatagttcattgtaatcyacgcttcttagttcttcgtgtggtattttgaggaacaagctagatgtaaaattgatatcagattctcaaaataaaaattattgttctacttcaacgtaataatcttggttgctcacttgatttcgtcttacctcccacagagtagtcagaattgagcatcaccattcctttaagtcaacaacatataacagacataattttgatttcaatttttatagataacagaaagagaagaattttgtttggaaaacgaaataagtggtgttaatattttctaagaagaggagag

SEQ ID NO: 370551 - DNA, 652 bp, Homo sapiens
atacagcataggattgactgcctactctgagatatattattagctttgtgactttggactagttacttagcttttctgtaccactgtatctttttccataaaataaaaataatgatatctactaaatggaactattgagaggattaatagaggtaatacacatcaagtaatcgtaactgtcactataagtatttgttatttttaaatatgtgtaaagtggaagggatcctcttttaaggagtgggaaaaacagtgtgcaggagggctctgagaaaagagagggcttggagcttttgaagacctgaaagacaggtcatgggaagacmagatacctatacggatagtaagtagggttagctcggggaggacctttttaggtaaggtaagggtttggaatattgtccaaatggcagtagcaaggcattaaaaatacttatcaagaaagtttaaaaaatcagatttgaattttaaaatggtcattttcaccataactgcaaagcctgtttggactaggtcagtggagatttgagtgaggacccccataaggacatttttgtgatagcccaggctagacatcatgataggttggactatggtatggtagatgagatggacatgagtagaaatatcttgtccagcttattaaaatcaa

SEQ ID NO: 370552 - DNA, 403 bp, Homo sapiens
ttcaaagggtaagctgcatgtttattgttgtcataaaagctgttaaaattttcaggataacttctggaggactttcatgacaccagctatatactgacattaacatctggcctgtaccaccctgaacagcagcatgtgtactgatgaaaggcaggtctctagagctaaaatgtatggctctaacatccaccccacattactaacttctgtgtgctcatgggttttatggtaacgcaaatttggttaagtcaatacatgtaaagaacacattggccctggttaatcaaagcattaaaatagtaatgttatttttggtacaccctatgrttatggttgtacccatagctttgctttctaccaatgtaactgggtttacctggaaattactgaaattgatcccgtg

SEQ ID NO: 370553 - DNA, 403 bp, Homo sapiens
ttcaaagggtaagctgcatgtttattgttgtcataaaagctgttaaaattttcaggataacttctggaggactttcatgacaccagctatatactgacattaacatctggcctgtaccaccctgaacagcagcatgtgtactgatgaaaggcaggtctctagagctaaaatgtatggctctaacatccaccccacattactaacttctgtgtgctcatgggttttatggtaacgcaaatttggttaagtcaatacatgtaaagaacacattggccctggttaatcaaagcattaaaatagtaatgttatttttggtacaccctatggttatggttgtacccatagctttrctttctaccaatgtaactgggtttacctggaaattactgaaattgatcccgtg

SEQ ID NO: 370554 - DNA, 629 bp, Homo sapiens
ccaaaccaagaagcacctaatctgctgaccctaaagaatcaagcactaaaacatggatattgtttgaggatattaaattcttgtatggttgattattcacaatcctcatagagattgccycaaattcttccttattatattttacctttcatttacagaagccatagctcactggcatagttacttcatatcccaatttaaaattaccaaagatacaaatattactgattttcttttatccattaattagttcacgttgattgagatgtccatctattgaaatgtaggatatgctgggtgcggcacatcaggtagtaaacactacatgactgccttttaaactgtaggaaaattgtgttccacaaaagggcagataattgagggaaaaatgtatgctcatttttttcaacaatattatattaaaactaccctctcactgttttcctaccaaaaagtaaagctaacaatttcaaaattatttaatagctcatattctttgagcacaatgcaaaagctaaataagcaagctatattataagaatatttcagttaaaaatatttagttgcatagactataatgtggaaaatgctactatatcattattttgttaaacacaaattcaaactgt

SEQ ID NO: 370555 - DNA, 588 bp, Homo sapiens
caggaaactttctcttttttccacttattgtactaagtggctagagtgcaggagtcatgtgttctttctaaaatacagttctgatcatgtcactccaacgtaatgatcttctgtaaccccctcatccctaaagagggaagtctatatttctaaaagtgaccctttatagcttattttccactgatccatttcaagaactctacacatgcccacactggaccaccacccacgtatccaaatgtamcctgtccttgcctttcctgttagaatagccttcatctgaaatgcactcccagctgtcccagctgcagtttttgacagccaacccaacattccaggtcctatgtaaaagctacttattcagcagagttgtctttaataatgattgcttgggttcaaatcccatcacttaccaactgttgactttgggaaaatttctcaacttccctgtgtcttagttccctcacctataaaataatggtaatgctagacccgagctcataaagctgtgagggttcaataagctaatctgtagaggagcttccacctcctccactgctatcagcaaaccccactactcactgcagt

SEQ ID NO: 370556 - DNA, 469 bp, Homo sapiens
tcaacacacacagtaaacgctcaataaatggtcacccctcttaagctcgcacttccagcaattggaagaggccaatgggaaagtatacttcacccctgccccctaatgtaggtgctctgagacttggtcataagcccaagtagaagagaacctgaacacctttcaatttatctttggtgtaaagggcaacatgtgtttttgttgtaagtgattagaaggcaggagatatacctttggggactgagtacattacagaaccgtgaaaggatccagaagcactgagcagtggagctggcactggcacctgctgcttgcttctgtcattaactttcgttgctttctgtctttggagtggaggtgaagaaactctcttgtcagcaccacctctcccagactcccatcaacytgggggagcacctacactggggaaaacattcttggactgctgatgacccaaaccactgtgcgc

SEQ ID NO: 370557 - DNA, 637 bp, Homo sapiens
ttatcattcacttattctttgcaaagtatatttgttgaacaccttctatgtgctgggcactgtccttggtgctgaagatactgtgtgamtaacacaaagtccctcctttcggggagcttaaacgtgtagatgtacaaatattatcttaagattattttaggtagtgatacatgaatttaaacaaaaacctggatgatgagaggtagttacagtaggtgggaaagggaacagtttagattgagtggtcaaggaaagcctccctggggaggcggtctgaggtaacacgtggaaaagtcatcatgcagacatgaggagaagagtggcttgggtgggaggaattgctaacataaagtatatcagacagcaagcagtagagaaatgacagtgtaagcaagggagagttctgtacaggatgatgctgaaaggatacacaaggatagaagctgcagatcttgagagccatgacacagagctcagtttaaagtttggcttttcatggaatagtatacagccatgaaaaatgaaatcatgtcctttgcaacaacaatatggatacagctggaggccattatccaaagtgaattagtgcaagaacagaaaaccagatgccacatgttcttacttataagtgggaact

SEQ ID NO: 370558 - DNA, 487 bp, Homo sapiens
tgcaccattacttgagatggcaaagcttccctttgagtttggctttactatcttcgtgtcatagatgaaaaatggggctcagaaaagctaagcaactttgcttcaaattacctttctaatgagtagaagaagcagagtcaaagtcagtgactcaaaaaactatcttctaaactgctcagtactgccttctgcccacggatttcttgcatccttggccagccagtagatggaaatcagatgaggtggcattcactgggtggagacagaaagacttcttggcagtgaaggctggtgggtgggcttgtcatagaacaaaaaagaaaggaacagcttggaagagtaacacttttctagtgaatcacattaaataatcagcakggcttatacccagtgtcagcctgaactgagattgacagctaataaaaagcacagtaattacaggaaaacatcagattggaaagtacagagattcttgaaacacctgaag

SEQ ID NO: 370559 - DNA, 354 bp, Homo sapiens
tttgctccagactaacaggcagctcccagagcaagaccggtctcattactgagctaatggacattatgctctgaggtacttttccctctgccaaatatatcagaattttaaaaacggaagcctgrtattgccatgctgcaaatgtttacaaggacatcgctgagtgttttaggtgtcaagtttaatttcagttggcctggcctattctcttaaggaaggctccagagcagtcagccaggtcacagggagaattccttctgctcttgctcttcaggctgtgacagaaatcagaccttgattccctgagcacgcttcccaagaagggattgctcctgtcaccacagcccaaaggag

SEQ ID NO: 370560 - DNA, 649 bp, Homo sapiens
tgatcagtgtttaaatgtttaagtgtatgttaccacaactcaatttcttatgacagcccccgtttaacaactctttcttaacgagaacacttgagtaactagaaattctccttgttccccaaacaggctagataatgagtagcttattaaatataaataaacattcacatgtatttatctatctattagtcaattggttgattgactgaacttagggtgaaagcttgccttcaagtagactaacaccaacatcttgattgaatatctttccgtaagaagggtacactcatttgggtatgggctaatgaccagaggaaaagagccacaggaatgcttatatttaactgaacatttgcttcattttacatatcagaaaatttttactaggagaccaaaaattsacaaaatttaaggaatgaactggtgcaccccaccattcattaattttcccattcagacatctgtaatgagcttctaccacatgctacaccttaggataactgtggagacataacaccaaggtctaatttgatcctgtgagaatgactcagcctaccatgctacactactgtggatattaatttcaattcttcgggggttgctgcttttacttttccttcagtacttacggcatgcctcattagccagt

SEQ ID NO: 370561 - DNA, 613 bp, Homo sapiens
tattccacagtacaatcataattgatgttaatgctcatgctgaatttgtgacaatgaaagatgctcaagggacttctgcatcatcaaagatgatgatcagtgtttaaatgtttaagtgtatgttaccacaactcaatttcttatgacagcccccgtttaacaactctttcttaacgagaacacttgagtaactagaaattctccttgttccccaaacaggctagataatgagtagcttattaaatataaataaacattcacatgtatttatctatctattagtcaattggttgattgactgaacttagggtgaaagcttgccttcaagtagactaacaccaacatcttgattgaatatctttccgtaagaagggtacactcatttgggtatgggctaatgaccagaggaaaagagccacaggaatgcttatatttaactgaacatttgcttcattttacatatcagaaaatttttactaggagaccaaaaattcacaaaatttaaggaatgaactggtgcaccccaccattcattaattttcccattcagacatctgtaatgagcttctaccayatgctacaccttaggataactgtggagacataacaccaa

SEQ ID NO: 370562 - DNA, 561 bp, Homo sapiens
gtgttggaataaagctgtggtcctggcttctgggaagctcccaagcttccaggcccacactgaccaagcagccctttcctctgctgcctggggcctggttgcagcttgttatctgggctctctcagatctgtctccttaacagtgacccttttattcatgtgtatattctccagtagatataactgaggctgaattttgaagttaaaatgtgaagcaaacccatgcgggcttaatctgccagcatcagcacaggacacctgctcatggcaccccaatgactacccccatycggcccctttgagaaactgttcttcctgctttgtagctcacactcttctagttggcgctacaatgacccagttctaccaggcccctgtgctcagcctcacccttccctgtggtgctggatatgataataatttaaaaaaacaatataataaagtgcaacagatagagaaaaaactgcccactctcaatctaactgtgaaggctcctgcctccttcagtgccaagatttctgagctgtccgagatttcacctctgctctgacacagttcctt

SEQ ID NO: 370563 - DNA, 561 bp, Homo sapiens
gtgttggaataaagctgtggtcctggcttctgggaagctcccaagcttccaggcccacactgaccaagcagccctttcctctgctgcctggggcctggttgcagcttgttatctgggctctctcagatctgtctccttaacagtgacccttttattcatgtgtatattctccagtagatataactgaggctgaattttgaagttaaaatgtgaagcaaacccatgcgggcttaatctgccagcatcagcacaggacacctgctcatggcaccccaatgactacccccattcggcccctttgagaaactgttcttcctgctttgtagctcacactcttctagttggcgctacaatgacccagttctaccaggcccctgtgctcagcctcacccttccctgtggtgctggatatgataataatttwaaaaaacaatataataaagtgcaacagatagagaaaaaactgcccactctcaatctaactgtgaaggctcctgcctccttcagtgccaagatttctgagctgtccgagatttcacctctgctctgacacagttcctt

SEQ ID NO: 370564 - DNA, 591 bp, Homo sapiens
ccagtaaaaacaaataagagttatgcataaagtgctgcaggaacagaaaggaagcagtgaatgactgaggaaacaaagttatattacagtctttgtgaatagatcatttcagtctgagtaactgacaaaactataatttccatatttcatctggaaatcatggcaactagataatattactattttaaaattacattaagtctgagaaggaggttgatttgttatatcaagtgtatagatataattcttgtcatttgtcaattggtttttctcaaataggcctatgtagttagcttttggtctttaacggctcttgcgtctatactggatatactcttctagagaatcactatgcatggcttggcaatagtttttctttggtaaattaatctttcttctatgagtcaatcattaagatatatttaaatgatttaagttagatttggaaggagtttttaggaatagacaatagcaataggatgtattttgtatattatgwttagtaggtttgtccttaggtttctgaagaatgttatttaaaagcttatttctgtttcaaataattgcttatctataactgtgtttatgaag

SEQ ID NO: 370565 - DNA, 531 bp, Homo sapiens
cccactgggcacgcattatcattgataacatcttatcaggaggcagggtttgagagcagacaacgcagtctgcctaaatttactaggcaggaatttcctaatcctaataggcctgggagcgctacaggagactgggcttatttcatcccttatctgcaaccgtataagacagacattcccagagtggccattatagagacctctccctaggaatgcattctctttctcagggctgttccttgctgagaaaaacaattcagcaatatttctcctattcacttttgtaaggagaaaaatatgactctgttctgtctggccccttaggcagtcaggccctagtcaggagataacaaggttatctcccttsttccctgaaaatcgcagccattgtattccttttggatgcccagatttcatattgttcaaacacacatgctctacaaacaatttgtgcagatagcacaatcatctcaggatcctgaagcaacatacatcctcagtttaccaagatgatgggattaagagattaaa

SEQ ID NO: 370566 - DNA, 657 bp, Homo sapiens
aatatctaatgatcgtttaaaaaatacttctattgattatacaggaaagattaaggaaactaatttttttattgctcttaattgctatttagtttttaataaacattcctcactaatacctcatcttaccctaccacctttatttttaagatttaatgatgactattgtaatcttattcaataagaatgattgattttctggcagtttactggggcagtgacttaacctatctctagctcaattgtataataatacctattttctattagagtatatgtgtatagtaaagtttgctgagtatcagctgtattcacagyactatgttagttgctttaggagtagcaaaatttgaagacctggtgttagccccttaaaaatttatagtgtcattggtgacagttgaagagcacatttataaaacattacttgttatgtgaaatgtctggatcctccaggtaattttctttcctttgtgaacatataactcttgccatgtacctttattatacttttagtattgcactgtaattgtttatatttgtgatgtttcctcaaggctttgagcttcttgaatgcgaggtgtaaggaccatgttatattcatcttacactccacagaacttaattacagtacctggtttatttgtagatgctcat

SEQ ID NO: 370567 - DNA, 657 bp, Homo sapiens
aatatctaatgatcgtttaaaaaatacttctattgattatacaggaaagattaaggaaactaatttttttattgctcttaattgctatttagtttttaataaacattcctcactaatacctcatcttaccctaccacctttatttttaagatttaatgatgactattgtaatcttattcaataagaatgattgattttctggcagtttactggggcagtgacttaacctatctctagctcaattgtataataatacctattttctattagagtatatgtgtatagtaaagtttgctgagtatcagctgtattcacagcactatgttagttgctttaggagtagcaaaatttgaagacctggtgttagccccttaaaaatttatagtgtcattggtgacagttgaagagcacatttataaaacattacttgttatgtgaaatgtctggatcctccaggtaattttctttcctttgtgaacatataactcttgccatgtacctttattatacttttagtattgcactgtaattgtttatatttgtgatgtttcctcaaggctttgagcttcttgaatgygaggtgtaaggaccatgttatattcatcttacactccacagaacttaattacagtacctggtttatttgtagatgctcat

SEQ ID NO: 370568 - DNA, 507 bp, Homo sapiens
atgtttattgatttgcatgtattgaaccattattgcatatctgggatgaatcccacttgatcatgatggaatggtctttttttaatgtgctgtggaattcagtttgctagtattttgtggaggatttctgcatttatgttcatcagagatattggcctttagattttttatgtgtgtgtgtggtggccttgtctggttttgttatcagggtaatgctagcctcatagatgaatttggaagtattccctccttcagttttttgaaatagtttgagtagacttggtattagttctttaaatgtttggcagaattcagtagtgaatccatcaggtcctgagcttttctttgatgggagattttttactactattttgatcttgttactcattattggtctgtttagattttctgtttctttctggttcaatgatggtaggttgtatgtgtccaggattttatatgtttcttctagattttccagttttttyggcatgtacttgttcacga

SEQ ID NO: 370569 - DNA, 570 bp, Homo sapiens
ctaaagtcttagtgtttttctgggggaagcaggaatacagttggctttaaatctcttctctatacttacctaagcttttgaaaatgttttctacaatgagtatgtcttactttagttattttggggagaaattggattatgcagcaaaaatctgtattgaaagactccacctagaagaatcttcatatattcctttccaaataggagaaacactgcagcaacactgtttattactgatgtccaactttaagaaaaagtaacccggatagcattacagcaacataatgtaataaagtgctttttcagtatgtgtttaatgatatcgctgacatatgacaacaatgctatttttaaaacaactatatgtaaccttttagacattttacaatgattttacttacaatcaagtgacaaaaytggtataattattgcatttggcagtatagctgcatttgaggtaagttcatattaaagcatatcttgtaatttcatttgtgtccattagagcttcttaaaaaaatgactgactttatgtattaaggtactctagtgactgccattaaatgcact

SEQ ID NO: 370570 - DNA, 510 bp, Homo sapiens
tactcagtttccccctccatgttgctaggagaacattaccacataactttaaaaatagttaacagagcacagatctaagtattaaaattatgtaaaaagaaaaaacttaggattttgaaaactgtacacatttattgggaagcaaatggaaaatttccaaggtttcaatgagattcttaaatgtataatgagcatatgagttcagttaaattgtattttaaggacagaaagtataaaacaatctactaaggttatagttataattatttcagaaaatagctgtgttcaactatttaattagtggtggtttattagtatttccagtctatctatatcctttatataaaatgcaatttgtatttctctaattatattaatagtgtaagtcaractgtggtaggcagaatgtaagacagcttctaagattccctcaacctgggataaatgccctatataatacctatcccttgagtctggacaagacctgtgaatatgatgcactatcactcc

SEQ ID NO: 370571 - DNA, 542 bp, Homo sapiens
aaatccaaaaagtacattaaaactatattttacatggtatcaaaagaaaaccatcaacacaccaagaatgaataaatgcttgtttcccgttacgcaaatattcctaaatgggcaaacarttaatgggacaagttttaaatttactataacaggattttgttactttgctacttaaaaggtaattccaactccttgtttttaggcagaatttctttaacttctttaatatggatctctcaagagaatcatcacatgctttcaagtggaaaaggaggactggcatcctccttctgtgatacataggctgaagaacaaatcattaagcctctcactgtgcttaaatgaaatcactcttgggagaacatagtgaagttcagtcagatgaactctctaggacactatttacttgtattaaaaacgatcataaacaacattccttttaaaataaattatctaaagtttgaaaaagtatttttaacaaaagtagtcactttcagtcatggtaatcatacaaatgtttaacatatttgtacaacaaaaat

SEQ ID NO: 370572 - DNA, 542 bp, Homo sapiens
aaatccaaaaagtacattaaaactatattttacatggtatcaaaagaaaaccatcaacacaccaagaatgaataaatgcttgtttcccgttacgcaaatattcctaaatgggcaaacagttaatgggacaagttttaaatttactataacaggattttgttactttgctacttaaaaggtaattccaactccttgtttttaggcagaatttctttaacttctttaatatggatctctcaagagaatcatcacatgctttcaagtggaaaaggaggactggcatcctccttctgwgatacataggctgaagaacaaatcattaagcctctcactgtgcttaaatgaaatcactcttgggagaacatagtgaagttcagtcagatgaactctctaggacactatttacttgtattaaaaacgatcataaacaacattccttttaaaataaattatctaaagtttgaaaaagtatttttaacaaaagtagtcactttcagtcatggtaatcatacaaatgtttaacatatttgtacaacaaaaat

SEQ ID NO: 370573 - DNA, 645 bp, Homo sapiens
tcctgtaacaatagctgagtcttgaccaatcccaggagccatacttcactcttatactgctgagtgctcaaactgtgttcaaataaggcaaacgctgagctgtaaccaatccagttgttcctgttcccatttccaatttctgtacttcctttcccttttttttctctataaatattcttccaccacatggctgcactggagtctctcagaatctactgtgattctgggggctgcctgattcatgaatcgctcattgctcaattaaactcctttaaatttaatttggctgaagtttttcttttaatacactataaacataatttgatgatatagataatgtctgttcataaaagtatgttgtacactatgtaattcataatttccaggttctgtttactgttcagaacaatcagatattatatttacataagcttttgccaataaacattctttgaatgccatttatcataaggtctcatttgataactcaaagtgtctttttcacttgaataccaggtcagcatcacagcagttatttaaatctgcactgaataagcatcaagtcaatcactgctgaaatcaagactcaaaaaaaraagctactctaaagacatactactgcattcctataaataacagtaacaa

SEQ ID NO: 370574 - DNA, 535 bp, Homo sapiens
cttgtaccgagcattcttctatgtgcttcaggtatataaatgcatttagtcctcccaataaccccatgacataggttcttttatcattcccctttacagatgcaaaaattgaggtacaaggcacttcagtaacttacccaaggtcatgcctccattaagtgggaaaggcaggttagaagccaaagggtctgtctytggagtgtctgttctttgtcaccatgtacttcttggcagaaatttaatcctataggcaacaatttctattaggatattcattatataatattcgatacacaccaaataatgtgatgagtatgtatattatgaaggaaacataaaaagaacattatcactacttttgaagctacctgagtatttcttctattgccttgaatttttttatttaccattttcttgctttctgaatggttttattacatacagatgtatatataaatactatatcatttagttttgtatatttacaaacattataagcctgttaaaatgttgtatatagtcttctgaaacttgc

SEQ ID NO: 370575 - DNA, 611 bp, Homo sapiens
ataagcttcctcacctgctttgttctcccaagccaactggccttttttcttgcacactgggacctgataaaagcctctgggacttgagatgaaccactagacaataatcagaatggaattttctgggaaatgtggccatatgaaaaaaatgatcackttttcctcacaaggatttgcaaagtggaaagagtaggattttaaaaactgtattttgtagcagagaaaactaaggtttagaaatttgaatgacttccttaacaaatatttattgagaacttgccatgtgctaagcacaatattaagcactgagcttactcggtattagtcggaattctccagagaaacagaaacaataggacactcgcacacaaacacacacacacacacacacacacacacacacacacacatggagctttattatgagaagttggcttatgcaattacggaggccaagacatcccatgatcagcagattgcaagctggggactcaggaaagccagtagggtaaatcagtccaacctgagacccaggggagctgatgatataaatcccagtccaaaagcaggaggagatgagatgagatgtcctaatttaagcactgaggcag

SEQ ID NO: 370576 - DNA, 611 bp, Homo sapiens
ataagcttcctcacctgctttgttctcccaagccaactggccttttttcttgcacactgggacctgataaaagcctctgggacttgagatgaaccactagacaataatcagaatggaattttctgggaaatgtggccatatgaaaaaaatgatcactttttcctcacaaggatttgcaaagtggaaagagtaggattttaaaaactgtattttgtagcagagaaaactaaggtttagaaatttgaatgacttccttaacaaatatttattgagaacttgccatgtgctaagcacaatattaagyactgagcttactcggtattagtcggaattctccagagaaacagaaacaataggacactcgcacacaaacacacacacacacacacacacacacacacacacacacatggagctttattatgagaagttggcttatgcaattacggaggccaagacatcccatgatcagcagattgcaagctggggactcaggaaagccagtagggtaaatcagtccaacctgagacccaggggagctgatgatataaatcccagtccaaaagcaggaggagatgagatgagatgtcctaatttaagcactgaggcag

SEQ ID NO: 370577 - DNA, 611 bp, Homo sapiens
ataagcttcctcacctgctttgttctcccaagccaactggccttttttcttgcacactgggacctgataaaagcctctgggacttgagatgaaccactagacaataatcagaatggaattttctgggaaatgtggccatatgaaaaaaatgatcactttttcctcacaaggatttgcaaagtggaaagagtaggattttaaaaactgtattttgtagcagagaaaactaaggtttagaaatttgaatgacttccttaacaaatatttattgagaacttgccatgtgctaagcacaatattaagcactgagcttactcggtattagtcggaattctccagagaaacagaaacaataggacactcgcacacaaacacacacacacacacacacacacacacacacacacacayggagctttattatgagaagttggcttatgcaattacggaggccaagacatcccatgatcagcagattgcaagctggggactcaggaaagccagtagggtaaatcagtccaacctgagacccaggggagctgatgatataaatcccagtccaaaagcaggaggagatgagatgagatgtcctaatttaagcactgaggcag

SEQ ID NO: 370578 - DNA, 582 bp, Homo sapiens
ggcagggccttgctccaaaatcctagaggcctccgctgtggttcacctatgagggcctgccaaagsgtccaaacagcatccctgcttgccactgacacctcaagcaccattggatctgctgtgtcatatggcccatgtggagagcagcttgcacagcagcctggacctgttgcagagccttctcctgttctggaccccactcaaaactggcagcctttcaggtcactcaataaatgggccggagtaacacaccccagtgaggaatgtgttgcctccaaaatccagttaggcccactgggcattgtgcctctttcttggtggtaggaggggccaaatgcagcaacttatccttcaccttagacgaaatattttgacaggccccacaccactggatccctagaaattttactgaggtagaaggtccctgaattttagttggatttatttcccatcctctggcatgcaaatgtctcaccaataagtctagtgtgtttgccagttcttgctcactggatccaatcagcataatgtcatcaatgtaatgtaccagggtgatatcttatggaagcaaaaaggatcaag

SEQ ID NO: 370579 - DNA, 582 bp, Homo sapiens
ggcagggccttgctccaaaatcctagaggcctccgctgtggttcacctatgagggcctgccaaagcstccaaacagcatccctgcttgccactgacacctcaagcaccattggatctgctgtgtcatatggcccatgtggagagcagcttgcacagcagcctggacctgttgcagagccttctcctgttctggaccccactcaaaactggcagcctttcaggtcactcaataaatgggccggagtaacacaccccagtgaggaatgtgttgcctccaaaatccagttaggcccactgggcattgtgcctctttcttggtggtaggaggggccaaatgcagcaacttatccttcaccttagacgaaatattttgacaggccccacaccactggatccctagaaattttactgaggtagaaggtccctgaattttagttggatttatttcccatcctctggcatgcaaatgtctcaccaataagtctagtgtgtttgccagttcttgctcactggatccaatcagcataatgtcatcaatgtaatgtaccagggtgatatcttatggaagcaaaaaggatcaag

SEQ ID NO: 370580 - DNA, 606 bp, Homo sapiens
atatcaaatagttttaaaagctataattcaacacataaaacaagatcctctaggagtgcagggaataatacacttcttttcacattaaggttagcatacctatgtgctataatcaaatcaagtgaatacttacaaggtcattcatattagtttggctagctgggttaatttcttccaaaaattccaagacataaaatgtgtatctatccataagatggactccaattgcaggatcaggttgatgctatgraaagggggaaaaaaagtatttctaacagtatcattataacaaaatgttttaaatgtaaccaaaatttccttctaatgtattagtctaagaaagaacagatacattcataaagcatttaattggtttcagaaatagctgcacattccaaagacacagtttacaaatggggaaaatgcacataccgagagtgaatcttctcccacttgactactagctagagccattatgttaggagaataaaatcgttcatacatggatgctccttggcaagtatcaataataaacagtagctcattgtagctgaaagaaaaatgataacatctttgacaaggatcatgctgtaaatcatacactaa

SEQ ID NO: 370581 - DNA, 450 bp, Homo sapiens
tatacatttacttcattcattacattttgacatcgcttgttattttatactctaaaatgtatactatgaaaacaaacaaattgaattttctactatgccaattaaaaagagaatgatagactatataaaatagcagatataatatctttaayagggtttctaatattcaattacagaaacctatatttatgctcttccactggctccattattatatcagaaatgagtttccattcacaaaatgtttcaaataccaggcaaacatttttgatgagaaagaagctgaagacattagctagtcccacatttttactacaagaggtggagcagaagattgtgctatttgtatgcaatctagaggcaggttgcctggattcaaatggtaactatgccatgttagtttaggaaaataatttaatatttctatgcttcagtttcctcagccataaa

SEQ ID NO: 370582 - DNA, 553 bp, Homo sapiens
caaaaattagccaggcatggtgatacctgagtaacctcccactcatgctcaggccaaattcttagaaaccattaatataaaactctgtggaatatcttcctccaaagaaatcraattctattcacaaatgttaatttcacttttgtcccagctactcaggagattgaggcaggaggactgcttgtgcccaggaggtccaggctgcagtgagccgagaccgcgccactgcattctagcctgggatacagagcaggaccctgtctcaaaaaaaaaaaaatcttttggcaaggactaaatatagggacacaacactagtcgtgaagagtactttgccactgctctgctcttcagtttgatcataaaagccaactaagacaaaaattaaagggaaaaaatatagaatgaggactgtcacagatgaaatcaaattaattagaagatattaacaaatctcaattaaatgtaattcaacaatacatacattttaaaagcaatataatggtgttcattctcatgaatttgatttaactattacacattaaattgttcaggc

SEQ ID NO: 370583 - DNA, 563 bp, Homo sapiens
aatacctaccccattacagctaaactttactaaaggttgactgaaatgtctatcaagtagaaatctctgccaccttsttttaaaaaatgtgcctattgaattatcaatatctggaaactcatcagaaggatgctgaatccctagcactctgtctgcctcaggactgacttatattgctttaaaatcttgtagcgctttccctaaccatagcaactttaaaactgatgtctagtgaaaaataatacatttttcatttatttttattcaagtgataaggcaagtaatgaaaactaaactttttgaaggtcatgggctaatctcttaatatcagatatgtttttaaattaatataaattaacctcagctttcatattataacttattacagccacttccaaaaatgtcacttatcaaggaataaatgcaagggtaaagctgtttgagaatgacaatcaacattttaataattatcatcaacttttaagtttgaaaatttttggtccacctacaaatttgtcattacatcccttttctgatatgtgaaatttctataatagaaatgg

SEQ ID NO: 370584 - DNA, 563 bp, Homo sapiens
aatacctaccccattacagctaaactttactaaaggttgactgaaatgtctatcaagtagaaatctctgccaccttgttttaaaaaatgtgcctattgaattatcaatatctggaaactcatcaraaggatgctgaatccctagcactctgtctgcctcaggactgacttatattgctttaaaatcttgtagcgctttccctaaccatagcaactttaaaactgatgtctagtgaaaaataatacatttttcatttatttttattcaagtgataaggcaagtaatgaaaactaaactttttgaaggtcatgggctaatctcttaatatcagatatgtttttaaattaatataaattaacctcagctttcatattataacttattacagccacttccaaaaatgtcacttatcaaggaataaatgcaagggtaaagctgtttgagaatgacaatcaacattttaataattatcatcaacttttaagtttgaaaatttttggtccacctacaaatttgtcattacatcccttttctgatatgtgaaatttctataatagaaatgg

SEQ ID NO: 370585 - DNA, 563 bp, Homo sapiens
aatacctaccccattacagctaaactttactaaaggttgactgaaatgtctatcaagtagaaatctctgccaccttgttttaaaaaatgtgcctattgaattatcaatatctggaaactcatcagaaggatgctgaatccctagcactctgtctgcctcaggactgacttatattgctttaaaatcttgtagcgctttccctaaccatagcaactttaaaactgatgtctagtgaaaaataatacatttttcatttatttttattcaagtgataaggcaagtaatgaaaactaaactttttgaaggtcatgggctaatctcttaatatcagrtatgtttttaaattaatataaattaacctcagctttcatattataacttattacagccacttccaaaaatgtcacttatcaaggaataaatgcaagggtaaagctgtttgagaatgacaatcaacattttaataattatcatcaacttttaagtttgaaaatttttggtccacctacaaatttgtcattacatcccttttctgatatgtgaaatttctataatagaaatgg

SEQ ID NO: 370586 - DNA, 552 bp, Homo sapiens
gttcaagaaatagttaaagaaatctctgtgcctcagtgcctcactttctcagcaagcagtagatgatttttctctgtccaaagggggcatggatgagttgtcagtgggacargcctatttgtttcttttctgaaatgctagtacattggttgatgttacgcactggctcacctcagtgccttcaaataactccctgatgtgatttccttcaaaggtcactcgtatgcaattacttcctctaggaagagattggacataaaggccccctgcgctcattagaacaaacaaaaacctgcattttcattagagtgaggtgatatttaatgtggcccgacaagcccgattccacaaaactggcttctctggcctctgctgtttgaaatggcctgaagataaacatagcatggctcgaaatctggaagataactgagaattaatggtcaaatgcaaaagaattatgagaacttggagtcgtatatatagctgaattacattgggggaaaaatctgaggtttcagtcaaccaaatgagaaaaatattgaattgaccaga

SEQ ID NO: 370587 - DNA, 596 bp, Homo sapiens
aacatacttgaaatttcagtatcaatttttgaaaattccatagtctatactcctgactcagtaaaaccataattaactgtattctggctgacattcttaagttcagaatttgtattaatatttgtaacaagtgtgccttgaaggatagcacagtgaagaagaaaaacaataattaaattccaatcttctcactggcattaaggttttgttgtttaaatgacctattataaatacacattcaagtaaatcatatacattttactatgtatacaatcctagacaatgacttttaggagactcgttcagaggccttatatttatactgacatcatagaagcaatattcagtgatatagttaccaaaaggggaaggtagacacataatctagacagatgtaataagctaccaaatatactttaaaatagaaaaggttttggattaatcttaattaaaaagttaaagaataagttcctttcctgaaaactataactaaataatatttactatatttgctcrttttaattcacaactgtttcttcagtcttataaatcaacagttcaccataaagtattcagataccagtaaagcaatccca

SEQ ID NO: 370588 - DNA, 571 bp, Homo sapiens
accaataatttgattttgttgatayatccagatttgaccatttcaaggaagtaattcgtgtttatttaaattctcaagggactgacctataaacctagatgcaaatttattcctttataatggtagacagaacttgggctatgatgtcaacagagctggattctgatccaccgtcaccgttacttactatgagggaaaattactaaatttctctaagactcactacttgcatctataaaatgcaactgccatgaatattaaaagacataaataaagtacaaagcctggtagttagtgaatggtgactataaggacgaacttgatggtggtgatgaaaacaaagaaggagaaagaggaaaaggagaaaaagcaggttgctggaatcacggggattagaaagcttacgctggaatcagcatattttcttcctgagatctaagacagtccaagagtgaattagaagacactcagctagcagagaatcagagcaaagttaattacatggaatgctataaaaacttgggccttcacactatgaggatctggtaggtccatctctatcttatggata

SEQ ID NO: 370589 - DNA, 571 bp, Homo sapiens
accaataatttgattttgttgatatatccagatttgaccatttcaaggaagtaattcgtgtttatttaaattctcaagggactgacctataaacctagatgcaaatttattcctttataatggtagacagaacttgggctatgatgtcaacagagctggattctgatccaccgtcaccgttacttactatgagggaaaattactaaatttctctaagactcactacttgcatctataaaatgcaactgccatgaatattaaaagacataaataaagtacaaagcctggtagttagtgaatggtgactataaggacgaacttgatggtggtgatgaaaacaaagaaggagaargaggaaaaggagaaaaagcaggttgctggaatcacggggattagaaagcttacgctggaatcagcatattttcttcctgagatctaagacagtccaagagtgaattagaagacactcagctagcagagaatcagagcaaagttaattacatggaatgctataaaaacttgggccttcacactatgaggatctggtaggtccatctctatcttatggata

SEQ ID NO: 370590 - DNA, 565 bp, Homo sapiens
ggaaaatttcgtgggcatgtaatagtcttttgaattttaaatactgtctttgttgaaggtgtaggagtgtgtgtgtgcatgtacgtgtgtgttttatgcttgtgaaatatctggcagcaattccaggggagttgtaggaaatggtaactttacaaagtgccccttcctaccccattcttctggcttgcaatgcattttccttttcttgcttatcacaaaagatggccatcttgcacttttgtcctctcagccaatacctcacacatccagagtccttggggtgggttatatgaggatgaaggaggttcctgaagtgttctccttgggtatgacacatgccttcaygggctgtattagaaatcttcaggagattttgggtcttcccctccctctctgggagcttgctatacatttccagccagcgactcaaaataattgccctcaagactctttgaaaatatgaaatatagacccgatcatagtattggaaaaaactgccaccctagctaaattacttagaaaaaaaaaacccttaattagtcgggtgtggtggcagccacctgta

SEQ ID NO: 370591 - DNA, 561 bp, Homo sapiens
aaccttttgtaaaatataattttaaggataatttaaatctaaaatgacatgcaaaatgtgaatatgttctgttctctgttctttcctctccacaaggagaggaaaaggtagatacccactttggacaggagtgtatataagtgacttcaagtatatagtccaaccaggctactggtttatatcccagatgtgtcattttaactgtagcaagttacttaaactttaaatggttttcaatttcccatatataaaacaggaatagcaatagcaactgtatcaagttctggratcataaaatgggttaattgatataacatacttaggcatgataaacatcgttttacatttagctattttttgttttttgccaccagttggatttgggtagaaatccacactctactgctgccatctatgtgacgctggaaaagtcacttaacttctctaaggcctcaagcttttctgatctggaagatgaagagaaaaatatcgacctattagtgctcctgtgaaggttaattaagatgcatgcaaagccaccaggtcagtgcctggctccta

SEQ ID NO: 370592 - DNA, 561 bp, Homo sapiens
aaccttttgtaaaatataattttaaggataatttaaatctaaaatgacatgcaaaatgtgaatatgttctgttctctgttctttcctctccacaaggagaggaaaaggtagatacccactttggacaggagtgtatataagtgacttcaagtatatagtccaaccaggctactggtttatatcccagatgtgtcattttaactgtagcaagttacttaaactttaaatggttttcaatttcccatatataaaacaggaatagcaatagcaactgtatcaagttctggaatcataaaatgggttaattgatataacatacttaggcatgataaacatcgttttacatttagctattttttgttttttgccaccarttggatttgggtagaaatccacactctactgctgccatctatgtgacgctggaaaagtcacttaacttctctaaggcctcaagcttttctgatctggaagatgaagagaaaaatatcgacctattagtgctcctgtgaaggttaattaagatgcatgcaaagccaccaggtcagtgcctggctccta

SEQ ID NO: 370593 - DNA, 558 bp, Homo sapiens
agagtcttgctctgttgcccaggctggagtgcagtggaaggatctcacccactgcaatctccgcctcccaggttcaagtaattctcctgcctcagcctcccaagtagctgggactaaaggtgcctgccaccacatctggctaatttgtgcatttttggtagagatgggattttgccatgttggccagactggtctcaagctcctgatctcaggtgatccacccacctcggcttcgcaaagtgctgggattacagacgtgagccactgcccccagccatatttttcattaacttctattcatcactttcagcatagaacttcaacagtttatccttccatttcctcaggttgtatatggtggtcactctaacgccatgctyttctataagacatttcacacttacatcactgtccagtttctccagcagcctgattttgtgtgttatagatgaacataaatgcttaccctttttcttatcactgtcagtcatagggatatcttcaggccttttttgacatttttcaacaatattctttcaccacaaagtagagaataag

SEQ ID NO: 370594 - DNA, 558 bp, Homo sapiens
agagtcttgctctgttgcccaggctggagtgcagtggaaggatctcacccactgcaatctccgcctcccaggttcaagtaattctcctgcctcagcctcccaagtagctgggactaaaggtgcctgccaccacatctggctaatttgtgcatttttggtagagatgggattttgccatgttggccagactggtctcaagctcctgatctcaggtgatccacccacctcggcttcgcaaagtgctgggattacagacgtgagccactgcccccagccatatttttcattaacttctattcatcactttcagcatagaacttcaacagtttatccttccatttcctcaggttgtatatggtggtcactctaacgccatgcttttctataagacatttcacacttacatcactgtccagtttctccagcagcctgattttgtgtgttatagatgaacataaatgcttaccctttttcttatcacygtcagtcatagggatatcttcaggccttttttgacatttttcaacaatattctttcaccacaaagtagagaataag

SEQ ID NO: 370595 - DNA, 612 bp, Homo sapiens
aacacttctattctcttggtacctctttttcaactagamagccagcaactgggggtcaaattcctctcaatttgaatttctctgatgcagttgttttccatttcatttccacttttaagaactcatctgattagattgggctcacccagataattcaggataatcttttcatctcaaggtcctcaaatttaattacgtctgcaaagtccctcttactatgtatgacaacatacttagaagttttggaaattctgacagaatctgacagttttggagattctgacaattttggagactctgacagaaagactggggccaataaatgtctacttgatgctttggtgcgtgattcattctagatacatacaactttggaatgtacaaagaactggaatatagttaagttaattcccttggcataaacctctgtggggggccattattatgcctatcacaggcaatgagattttgtttcttaaacgtgttcagacttgactacatcagatagaaggagtatctcaagagcagatcattcagcaaggtttttttctgtacaggaaaattagatgccaacaatgagtctctttttaatttataattcagcaaaatcag

SEQ ID NO: 370596 - DNA, 599 bp, Homo sapiens
tgaatcatcttctcttttttgtaggtccagtctatttagacatttttgcaaagattttgatctgtgcttgtttcatacatatagtcaagaatgattttctttgaaaccatttatcatgtatccaacttgcttaaaatcatccaatggattttcattacacttataataaatttcacatcctactctcgcctacaaaaccccacataaactggccagaccaccctgagttgtttttttttttttttccattaatttggaactactttacgccttgcttactgtgtcccaaacatgcaatgtttctttttttacacacaccagttacattgtttgcagtaggattttgctctagcaattccttcttcctggacatttttccttctctgatgttwattaacatggtcacctgattcttgatattcaggtctcattttacattttacgtagagagacctccctttctcacctgatctaaagtagtcttccatttgctcacttacaacagcctgtcttgtctttctgcatagcaattcctgctgtctaaactattcctgttaatttacatattgtttaggtgtttgtttttaaaatataccttt

SEQ ID NO: 370597 - DNA, 616 bp, Homo sapiens
aacaacatacatcattgtggcttctaaattttaatttacaaggaacaaatatggtagttttataggcttctgaccattgcaaaatcactgattgcaaggcctgtctcctcagaaactaatcaaaaggtgacatattctgttaacttcccattatacattcataacatcatctttcaattcagtgtcataaagaatttatgtaggacattaatcatgcaagaccactaaattgttctcatttcagtgataattgtttactcctataaatggtttgtgttgagytgcaacaattcagctgaataaaatatatctttaccaccctgcattgggagagaaaattaacctatagatagaagaaccaaactgaatatataatatgattattagaaaaaaactaaaattttatagcactcttctcttttcagtgacaagagccaatgacattaggataattctgtcaccttcaataaaatgaatcttgaaaaacaaaattaaacaaaacaacaaaatcatatagaatcaacaaacatgtaaaaacaaaccctgtctaatatctatatgacattgttgaccctgaaatcaggtaaaatatcttgtaaatgaaacatactacacc

SEQ ID NO: 370598 - DNA, 547 bp, Homo sapiens
cactattaattgacttaattcattaataaagaagtaaaaaaaatgactgctgggcttcaggtacattcaacaggatcaaaggtgatagccatttgtaagggcagatgatgatgagttctatttggaatatgatgagtcagagatcccctttagaaataaaagagagacgygaagtaggaacttaagagtagaatgtggctaaagagagaaatgtgtggtggcagctgaagctgtagatataagtttgtctaggtagagggcgaatggtgagaaaaaaggtttaagcttgagttatttgcaggaaatccagcacggaatgacaaatagaacaggtttaacctatatatcctgaagagagaggacatgggagagaaaaactaggtacatgggctatcaataaagggaagaggttttcagggaggagggtgttatctacacaacaagtgttgctgagaaataaggagagatatgattattgttgaacatagcaggaaaatattagttaaataataaggacaaaggccacattatataaaggcaagaattg

SEQ ID NO: 370599 - DNA, 547 bp, Homo sapiens
cactattaattgacttaattcattaataaagaagtaaaaaaaatgactgctgggcttcaggtacattcaacaggatcaaaggtgatagccatttgtaagggcagatgatgatgagttctatttggaatatgatgagtcagagatcccctttagaaataaaagagagacgtgaagtaggaacttaagagtagaatgtggctaaagagagaaatgtgtggtggcagctgaagctgtagatataagtttgtctaggtagagggcgaatggtgagaaaaaaggtttaagcttgagttattygcaggaaatccagcacggaatgacaaatagaacaggtttaacctatatatcctgaagagagaggacatgggagagaaaaactaggtacatgggctatcaataaagggaagaggttttcagggaggagggtgttatctacacaacaagtgttgctgagaaataaggagagatatgattattgttgaacatagcaggaaaatattagttaaataataaggacaaaggccacattatataaaggcaagaattg

SEQ ID NO: 370600 - DNA, 459 bp, Homo sapiens
agctcaaccagttgccatccaattctcatcctgatattcacaatttgatttcagaatacttccttcacaccttccaagtctcagcttcctcagccaaaaatgaagattattgttaccttcttcacagcattagttttctaaataaatgatatgtagatgaaataataataatagaattattgctaaactcttagctattgtcaggcactgttaacctacatacaatttcctaatgttaactaatttaattctcactattacctattgataacaaacagaagatacattatctgccacatggtcaaaaccaaaaaattgtaatcaattatcattttaatactgattaaaatgtgtggcrgtttgcttaaaataagacagaaactaagtcgcttcttacctaaggagtgaatataatagcatcacttgcaaacacaaacacccccatgcatacatacacac

SEQ ID NO: 370601 - DNA, 479 bp, Homo sapiens
ttatattatttaaaggcatgcatacattttaaaagcctggaaattcattatttaatagcctcccctctgatgaaatcctcttttaggagattttgaatatttcttcaaaacattagttaatataaaacaagatgaaagtaactggatatcatccagataaataggatggattattttytttctactagtatcaaaattttcaatagcttcttagtttatcaaatatatgttgtattttaaaaagtgctacaacttaatcattattttgaggaacaaatataaaacgtgaccccactcttctcacactttataatgatgttcatggggtagcatgagaacaggtttccaggctttcttcctcaggattatcaatgtagaactgtttccctttttgcactggttttatgggagcacagagccttccttgcttagaacatgcatcttttaatgaaagagatatatcacttttcacatgtcag

SEQ ID NO: 370602 - DNA, 565 bp, Homo sapiens
aaccagcactcgtgatgtggtgctgcagcagccactgccttaaatgatatatcttaatatccattatccccttcgtgcccatgttcaatagataamtgttttcctgggcaactactgtttccttaagtaactgaaaggggattcattaatttattcaacaacattttctgaataccaactctgtgccagacactgtcagggactaggtaagcaaagataactaggacaacctaaaagtgcctcacatgggggaatgtttgaattctggtacatctataaaaaggaatattctgggttggatgttccgcccaactccttccagacctttattttcttggcttcatcctgatcaaaaaatttataaagagagagagagggaaaaaaaaagaaaaagaaaaaagaaaaaaccggtattggtcccagccaaatggagctccacagtcaatggcctcaggaagatcccccacctgcacccccgactgtgctggggcccctattactgcccttgtagaatccgggttttcttcctagcccttagctaatttgcaattatacatttattttt

SEQ ID NO: 370603 - DNA, 533 bp, Homo sapiens
  misc_feature (1)...(533): n = A,T,C or G
gcttcaagccttcaccggagccagttaaatgtccacgcatacatgaggttctatctccttgcttttgagtctttgccattattggatgagtcacttatctcactggagtgaggaggaggtttgcccctcctacgctgtcaagaatcggttggaaatctgcccttaaccctggagcccaagtcagagagaagccctagaacaagggtctgcaaatacagytcacgggcccaattcagcctacagcctgtttcagtgtggctcacaaggtaaaaataggttttgcattntttaatgaatggacaaaatcagaaaaaaaaatttgtgacacatganaattatataaaattctgatttcagcatccataaataaagttgtgatggaacacagccatacgcattccttacatattgtctgtgacctttcttgatatacaatagggaagctgagtagttacaacagagacagtagtacccctaaagcctataatatttagcaggaaaaagtttgacaactcctgccctagaaatgctct

SEQ ID NO: 370604 - DNA, 469 bp, Homo sapiens
tgatgggtcaacaaaaaatagtctctagaagcttatatgaaaaaatcgtaaggaatataaataaaaatattgattatcagatatttatgagcaacaagtgtttcattgtacaccatcatacattcatattatttctcctctttaaaacatttccatggaacaaaaaaatagagcattgcatatcaattttctactgaataaaaaaagaatagtatgcttgatcttgctaaaagcttgtactttctgaatgttaaaatactttattttgaaagtggcatgaaacacagtaagatcgaygtaggtgatcccaaggcttaaattaatgattaatttaatgtataaaagaaaacaatagaaattatgaagcccaggtattaataattcttcctgacaacaaatgaattaatattataaatgcttattcagaatatatttttctaccatgctaagataaagatgagtgatatca

SEQ ID NO: 370605 - DNA, 469 bp, Homo sapiens
tgatgggtcaacaaaaaatagtctctagaagcttatatgaaaaaatcgtaaggaatataaataaaaatattgattatcagatatttatgagcaacaagtgtttcattgtacaccatcatacattcatattatttctcctctttaaaacatttccatggaacaaaaaaatagagcattgcatatcaattttctactgaataaaaaaagaatagtatgcttgatcttgctaaaagcttgtactttctgaatgttaaaatactttattttgaaagtggcatgaaacacagtaagatcgacgtaggtgatcccaaggcttaaattaatgattaatttaatgtataaaagaaaacaatagaaattatgaagcccaggtattaayaattcttcctgacaacaaatgaattaatattataaatgcttattcagaatatatttttctaccatgctaagataaagatgagtgatatca

SEQ ID NO: 370606 - DNA, 610 bp, Homo sapiens
acattatccccataagacaaggctgttttcaaatttgatggttacaagctgtgatgaagcttcttatgaagtaacttggcaattcatctttccactttcctttgttacatacatctatattaaaattaagtttcatcgattacatttaggcaatgaattttagcctctcagtttatttcagttgaacatagattccagagctaggaaaattatttctgtgttaccgtttgcatcttaccttgggacatgagagttacatttatctgtagcttattgttttcagtagtctactcagaaagcaaattgcagtcattcttcactagagctcaaatgtcccgtgtgaggttagcaaatttctgccaattgccattggtctggagcttagaataaaaattgtcttcacataaggrctattgaattttaaagatgatactcattatatttgtttagaccataccttaataacttaataattataacagctaacctctgttcaaaacattaaaatatgccccacaccctcccccacaaaaagaaatagttggtttaggaacatttgaatcaaatacagaaacactatcatcataaaatctcacattgtttttacaat

SEQ ID NO: 370607 - DNA, 497 bp, Homo sapiens
ttgaatcaaatacagaaacactatcatcataaaatctcacattgtttttacaatactgagtccctttattacattaaaacttcaaaataatcttagattatattcaaaagtttagttaatataataactatatatataaactattctgtatgtatttgcatttatattttgaaactgtcttattacaaatgtgtcttatgattttaacttgatggaaaatgataagacatacattaaagagattctttttagatgatattacttaatacaagataattataactgtaatttttaccagtatgctagacaatgcatctaagatgaaattcattaaagtttyattactctgagctgtgttagcccacattagttaagtagttggacctgtacacttaaattcataatcccagcctactttatttatttttcctcatgttctttctctttggctttctactcctctgtaggtctgtcacggaagtgtggagccagttctg

SEQ ID NO: 370608 - DNA, 582 bp, Homo sapiens
ctgtcttattacaaatgtgtcttatgattttaacttgatggaaaatgataagacatacattaaagagattctttttagatgatattacttaatacaagataattataactgtaatttttaccagtatgctagacaatgcatctaagatgaaattcattaaagtttcattactctgagctgtgttagcccacattagttaagtagtkggacctgtacacttaaattcataatcccagcctactttatttatttttcctcatgttctttctctttggctttctactcctctgtaggtctgtcacggaagtgtggagccagttctgtcttccctcctttctaaatgattatcatattcttttgagaaaatgttggtcttgcccctccttgtgtttcaacctattccatgtgcaacttctgtattgtggattagtcatatcccatcagaattaaaacttctaaggacagtatgttcagtatgacattgaatgtgtagaccctagagtctgccatataacagagacagtgaagtgtacccaataaataaaacaaggtaattttgttgttatcttggtaatgtggacc

SEQ ID NO: 370609 - DNA, 571 bp, Homo sapiens
gtgcattttcccgcaaaatgatggctttccactttagggattaagtaacttagaaaactgtgaaataaagcaacggttgccaattttttctcatcatgaaacaataaagaataatagtcattttttgttttatagaagatagatatgttagaaatatcagaacatttttttataacctggtaccatttaaatctaccaagttctacattttatataggctgggataaaaatcacttcaaaggaactgaattttgatcatcttcacaacaatttgtcttgtttgaaaaatgaagtttagtgtaatcccaccactgctactcaaacttttgctaaactgtctagaataattacacttttgggttgaattcagtttgctagagaaacaaggattggcttccatgcacattttaaagaacttaaatttggatgtgaagatgtattatgaaactcccccttgctgataacttaaataaggacctgtcaagtatcaaacaggtgacagctattgytctatactaacagtaaaatccagtgtttcctagatataacatcgttttgtgtattgcaatca

SEQ ID NO: 370610 - DNA, 522 bp, Homo sapiens
gtatatattgtatatatgttttagacaattttacatacacacacacacacacacacacacacacacacccatattttatccaggatattttaactggagtgaggagcacagagatcaaaaggagaaaatgtatggtaggaaaaaagggccagtgtttttttgtctttgcttatcaaactaaaagctcctcacttagcttatgtaccaagtaagagtaattaaaatgccttgatttcaatctcccttaggcagtggtcttcataatatttgaargttaacatcaagccattcaaacaatatatctttagaacaatggacacttctcctgtgaaatagactggaaaaatatgatagcatacagaaattatattaaaatggtggttcttcaacctgacgaatatcaggagtgttattttctgaaagacaccatcaaaattagaaacatctatcttcagccaactctcaattatctacatgtagattatccactgtgaatgatctgctgcaattttataatttcaa

SEQ ID NO: 370611 - DNA, 541 bp, Homo sapiens
caactgagtatgaagatggaagaaggtacatatttgatggtaagactgggtgcaaaacttaccatgtaggacaataatctattatcatcataattgactttgaagttaactaaattacacacaaataatacttgacatggttttgaacatacaactctgtagagtgttttgtttatataagcatgtagtatatacaataatattcagtccatattaggcacgcaagcataatataattttataacattgaaatcatatacagagagatgaaaaagaaatagaagaattaaagaaacaaaattttttatattgttgaatttgtattttttaaagatacagagctgtaacttgtcttgggtagtaaataagataagtagagaaacagaactaacrtgacaactgtctgctgtgtgccagatgttttttgttagtctctctaaaaatggatcatctgttctttatgacagcacctagaggaaggaactctttgagggaaacattattgctattgtacacataggactgcagagtttaaatgccc

SEQ ID NO: 370612 - DNA, 603 bp, Homo sapiens
gtacacatgtggcatattaggtatacacaaaaatatctctggctctcttgctgctgaaccataagaaattatgcttcacattttttgagtttgaatatacccatgagattttgcattggtcaaaataatgagataggaaacattgatttgcctgttttcttctcctctgctgcaagggtggaacatatgctyctataaggtgcacagctcagtcatcacagatgagttgtgtagtcttcaggactcagtcaacattgcaagaaaaaaatgtaactttatcttgtaaattttttgaaacaccaagatttggagaatgttggctattgtagtttaactacatcagattgaatgacacactacgtgactgtagtgcccattctaatttgaagatgctagaccctgagcacttggaaggtaaagaaagcttgtgtttaaatcattttccttacttcaatatctagcacatgactgaagtttaaaaggttattgggtaatgaaaataattaaatgaataatcaattgtaacatgtaacatagatgggaagctcttgagacaggcttttaacaaaggcaatgaaggtgataaagattaagtaggatgag

SEQ ID NO: 370613 - DNA, 541 bp, Homo sapiens
cccacacacaaacagcatgcaggagctgatccgtgaactttcccttaaaacaagatgataaatggcctatttttctatcatactaaagcaatatgttatttttttccattctgaaaacacttgctctccaggaaaacaaatcaggacatgttctgtggttttaaaaaataataataaaataaaataaaataaaaattatttaaagtacttttaaaaaatcttggccctgaatgtctataatagaagaacatgtaaattaactaacaaattcctttggcatgttagttttgtgtcttttgagtcatattttcacagtcttttcaattccatcttccattttaagtggaaagccaagttaaatatgaagtagctttgaaaggattatttgcttctatgcctttattkaacattaaaactgtgtgtgtgtgggggggaaataatttacatcagaagacactaaaaataaaaccgtacataatttacattttgaccattatattctttgtaattaaaaattactttaaagagcttaagtagttaa

SEQ ID NO: 370614 - DNA, 528 bp, Homo sapiens
gcgatttagcctcatattttattaatagtaatgggaatcatgtagctgaatcctggcaaattggactgaatagctatttccaatgttatatgattatattcataataagtgttcatttgatattcaatgtgaagcaactaactctaatgggtttttgttttagtaatagwgatatatcagtaggtggaaaggccattccatttggaataaaaaatacaccgtaatcagtgtttaagttaacttttctctagggttttacctgtaattctctggactatatgcagttcttcttttagcgtattattcatcatatcacaggtaatatgataattgcttaagatactgcttttctgaagctctcattattttatttggaggcaataactataaatgattctatactgtatcacccacttattatttggccttttgacaaatccttgaatattatcattacactattttctatttttgtagagatgtggtctccctatctttcctaggctgatcttgaactcctaggctcaa

SEQ ID NO: 370615 - DNA, 613 bp, Homo sapiens
atactttatagggcctattagcaacactgtgttatatagttaaaaatttgctaagaggttagatcgtatattaagtgcttttaccagaaaagttaaaaaagtaggrgagtaatgggaggacatctttggagttgatggatacagttatgcgtcgaaagtgatgatactatgatagtttcatgatgtatatttatctccaaacacatcaagttgtatcattaaacatccacagcttttttattgccaatcgtgctacaataaagtgatcaacatatttactaaccattctgtgaagtggtccaaaggcgtgcatggcacaaacagctccactggagcatgctgaactcaacattcccaccccataaccctttttggaaatctcatcttccaccacacccaggcatgtctctggtgtttttgtaggtctaaatcaataataacacagcctagatcctgcataatctggcctcctctacccttataaattcactctcatccttctgacactccataacccagccacatggaactcctttttagtacttgcatgagccatgcttttctaatccggggcctttccacctgccattcaatttgcctaaaataggattct

SEQ ID NO: 370616 - DNA, 613 bp, Homo sapiens
atactttatagggcctattagcaacactgtgttatatagttaaaaatttgctaagaggttagatcgtatattaagtgcttttaccagaaaagttaaaaaagtaggagagtaatgggaggacatctttggagttgatggatacagttatgcgtcgaaagtgatgatactatgatagtttcatgatgtatatttatctccaaacacatcaagttgtatcattaaayatccacagcttttttattgccaatcgtgctacaataaagtgatcaacatatttactaaccattctgtgaagtggtccaaaggcgtgcatggcacaaacagctccactggagcatgctgaactcaacattcccaccccataaccctttttggaaatctcatcttccaccacacccaggcatgtctctggtgtttttgtaggtctaaatcaataataacacagcctagatcctgcataatctggcctcctctacccttataaattcactctcatccttctgacactccataacccagccacatggaactcctttttagtacttgcatgagccatgcttttctaatccggggcctttccacctgccattcaatttgcctaaaataggattct

SEQ ID NO: 370617 - DNA, 454 bp, Homo sapiens
acctatcatgtattaattagttcttctggatccaaacattaataagataacaagcatttccctcacagaactcacagaccagtgggcgcacacacacacacacacacayacacacccactcactcacactcagggtctaggaacaatacaatgtattgtatatgctatgtccaaggtctagacctcatgcttataggggtagaaagaagggagtacttattcttatgtgggtaaaaagcgacaaaaggaatagctgtgttctaacatttgtggaaaacccattgttagggttgttatgtggttggagacagtattttaaagcacttagaacaattcctagtgctatataattattggttcaatagataaagcttttatggctttgtgaatacgttctaaattttacttcttgattttctggtttggtatgacagcataatatggaacagtttgg

SEQ ID NO: 370618 - DNA, 627 bp, Homo sapiens
aaatacaataaaattgtatatttcccttttgttactttatacattaagaataatgtttccacaaccaggactatacataagtgtttatatttcctatttgcattaaagaatctttatgtgcagagtctaagaatattagtgtctcattctgtacagaagctaaaaattttaaaacttcctgactttcagacttgcctctcccaacagactattgctatcaaggttgaacaacatgtacctagtacaatctagctgatttctaccttaggtagaaattgatgtgaaattctataaacaatgttcaacctaattraaataattgagagggcttaaccttttgtttgaaaatagtttttatatggtaaaatatttgacgtctccaactcccaaactgtaccttaaccatgggaacacaatcttttcctaagttgcatctacatctataacagatatcttctacttcgggttagctgatgagaataacttcaaacattgagcatagaaattgaatctttgtgtaagcaagtgagtcagaatcctgtatttacagattgtcagtctctgagttggtcgtcatgggagtgggatgagaccaatgcttgcacatgcttttatcattactgccca

SEQ ID NO: 370619 - DNA, 589 bp, Homo sapiens
  misc_feature (1)...(589): n = A,T,C or G
aagtaggtttgttaatggtattcatgaagcttgattttagtagatgctgggaattctataacgttacaaaatggttcataaaatattgccatctgctataccaagtaacagttcatttttactagttttaaaatggctgtgcttttatgtgtttggatttttggcctaaacttcaagttccctctgaaagttgcttctgacctctgcctgaggaaatatgaaaatctgcctttcctatcttgttttataagcttcagtgmcagaatgtaaatggactaaatacattctgcaaaattttaccataaaaatctttcacatgctgcctgcatggctggctctgtttataatatttccagcttatactgaagtaaccacttgtaaaagaaattgccccaagtactagtgctgaaagcaaacatttatagagtagtgtgcagtcagcagaagataaaggcttttattacaactgaggaaaaatnttgcaaaataattgatcctgacagaaaatacaggatggaatataagcttcagatttgaaaattatctcatccaactacttgctgagtgatgaaactgagacccagaggaa

SEQ ID NO: 370620 - DNA, 386 bp, Homo sapiens
tgctttgaagttcaaaatgacattgccagtgagttttactttaaaatggarcaattgctttctagttaaagggatttctcaaaaggtctaaaaatttgctgtcatgaaaatacatagtctgccaccatcttttttttttctttttctttttctaagcagtaacaggctacaagtgctagaaagttatttaatttttcttgaaaatattgggatactaattgcaatgcttctatgtaaagctccatgaagctagaaatgtgcatgttaatagctagctgaatgcaaaatgcaattcttctaaatgccttccataatactgtttgattttgtttccctactctgacctacacagttatatagtagtatgtagtagttatgagagtgta

SEQ ID NO: 370621 - DNA, 386 bp, Homo sapiens
tgctttgaagttcaaaatgacattgccagtgagttttactttaaaatggaacaattgctttctagttaaagggatttctcaaaaggtctaaaaatttgctgtcaygaaaatacatagtctgccaccatcttttttttttctttttctttttctaagcagtaacaggctacaagtgctagaaagttatttaatttttcttgaaaatattgggatactaattgcaatgcttctatgtaaagctccatgaagctagaaatgtgcatgttaatagctagctgaatgcaaaatgcaattcttctaaatgccttccataatactgtttgattttgtttccctactctgacctacacagttatatagtagtatgtagtagttatgagagtgta

SEQ ID NO: 370622 - DNA, 548 bp, Homo sapiens
gagacctcttaatttatactgtagaagaatgtgattatttataagaactcaaaagggagggctagaaaacaagagagagctaagagattgcaagcccaaggcaaaaatgtaagagctggaaattagagttacaagaggaacacttagtatgcttgtgtgtataaatactttcataggacagcaggtgtctaccagacttttctaagggagtcagatagtgagtatttaaggctctgtgggccataaggtctccattacatattctcttttcttttttttttctaaaaaaccctataaaaatgtaaaaaatattgctrcctcacagattatcaaaacagaagtaggctgtgatcttgacgatcttgatttggctcacagaccgtagtgtccctactcctgacatagaagattgacattattgttgtgaaaattttagtgatttgctttttttggcctcaaagaagaaaactggcacgtgatgtttagcatttaaaattctacattcacaagaaaacaaaacaaaacaaaacaacagccaatggccaatt

SEQ ID NO: 370623 - DNA, 548 bp, Homo sapiens
gagacctcttaatttatactgtagaagaatgtgattatttataagaactcaaaagggagggctagaaaacaagagagagctaagagattgcaagcccaaggcaaaaatgtaagagctggaaattagagttacaagaggaacacttagtatgcttgtgtgtataaatactttcataggacagcaggtgtctaccagacttttctaagggagtcagatagtgagtatttaaggctctgtgggccataaggtctccattacatattctcttttcttttttttttctaaaaaaccctataaaaatgtaaaaaatattgctacmtcacagattatcaaaacagaagtaggctgtgatcttgacgatcttgatttggctcacagaccgtagtgtccctactcctgacatagaagattgacattattgttgtgaaaattttagtgatttgctttttttggcctcaaagaagaaaactggcacgtgatgtttagcatttaaaattctacattcacaagaaaacaaaacaaaacaaaacaacagccaatggccaatt

SEQ ID NO: 370624 - DNA, 561 bp, Homo sapiens
tagcaatataggttgcattagaaatgagcatgatggaaggattctgttcatttggtttaaccctgcaaggggattcacaaatgtgcagaaaacctatacagtgtaaatttgtgccagaaaatgtatatgagccatttacagtattaaggtaagtctactttacaaatattcacagagtgttcaattattttcaagttgtgtctccagcgaaaactccatccaatttaccagtatgacgctcatgtttactgaaaagccttcttcatttgcctcatctttcctgcttaactgatggcttcccactaagcctaaccattatcactaagcatatgcttatttaggcaacaacaaaccttcctagctcatttttcagattctcccttgccataaatccatatagttcttygtttctattaataatgatacctgactgtgtataaaaatagttactattgactgaatgattgccaggtgtcaagcactgtgatgaaagctcaacatgcattaataataatagctcacgtttgtgacaggcaccatcctaagtgctttgcagacatt

SEQ ID NO: 370625 - DNA, 539 bp, Homo sapiens
acaccttgggcaattgagaaagccacagaagccagaagttcactstgactttcccctggctttctggtgtgaagcatggtcataaaggaattacctgacctccctcacccaaacgtagattataagaccctcattccagaggcttcctgctccatacctagaggtgattaagtgttgttcagaagggccaagaagaatctgaacaaacaagatttgctgagttcctcccagtttactaccattaaatcatacccctttctttgttcaatcacatttctcaatgactgtccattcttcattgaccctaagcataaaaatacagttttccctgggtctctgggtcttcatttctgaagggtcccatgccatctaaaactttgttaaataaatttgttatgcttttctcttgttaatcagtcttgtcttatggggtgtcacccatgacacttgcaatgggtaaggaaaagatattaatttttctcccattcacctgcttagacaagactaaggaacttgaatccaaacattggtagaattct

SEQ ID NO: 370626 - DNA, 539 bp, Homo sapiens
acaccttgggcaattgagaaagccacagaagccagaagttcactctgactttcycctggctttctggtgtgaagcatggtcataaaggaattacctgacctccctcacccaaacgtagattataagaccctcattccagaggcttcctgctccatacctagaggtgattaagtgttgttcagaagggccaagaagaatctgaacaaacaagatttgctgagttcctcccagtttactaccattaaatcatacccctttctttgttcaatcacatttctcaatgactgtccattcttcattgaccctaagcataaaaatacagttttccctgggtctctgggtcttcatttctgaagggtcccatgccatctaaaactttgttaaataaatttgttatgcttttctcttgttaatcagtcttgtcttatggggtgtcacccatgacacttgcaatgggtaaggaaaagatattaatttttctcccattcacctgcttagacaagactaaggaacttgaatccaaacattggtagaattct

SEQ ID NO: 370627 - DNA, 451 bp, Homo sapiens
ctaaggaacttgaatccaaacattggtagaattctatgttttgtggagtctggccccaaaatcagcttcaccaattatgccttgttctgggaacctggaagggtgtatttgagagattagacagtttgwaaaggaaacaaaaactcaaaaccttactgagtataaataaaataattcatctcaaactcttcacttcccttatggcaaagattctcaactttggtactactgacatttagggccagataattattttattattattatttttttaatgtggaggttgtgtgcattgtaggacgtttcccagcatttctggactctacatgccagtagcacccatgtccctgtgctgacaataaaaatgtttcaagacactgtcaaatgtttctggggggccaaaatcacccacagttgaaaaataacaaccccatgaatcttaaagtagtag

SEQ ID NO: 370628 - DNA, 528 bp, Homo sapiens
acaaactactataacttactcaatataaactagataatttgaatactcttacaactattaagggaattgaatttacaaaccgtccccctaaatgttcaatgaaacaattaaagcataattaacaccaattattcacaatctcttccagagaatataagagggagacatttcccaagttattttatgaagcgcaaactactctgatagcaaaatgagacaaaaggtacaacataaacaaactacagaccaatatattttatgaattgcaatgcaaaaatctacaacccagaaacagatttattcaaatatgcccaactaatatttgatcaaggtttaaaaacaattaaatgcaggaaagatagcttttacaacaaatggtgcargttcacttggatatccacagataatcaatcaataaatcaatcaattaataaaataatctctttctaagtctcataccttgtaccaaaaggaaaacaaaatgacattatgttaagtgaaataagccaatcttttgtattaaaagac

SEQ ID NO: 370629 - DNA, 572 bp, Homo sapiens
ttcttcttgtctccatactccacccatatgtcctacartattccacgctatattttcagagataagccccagtactacctactactattaacttatatgtagctcttaatatagctacacattttctacatgttaactcatttaaagtaaactaagtcacattgttccgttacttacaacttttctctcttttttttctttctttcttctttcttttctttccctctttcttttctttctttttctttcccttccttccttcctgcctttctttctcttcctttcctttccttccttttttctctctctccctttctttctttctctcccttccctccttccttccttccttccttccttcctctctttcttttcttttccctctctttctgtctgtctgtctttccgtctttctttctttctctgtctctgttgcccaggctggggagcaatggcacaatctcacctcactgcaacctccacctcctgggctcaagccagcctcccacctcagcctcctgagtagctgggactacaggcacatgccaccaagcccagctaattttttgtat

SEQ ID NO: 370630 - DNA, 571 bp, Homo sapiens
tctgcctagatttcagaggatgtatggaaaagcctggatgtccaggcagaagggtgctgcagaggtggatccctggcagagaaactctactagcgctgtgtgggaggtgggtgtggggtgggagcccccacacagtctctgcaagggctcttcttagtggagctgtgagaaagggaccaccaacctccacactccagaaaggtaaagccactggcagcttataacctgcacatggaaaagtcacaagcatgcaaccccaacctgtgagagtggctatggggcatgaacactgcaaaaacacagaggtggagctgcccaaggccttgggagtttacccctcacagcagtgttctctggatatgggacatgaagtcaaaggagatcattttggagcttcaaaatttaatgactgccctgctgggttttgaacttgcatgagacctgtagcccatttcctttggctgattcctgccttttggaatggcagtgtttatctaatgcctayacttccattggatcttggaaataagcaacttgctttgattttacaggctcataggtaggagatgag

SEQ ID NO: 370631 - DNA, 549 bp, Homo sapiens
aagtaaagagaaggtgacatttatgttagtcgaggaactgagaaacttgtgcagggaagcaccatgagtttataaagaagatggcacagctttgaataaagaggaaaacagattttacacttcagaaaaaaaaaaaaaatgaaagccccagaagttgtctgttgctgactgacaactaagttaggatgtcccattgtgtttggaaataaggtgacaaattaagggccgaaaataatctagcatgagtctaaaggggacattgaagagttaagaagatgccaattgtaccatccaaccctaagaatgtctagtgtagtgtaacgaacagtaaatacccaattccaagggctacagaggaaaaagagtactccagagaaacccagtattaggtcactacaaaacagggtttggagtctgggagttagttctcggggaaggtcagtwaagaggacaccatggagaggatggagagtgtaggagaataggtcataagaaagaaaacagctccatgaaaatgagtgtgggaaaatgagacgccccaaagaactg

SEQ ID NO: 370632 - DNA, 622 bp, Homo sapiens
aaaatagactggtgtttgattttacgtggataaccctgaccaacaytggagtcttacttttcttatttgtaagatgagaataatattaaaagtaatagtaaaaaccacaattacttttgcacccaactaatagctgtctcttagggttaggaggattaaaacagataattgatataaaacatatctagacccaccaagagcagtgacaatgatgggggtagtagcaatagtgattcctactaccctgtctaaaggttatctcagttcatactggtcattatattatttgaagagcatagtggacttacaatgattctttcctatctttccttgatctctttaggtatataacttatcttctcatagcttcaatgatgaagacagaaatacttgaaaacatcataagatttatgtaaggatgataatttaaaaaagaaggtaatatgatttgaaatgttcattattatactttatataatctcacacattgttaggcccgtacacacatattaatatttttgttaagtgcatatctccctagaataaagatacataatatttctctaagtatagtagaatagacagaaatatatacatctgtaaaaaacagaaatgtactaaa

SEQ ID NO: 370633 - DNA, 454 bp, Homo sapiens
acttaaaattttatcactgcaaataaatatctgaggaggtggatatgctaattatcctgatttaatcacttcagaatgtacacatgtatcaaaagatcacactgtaccccatatatacaattatgtgtaatttaaaatagaataaaatgaaaaaaaagaaattgagaggctacagaggttctccttgaacatgaagactgtgtgyatatttttcatctggtaacaaggcataatgagtaggaagccaaccagagacatttaatgaccagaatttgatggatatgaaggtggagaacagagattgcaaaggaaatgttggaggttctaaagccaggagaaaacaagctaagtgactttatacataaaatcaccaaatctacaccagaggacagctgattatagacttcctgaagagacagcctcacaggggatgacgtgaaagttgtttttgctt

SEQ ID NO: 370634 - DNA, 520 bp, Homo sapiens
acagaaagttgcaataatagtataattactatatgcttcaattcsccaagattatcaaaatttaacattttactacatttcctctataatttctatgccctctgtacacacacacacacacacacacacacacacacacactcttttttcctaaacccattgacagtaagtttcagacatgacatttatttaaccctaaataatttattgtatatttcctaaaatcaaggaaattttcttcaataaccacagtaaaactgtcatctgaaaataaacatgtatatagtattattatgtaaacaccctattcatatttttccagttgtcccagtaatgtcctttaaaaccaaagcaaatctgagatagttcatatacacttgacatgtccctttaatctcctttaatcttgaacagttcctcaagctttatcttttatgttcttgacaattttcaatattacaggacaattattttgtaaagtttagctttgtgtgatgtttcctcataattagatacttcc

SEQ ID NO: 370635 - DNA, 520 bp, Homo sapiens
acagaaagttgcaataatagtataattactatatgcttcaattcgccaagattatcaaaatttaacattttactacatttcctctataatttctatgccctctgtacacacacacacacacacacacacacacacacacactcttttttcctaaacccattgacagtaagtttcagacatgacatttatttaaccctaaataatttattgtatatttcctaaaatcaaggaaattttcttcaataaccacagtaaaactgtcatctgaaaataaacatgtatatagtattattatgtaaacaccctattcatatttttccagttgtcccagtaatgtcctttaaaaccaaagcaaatctgagatagttcatatacacttgacatgtccctttaatctcctttaatcttgaacagttcctcaagctttatcttttatgttcttgacaattttcaatattacaggacaattattttgtaaagtttagctttgtgtgrtgtttcctcataattagatacttcc

SEQ ID NO: 370636 - DNA, 539 bp, Homo sapiens
ataattcgttgaaatgtttccctttcgtttctaaagaggaaaatgtgcccttagccatcactttttaaatctaaaagctacaaacagaaattgctttgcaattttcatgtactccttagaaattttctagcttcaaacatgtgatatttgcttctcttacataaacgtctccaaaaatgactgctaaaaatgaaaacatcttttccaacaaatattttcaatgcaatgtaaacacrtattgcaaacaatgatttaaactaattccaagaaacccagctattggcattctaggattttgctagttaggggaactggccccagatggggaaagcattctttgttgtctgaagtgattacagtaaaacaggcccagacagaaaaactatgggttgtatgtctcaatactgcaactttaccacctggccattctactgtcacacaaaggtcaagcagacagcaatgcaattttgaggtggggaaggaaaataatccagtcagaattcaagcaaatgtttgaattcagagtttgaattcagaga

SEQ ID NO: 370637 - DNA, 588 bp, Homo sapiens
cacattagtgaggtccatcaggaatgcatgatgtccctacttcacacatagayaagtgaacaccaccactggaggtttttagtttatgtgaaaatgcagaggacttctgaggacctagtctgtgaagtatacggggtagttacagatcatactcaagcaatctaatgaaatgggtaacatttttaagttaaactcttaatatacacagaggatgtgacatcaaggggaaagaacaactcttctttttaggtattagagttaaactgcatgaagaagcatggaggggaacttcctatagaatgattttaagggagctgggtaaccttccttgcagagacaacctgtagtatccaaaactctgtctgggatccagggataggtcattctgtattttccacacaagccaattcattccacaatctatggacagacaatggtaaataaatgtccatgcatatcaccttctacgtgagaagcccatttcctttactgagttagatcagcacttgcattacaaaagaaccatcttctttaggggttctaaaatagagctgctaaatattcctgccatgtatcccggagaacaaa

SEQ ID NO: 370638 - DNA, 269 bp, Homo sapiens
ctaatgaaatgggtaacatttttaagttaaactcttaatatacacagaggatgtgacatcaaggggaaagaacaactcttctttttaggtattagagttaaactgcatgaagaagcatggaggggaacttccyatagaatgattttaagggagctgggtaaccttccttgcagagacaacctgtagtatccaaaactctgtctgggatccagggataggtcattctgtattttccacacaagccaattcattccacaatctatggacag

SEQ ID NO: 370639 - DNA, 521 bp, Homo sapiens
agaaaataagagtaaatagatataaaatgatttctgtagaatttgtacagattgcatgtaggcatgtatttatgtctaggttttatttttaaataacctaccagcctttcttaagtgggctttctaaatagaggaacatcccttgtatgtaatagattatctgcttctcttatgcacctaaaatactaacagaacagcattagcattttttgggagaactaagaagatgagtaactaaaataatttcctgtgttctgcaggtcaactgagaagccttgctgaaacaggctgccagggtcactattacagattgtatacagcttatacagttggcctctccctaataaccaactgcagatcaaaaatatttggaaaaagttggatggttgtgtctgtactgaacatgtacagacatttccccctcatcattattccctaaatggtacaacaactatttacatagaattayactgtattaggtattataagtaatccagaggtgatttaaggtatacaggaga

SEQ ID NO: 370640 - DNA, 303 bp, Homo sapiens
ttatcatttccctcttcacttctttataatgcttgagatgtggctgtaagttaaccagagaagaaaacttattttcttgctttgtagtcataaccatacacttgaacactgcaatartgatctcctaatgcagtcagagattttatagtcttgcacttctgttcagtttttttttattatttaagaaaatgtgaagggtacggtttattcatatttttatctcaaataccatccctaataggtattcacagatctgagagaatagactcaatctgatttagaaatgctttggaattagtagtc

SEQ ID NO: 370641 - DNA, 600 bp, Homo sapiens
ttttcattatttatgtatgtattgactgattgattgttttttgggagagagcagttttattaacatcacagcttccctttttctctttcccatccaagcacccaggtctagggtccttggtcagttcagaggttaaagctggaggccactggagctgtcagctcccaagtaagtgaatgtgcaggtcatttacggattgttcacccagcttctcatcattgatctcaagttgrtatccatctcctaggccctcagcccttgctatcttcttacacacaaggagtaggtgtccaagaagctgctgtcttcttcttcagcctggttaatccgaggaatgggcttcttaggaatgaccagaaagtgcacaggagcctatggagccacctcagggaacacaagacactgctagtcctcatataggatgtaggctgggaggcgatggtccaggatcccacagaagatggttggggctacacccccaggaattgcccgctgggccttggtcatttcattcccaccagtcacacctacagctcctcagatgtgtgccgcgcagccctggggccgccatggctctgcagagggcacaacccagctgcc

SEQ ID NO: 370642 - DNA, 600 bp, Homo sapiens
ttttcattatttatgtatgtattgactgattgattgttttttgggagagagcagttttattaacatcacagcttccctttttctctttcccatccaagcacccaggtctagggtccttggtcagttcagaggttaaagctggaggccactggagctgtcagctcccaagtaagtgaatgtgcaggtcatttacggattgttcacccagcttctcatcattgatctcaagttggtatccatctcctaggccctcagcccttgctatcttcttacacacaaggagtaggtgtccaagaagctgctgtcttcttcttcagcctggttaatccgaggaatgggcttcttaggaatgaccagaaagtgcacaggagcctatggagccacctcagggaacacaagacactgctagtcctcatataggatgtaggctgggaggcgatggtccaggatcccacagaagatggttgsggctacacccccaggaattgcccgctgggccttggtcatttcattcccaccagtcacacctacagctcctcagatgtgtgccgcgcagccctggggccgccatggctctgcagagggcacaacccagctgcc

SEQ ID NO: 370643 - DNA, 634 bp, Homo sapiens
tgattacaattaaaacttattccagtcaccaagagcattctagatgccagaggtaagtaaagagaattatcattttgctatcgcttaatcctaaatatattaaatgcttcaggaaataagaaaagaatatttgctgagtgcttcctatgccaagcactggttaagtgcttttaaatatgctgtcatttcatccatattatcctgcgaggtaggtgttactgtctgcatgttgtagttgcaaaaacggaggctcgaaatggaaagcttactcaaggtcacagaaactaccaaaacattcctcaaactgttaagtggactgtgatatacatcttaaatagatagaaatattgtatcctttttttgtcaagtatcctacagataaggctagaagaaattgttagaaatcaaaagaaatgattttgctrcagttgacttcccctcgtccacactaagtaaaatgtcacatggggtacacaggtgttcccaatccactgatgctgctacatacggtttataaaacgaaacgataagtgtagaattcacatattacataaaagacagtagctggagttattttaaaaacttctaaatgaaataggatgtattctgtagagtattattttggaaattcatt

SEQ ID NO: 370644 - DNA, 634 bp, Homo sapiens
tgattacaattaaaacttattccagtcaccaagagcattctagatgccagaggtaagtaaagagaattatcattttgctatcgcttaatcctaaatatattaaatgcttcaggaaataagaaaagaatatttgctgagtgcttcctatgccaagcactggttaagtgcttttaaatatgctgtcatttcatccatattatcctgcgaggtaggtgttactgtctgcatgttgtagttgcaaaaacggaggctcgaaatggaaagcttactcaaggtcacagaaactaccaaaacattcctcaaactgttaagtggactgtgatatacatcttaaatagatagaaatattgtatcctttttttgtcaagtatcctacagataaggctagaagaaattgttagaaatcaaaagaaatgattttgctgcagttgacttcccctcrtccacactaagtaaaatgtcacatggggtacacaggtgttcccaatccactgatgctgctacatacggtttataaaacgaaacgataagtgtagaattcacatattacataaaagacagtagctggagttattttaaaaacttctaaatgaaataggatgtattctgtagagtattattttggaaattcatt

SEQ ID NO: 370645 - DNA, 634 bp, Homo sapiens
tgattacaattaaaacttattccagtcaccaagagcattctagatgccagaggtaagtaaagagaattatcattttgctatcgcttaatcctaaatatattaaatgcttcaggaaataagaaaagaatatttgctgagtgcttcctatgccaagcactggttaagtgcttttaaatatgctgtcatttcatccatattatcctgcgaggtaggtgttactgtctgcatgttgtagttgcaaaaacggaggctcgaaatggaaagcttactcaaggtcacagaaactaccaaaacattcctcaaactgttaagtggactgtgatatacatcttaaatagatagaaatattgtatcctttttttgtcaagtatcctacagataaggctagaagaaattgttagaaatcaaaagaaatgattttgctgcagttgacttcccctcgtccacactaagtaaaatgtcacatggggtacacaggtgttcccaatccactgatgctgctrcatacggtttataaaacgaaacgataagtgtagaattcacatattacataaaagacagtagctggagttattttaaaaacttctaaatgaaataggatgtattctgtagagtattattttggaaattcatt

SEQ ID NO: 370646 - DNA, 547 bp, Homo sapiens
attatattttaagcctatgaggggatgccctgcctccagccagagtggttttgcctaccttaccttctaattttttaattccacttcttttcacttatgtttctattgacctccgcaaggtcatagactttctactctttcttaacagtttgttccctttcgccctttatttctttcaccagttctttaaaagcgttcagcattgtagaattttcaggatattcctttattttaaaactgtgttatttggctgggcacggttgctcacgctagtaatcccagccctttgggaggccgaggcaggcggatcacctgaggtgtcaggagatgaagaccaggctggccaacgtggtgaaaccccatytctactgaaaatacaaaaattagccaggcatggcggtgcgtgcctgtaatcccagctacttgggtggctgaggcagaagaattgcttgaacccgggaagtggaggttgcagtgagccaggatcaagccactttactccagcccaggtgaaagagtgagactctgtctcaaaacaaccccccca

SEQ ID NO: 370647 - DNA, 578 bp, Homo sapiens
gaaaaaatccaactacacgctgctgaaaggagatacacctaaactaaacataaaggttgaaaacaaattagaaaggaaatctcaggcaaatttaatttaaatgaagtaatattttgtcaacaagcatcatcaggaataaaaagaggatcacgccataatggtcaaaggattaattcgtcaaatttatagaagctcggtgcccactcatcatcagtagcctatcagagggtcacacaataaattagttgtggtgcggaactataasctctgcttctcgatcataatattctcttcctttcctttacagtacttagcacaatatgtattttttctacttgtatgttatcagtccccctattagacagcaaactcaaaattccagaagatatacatatattatttggcaccatatcacctggtcctaatacatgttctggcatgtacttagcttcccaaaaatagttgttgggagaacaaatgacacccatgctcctgatattccggccattcaacatagcataatcctttccattaaccataaggaaaagcataaaacatcacttggatcaaatggagca

SEQ ID NO: 370648 - DNA, 542 bp, Homo sapiens
atgttcctgctgagagtttcatttcaaacttgtagattccacaaatgtgagagaataagtttccattgttttaagccaccagttactttattggatcagcatcaggaaagtaaaacataaccattttactgttttacatctatatattttattaaggaaaaaatttgcatacattgtagacagtgagttacatttctcatgttttatcccttcaaaagcttcaacttttaagatctgagtatttataggactgcgttaacttaatatttgtgttggtttgactgctaaaacatcctctcctatgaaaccatttggyaaaagtacaacaactttattcccaatatacactttctatgattacaaattctaaaatttttgaattatcaaattaatctaaactacagaaaacctaccttaagtatcttctccagagagaaatgtaaatagtccctatttcttagtttcaggctttaatttatgtaacttcactactttcattaatttcaacattcataaaaacatcaaaaacaatctcatgctat

SEQ ID NO: 370649 - DNA, 560 bp, Homo sapiens
cacattaagtcaacaagattctctctcagagattttgaattgcaacacttgagagtttgaggcatgtaaagttggaattattgttaaagaagccagtcttgagagaaccagaaaaataagactttagagaaaaccagagttaggattacatacatccttactcctgatccacatgagaaatgaagaactgaaaatagggtaaaaggtgaggggcagccacatttcctgacttcctaagtcaagtccccatgaggttacgtttwagctataatttttttatgcttagaagactatcattttgcctggcagatggtttcaacaacccttattatgtgagctagtttaagtttctgtatattacaactaaatggttactagttaagaaatcataagcccactgaagctaagttttctgtgagtaatacaaagtcctggctttgtgcctgtagaaatgaggcagacaaataagtgagcaatgaatacaaataagtcacaatgctaacaacctacaaatttgtaaggaaattccatatataaaaattcctggctcatgaatatga

SEQ ID NO: 370650 - DNA, 560 bp, Homo sapiens
cacattaagtcaacaagattctctctcagagattttgaattgcaacacttgagagtttgaggcatgtaaagttggaattattgttaaagaagccagtcttgagagaaccagaaaaataagactttagagaaaaccagagttaggattacatacatccttactcctgatccacatgagaaatgaagaactgaaaatagggtaaaaggtgaggggcagccacatttcctgacttcctaagtcaagtccccatgaggttacgttttrgctataatttttttatgcttagaagactatcattttgcctggcagatggtttcaacaacccttattatgtgagctagtttaagtttctgtatattacaactaaatggttactagttaagaaatcataagcccactgaagctaagttttctgtgagtaatacaaagtcctggctttgtgcctgtagaaatgaggcagacaaataagtgagcaatgaatacaaataagtcacaatgctaacaacctacaaatttgtaaggaaattccatatataaaaattcctggctcatgaatatga

SEQ ID NO: 370651 - DNA, 570 bp, Homo sapiens
tttacattctccttgtttcagtggctgaatgtcccaaattctttcctagctcaagacttttgcacatgcccttccctttactcttcttgtagagtctttctttcttttttgtttwtaaacagatatatttttacattttatttgttcaattcttttaaattttatttgtaactgacaactaataattatacatgtttgtggggtacaatgtgaagttatcaaatatgtttacaatgtgaaatgattaaatcaggctaatgaacaaattcatcacttcacatacttttaattttttatggcaaaacatttaaaatttactcagcaattttgaagtatgtaatgcattattatttattatagtcatcactttgtgcaatagatcaccaaagcttattcctcctgtctaaattaaactttgcaccctttgatcaacatttcccctttccctatccaatccctcccccagcctctggtaaccatcactctctacttctatgagttcaactttgtaaaattccacatgcaagtcaaatcatatggtatttgtccttctgcgcctggcttatttca

SEQ ID NO: 370652 - DNA, 570 bp, Homo sapiens
tttacattctccttgtttcagtggctgaatgtcccaaattctttcctagctcaagacttttgcacatgcccttccctttactcttcttgtagagtctttctttcttttttgtttttaaacagatatatttttacattttatttgttcarttcttttaaattttatttgtaactgacaactaataattatacatgtttgtggggtacaatgtgaagttatcaaatatgtttacaatgtgaaatgattaaatcaggctaatgaacaaattcatcacttcacatacttttaattttttatggcaaaacatttaaaatttactcagcaattttgaagtatgtaatgcattattatttattatagtcatcactttgtgcaatagatcaccaaagcttattcctcctgtctaaattaaactttgcaccctttgatcaacatttcccctttccctatccaatccctcccccagcctctggtaaccatcactctctacttctatgagttcaactttgtaaaattccacatgcaagtcaaatcatatggtatttgtccttctgcgcctggcttatttca

SEQ ID NO: 370653 - DNA, 631 bp, Homo sapiens
gaagttaattattactatctggctcacagattttcaggcgggagcattaatttgagaaaatattattgcatttcaaaattaaatatttcaacgactttagttaatatataccagttagctcacgttaagattatcccacaacatatatttgtttcaaattacataaccaacgtagagccaaacaattctaagatgtctgtttgtttgttttttgagatggagtctcgctctgtcacccaggctggagygcagtggcacgatctcagctcactgtaaactccacctcctgggttcaagtgattctcctgcctcagcctcctcagtagctgagattacaggtgtgcaccaccatgccggctaagttttgtatttttagtggagacatggtttccccatgttggccaggctggtctcaaattcctgacctcatgaaccacccgcctcagcctcccttagtgctgggattacaggcatgagccactgtgcccagcccaattctaagttttataaagtcaaagttaatagtgccttccttcaccctgcctacctcataaaatttctgccacaaaaaaatataaatgggtttaagatcagttccaatttagacagaattgtacacaaacacacacac

SEQ ID NO: 370654 - DNA, 559 bp, Homo sapiens
tacttgtctgtgtacaagtcagaatgctgtttaatctcaaccactgaaacaatactgaggtcagaagctaaaaaccccccctgacaggtgaaatttgacaaaaatagaagtgactttgaagaaatggctaaaagaagattatcaaaattttatgaacaagatgctttaatgtctaatcatttcaatacaaattctcatataccaagtgtttcacatgttacaaagccttctcccatatatgcattaatttactcctcacaaaaactatcatggccatacaggtaataggttaattttaaaacaatactcattccatgcttaatctacacatatatgccacgtaatttctttgctgccacttgtagtcttcaggaataacattcactaagtaaactatagaatatatatttcatacacaatacttttttggttgaaatgtagctatatgatttttcctccacatatgtggcattagatttttaatatgaatgtaccaaagatggaarttcattctctattaaattgtatgagagaaaaggagagatatatggacggagag

SEQ ID NO: 370655 - DNA, 559 bp, Homo sapiens
ccaatcaaatactgcagtagtttctaagtcttagagctgttgtgaccagatgggatggatggatgaatttgtgttctyatgattgagacattacaataaggggaaagagtattacagcaacagtcaaatgacttggctttagccctcaactaatttattgggtgcttttcaagtttcctactcttataaacttcagttttctcttctataaaatgaaaagattagccttgatcatttttaaagtcccccaggctaacattggctatgactgacactgtggagctatgggatctgcatgagaaatttttctcagtcagtacagcatgcacaagggagaatggctttattttatgtcacaatgcagaatgtctgttgtttgctatccctaaaagtgatgtcctctatgatttacaaagcctatggagacatttgcagcataagggaccgccttcccactttttcacctcagcacatgctacctcatcacactttctccttatttttagttttatgccatcatctgcaggtaatgtttgacctaaaacctacaccattactt

SEQ ID NO: 370656 - DNA, 559 bp, Homo sapiens
ccaatcaaatactgcagtagtttctaagtcttagagctgttgtgaccagatgggatggatggatgaatttgtgttctcatgattgagacattacrataaggggaaagagtattacagcaacagtcaaatgacttggctttagccctcaactaatttattgggtgcttttcaagtttcctactcttataaacttcagttttctcttctataaaatgaaaagattagccttgatcatttttaaagtcccccaggctaacattggctatgactgacactgtggagctatgggatctgcatgagaaatttttctcagtcagtacagcatgcacaagggagaatggctttattttatgtcacaatgcagaatgtctgttgtttgctatccctaaaagtgatgtcctctatgatttacaaagcctatggagacatttgcagcataagggaccgccttcccactttttcacctcagcacatgctacctcatcacactttctccttatttttagttttatgccatcatctgcaggtaatgtttgacctaaaacctacaccattactt

SEQ ID NO: 370657 - DNA, 585 bp, Homo sapiens
atttataaacaaaaagactcccttgactttatcctcctgttttccagacttttttattttttaagaatgaaaaataacagctaaggaatgtggcctggaatgaaaatatccgaatcagaagcaaacagaataaaaacacacctacctttccccctgaaataacattaatgtcttattggatctgacaaaattcaatgaatttctaattaaagactgtttccccactcctgattcaacctgtcctgcctagcagtagtagcaagaatgagtcatagtctcttcagaaagtaaagcattgcagattgagttaatgatgaatttttcccccttgatttgaaatactcttgcctctgtctttccgtcaaccctagaatagtaccttgatttgtaattttatattgattttaatttgcttcattatttttcttgtagccattaaaaatatatcaaacagaatcatacttgacaagaagcataaagaaacmttccactgatactggaactgttgggttttctttctactgaagcttttaatgattctttgccaatctactttttaatcatctgaagtaaaagtagtataaa

SEQ ID NO: 370658 - DNA, 646 bp, Homo sapiens
tattacagttatgattttacacatctgtaatatccagagatattcaagaatcatagccagtaagttggatgaacattgcctaaaaaacacatttttaaaatctgaaagccagaacacttaacccttgaacaacgttagctgcatgaatccactaatacccacattttttaaaataaaagttayaccaagggtgcctgcctttcctgcctcgccttccatctctttcacctctgtcaccccagagacagcagaactaatccctcctcttcctcatcctcttcagcctactcaacttgaagatgatgagggtgaagacctttgtgatgatccacttccacctaatgaaaagtaaatatgtttcctctttcttatgattttcttaataacatttctttagcttactttactgtaagaataatgcatataagatacaaaatatgtgttgactgtttatgttatcggtaagacttttggtgaatagttggctattaaagttttggaacagtcaaaattaaacaccgatttttgacttcatgggggttggtacccctaccctcctcgttgttcaaggggcaactgtatattctttttggtgtatatagagaccctgtaaaagagaattaaactttttcaagtccctcatttg

SEQ ID NO: 370659 - DNA, 646 bp, Homo sapiens
tattacagttatgattttacacatctgtaatatccagagatattcaagaatcatagccagtaagttggatgaacattgcctaaaaaacacatttttaaaatctgaaagccagaacacttaacccttgaacaacgttagctgcatgaatccactaatacccacattttttaaaataaaagttacaccaagggtgcctgcctttcctgcctcgccttccatctctttcacctctgtcaccccagagacagcagaactaatccctcctcttcctcatcctcttcagcctactcawcttgaagatgatgagggtgaagacctttgtgatgatccacttccacctaatgaaaagtaaatatgtttcctctttcttatgattttcttaataacatttctttagcttactttactgtaagaataatgcatataagatacaaaatatgtgttgactgtttatgttatcggtaagacttttggtgaatagttggctattaaagttttggaacagtcaaaattaaacaccgatttttgacttcatgggggttggtacccctaccctcctcgttgttcaaggggcaactgtatattctttttggtgtatatagagaccctgtaaaagagaattaaactttttcaagtccctcatttg

SEQ ID NO: 370660 - DNA, 609 bp, Homo sapiens
tgcaagagctctcttgcctctggagagactgatctggaatgactgtcaataacaacaaccatatacctgaagaatcggtctcttccattttaatttcatagacatgcaccgctggaactatgattattacaggatgaagtctcctataggaaagccggctgagctaacaaaatcaagccccattagtctgtccctggagcacaaactctaaatggccaggggagggaaagtcacacaggagagggcaagtgattggaaattgtagaaaatgggagaacgttgttgcgtgccatggtctcatggagattcatggaacctggtaaattaaagtgcacatcygtcccttaaattgtcatgctgcttcacgtttacttaacttttgtacagacttttacagacttgtagaagtatttgtacagacttttagaagtctctccttcttccattgcttgtagctcttagatttaaatgatcacctgttcttttttgcagtcaagttgggatgtgcccccaaacacgtaacatgttttgaaactaaacaaatatccaccattaaattaagtttctttgatgctttcttttttcctggcagaatttggtcaaagcaac

SEQ ID NO: 370661 - DNA, 609 bp, Homo sapiens
tgcaagagctctcttgcctctggagagactgatctggaatgactgtcaataacaacaaccatatacctgaagaatcggtctcttccattttaatttcatagacatgcaccgctggaactatgattattacaggatgaagtctcctataggaaagccggctgagctaacaaaatcaagccccattagtctgtccctggagcacaaactctaaatggccaggggagggaaagtcacacaggagagggcaagtgattggaaattgtagaaaatgggagaacgttgttgcgtgccatggtctcatggagattcatggaacctggtaaattaaagtgcacatccgtcccttaaattgtcatgctgcttcamgtttacttaacttttgtacagacttttacagacttgtagaagtatttgtacagacttttagaagtctctccttcttccattgcttgtagctcttagatttaaatgatcacctgttcttttttgcagtcaagttgggatgtgcccccaaacacgtaacatgttttgaaactaaacaaatatccaccattaaattaagtttctttgatgctttcttttttcctggcagaatttggtcaaagcaac

SEQ ID NO: 370662 - DNA, 609 bp, Homo sapiens
tgcaagagctctcttgcctctggagagactgatctggaatgactgtcaataacaacaaccatatacctgaagaatcggtctcttccattttaatttcatagacatgcaccgctggaactatgattattacaggatgaagtctcctataggaaagccggctgagctaacaaaatcaagccccattagtctgtccctggagcacaaactctaaatggccaggggagggaaagtcacacaggagagggcaagtgattggaaattgtagaaaatgggagaacgttgttgcgtgccatggtctcatggagattcatggaacctggtaaattaaagtgcacatccgtcccttaaattgtcatgctgcttcacgtttacttaacttttgtacagacttttacagacttktagaagtatttgtacagacttttagaagtctctccttcttccattgcttgtagctcttagatttaaatgatcacctgttcttttttgcagtcaagttgggatgtgcccccaaacacgtaacatgttttgaaactaaacaaatatccaccattaaattaagtttctttgatgctttcttttttcctggcagaatttggtcaaagcaac

SEQ ID NO: 370663 - DNA, 609 bp, Homo sapiens
tgcaagagctctcttgcctctggagagactgatctggaatgactgtcaataacaacaaccatatacctgaagaatcggtctcttccattttaatttcatagacatgcaccgctggaactatgattattacaggatgaagtctcctataggaaagccggctgagctaacaaaatcaagccccattagtctgtccctggagcacaaactctaaatggccaggggagggaaagtcacacaggagagggcaagtgattggaaattgtagaaaatgggagaacgttgttgcgtgccatggtctcatggagattcatggaacctggtaaattaaagtgcacatccgtcccttaaattgtcatgctgcttcacgtttacttaacttttgtacagacttttacagacttgtagaagtatttgtacagacttttagaagtctctccttcttccattgcttgtagctcttagatttaaatgatcacctgttcttttttgyagtcaagttgggatgtgcccccaaacacgtaacatgttttgaaactaaacaaatatccaccattaaattaagtttctttgatgctttcttttttcctggcagaatttggtcaaagcaac

SEQ ID NO: 370664 - DNA, 571 bp, Homo sapiens
taactcatgtcaggaaattacctggtatatgattgattacttgcaataattggaatataaactattactcaaagccacttatattttctctcataaggggtatccaatttttagaaattatttttaaacgtgaaccatatagccakttaacttctaccaattaatcttactcatgaaccctggagctaattttaaataatttgacttttcccataagattctgaggaaggcctttatctttttgggcatcagtgcccttgtcctggcatgagatccaaagcttttttcatcctacgggttgtaggattctttcctttcctgggattctctaaacacaataaaaatacaaacatctaaatacaaatatcatgaactgtaaattattcccttctttcacaatgcaagccaacatggatttaaaatgttactgattactttcatcaattcaatgtccctgatattgttttatgtattattttttcttaatataacacctttgttcttttatatatcagaaatgctgaaatatttcctttcctataaaccctggatgtgctttacaaaagtgaaa

SEQ ID NO: 370665 - DNA, 571 bp, Homo sapiens
taactcatgtcaggaaattacctggtatatgattgattacttgcaataattggaatataaactattactcaaagccacttatattttctctcataaggggtatccaatttttagaaattatttttaaacgtgaaccatatagccatttaacttctaccaattaatcttactcatgaaccctggagctaattttaaataatttgacttttsccataagattctgaggaaggcctttatctttttgggcatcagtgcccttgtcctggcatgagatccaaagcttttttcatcctacgggttgtaggattctttcctttcctgggattctctaaacacaataaaaatacaaacatctaaatacaaatatcatgaactgtaaattattcccttctttcacaatgcaagccaacatggatttaaaatgttactgattactttcatcaattcaatgtccctgatattgttttatgtattattttttcttaatataacacctttgttcttttatatatcagaaatgctgaaatatttcctttcctataaaccctggatgtgctttacaaaagtgaaa

SEQ ID NO: 370666 - DNA, 595 bp, Homo sapiens
ctttctttcacacttaacaccattttcccaatatcaagaggcttaatgcttcaagaacagaaatttgagttttcttttgttattcacagcagtaatatctggattctgaaaataagtgattgagaatgatttgatcaagaacattgttgaactaatttaaactggagtatctcattatttgtagtcaagaagcaatctctctctggttgttatcattcactttggttccactaaagtagagatacaagagccaaaatgagtgagaagagttagccctctgacaattttggttagagaagacagtcattagatcaacctaatctacatagtacattttaacgatgcatatgtatgtagaatcatatggaatcctgtagaatcatatggaatcctgcacacatttttgaataaaaataatgtacatacttggaacartaacagttaacatttattgagtgcttactgtctactctgaaggtaaagtctaacttaatcaccaaaacaattctatgaggaaggttctaatatccttttttattttttaaaaagcaagatacagctaatataaataaattgcctcaactcacacaatatc

SEQ ID NO: 370667 - DNA, 476 bp, Homo sapiens
aacatacagtgctatttccaccttctcacaaccaaataacatctcaaatgacagaggaggaagcaagtacgaagtatgtggtcaggcagcacatgaagctaagactgcaaaaatacagacacaacacccaaatccctctccagtgttctttatatttgttccctttattttatgatttttatatgttttgaggcatttttccacagayagatttatgaaagttctgttctgagagttatcagatcttggtttacccatagacaaagtggttcataaactgattagccaaaacaaaaacaaaaagaaaaaaaaaattcctttaaaaacctagaagtatgtcagatctcagcatgattctttaagtatatttgggtttctcagaaggtatttgacaactgattaatctcaattttttccctctgtttcaagctaaataaattacaagtaaaaataactcttttatgaaccttctctcc

SEQ ID NO: 370668 - DNA, 483 bp, Homo sapiens
ccctgtgtatctgataaaaccttttaaacttgttgcctttactttcttatcgaagaaatggggatgactgtctccatcccattcagatgccataagaataacataagttgaaagcacctagtacattctaaacaacatgattttgggggtaaagaactgatttgaaaatgcttaatgcaaaaagaaaaaaaatactgagatgttataggcygaattctagagctgtccctcaaaggttcccatttactgattattctatcaaataccgatctaagtattactgtgaagggactttgcagatggaattaaggtgattaattagctgactttacaacagggagattaccctagataatcagttggcccaatgtaatcatatgagtccttaaaagcagaaggggaagacagaagagcctccttcagaaatatgtggaggagaaggtgaggcaggacagatgaggtagaaagggagagcagagagaa

SEQ ID NO: 370669 - DNA, 438 bp, Homo sapiens
ttgagctttcggttaaagtttacctggcaatgcactgcggtgaacaaacagccacactcgtgtggtgaaagttttaacctctacaaagtttagcagcctatctgaagagcaatctattattagctatagaaacaacagattcggaatccctgatgaaaacttcaaaccatgtgcactgttcactcctaataagaatgaaataattcttccttctttcttgtttgcctctctagtcttgaattactcagattgtcttcaatcaagtcatttgagaaaactagaaaagccaaaatattagaaacctatgattattttwcagaaaaaaataaagctttaagttgtgaaataatttacacacaaaaacataataaagtgaaaactctattttattatcttaacttctagactgatgctccaaaatagccactagctacatta

SEQ ID NO: 370670 - DNA, 607 bp, Homo sapiens
ctatcctcttggggagaaagggtggagagaggcatccacagactgcctggggaatgctatccctgctcctcatccctcagctgcaactgaagttctgctggatcctcagaggggctagacaacagatgtcgccctcccctcacaaatacaagagctcttcctggtatgcagatgaactgatctgcacctggcctgttctgtctctgcggctgtgacacatatgtaacccaaggaatgctaccttccccatcctaaaaaagtactgttgcccacaggtggtacctagaaaaactgagatcctgacaaaggggctcttctcagttgcatttcactgtagcacctggaggatttctggaaacaaaagctcaatgaaccagatctcaccatcttcagaagacctaagaggtcctgagggaaacagctaaaacttggcctaccagcccttctgcataactacccttcaagagygagctgtcagaaagtttcccacaccagaagtcctggctcaccaccccttagagagtagcagtgcagggcccctggatctgcagagctccctgctttcccttcccaacttaggctcatagtgacagaggtgaaaaagcct

SEQ ID NO: 370671 - DNA, 532 bp, Homo sapiens
agtcttgtctaaacatctgcccattaaagagctaaaaacttaaacacaatttttttttttttttgagacggagtctggctctgtcaccaggctggaatgcagtggtgccatctcggctcactgcaacctccgcctcctgggttcaagcgattctcctgcctcagcctccagagtacctgggacgacaggcacacgccaccacacccaacaaatttctgtacttttagtagagacggggtttcaccatgttggccaggatggtctcgatctatctcttgacctcgtaatccacccacctcggcctcccaaagtgctgggattacaggcataagccacygtgcctggcccttaaacacaattttagtcatataaacttttatatatgacatatcaaatactacctataattacataaaatcaactttttaatttttaatatactattttgaggaaagcacatgtaatgataaagtattgtttctataaataattataaatgattaattagtacatttggaaatatattattttc

SEQ ID NO: 370672 - DNA, 573 bp, Homo sapiens
atctgacaaacccatttcactcttgattcaaattattttcatagaatattctatgcttcctctggtatcaccaaaatactttaaaataataactggacataaatattcaatcattattttgaagtgtgttaatagcttagttataaattgcacatgaagttatttggtaacgtacctcacatccacgtttttataaaataatctccaatgtgtaattagtaaactgtacagataaaaacatgctaaacaaattgagaaatctaattacaaattattcttcacttaaaaagttaattccagatttggagagacctgaagattataaaatctgtagatatatttaataagaaaaataatatcaaattcactcaataaataaatactgatctatatcaataaaataawtcacaacaaattttaaaattaaataaaagctgagagctaaacctcacaacattcagaaaaatgttattatcattatgattataattaggattatatatttgtttacaatggtaagaaccacatcatacctactcagttatcaaatttttaaggatctagtaccatata

SEQ ID NO: 370673 - DNA, 630 bp, Homo sapiens
tatttgcaaaagatatctctgactatgggcttttatccagaatatataaagcactgtcaaagcacacaggaacgaaaacaacccaatcaaaaagtggacaaaagatgtgaagagatatttcaccaaagaggatgtaggaatagcatattaattatctgttgctgcacagcaatgttaaaacacacttggcagcttaaacaacacatctttactatctcatggtctctgttggtcaggaatctaggcgtgtctaagctggaccagagtctgctccagagcctctcactaagctgaaatcatggtgttgtgcagagctgggatctcttctaaggctgaaatgaggaaaaacatacactcrgcaaaacaatgaaataaactattgatttgaccaaatggatgaatgataaaataattatactgagtgaaatatatcagacaaaagagtatataggatataactttgtataaaattacaggaaatacaaatttgttttgacagaaagcagaggagtgattgcctggggatgtgggaaaaagtaagaggaagggattacaaaagagcatgaggataggtttaaggcaagaaatatgttcattttcttgactgtggtggtaccttaatggagtaca

SEQ ID NO: 370674 - DNA, 606 bp, Homo sapiens
cccaaaggacaaatattatgtttctatcattcatttatgtaaattttcagatagatgtgaccctgtagccctgatgatgatgatgatgatgaaccagatttgaaggtgttgaaaaaagggacataygcacaagatatttccaggttcagagttagggggaaaaaattcaaatgatgatatacattttctggtccattattataaaaattaaaaaagagagagagcaatacaccttttatgtaatttagtaatgtgtttctatattgaatttgtggctaattatcaatcttattttttagcttgaatcttcctagataacaagcacatagttgtgaaaatggaatgaaaattatagtgttaaagaacaaagacaaaagttttccagttttttggtatcagaaaccctttataatctcaagaattattagggaccagaaagcgattttaattatctgcatttcatctgtaggtagttaccatattaaaattgaatctaagagtatgaaaaatatattaattaaagtaacagtgctaaactcattacctgtaaacataaaaagcaaatttgcattaaaattaaaaaaaaattaatgtgaagcttgatat

SEQ ID NO: 370675 - DNA, 606 bp, Homo sapiens
cccaaaggacaaatattatgtttctatcattcatttatgtaaattttcagatagatgtgaccctgtagccctgatgatgatgatgatgatgaaccagatttgaaggtgttgaaaaaagggacatatgcacaagatatttccaggttcagagttarggggaaaaaattcaaatgatgatatacattttctggtccattattataaaaattaaaaaagagagagagcaatacaccttttatgtaatttagtaatgtgtttctatattgaatttgtggctaattatcaatcttattttttagcttgaatcttcctagataacaagcacatagttgtgaaaatggaatgaaaattatagtgttaaagaacaaagacaaaagttttccagttttttggtatcagaaaccctttataatctcaagaattattagggaccagaaagcgattttaattatctgcatttcatctgtaggtagttaccatattaaaattgaatctaagagtatgaaaaatatattaattaaagtaacagtgctaaactcattacctgtaaacataaaaagcaaatttgcattaaaattaaaaaaaaattaatgtgaagcttgatat

SEQ ID NO: 370676 - DNA, 606 bp, Homo sapiens
cccaaaggacaaatattatgtttctatcattcatttatgtaaattttcagatagatgtgaccctgtagccctgatgatgatgatgatgatgaaccagatttgaaggtgttgaaaaaagggacatatgcacaagatatttccaggttcagagttagggggaaaaaattcaaatgatgatatacattttctggtccattattataaaaattaaaaaagagagagagcaatacaccttttatgtaatttagtaatgtgtttctatattgaatttgtggctaattatcaatcttattttttagcttgaatcttcctagataacaagcacatagttgtgaaaatggaatgaaaattatagtgttaaagaacaaagacaaaagttttccagttttttggtatcagaaaccctttataatctcaagaattattagggaccagaaarcgattttaattatctgcatttcatctgtaggtagttaccatattaaaattgaatctaagagtatgaaaaatatattaattaaagtaacagtgctaaactcattacctgtaaacataaaaagcaaatttgcattaaaattaaaaaaaaattaatgtgaagcttgatat

SEQ ID NO: 370677 - DNA, 592 bp, Homo sapiens
acacatttatttttctatgatgtacaagtttgtctgcttttactagacaggcttattcatatgcttattaatttttaaaatgtaaaatcaatagagcaattcacaagataacatgtrtatgtaaatatgtgtgtgcatacaagtgtatatgtgactatgtctatgtatatgtgggaatgaatgatactgtgaaaactctatctcccagcctattgtttcatcaccctttttcccatttattcatactgtataccttttcgccagtattcatactgtataacttttagaaattagttcttatatttatttaaattccaataagcaatttaaaatgaaaaggtgtagtgtattctttatttaatatttttaatacaaagaatacatgtagaacacataactagcatataatgtgtataacacatatttcttttgcaacatgaatttttttacaatttaatacagccaggctagtaatcccaaaggtcttgatgctgacatatgaaatctttaaactttccttggttattttttaaaaggaattaaaacagaatcctgatcttgcaaataaaagggattatattttaaagttgaa

SEQ ID NO: 370678 - DNA, 496 bp, Homo sapiens
tgcgatgttaataaaacctaaaatgaggtgatctttagcaagctttccatgctagcaacttttattatttgcatttatttatgtgacagaggctgctttaaaaaaatctttattagttccaaggcatattttatgagactattttaatccaccaagtaccaccaatagactgtaataataaatgaaaaataattttaagtgctccattggaaaacacaataaaaatatttaaatagcatttcagtataaattatacattcattggggaaaataccattagtaaaattttctgaccaataataataaacaggtaagtataaaagagaatttgtttctatagagmataatgtgttatcagccttagattataacctgcatatagtggcatgtctattctaaagttgtgaaacacaaattttagattcaaatactaagatacaattactttgcatttttttatacaacatcaactaaaatatagagaaataagttgttt

SEQ ID NO: 370679 - DNA, 618 bp, Homo sapiens
tacggacaatatcacggtcagtttcaatccagatataaaagatgaagaggcagtgcaaggaaagatttygcagatagtaaaaagggccaaaatagatcaaaattatcttattaactgttagtactgagagttcgcagtgaggtaggagaatcagaaaatctcagcaaatttaacttttaaaaagtaatgcgtatggtgctccatgttctgagtaggtggcttgtgattttccaggaaaatctgttcaagaaacagagctgttatttggtcatggacacatatattttttgtctagaagaacatcattatctttttcatgaagtaattgcagtgtttatgtcaaacatttatcttattaagtcaacaggatagttattatataatatttttccaaatgaataaaatgaaaaaccgaatgttaagtcacagtcacataacattgctggtatatagaatggttgacatgataggacgtttttgtaactccaaaagagaaatatctatccaagaagttgcaaccctgagaatttattatattatctgacaaaagtctatcttatgataagcagtttttctagatttgtctaggaatggagacagagataaaagttcatgtgg

SEQ ID NO: 370680 - DNA, 618 bp, Homo sapiens
tacggacaatatcacggtcagtttcaatccagatataaaagatgaagaggcagtgcaaggaaagattttgcagatagtaaaaagggccaaaatagatcaaaattatcttattaactgttagtactgagagttcgcagtgaggtaggagaatcagaaaatctcagcaaatttaacttttaaaaagtaatgcgtatggtgctccatgttctgagtaggtggcttgtgattttccaggaaaatctgttcaagaaacagagctgttatttggtcatggacacatatattttttgtctagaagaacatcattatctttttcatgaagtaattgcagtgtttatgtcaaacatttatcwtattaagtcaacaggatagttattatataatatttttccaaatgaataaaatgaaaaaccgaatgttaagtcacagtcacataacattgctggtatatagaatggttgacatgataggacgtttttgtaactccaaaagagaaatatctatccaagaagttgcaaccctgagaatttattatattatctgacaaaagtctatcttatgataagcagtttttctagatttgtctaggaatggagacagagataaaagttcatgtgg

SEQ ID NO: 370681 - DNA, 536 bp, Homo sapiens
gccgggggtgacatcacatatcaggaggaccgtgatgcccacctgagtctcagatcagcaagtttttattaagagtttcaaaaggggaggggtataagaacagggagcaggtacaaagatcatatgcctcaaaaggcaaaaagcagaaatactagtaaatatctaacaaagatcagacgcttctaagggaacaggacaaaggamaaaagcagaagaactgataagggtccaacaaagatcacagggcaaagggcaaaaacagaaccactgataagggtctatgttcagggtgcacatattgtcttgataaacatcttaaacaacaaaaaacagggttcgagagcagagaaccagtctgactacaaatttaccagggcggagtttttccccaccctagtaagcctgagggtactgcaggagaccagggcatatctcagtccttatctcaaccacataagacagacactccaagagcggccatttatagacgtccctccaggaatgcattcctttcccagggtattaatattaatatt

SEQ ID NO: 370682 - DNA, 605 bp, Homo sapiens
taaatgttatcatgttagcatgtgtggtaaacttcatgaatcattagcacattttcaatccccgccttccttcacatggttgaaaagagtgtacttcctgctccttgatgcagggccatgcgacagactttgccaatgaaacatagacagaagtgaaggtgtaccagttcttagcggaggcttgcaccagtaattttgagctctgtcctctcccatagaaagatcacgcctcaggtagaggttgcatcttaaacctaagtaaaaaatcatttaccacctcatactaaaacatccaggtagctggttgtcagaagattagccagacatcttttatgattatcaaggatattcacaaagctctcatcatctgtctcagtctacaagacttcatcaaacattctcaagtcttcactaagcctttgtgttactcatgtatacctttcacagctgccaatatatgtgawtgaaaccatttctggagaacaatggccttccccctttgcatgtttaaagcttttctaaggtcttcccattggcaaactcaaattcggcaggagattctgggaaatgtagctcctggttttcactccacaacgaagagggca

SEQ ID NO: 370683 - DNA, 430 bp, Homo sapiens
acctttgcatgacttccttgctttagttagtgaatccttttctaataaaacataatttggcgactgcatctagtatataagatgtttctatttctcargtgttgtaggttgggaaatattatgctttattaatttgaggatgagggtaggtatccaaaacatggaaggaaacttcagaaagtttattaaaaaattgaattagaagaaaaaagttaaaaatgtgtaagctttatttcacaacataagtttcatcacgttcgagacacctttgtaagtgatcatggcagccatttagtccatccctgaagaattgggagtgctaagaatttaagaatgccttgcactctttttaaattattaactgaataaaaatggataccctatatacatttttttaagactaagaaacaaataaaaaaatcggaaggag

SEQ ID NO: 370684 - DNA, 480 bp, Homo sapiens
tgtgtggcatgacccatgcaacatattttttaaaaatgcaaatattaatcagaaataaaactacatgatgtgaaacaaaaatatttaatattagatcaaaatakatagatagaatcaatagcagcttatatgtcatcacttcactactcaatagaagaaacaaggaaatatctataaaaacaaataaaattattagaaactaaaatgattgataggatttggaaatacaggaatggaatatagaaataattttgctggtagaataattagaaggaaatattgcaggttctatggaagaagaagttagtggctcacttcttcttccatggggaaataatgttggaaggatttttaaaggcttagctaagacagaagtctttcaggccaataagcactattgtttgtatgagtttcataaatatttcttatactgaaagcaggtttcataatcgtgtctgagcatccagtatacaccaaggt

SEQ ID NO: 370685 - DNA, 508 bp, Homo sapiens
tgacagtttgccatggagtttggaaatatatttaataaaaagtccatgataaaaactgaagagaaaaagataaaatcaaaggaaaatgtggaaaatcatacatctagcaagatacataactgccagaacaaataaactggcagatcaaataaaamgggcaatttaaagtccactgtcaacagaaaaaaaaatcatgcacgtatgtacttttcagcaatagttttttttaaaattagaattgctaagagtatttctgagaagagtctattctgacattgctcaattgctgtatagtagcaattggattataaaaattgatttttgcttcttatcatttaaaaaattgtgttccttattatttgtaagacatcaagaatattggaagaagaggaggaactcatttcctgtggcttcatatttccttgtgactagacgcattacaatcacttctccctatctttctcactctactccttcccatggcaggagacatgagtcatctgttcgg

SEQ ID NO: 370686 - DNA, 350 bp, Homo sapiens
taggggccttgcttgagcaacttatttagaagagccaaagtcctatatagtgacaagataaagaaaacagtatcttcaggcttccaaaagaccgaaaattgtgggaaggtaatttttaagcagagtaacatctgcttatggatcctctgatgctgctgtctctgagctgtttctgagcygacaaaggcaaagagtagaggcagaatgtggccctatattttaactgtgtaatttaaataaaatccccagtattgtagagaaggatattttggtctttttcatatgcttaatagcatacagtagagtgtatgcataacttttatgcacacgtggaaacaaatgaaaatcct

SEQ ID NO: 370687 - DNA, 660 bp, Homo sapiens
catagctcctcctgtaacctgataaataagtacacttagccaacccgttgggtatacattcctgttccactcgttcctttctcaaagtgcctgcttattatggtctctgccagaggccatgcttccaaacctactgcrtggctagcctgcaggctgcaaccctttgtgagaaataaagccctcctttccaaatgtatgaacctcatgattcttcagttgacaacaacaaaacaaactcagagcaatctacaacttcacaacttttcctgaacccatctgagatttgagattggagggcagccaaataaccgggtattacaggaaatacagtcacttcccaggacagacagacacagatacttgcttacctgcgtcagaggccccaggatactggtaaggattctgctaaaatacatgatgcattgctaacagtgggcaaaggacaaaattacagtacatttaacttcaaggtgtcaattggctttattgtgactataggattgggcaacactccattccatgaaataggatgtgttccaatgagctgagtttggttttataaacagacaaagggttgaagaaagcagaaacaaagaacaaagagtgtatcagtcatcttaaagctacttttcttgtaaaaggagaacagggagtcaggac

SEQ ID NO: 370688 - DNA, 445 bp, Homo sapiens
tgtcttcttgtgctgagtctcgtgcagagtcatccagtttctggatgggggccacaagatcatatgagcaagtttatcaatctgggtagtgccagctgatccatcaactgtagggtctgaaaaaaaaaaaagcgtttccaaaaaaaaagctgtaaatagaaaagtyttcttggctctggaaaacaaaaaaggatcgccagcattttgagcaaaaaaagcaaaaaaaatattagttcaattttctattagttcagtccattcatttaactcctattctacttgatattcatgaacatttcagctctccatgagagtcctgacagtttttttcctttattctaatgtcataatctccaaagttaacagaaacttgcatttaagagcacctgtcaaaagttttgtaactgattataaaaccatcttctcaagaggaccaaaatgggac

SEQ ID NO: 370689 - DNA, 567 bp, Homo sapiens
cagttgtttttttgtttgtttgtttgtttgtttgagatggagacttgctcttgtcactcaggctggagtgcaatgacatgatctcggctcaccrcaacctccacctctcgagttgaagtgattctcctgcctcagcctcctgaatagctgggattgcaggcacccaccactatgcctagctaatttttgtacttttagtagagacagggtttcgtcatgttggccaggctggtcttgaactcctgacctcaagtgatctgcccacttcagcctcccaaagtgctgagaacacaggtgtgagccactgcgcctggcccagctttttttatataaacatcacacacacaacacatataaatactcagaagatccagtagttgtaagatttctcatttgccagtttcttaattggattactggcttcagggtggagcccttggaggaacaggtccaggaaagcatgcagtttctagggcctaataagcaggcacagctggaagaaagatccccaaaattaagggtgcccttttatactgaataccggatccccaaaaaggagggaaatac

SEQ ID NO: 370690 - DNA, 581 bp, Homo sapiens
cttttccaaccttaaggcaaagaaccgatcccagtccaattcttaagaagcatggaaagggccagggactgtgccaggtgcagtgtccctgtcagcatttccttgagggtcctcatatcttagaagcatgctctctgggtctcagtccccactgctggctatgtgtattgagtgctgattctgaccggtgctgtgctaagtgcctcacatacaggatctcatgtaatcctcatgtttctcatgtaaatgatatcaacctcattttaccgataaggagactgaggtctgacaatgttcagcaacttccscaaacccatctaccttatttcaatgacacagctgggatttcaccccagatcagattgactcaaaaggccgtatcttaacactccccctggcttggaagagagccctgccttcatgataggggtgacactgtaatggagggaacaatgccaggctgtggagaagccatgttggggcaagtgggtctcttcagcactgtttttgtgggggcgtgctggagctggctccatggcactctttaatccattagtaacttgaaattggccacagtgagg

SEQ ID NO: 370691 - DNA, 549 bp, Homo sapiens
agagtggtttgttatcctgttctccccatcctaaatctgcactccccagagtaacccctctcaactcttttagctatttaatctgctatttacttctatattttaaaatttcttgcataggtagctatttcwtgatttctcagttttaagagttattgattgactttcaaccacagataattaaattttagctctttacacacccatttgctctctcaccaaacacacaaactatccttcccccatcctccaatagagctgtatcacaatttttcataaaagtcactagttgggtatttatattagtatgagcatataaatattcatagctaagccatgtagggtgctatgagtataattcttttttcttcctcctggattgatacttgcttttgttttcatttgcttagtttataacttgttagtgtattgcaaatctattcctaaattcttctacagaattgaaaatctctttagaatatgttgaaatatgttaactatttgattagctatcatcctgggatttttcttcacctcttttcttggtgg

SEQ ID NO: 370692 - DNA, 608 bp, Homo sapiens
tccagttctatctatgttgctgcaaatgacatgatttcattcttttttatggcctaatagtatttccttgtgtatatatagcatatattttttaacccattcatctgttgattcccacttaggttgattccatgtctttgctattgtgaataatgctgcaataaacatgrcgttgcaggtatccctttgtaaaatattaatacatttttaaagattaccatgatacttaaatgccacattcacaagtcataatgcaataaaatgagaaaccatcaaccaaataatgccaaaaataaaatctctggacttgtgatttaaataacacatttatctcaataattactgaattaaaggttaatcaaaatggaaataacacattattagaacaaatacaagagcacagtatatccaaatatgtggagtatgattcttcagaagatattgtaaagctttaagttcattaattagaaaataccaagtctgaaaataaataacctatgatttcaacttaagaaattaggtaaaaagcaacaatataaaaccaaagacaataaagagaaataattaataaagatgaaagctcaaatgaacagaaaacaaaaagtgga

SEQ ID NO: 370693 - DNA, 590 bp, Homo sapiens
ttgcaggtatccctttgtaaaatattaatacatttttaaagattaccatgatacttaaatgccacattcacaagtcataatgcaataaaatgagaaaccatcaaccaaataatgccaaaaataaaatctctggacttgtgatttaaataacacatttatctcaataattactgaattaaaggttaatcaaaatggaaataacacattattagaacaaatacaagagcacagtatatccaaatatgtggagtatgattcttcagaagatattgtaaagctttaagttcattaattagaaaataccaagtctgaaaataaataacctatgatttcaacttaagaaattaggtaaaaagcaacaatataaaaccaaagacaataaagagaaataattaataaagatgaaagctcaaatgaacagaaaacaaaaagtggagttaattcataaaaccaaaatctttttttcttttttaaagaccacyaaaagagacaatcctttgccaatcctttgccaagattgatgaacaaggattgaaacagatagacaacagcaggaactaaaaatggacctaattacagcagaaaaataa

SEQ ID NO: 370694 - DNA, 538 bp, Homo sapiens
attataatcatcgtggggtcaaggtttatgtccattttaaacattgaaatatcctttaaatatgtcattgagagtattttttccatattgtgtcacggaggccacctctattccccttcctcagtaacgccagagatcctgtcttcttcttcctcttccatggccacagtctgtaaaactgataggggccggggagtggaatgtctactggagatgtgtgaaatcactcagtaaactcttggaggagacaggtacagtggctgcacttggtttcccctctccagacctccctctccctccccyttcctcccctgtctgtcccctacaagctgttgtttggttaaacacggttttgctttggttgtttcttcctgcatgctaaggcttggggaataactacattagaaactaccaagcagaggctgaaatccacgcattacatcctacttaggaatttccaaaggcggctttgagatagatttccagggataaataagataaaaaatacgctaggtaatgtctgtacacacacagagcg

SEQ ID NO: 370695 - DNA, 560 bp, Homo sapiens
gactaatctgtgcaaatatcccaatcaccaaataactttcacccaagagttttagtgtccggtgatccttgtgatcyttgactgaatcagttattactatggtagctacattatggtgactttttcccacatttactggttggtattatctgtaaggacatgctctcttctcaccaggtaggaactattctaagggttgaggttagtgtcatgagataaagtcagagagatagtgagtccagaccatgagcaccttctggaccatgctaaaggactttggcttcattgtaagcacaataagaaagcagtgaaggtcttgagcatgggagaaacatgattaccttttgaaaagatcaaattctcttaccatttttcacctctcagactgaaatatttttccccccaggctggagtgcagtggtgtgatctcagctcactgcaacctctgtctttcaggctcaagtgatccttccatctagcctcctgagtagctgggaccacaggtacacgccaccatgcctagctaatttttgtattttttgtagaggtggggtttcacc

SEQ ID NO: 370696 - DNA, 560 bp, Homo sapiens
gactaatctgtgcaaatatcccaatcaccaaataactttcacccaagagttttagtgtccggtgatccttgtgatccttgactgaatcagttattactatggtagctacattatggtgactttttcccacatttactggttggtattatctgtaaggacatgctctcttctcaccaggtaggaactattctaagggttgaggttagtgtcatgagataaagtcagagagatagtgagtccagaccatgagcaccttctggaccatgctaaaggactttggcttcattgtaagcacaataagaaagcagtgaaggtcttgagcatgggagaaacatgattaccttttgaaaagatcaaattctcttaccatttttcacctctcagactgaaatwtttttccccccaggctggagtgcagtggtgtgatctcagctcactgcaacctctgtctttcaggctcaagtgatccttccatctagcctcctgagtagctgggaccacaggtacacgccaccatgcctagctaatttttgtattttttgtagaggtggggtttcacc

SEQ ID NO: 370697 - DNA, 571 bp, Homo sapiens
agcatttttaatagattgctatggtggctgctcagcagtggccttgaggaagacccagtggaaacagggaactccatagagactgtagtccaagcaagtgacagtgtaggtcagaatgaaaagagtgagttggagagattattggacaggtgagagggtggcaaataaccacatacactctgaaaccagagcacctggttcatgtcctggttctgctatttcctacctatgtggctccaggcctcagctttcttgtctgcgaaatggggatgctactaacgttccctactttgtaagggtgttgtccagattatgggagtcgaagtcttcagggagcttagagragtacttgatgtacaccaagtgcccaatatatgtcagctatcaccattacttagctatggagtaagaaaaacttgatgaaagcttgatgggagcagtggagctgagggaggagcccccaccctctggctagctggagagacatcaagaggaagagcaggttggggaatacggttgtatgcatagagtttgaagaatccaagacatctggtgaagattgcaggcagaa

SEQ ID NO: 370698 - DNA, 516 bp, Homo sapiens
ttcttgtctgcgaaatggggatgctactaacgttccctactttgtaagggtgttgtccagattatgggagtcgaagtcttcagggagcttagagaagtacttgatgtacaccaagtgcccaatatatgtcagctatcaccattacttagctatggagtaagaaaaacttgatgaaagcttgatgggagcagtggagctgagggaggagcccccaccctctggctagctggagagacatcaagaggaagagcaggttggggaatacggttgtatgcatagagtttgaagaatccaagacatctggtgaagattgcaggcagraagttggacaactgagtctgagcagaggtctgggctggagatagtcatatggggtatcatcagtacactgtgtgagttgacacatgggagtggctgagatccctggagagtcatagcatgagaagagcaggtggtcaaatacggagaattccccaacagttaaggaccggatagaaggagagagactcaccaagg

SEQ ID NO: 370699 - DNA, 565 bp, Homo sapiens
ctaatgttattgttttagaagacaattaacttgatagactcaaagttcagttgaattgccttaagtagatagcaattcaaatctcagttcagttctgttagccttacctgcaagcacatgtacggtacaagggttaaccaatgtccctcagtttggatatctgagygcatgcacagaacttaagagttgctctttctggctctcctctttttgggattatccttacatgttccagtggctgtggccaccccaggctctgtcctcgaacatttcaggccagaaaggtgatagattttctatcagggttttagtcactccatacaatgccatagcaagcagttttcagcctgaagccattagaatagaaaattcaccatgtgccagtccttttttccaagtctcaactcccttccaaattctccctgatttttctcactctgcagaggcttcaagccattgcttttttgtattttttccagaatttattattatttgtaggattacaagtttatcaggagctcattccaccagatcagaaatggaaccagctactatttattaaacc

SEQ ID NO: 370700 - DNA, 615 bp, Homo sapiens
aataaataaacgattggataagcaaataaactccaactaatagctgggcatggtggcatatgactgtagtcccagctactcaggaagctgaggtgggaggatcacttgaacccaggaggttgaagctgcagtaagctgtgatcatgtcactacactccagcctgggtgacagaacgagaccctgcctgtaaaaaaaataataataattccaactaataaatgtagaacaaatgacagaaatagaagatcaccattagaacatctcaattacaattactgtaagcagaggcaggctccatctctgaatgaatgctaacattaacaggtaraagtttaagaaaaaacatgacgtatgttcaaaatatcttcctcaaaatacttattagttactgtagtgagaaatgttaacaaattctttgatacccctccctttgaggtggaccttaatttccctctccttgagtgtgggctgggacatagtgaatctcttctaacagagtgtaagaagaggaaaatattaactttgtcatggataaagctgacagacaccacctaaatcgagtgatcaaagttaacatcaccataataagacctagtgataccacacacgccctg

SEQ ID NO: 370701 - DNA, 593 bp, Homo sapiens
ggatagcaacaggtaaagaaggaaacaggaatgagatcatgcaaataagacttggctcattcatcttcaattgggatcccctaaagaggatcatttgctgtcccctcagccacctcaatggtacagaagttatctttaacctctgtcatctggaagctcctttgagcacatctagattcctctaattttacatctagaagagaaagaagctcagccatggtgttaggagcttgccctctgccttagaaatggttaatctgtattaagtattaatccaacctctttgtaatgtgcctttctgaatttcagagtctggaaatctaaaagttactgactccctggcctctagagttctggttgagaatggaattctgtccattaaatatacttgtgtgagatttggaagctgggactaatgccagggcaattttcctgagagtttggctaatggcatggacaccttaggctgctaagcagagctgcaggtgcaaacactaagctctgaggatattgaagggagctgckgcaaaagcagcaatgacctccccagattgcagattacatcactaggtccactggggcctcctgatttc

SEQ ID NO: 370702 - DNA, 662 bp, Homo sapiens
tactccttttctattattcttgagtggtctcaactagtctcaactacatgctgatgactctaaaaactttaatctgaactgcyctcccaaattcaagattcatatagtcaactacctactagacatctgtacttggatgtttaataagcacttaaatccatgttccatactgaggcattgatcttcttatcctcaaacctgctttccctgccatcttactatttatttagttaatggtaacattatcctttctggagcttaggtcaaataacttttgaatcacctttaattcttctcattctttcataatttacatccaattcattggtatttacactttacctgaaaaagtacatctggaacgtgacttcttcttatcacctgcactaccattaccaacccattgtcatttcttgctcagaatctttctatagcctcttctccattgatgtctctgcttctatccttgcccctcgttgatctattcataacatagaagtctattaaaagatggtcagatcatgtcacaccccatttcctcacctccacgactcccatcctaaagtctaagtcaaagtccttatggtggtctactgaacagtattccattgcatggctataccacattttgtttattcattcatctattgatgggcacttga

SEQ ID NO: 370703 - DNA, 522 bp, Homo sapiens
gtgggggagaatagacaaatctctctctctctttcatttttgtttctcagagttagggtctcactctgttgcccaggctggagtgctgtggcacgatcacagctcattgcagccttgaactcctgggctcaagtaatccttccacctcagcctccccagtagcagggactacaggcatrtgccaccatgcccagctaattaaaaattgttttttgtagaaacaaggtttctctatgttacctatccaggtctcaaactcctggactcaagaaatcctcccgcctcatccttcaaagtatcgggattacaggcatgatccactgcacccagccaagaatagacaaatctcttgtgtagaagaatttcaaataatttgtatagaccttctgtcctcaaaagggaggagcgtaactccctaagtttggggtgcacaaaatgacttctttccaaagagaacaatagggaaaaggggaaaaagagtgatttaacagaggagccacctataaataatacctcagccaa

SEQ ID NO: 370704 - DNA, 522 bp, Homo sapiens
gtgggggagaatagacaaatctctctctctctttcatttttgtttctcagagttagggtctcactctgttgcccaggctggagtgctgtggcacgatcacagctcattgcagccttgaactcctgggctcaagtaatccttccacctcagcctccccagtagcagggactacaggcatgtkccaccatgcccagctaattaaaaattgttttttgtagaaacaaggtttctctatgttacctatccaggtctcaaactcctggactcaagaaatcctcccgcctcatccttcaaagtatcgggattacaggcatgatccactgcacccagccaagaatagacaaatctcttgtgtagaagaatttcaaataatttgtatagaccttctgtcctcaaaagggaggagcgtaactccctaagtttggggtgcacaaaatgacttctttccaaagagaacaatagggaaaaggggaaaaagagtgatttaacagaggagccacctataaataatacctcagccaa

SEQ ID NO: 370705 - DNA, 522 bp, Homo sapiens
gtgggggagaatagacaaatctctctctctctttcatttttgtttctcagagttagggtctcactctgttgcccaggctggagtgctgtggcacgatcacagctcattgcagccttgaactcctgggctcaagtaatccttccacctcagcctccccagtagcagggactacaggcatgtgccaccatgcccagctaattaaaaattgttttttgtagaaacaaggtttctctatgttacctatccaggtctcaaactcctggactcaagaaatcctcccgcctcakccttcaaagtatcgggattacaggcatgatccactgcacccagccaagaatagacaaatctcttgtgtagaagaatttcaaataatttgtatagaccttctgtcctcaaaagggaggagcgtaactccctaagtttggggtgcacaaaatgacttctttccaaagagaacaatagggaaaaggggaaaaagagtgatttaacagaggagccacctataaataatacctcagccaa

SEQ ID NO: 370706 - DNA, 522 bp, Homo sapiens
gtgggggagaatagacaaatctctctctctctttcatttttgtttctcagagttagggtctcactctgttgcccaggctggagtgctgtggcacgatcacagctcattgcagccttgaactcctgggctcaagtaatccttccacctcagcctccccagtagcagggactacaggcatgtgccaccatgcccagctaattaaaaattgttttttgtagaaacaaggtttctctatgttacctatccaggtctcaaactcctggactcaagaaatcctcccgcctcatccttcaaagtatcgggattacaggcatgatccactgcacccagccaagaatagacaaatctcttgtgtagaagaatttcaaataatttgtatagaccttctgtcctcaaaagggaggagcrtaactccctaagtttggggtgcacaaaatgacttctttccaaagagaacaatagggaaaaggggaaaaagagtgatttaacagaggagccacctataaataatacctcagccaa

SEQ ID NO: 370707 - DNA, 493 bp, Homo sapiens
tgagaaacagacacaccaagatctacatggaaacacacatatgtattacacatatgtgctgacacacttgtatataccaggcatgtatacatataggtggatatatacctatacacatgtgtttctgtattgcacacacattcagttcccaacttctgcatcacaaaagtctacatcaagggtgtccaatcttttggcttccctgggccacattggaagaactgtcttgggccacacataaaatacattaacactaacgatagctgatgagctaaaataaaaaagtcccccaaaatctcatattactggtgaagkgtcttgactacaagttgtccaggtccttggcattttgaacaaagtattgaacaccacacacaaagtagagaggaatgatatgcaggaacgaagcagcaaaagcgggaatttatgaaagtgagaaagcactccacagggtgggaatgggccccagcaagcggcttaagggcccagttac

SEQ ID NO: 370708 - DNA, 555 bp, Homo sapiens
tagcagtatggtcatctcaaagacttcacatcatgcctctcttgctcaaactccgttaagggtttcccattgctgttggtatgaatgccaaactttttgccttgggatcccacatgttccggcctctgtctatctctcttctgccctgagttcacaagcccttcctcttcaagatttaactgtattgccactctcttggcttctcaaaacaaaacaacaaaacaagctggttctatttcaaggcctttgcatgagtagttccctctgtctagaaatcttttctccctcatattcacatgatggcttcttcttgttgtaaagatcatttaaatgtcaccgcctcagaaaggctatccttgaccacccaattaaagcaggcaaactcagtcatacccttgggatatattttctttgttgcacatatcagtctttaaaattattttatgyattcacttttttgccatatttttcccacccaagaatgtgaatcttatcagaccaaggccttgatagaatagtttgttgatagtgctatagtcctagcacctaatatat

SEQ ID NO: 370709 - DNA, 552 bp, Homo sapiens
acttttgttttcattgcatttatttttatagtttctattatgatagatggtactggttttccatttacttagagataaagtttccctttagaatacatttaagatttttttttaagtgagcctatttaaagataaatatgaagtaaaccacagcacagatggaaagggaaaatagcaaagataatggaggtggtatgactaatgtttgggaaagcctcatagaaaacagggagctatggacaggttttgagcaggagagcgataggatcaaggctctgctctgggaagctaaacgtagctgcagcatatacaatagacagcagggagatgggaggtagggaggccgtaggcagtgccagtggggctagagargtggggatgcaggggagaggattacgggagaaagagtaaaatcaacaatatttagtcagtcattgcatggagggtaagcaagatgcaaagcaaaagataataactgctgcccaaattgcctttaaaaacatctatttccaggagtattagaactgatgcaggaaataatgtgacagcaat

SEQ ID NO: 370710 - DNA, 556 bp, Homo sapiens
gattttgtttttagtgagtaataattttacaagattaaggcaatgtgaagtgaaatgaaattaaggagaaatactaagaaatataaactaagcataatttgtctttaattttggtgtttattgaagtctttgaagagcgcattgactagttgctggattaacaaattttgtttttggaattattcgtagttgcttagcactgaagctttagaaaaatttaatcctttagtgaaaaggggctaacaatcgacagtatrctgtggtcatgttgatttaattatcaaacagaacaaaattgttgattacttaatgattaatagtaacaaagagatattaagggcagtcttggctggggattgagtctttaaaagctcgtttgttttgttttgtttgaaaatgtttaacccaaaaacttggataacaggctgaatcatggaatcatggaatttacatctacaatatgaatcacaacattttaagagagagatgtgtgccctgtttctttattttggccatgaagatgagggtgaaggtatctgttttatttaaagaactg

SEQ ID NO: 370711 - DNA, 616 bp, Homo sapiens
tgtgacactaggcctgtcccctggcctcagaatgaagctaagagaagctgaaaagaatacatttagcgtctatgaagggtacttatgtttcagggacctggtacactgtatctgattgtggttaacagtgggctgtggaggcttctcgtgctcataattgtgattgtctttctttgcaacacttcttcccattccaggcctcactgaagcctctctaggaagctgggtgtccattccagagccatttcctggtctctcagcagagctttaagagctctgcttggctgaattcatctcccagattcaaggcactgaggcctttgactctggaaagtgttcacacctcctacrggctgtcctcccagaattctcagaagcctgctctggagagctccttcccctctggcaggtgcagcaggccatagctcacattggcactgaacaatggcctttgtgtagatctccctgtgatctccagaaaccctgatccagctcttagggaaggggaagcaacaagacttagcaaaatccctgctgcatccatctcatacagataattaataacagcaatccttggaaaatgaggcttaagcaatgaaatccttttctctttttc

SEQ ID NO: 370712 - DNA, 562 bp, Homo sapiens
accaattatttttcccttcaatttgattgatttttttattggactggattgtatcatatttgccttaataaacaggagctcataacaatgcatttaaaatctgtagtgatatactcaccacctatatttactttgtaaatatgtgaaaaaaatctacagttatgagattaatgacacagaagrgtctagcaggagtatgtttttattttgaatagagcaggaaattttatttaaaggtaatgtaaaattaaaatgtattgagtggaatcgtcttcaccatgagtcaacttatttattgggatgaagatggcttctctgtgtttcttgaggacatgttttccttttgtgtatacttgagtatttagaggagacttggcccataaggaaatatgaaaacataatattacctttgttcagtagttagtaaaaccatccgggattattaataattttataggtcctatgacttttcataaaaacatgaatgcttcctctttcaccactccaatccccaaccctggcaactttttagtttttagtaattgtcctatagaaatttgag

SEQ ID NO: 370713 - DNA, 562 bp, Homo sapiens
accaattatttttcccttcaatttgattgatttttttattggactggattgtatcatatttgccttaataaacaggagctcataacaatgcatttaaaatctgtagtgatatactcaccacctatatttactttgtaaatatgtgaaaaaaatctacagttatgagattaatgacacagaagagtctagcaggagtatgtttttattttgaatagagcaggaaattttatttaaaggtaatgtaaaattaaaatgtattgagtgraatcgtcttcaccatgagtcaacttatttattgggatgaagatggcttctctgtgtttcttgaggacatgttttccttttgtgtatacttgagtatttagaggagacttggcccataaggaaatatgaaaacataatattacctttgttcagtagttagtaaaaccatccgggattattaataattttataggtcctatgacttttcataaaaacatgaatgcttcctctttcaccactccaatccccaaccctggcaactttttagtttttagtaattgtcctatagaaatttgag

SEQ ID NO: 370714 - DNA, 556 bp, Homo sapiens
catgtcttacatggcggcaggcaagagagaatgagagccaagtgaaagggaaaaccccttataaaatcatcagatctcctgagacttattcactaccatgagaatagtatgggggaaccgcccccatgattcaattatctcccactgggtccctcccaaaacacgtgggaattacaggagctacagtgcaagatgagatttgggtggggacacagccaaaccatatctcatctctaaaggaagaatgtgtcttccttgtcctagctttaggagagaaactcaggaacgttttagtgcatacttacctggattatttaaacaatattttcagttgcaatgctttgctgtgtttctggatgctgtgctgagttttcttcctgcctgtgtgcaatttytgaattcatttctatctactggaagtagtgatttggcaggcatcagcactttttccatgtttaattaattcctctaattttgtggtaaatgagaataatgggacttaattttgctatttatgtaaaattgattggtaattatggggagcacaggagatttg

SEQ ID NO: 370715 - DNA, 533 bp, Homo sapiens
aacccctttgaacactgaatagggctgggcaaatggagcttactccagttggtggtggcgtatcatctccacagttagtagacacagcaccattgtctsatctacatggtatattcagcaaatattcaactagaaatttatccactctatttaaatgtgaggaaatacaggtaattaagcaaggctcggcatggatctccaaccaccgtttaccaaaatagtttggcatctgtgatgttcacaatttcagggtcaatttggtactggaccatatagcagtagggaagtcatggaccctgaggtgaatggagagagagaaagagagggagagagagaacacacaagcagagatcaattaagaactctattttactgtgttctcactccttccacatccatgcaaccctccatccatggagtaagcatcttctatattcaatgccccctcagtgatagtgaaagtgatagtgatagtgaaaagatacataaggctcctgtgttcaaggagcttacattctgctgatgggagggga

SEQ ID NO: 370716 - DNA, 533 bp, Homo sapiens
aacccctttgaacactgaatagggctgggcaaatggagcttactccagttggtggtggcgtatcatctccacagttagtagacacagcaccattgtctgatctacatggtatattcagcaaatattcaactagaaatttatccactctatttaaatgtgaggaaatacaggtaattaagcaaggctcggcatggatctccaaccaccgtttaccaaaatagtttggcatctgtgatgttcacaatttcagggtcaatttggtactggaccatatagcagtagggaagtcatggaccctgaggtgaatggagagagagaaagagagggagagagagaacacacaagcagagatcaattaagaacyctattttactgtgttctcactccttccacatccatgcaaccctccatccatggagtaagcatcttctatattcaatgccccctcagtgatagtgaaagtgatagtgatagtgaaaagatacataaggctcctgtgttcaaggagcttacattctgctgatgggagggga

SEQ ID NO: 370717 - DNA, 573 bp, Homo sapiens
gcaaatgcctatgctaatcatcccttattattgcaatgagttctaactgttctccttaagtgaggatgtgcctattaaaatgagtatcatatgcaccagacaccatgtgtcacatacagcttgattttcccttctgtccatgcagtgttatgtgtcatagaaaagctgctgtgtgataagtatgatggttttaatgccaattaagtgagaaagatgataaaatctatctccagaatcacagagcttcatctttcaacaaatatttgccaagtactaactctgtgcctgcgactccagaactggagttctcctgggcacaaggaatacagaaaactagggtgctaggtcttcacctataattawtattgccaggaagagttatgggcacccaaacacgcatatgtacaatggagacatggagcagggtcactgctacactaggggagggacagggagggtatcttcaagactgcactcagacacagtctagtgtagcgctgctaacaacggggtaagttagttaagtctggaagtgagaatgagaaagcatgttggcttacaggtatactgtgt

SEQ ID NO: 370718 - DNA, 495 bp, Homo sapiens
atacattctgctacatatggtaaacatagcctacaatgtggaagagattagaaaataaacatggaaatgaaatgtttttattaattcgcatcagtacccaccaaaaccaatcagcataatcaaatattataacactgaatgtaaaaaacaatccaaaagtccagagtgataggcaaaaggttttaattgtatagattaaaattaactttggacaaaaattaaaactcaggcagagaatgtcttctttttgcaacagcagacactagtaaaaacaaaggcacagtaaaaattgagaccccaaatttgcagtgtagagatatgaatataataatagacacaggcagggaggattaataaatgataaaatgtttagaggatgatcattagaatacaggatatttatactcttgaaaaccgctttcccaagtacttcattrtaagtaaggtgtctctaaaagggacagatctcctagacccctccttaaccaagtaacc

SEQ ID NO: 370719 - DNA, 270 bp, Homo sapiens
ggggacctaggaatcggtaagaattgcagtgtacctgggcctagggtgccctgtagtacaaaaatggctgcagtgatcactggcttagggaactcgtcagcccactttgaattcctggaaagtcctctgaaggacaggtacaaacaagacctgactgcaaaggctggaataaataccttatccttcaatgcccagatactgacaaacatcaacagtatcaataacattgaagccaatrtgacctcaacaaatggaccaagtaaggcactc

SEQ ID NO: 370720 - DNA, 600 bp, Homo sapiens
agtaaaacgattttgagtgaaataatatttgttgttttaaaaagttaatattaaccactctccatcatatgttgaaattatcttaagatgtgaaagttaaaattagaaaccttgtaaaggaaaaataggaaatagtttcatgaacttgacacaggaaaatatttcttagactagatactgtagcactcaccacaataagaaatcaagcgaattgcacttcatttttaaaaagcttctccttattatgttgttgtttaacaacttaaacgctatctctagaccaggaataattatttgctatatattacagcaaaaaatatgtatgtataaatggactcattcaaaatatataaagaactcctattacaaagaaattgacaaacagcccagtatatcaatgaatataaaaatttgagaagatattttccataagaagatatctaaatgaacattaggcatgagaaaaccaaattttakgatatcactacacacctggcatagtttaaaagactgaaaatattaagtgtgtgggaatgtagagcaactggaaatggcctacatctttcatagaaatgtaaaacaatacaaatactttgcaaa

SEQ ID NO: 370721 - DNA, 600 bp, Homo sapiens
agtaaaacgattttgagtgaaataatatttgttgttttaaaaagttaatattaaccactctccatcatatgttgaaattatcttaagatgtgaaagttaaaattagaaaccttgtaaaggaaaaataggaaatagtttcatgaacttgacacaggaaaatatttcttagactagatactgtagcactcaccacaataagaaatcaagcgaattgcacttcatttttaaaaagcttctccttattatgttgttgtttaacaacttaaacgctatctctagaccaggaataattatttgctatatattacagcaaaaaatatgtatgtataaatggactcattcaaaatatataaagaactcctattacaaagaaattgacaaacagcccagtatatcaatgaatataaaaatttgagaagatattttccataagaagatatctaaatgaacattaggcatgagaaaaccaaattttaggatatcactacacacctggcatagtttaaaagactgaaaatattaagtgtgtgggaatgtagagcaactggaaatggcctacatctttcatagaaatgtaaarcaatacaaatactttgcaaa

SEQ ID NO: 370722 - DNA, 544 bp, Homo sapiens
tctggactaagaatgaaggttcccaggctgtcttttcggcaatgttcttagttactgtcagagagtgaatgacttgtccttcctgagtttstctctctccgtggcagacaaattgtctcttgcaagggtctgaagcattcaaatgtgggaacacttacaactgctttccaaaatgagatgaaggccctcgccgtgtgatgttggagaaggcactttatgtgggggcgttttgtggtaggaagtgcttcagactggagcactccccatggatagaatgtccctgaagaacacagcagaagccacttggaggcttgaaatcttctgatgcatagaggactgtgggacaagtttgtctgcttctaagagaaagaattaggtttgaaatgcaaaccgtgacaggacaccaagcctgtgcctgggaatcagatctggcaggatgggggagacagctgccaacgtccagagagaggctgcacaagcctccagtgatatgggaagcgaaaggtcttttcaatatttggccacatgttgatggtggccctcc

SEQ ID NO: 370723 - DNA, 544 bp, Homo sapiens
tctggactaagaatgaaggttcccaggctgtcttttcggcaatgttcttagttactgtcagagagtgaatgacttgtccttcctgagtttgtctctctccgtggcagacaaattgtctcttgcaagggtctgaagcattcaaatgtgggaacacttacaactgctttccaaaatgagatgaaggccctcgccgtgtgatgttggagaaggcactttatgtgggggcgttttgtggtaggaagtgcttcagactggagcactccccatggatagaatgtccctgaagaacacagcagaagccacttggaggcttgaaatcttctgatgcatagaggactgtgggacaagtttgtctgcttctaagagaaagaatkaggtttgaaatgcaaaccgtgacaggacaccaagcctgtgcctgggaatcagatctggcaggatgggggagacagctgccaacgtccagagagaggctgcacaagcctccagtgatatgggaagcgaaaggtcttttcaatatttggccacatgttgatggtggccctcc

SEQ ID NO: 370724 - DNA, 559 bp, Homo sapiens
tttgtttaactttgactcaggcagggaatatggcattatggtctacacgtagagggagattttggcctgtgggtctggaaagcagggtcatctaattctcaccaaagttaatctaggacaccctagaatattcctgtcagaatccttattcttgcactgagaatagttatgtccttggctatgactggacagtgatttgktcatatgtgaagtatgaattgcttaatgtgacctgcttctctgaatttatttacagaaaatgaaagtgatgatgaggaagaggaagaaaaagggccagtgtctcccaggtaatgttgtggaattgttggctgttaattcagtagtgacatctggagattgtagatttagggaaaatgaggaagtgatgaatagaactatttcttccattcacccagctacaaattgtgctgatttacaatgttgtatgttatttgtggcacttgtattggttttaatttcatagtcctctcaagataggaacttgccatcagatgagccaggtgaactagccaaacagggttttcttgttgatcttttc

SEQ ID NO: 370725 - DNA, 572 bp, Homo sapiens
caaagttaatctaggacaccctagaatattcctgtcagaatccttattcttgcactgagaatagttatgtccttggctatgactggacagtgatttgttcatatgtgaagtatgaattgcttaatgtgacctgcttctctgaatttatttacagaaaatgaaagtgatgatgaggaagaggaagaaaaagggccagtgtctcccaggtaatgttgtggaattgttggctgttaattcagtagtgacatctggagattgtagatttagggaaaatgaggaagtgatgaatagaactatttcttccattcacccagctacaaattgtgctgatttacaatgttgtatgttatttgtggcacttgtattggttttaatttcatagtcctctcaagataggaacttgccatcagatgagccaggtgaactagccaaacagggttttcttgttgatcttttcaaaaaaccagccctggattcattgattttttgaagggttttttgygtctctatctcctttagttctgctctgatcttagttacttcttgtcttctgctagcttttgaatttgttt

SEQ ID NO: 370726 - DNA, 533 bp, Homo sapiens
acctatgagtgagaacatgccgtgtttggttttctgtccttgcgatagtttgctgagaatgatggtttccagcttcatctatgtccctacaaaggccatgaactcatccttttttatggctgcatatttgacagctttcttttgctgagattgtttcaagtatgttccaactttgggcgttatgagaagagttgttttacaacatttttctctgattatttttaaatctagggtctttgtagaactgtttctttctccactatttcttctagttctctgtaacggttatatgtatatatatatatgatacatatgtacttatctatcagctatatacatcatataggtgatacatacatacgctgtgagtgcattattttccttggaatattattgtggagattctttcaggatgaggaggaactgcacatttgtttctattaggtattgtgaactgttttaaactaaatttatagcttgagtttttgagawtgtaatttatgcaacagcagcattttccccatgctttgttc

SEQ ID NO: 370727 - DNA, 580 bp, Homo sapiens
ggaggtgagtacctttctatgaaggtgataaggatccactgagtcttccatataaagatcatattcctgctccaagtggccattactgagctgagagatgtcattgccacagggaggacctataggcacatgtaggttgaatgaaactctagttctacctggaagcccagacaagggatgggtcagtgagcaagactctcttcctagtctcaggccatacctgtggcrccctgatcctattctcatgacattggacctgggcagatgtgacaaactcagagaactatgattttgactcaagggtttgtagatttcctttttcactgtaatttcagtgtgtaaagtcctcacaaccatgaacaatctgagtatttgatgagacagggctaaatattgcagtttttctcctagaaatcatttgagggtatttgctttaagttgattggaaaaatatggcgtaactgtttgcacaaacttgggacaaatgatattgggataacgatctactagaatagggacattttacccacagtttctgggagaaaaaccgaggaatttctatcatgaccagccttcaggc

SEQ ID NO: 370728 - DNA, 580 bp, Homo sapiens
ggaggtgagtacctttctatgaaggtgataaggatccactgagtcttccatataaagatcatattcctgctccaagtggccattactgagctgagagatgtcattgccacagggaggacctataggcacatgtaggttgaatgaaactctagttctacctggaagcccagacaagggatgggtcagtgagcaagactctcttcctagtctcaggccatacctgtggcaccctgatcctatyctcatgacattggacctgggcagatgtgacaaactcagagaactatgattttgactcaagggtttgtagatttcctttttcactgtaatttcagtgtgtaaagtcctcacaaccatgaacaatctgagtatttgatgagacagggctaaatattgcagtttttctcctagaaatcatttgagggtatttgctttaagttgattggaaaaatatggcgtaactgtttgcacaaacttgggacaaatgatattgggataacgatctactagaatagggacattttacccacagtttctgggagaaaaaccgaggaatttctatcatgaccagccttcaggc

SEQ ID NO: 370729 - DNA, 580 bp, Homo sapiens
ggaggtgagtacctttctatgaaggtgataaggatccactgagtcttccatataaagatcatattcctgctccaagtggccattactgagctgagagatgtcattgccacagggaggacctataggcacatgtaggttgaatgaaactctagttctacctggaagcccagacaagggatgggtcagtgagcaagactctcttcctagtctcaggccatacctgtggcaccctgatcctattctcatgacattggacctgggcagatgtgacaaactcagagaactatgattttgactcaagggtttgtagatttcctttttcactstaatttcagtgtgtaaagtcctcacaaccatgaacaatctgagtatttgatgagacagggctaaatattgcagtttttctcctagaaatcatttgagggtatttgctttaagttgattggaaaaatatggcgtaactgtttgcacaaacttgggacaaatgatattgggataacgatctactagaatagggacattttacccacagtttctgggagaaaaaccgaggaatttctatcatgaccagccttcaggc

SEQ ID NO: 370730 - DNA, 580 bp, Homo sapiens
ggaggtgagtacctttctatgaaggtgataaggatccactgagtcttccatataaagatcatattcctgctccaagtggccattactgagctgagagatgtcattgccacagggaggacctataggcacatgtaggttgaatgaaactctagttctacctggaagcccagacaagggatgggtcagtgagcaagactctcttcctagtctcaggccatacctgtggcaccctgatcctattctcatgacattggacctgggcagatgtgacaaactcagagaactatgattttgactcaagggtttgtagatttcctttttcactgtaatttcagtgtgtaaagtcctcacaaccatgaacaatctgagtatttgatgagacagggctaaatattgcagtttttctcctagaaatcatttgagggtatttgctttaagttgattggaaaaatatggcrtaactgtttgcacaaacttgggacaaatgatattgggataacgatctactagaatagggacattttacccacagtttctgggagaaaaaccgaggaatttctatcatgaccagccttcaggc

SEQ ID NO: 370731 - DNA, 601 bp, Homo sapiens
cccatagcctgcggccagctggatcctcagggtcccgctcggcgcgtcaggagagcccaaggcgcaggcgcagcggggccttaaaggtacatggccgcctctgcggcacagcgggttcgcgcgggccaggaaaaggagtaaccgagcggatagacagagtgcagcagagaccgggaaatccctctctcccctccgcctctcttttaaagcaccagcccttgaccctacaaatcgctgatttcccgggccacttgaacygcccctgccaggttaaaggggcagaagacacaccccctcgggggcccggagcgaccccgcgcttaggactgcaggcctggtgctgcagcaccgcccccgagtctgacttccaggcccgggcatggggtgcagacgcgcagacgtgggaaggcaacccccagctcccccgagaggtggccttaggtcactcgcaaaaacaataacccacatgtcagtgggacttgtagtgattttctaatttaaattaataacagattttgcagatgggcttccactgaaataagcctttgagaaaaagaaaaactttttcaacaagattaggaaataccaagaaataggaagt

SEQ ID NO: 370732 - DNA, 601 bp, Homo sapiens
cccatagcctgcggccagctggatcctcagggtcccgctcggcgcgtcaggagagcccaaggcgcaggcgcagcggggccttaaaggtacatggccgcctctgcggcacagcgggttcgcgcgggccaggaaaaggagtaaccgagcggatagacagagtgcagcagagaccgggaaatccctctctcccctccgcctctcttttaaagcaccagcccttgaccctacaaatcgctgatttcccgggccacttgaactgcccctgccaggttaaaggggcagaagacacaccccctcgggggcccggagcgaccccgcgcttaggactgcaggcctggtgctgcagcaccgcccccgagtctgacttccaggcccgggcatggggtgcagacgcgcagacgtgggaaggcaacccccagctcccccgagaggtggccttaggtcactcgcaaaaacaataacccacatgtcagtgggacttgtartgattttctaatttaaattaataacagattttgcagatgggcttccactgaaataagcctttgagaaaaagaaaaactttttcaacaagattaggaaataccaagaaataggaagt

SEQ ID NO: 370733 - DNA, 392 bp, Homo sapiens
gcagacgtggcaccagaaaggctgccaaagataagtggagggcagaaagtgtcagataaaaaccttcaagaccagtgatagtcaccctttccaattctcgcttctggaacctggcaggaatggtcctgggatgtgggcccagcctgactccacaacccagcaacaatggtaggggatgaggatcctgacctcatagagctgtgctttcttcaactacaggatccttctctagccccatgttcaaaagagaaacaatgtgaacagtctgttttytgtcactgagtgagacaattcatttcctttgctggaaaaacataaaagattgtgatcgctactgttgtacagggaaagattttccaaagtaagcataacatgatgtgggtgtcctaggt

SEQ ID NO: 370734 - DNA, 612 bp, Homo sapiens
aaatacagcaaaataaaagcctacttagcagtgcaatggtagagtaaggaggataacatttactatcctccttacttacaaagggcacctgccactgtatgggtggtgggctggtatcaactcagtcatacccctacctggaacctaggttgtaatgttagttccaccagtactcttcagatcagrcagcatgataaagggaaggaaggcattaatcagcacaagtaaacaatagctgatataggttctgcctctgctgttggtctatgttctatgttgatagtcagctcctctttttcattttttcaaatcacctatcaatgctccctttaccttctaccaacacctttccctatcagaaattttaaactagtagtatgaccaaaattttcattccaatagactgcaaatcctttacagctacagtttcccactaaccattatctttggacactagtgaattaaggagccccagtaaattgcccatgttctagatgtaatcttctttgctcccattgtatacaaacactccaacatgctttcggcactgtaaaatgccagttgaaaataggaattctgtatcttgtaacatgaaaagcccaacatgattat

SEQ ID NO: 370735 - DNA, 523 bp, Homo sapiens
gccactgtatgggtggtgggctggtatcaactcagtcatacccctacctggaacctaggttgtaatgttagttccaccagtactcttcagatcaggcagcatgataaagggaaggaaggcattaatcagcacaagtaaacaatagctgatataggttctgcctctgctgttggtctatgttctatgttgatagtcagctcctctttttcattttttcaaatcacctatcaatgctccctttaccttctaccaacaccttkccctatcagaaattttaaactagtagtatgaccaaaattttcattccaatagactgcaaatcctttacagctacagtttcccactaaccattatctttggacactagtgaattaaggagccccagtaaattgcccatgttctagatgtaatcttctttgctcccattgtatacaaacactccaacatgctttcggcactgtaaaatgccagttgaaaataggaattctgtatcttgtaacatgaaaagcccaacatgattata

SEQ ID NO: 370736 - DNA, 511 bp, Homo sapiens
gcttggggctctttcattgactcagaaatatttctgcttcccacccaggacttctgttgtctcttcctcccttctcctcccctgctctcaggactcttagatgtagcccaggtttgcttccacacagttgacattggcggtgcacggtcttctcccctctatgccctcagatctccacgcctgtgcctatgacacgtgacacctgcacctgtgttgccaagcctggctcctcatccgtggccactcctgcccccacaacctgccagttctgcctcctttttgcctgcctcctgcctatctttacttcactgatttcttyggctggaaaatatttctacaacttcccctcccacactcacctggggctatgacattgttgtgcgcactggttgggcctcgcccctgccacctaacaagtacatcctacaggcccaggagggcattatctgtggttttgaatttctagtgtctcgaactgtactggcccagagaggacctcaaatatggaaaa

SEQ ID NO: 370737 - DNA, 594 bp, Homo sapiens
tatatcgccttgcttttcgctggagaaggaagcgccagcctttgtgagcatgtgtatcacaagctaactagcacgaagattgcatagctctttctacataaggctactgttcgcagaaatttggtccatggtctccagtctcttggggtctcacgctctgtgaaaatcttcgtgtttttccctagcccccagagtcacctttcacacagcgtctgcttgtaaccgcggtccccacaggagtttgtaggatttctgtgccagcggtgaaggtgttctcacctcatagagcaaggtagaaactacgcagacaggcgctgttctttgggatgaaagcagggcctttggggctctttcttagtgtccccgttcggtygtagacataacacgcttgctttgtgtaggagatcggctctgccggcgcccaggggccctaaagcaattcatcgaggcccgcaggtcagaactgcagtctcacctgtcttggcggaaatgcgctgcgctcctccctgtactacataagcacgagaattccactacagaagaaaaccccaggcctagtgatggcggttctgggcattttgccagcttctccca

SEQ ID NO: 370738 - DNA, 594 bp, Homo sapiens
tatatcgccttgcttttcgctggagaaggaagcgccagcctttgtgagcatgtgtatcacaagctaactagcacgaagattgcatagctctttctacataaggctactgttcgcagaaatttggtccatggtctccagtctcttggggtctcacgctctgtgaaaatcttcgtgtttttccctagcccccagagtcacctttcacacagcgtctgcttgtaaccgcggtccccacaggagtttgtaggatttctgtgccagcggtgaaggtgttctcacctcatagagcaaggtagaaactacgcagacaggcgctgttctttgggatgaaagcagggcctttggggctctttcttagtgtccccgttcggtcgtagacataacacgcttgctttgtgtaggagatcggctctgccggcgcccaggggccctaamgcaattcatcgaggcccgcaggtcagaactgcagtctcacctgtcttggcggaaatgcgctgcgctcctccctgtactacataagcacgagaattccactacagaagaaaaccccaggcctagtgatggcggttctgggcattttgccagcttctccca

SEQ ID NO: 370739 - DNA, 577 bp, Homo sapiens
gtgtccccgccaacagccctgagtctgtttccaggtggagggctagaggggcttgaaaacttgcccaggcaaagaggagggctttagttctttcccracctgtgaagtctgcatgctgtattagtgccctcccctgagttctgaccaggaggcttctcacccagttcaaattgttacaaagttcagctagagaattccttctccctgtggaattttaccccctgctcctctggccaccctcccaatggatccctgtggggccaggcaggactgggctgcttggggacccagcaagctcccagggcctttctgctgcttcctctacccgtgtattttgctcggctctctaacttgactcagctctatgtaaagttagaaacttctcctgcaaacagaccttcagcttctccagtgggggtgtgtgtttgggagagtagagtctccctttcctacttctgcagttggggcactcacagtatttgggggtctcctgggtcctgcaggagcagtcttcttccttcagagggtctgtgggtcctcttgggattggtggtttgttcttgcagtcaatctggag

SEQ ID NO: 370740 - DNA, 624 bp, Homo sapiens
ctggggctcagtcccactaggtcttctgggagatgctacagagcacatgttaaagttgtccacccaagggatgcacaagctggactatgtatgcaccaacttcctgtctggcattggttggtggctgcttcctctgcccatcagaatagtccaagattccatatcttggctactgtgaatagtgccgcaatcaacatgggagtgcagatgtctctttgacatactgattttcttatgtttgagacatgtctgcactctcatgttgatagaagtactattcacattggccaagatgtggaatccacctaagtgtctatcaacagatgaatggacaaagaaaatgcggtgcatatacacaatggaatattattcagcctttaaaaagaacaaaattccatcatttgcagcaacatggatgagcttggaggaccttatgttaagtgaaataagcgagccacacaaagatagatgctgcatgttctcacttacatgtgggagctaaaaatagttgatgtgayagaagtagagagtagaagagtgattactaagaggctagagagagtggagttgggaggaaggatagggagaggttggttaacagatacaagagtacaaacaggtagg

SEQ ID NO: 370741 - DNA, 298 bp, Homo sapiens
cccctttccacacggcccttttttctcaaagattcattcaggctttgtccttacttgtcatcaatgctccattttacactgaagttaaaggcagatgggaaacaaagtcttgcccctctcagaagtaggtactcattagaaaagctcagcatccaaraaatgatcctctagcagtaggaatttcagcctggtgtctccagatcactcaccactgccactagagagtgcctcaggctattcaaactccatggtctcaaaagtaacttcacctgcttccacctctggcctggccaacttc

SEQ ID NO: 370742 - DNA, 549 bp, Homo sapiens
  misc_feature (1)...(549): n = A,T,C or G
gaggagaaaatgtttctgggncatagagatttttcatggcctctgccttggccaacacctggatttgtggctgcctttgacatgttctgcaatctgaattccctgagagcaagaatagcttcacagtcacagccataaaaagcagagtgtctctgggtctactcccacacactctgcggagactaggagcccctctgattcctcccaaatggttctgagccttcctgctgtgttcagcaggctcctgctcttggtggcctgtggcgtcaccagcctcccctctccctccctgcagctgctatagcagagtctctcatccctgcctaagcccaaatgggcctttcacccctaatgtctgccaaaggcactattrctgccacctggccctgtcagagataccctggctgccatagacaactaatgtctgattggggtgccgaaaccccacactggacagctggtgtcaggcaaaggaaccccctccagtgggccaccaaaggactgctatcaaccctcccaggctctccctatgcattaagtgcccaacga

SEQ ID NO: 370743 - DNA, 541 bp, Homo sapiens
ttcatatcatttttgtacctactcacgagagcatttaaatcaaagttgattgtttcacttttwaaaaaatttataaattgacttaatttcaatgtagtgtaagatacacattttcatcattaaattctccatgtttgtggccagggctactaactggttaagtcacattgccatctctatagcaccttaaagagttgaagccagacaaacacacttctaccaaagcttggattctacaatactgtcagtggattagtatttccctaaggatgatttctatctccagaactagcctcccactttattttgacaaaactcaacacccatctgtttacgcagtcgtttgattgcgtgggaagtttgacaagtccatggccagataacagaactgaatcctttttatagtctcatacattttgtaaatcaacaatatgaacatcctaaaataataaaatgggtggcatgttttttatgagttggacaattaagggataggttcaacatgaaagcctgtcaatcattctgcatacattagagatta

SEQ ID NO: 370744 - DNA, 593 bp, Homo sapiens
ctgtgttggctataggacaaaacctcttctgctggagaaatgtagagggaaacataaaggagactttgtcttgaaccttaggtaccagcatgattctggagggcagaggcaggcagagcacatagtgggcttttgaagtttcccaattctaggacttaactcttggacagcattcctggagctgccttgggccagaggggagcccatttccttgaagcrtaagtttcaggccagacgacattctccacaggctaatttaagagctctagggccataagggaacattgactggtggtctgatagcattccttgtgtcctggggtggaggtggctacacagtgaggcttctctgcctttggaaatgggatggaagaaggggaaggactgtgtcttgtggtttgagtgccagctgagttgcaacatatagaacaccagctggacttctaaagttctgactctaggccatgactcctggacagcacttctggattcacccagggcctggggacctcaccacactaaagggaaggacacagccctggctggatttgccacctgctgactatagaaccccagggccttgagtgaatata

SEQ ID NO: 370745 - DNA, 593 bp, Homo sapiens
ctgtgttggctataggacaaaacctcttctgctggagaaatgtagagggaaacataaaggagactttgtcttgaaccttaggtaccagcatgattctggagggcagaggcaggcagagcacatagtgggcttttgaagtttcccaattctaggacttaactcttggacagcattcctggagctgccttgggccagaggggagcccatttccttgaagcataagtttcaggccagacgacattctccacaggctaatttaagagctctagggccataagggaacattgactggtggtctgatagcattccttgtgtcctggggtggaggtggctacacagtgaggcttctctgcctttggaaatgggatggaagaaggggaaggactgtgtcttgtggtttgagtgccagctgagttgcaacatatagaacaccagctggacttctaaagttctgactctaggccatgactcctggacagcacytctggattcacccagggcctggggacctcaccacactaaagggaaggacacagccctggctggatttgccacctgctgactatagaaccccagggccttgagtgaatata

SEQ ID NO: 370746 - DNA, 564 bp, Homo sapiens
tacaaattcaacataaaaaaatagcatttctatatgccaatagtgaacaatgtgaaaaagaaattttaaaaatctgatttgcaatagccacatgtaaaatttaatacataggcattaatcaaagtgaaagatcgctataagggaaactataaaacattgataaaggaaattgaagagaacaccaaaaatggaaaaaactccatgtttatggattggaataaccaatattggtaaacgtccatactacataaagcaatttacagattccatayaatttctatcaaaatatcaatgacattcttcatagaaatagaaaaaaattctaaaattgatatggaaccacaaaagacccagagtagccaaagctatcctgagccaaaagaacaaaactggaggaatcacattaccttacttcagattatactacacagctgtggtaatcataacatattggtaccagcataaaaacagacacataggccaatggaacagaatgtagagtccagaaacaaattcatacacctatagtgagctcatctttgacaaaactgccaagaacataca

SEQ ID NO: 370747 - DNA, 559 bp, Homo sapiens
tttctactttcttctgctagcaaagcagttgccactaccaattgaatgcatttgggccatctgtgggttactgggttaaggacttcygataggaagtctactggttgtcagtggtctcagtgctttcaggctatgcccttgtttatgctgacaacaaggtagtattggagtgttatagggtcatggagagaaccttcaattatcaattacaggttttaaatttaccctggcttttaaaggaataaggtacactgttttttctttaactacttgtatatttctttctttctctgcctctctctttcccttctctctctttatctctttccccttttgtctctgtttctttgtctctctttctctcttctctcttttatcctagccatttgcaaacttggggccctggcaagggtggtgggcaatgggtcccacataactgcccatgtcaagactatatacctaaatttgcaggaacaccagggacaagactccttgagttcatagcctaggtgcctaaggacacagcatagagcttcctttgatccctttggagatacaa

SEQ ID NO: 370748 - DNA, 545 bp, Homo sapiens
tttaataaactgtgtgctattaattggcatttagatttatttcagatttttaccattgcaaataatgcttcaatgaagatagtttgtacattcatgtttgcatgcttaggataagttcctagatgtgaaattatggaactatggttaatttgaagggttctttacatatgaaaaayatttgtactttctttacaaatattaaaagtaattttcctagatgttaaacttttttctttatggtgtttggctaaagaactttaaaagtatatgtgcagtaaaaattatttctttgtaactttgatttatttctttcaagtagaagggactttatccgctcaaagattattgcctttgctttctctagtactttaattttatttttaatatttgaatatttgatgcatgtgaaacttattttgctgtaatagatgacaaaagaaaccaggtttatttactagctagctcttttcacaacatttattgaatactttatcttttcctaatgacatttatatgccaaattttatatatagtatatttgggac

SEQ ID NO: 370749 - DNA, 585 bp, Homo sapiens
ctaaagaactttaaaagtatatgtgcagtaaaaattatttctttgtaactttgatttatttctttcaagtagaagggactttatccgctcaaagattattgcctttgctttctctagtactttaattttatttttaatatttgaatatttgatgcatgtgaaacttattttgctgtaatagatgacaaaagaaaccaggtttatttactagctagctyttttcacaacatttattgaatactttatcttttcctaatgacatttatatgccaaattttatatatagtatatttgggactatttccttttatctaatttctctgtgtttctctacatcagtatgaattttctttaattgaagtggcattttaatatgctcaaatatcatgtatgattatactattcctttattccattttttctttctcttttttaaaaatcgggttaaagacagcagagtttgatactgaggctagatgaaaaatgtcctttttattttttaaagtttgagactcctaaatggcagattagacttataagcaaatacaaacatgtatctagatttgtcatttgtgattataggac

SEQ ID NO: 370750 - DNA, 622 bp, Homo sapiens
tcctttattccattttttctttctcttttttaaaaatcgggttaaagacagcagagtttgatactgaggctagatgaaaaatgtcctttttattttttaaagtttgagactcctaaatggcagattagacttataagcaaatacaaacatgtatctagatttgtcatttgtgattataggacttacatcagagcctctgtctcctacactcttataaacagtattattatggtataatttatcaaaaaatgaacatatttaatatgtagagtttgracatatgcagacttttgggataccatcaccacaatgaaggtaatagacatttctagcatctcccaaagtttctttgtgtccctttgttttgttgttgttgtattgtgataaaaatgcttaaaatgagttctcttaacaaaatttgaagtgcataaatctgtgctattaattataggcactatgttgtacagatctctagaacttattcatctaccctaactgaaactttataagcattgaacaactttctatttcccccacccctcagcccctgacaaccactattgtatcttctgcttctatgagtttcactattatattttcctacatgttttgaattatattc

SEQ ID NO: 370751 - DNA, 545 bp, Homo sapiens
cacagggcataatgttttgttgaaaaatgtggacaccaatagctctcaccatgaaaatgttttacaagattgagactctgaatatgcagaaattttaggaataccttaaccatttctgtttgcttatctgatatatgagacatataattttaaaaatctgaaagagttcttttaaaaaacataaagtaacaattctcagtgacaagaaagcattatgtcaaaggytaactggcagtgacttttttcattttggtgctcctgaaaataatggtgaattgcacaatataaaatactgttagtaatatttccaaagctacatgtcataaagaatttatagccttaactttcatatctgagtgttaaataaatatactacctaccacttaataaacatccataatatgctaagaattttatgtatatcatttgacttaatccttaaaaaattatttttttcattttacaaatagggccacttaaaaaaagacaggtagcttgccagttgttttgtagttacggaagtagtaaagcccttattccccctc

SEQ ID NO: 370752 - DNA, 545 bp, Homo sapiens
cacagggcataatgttttgttgaaaaatgtggacaccaatagctctcaccatgaaaatgttttacaagattgagactctgaatatgcagaaattttaggaataccttaaccatttctgtttgcttatctgatatatgagacatataattttaaaaatctgaaagagttcttttaaaaaacataaagtaacaattctcagtgacaagaaagcattatgtcaaaggttaactggcagtgacttttttcattttggtgctcctgaaaataatggtgaattgcacaatataaaatactgttagtaatatttccaaagctacatgtcataaagaatttatagccttaactttcatatctgagtgttaaataaatatactacctaccacttaataaacatccataatatgctaagaattttatgtatatcatttgacttaatccttaaaaaattattttyttcattttacaaatagggccacttaaaaaaagacaggtagcttgccagttgttttgtagttacggaagtagtaaagcccttattccccctc

SEQ ID NO: 370753 - DNA, 545 bp, Homo sapiens
cacagggcataatgttttgttgaaaaatgtggacaccaatagctctcaccatgaaaatgttttacaagattgagactctgaatatgcagaaattttaggaataccttaaccatttctgtttgcttatctgatatatgagacatataattttaaaaatctgaaagagttcttttaaaaaacataaagtaacaattctcagtgacaagaaagcattatgtcaaaggttaactggcagtgacttttttcattttggtgctcctgaaaataatggtgaattgcacaatataaaatactgttagtaatatttccaaagctacatgtcataaagaatttatagccttaactttcatatctgagtgttaaataaatatactacctaccacttaataaacatccataatatgctaagaattttatgtatatcatttgacttaatccttaaaaaattatttttttcattttacawatagggccacttaaaaaaagacaggtagcttgccagttgttttgtagttacggaagtagtaaagcccttattccccctc

SEQ ID NO: 370754 - DNA, 490 bp, Homo sapiens
cttcaaatatttgaaggtgtttttttctgccaactaaatattccatttccttcaactgtttatttgacaaaatttcacgtggytttcttctggcacacagaacttgtaacaaaccagtgatggcatctcatgagtatgaagaataggagggctatcactctttgggaactggatgcaatattccaacaagtgcagcgtaagatgccaatcatgtctaagggagctactccctattgttgcattattgaaaacgtgaggattaagactcctcagatttttgttaaataaacttctatcatactatgtctttcaccctagttagaaatgaatgaattatttggtttttttaaatccaaattttaagactatgtatttaccccagttgaatacttggtcacactttgtgcatgtggtagccttgaaaatgtgccacgcagattctcatcttggaaataatagttgactgacagctctagccctccaaccccca

SEQ ID NO: 370755 - DNA, 492 bp, Homo sapiens
cttcaaatatttgaaggtgtttttttctgccaactaaatattccatttccttcaactgtttatttgacaaaatttcacgtggctttcttctggcacacagaacttgtaacaaaccagtgatggcatctcatgagtatgaagaataggagggctatcactctttgggaactggatgcaatattccaacaagtgcagcgtaagatgccaatcatgtctaagggagctactccctattgttgcattaytgaaaacgtgaggattaagactcctcagatttttgttaaataaacttctatcatactatgtctttcaccctagttagaaatgaatgaattatttggtttttttaaatccaaattttaagactatgtatttaccccagttgaatacttggtcacactttgtgcatgtggtagccttgaaaatgtgccacgcagattctcatcttggaaataatagttgactgacagctctagccctccaacccccaca

SEQ ID NO: 370756 - DNA, 617 bp, Homo sapiens
gtaagggaacaccacaaaagatagaagagggaccatagccaaaaagcacacttggagtttgatggagacacagagctccagagacttctaggccaagactggtcagggccctgaccatgagtcctgaaatrtggaactggaatatcttgatgattgcctctggagatgttggctctgcaaaacacactcatcttgcaaaggttctgaggcatctaataagaactctaatacctctccttagtaacagctagcatttcttcaagctggaagattctgcagagcctccatccacccctacaagttgccaatccccctatatttataccttctttcctggcttccagaagtataacaaaaacaaaatcttagcatagcctagcttagtgtgtgctgggcctgattgggggaaaggagattatacgccaaaggaattgcaagatttagatagatgtatcagcaaggatccaggagtgttcacaaaccctagtttgagttttaagggtgcttaatcaaggagataataatacaaatctgaataagaaagaattcctcaagttggggtcatttatttggtacacacgatttaacatcctggtaaagaccccagagggtcctag

SEQ ID NO: 370757 - DNA, 462 bp, Homo sapiens
gtaaataagactttttcaattttttgtctgccaagtgaaagcatggttaccattgttctggcaaatatgttgaaaaaatctatgagtctcaaaatccagtctgtacacattctactaatccccctatttatgatagagaacctaggacttccattgtgtttggtgtcactaagtccaagaacaagtggcaaacaaaaggtcctctaccttctgcagaaggaaactattaagtcttcttctgsgttgtgagaaatctctagactgtgaagagttagggaagggatttgactgttcaattatttattacattttcaagtaatgcaccttatttaccccccttcccttcatctcctctcacagtagaacctggtcttctcattttctgtctttaggtgatcctctgcataaaccatgctgaatcttagccttattaatccctattcatgagtcaactttctcaaa

SEQ ID NO: 370758 - DNA, 304 bp, Homo sapiens
taataggatggaggtagagtttagatatactaatttcagaccaataagctctaaggcaataagcatttttaggtatatacctaatagcaatggatgtrtatttttattaaaagtaatgtacaatattagtcataaagctttcttcataatattcaaagctgaaaataacccaatgttcatgaaaggagaaaaacaaattgtaatatattaatacaaggaaatactaaacagaattgagaaaaaattttgctatgcacaagtacttggataaatctcacaaacaaaatattggacggaagaagtc

SEQ ID NO: 370759 - DNA, 614 bp, Homo sapiens
agtgtaagggtataacatgatttaactgacattttcctaaagactaatggtgttgagcatcttttcatgtgttgatttgtcatttttatatctttagtgatgtttgttcaaatactttgctccttttttattgggttgtttgtttccctattatttaagagttttttatttattgtggatacaaaacctttattatatatatgatttgcacctactttcttctagtctatggctttatttccattctcttagtagtttctttctcttattccaaagagaaataaaaatttttgctgaaattccatttatcatttttccctctatggatcatgttttggtgtcagatctaaaaaactgttgtctaactcagggaagttcataaaagtttttctatgttttctctaraatttgtatggtttttagcttgtagatataggtgtatgatccattttgaattcatttttatatttccttcaaggtaagaatcttttgctttgttttgttcatggatatctagtttatccagcacattctgatgagaagacaatcttttctgcactgaattgcctctgcatctttgcagagtccatcagttacccatacatttatgggta

SEQ ID NO: 370760 - DNA, 526 bp, Homo sapiens
attgatttctcactattctggaggctggakgtttaacatccagggcttggcaaggctggtcccttctgagacctctgtccttggcttgttggcggccatcttctctctgggtcttcagaggtctatcacagcgctctgtgtgctaatgtctcattaaaaagacatcactgatgttgagctttttttcatatgcttgctggtcacatggatgttttcttttgaaaagtgtctgtttatgtcctttgcccacttttttatggtgttgtttgttttgttctcataaatatgtttaagtttcttatagatgctgggtataagacctctgtcgaatgcatagtttgcaaagattttctcccgttctgtaggttgtctgtttaccctgttgatagtttcgtttgctggataaagaaatggtggtacatatataccatagaataagctacagccataaaaaaagaatgagatcatgtcctttgcagggacatgaatggagccgaaggccattatccttagcaaactgtcacag

SEQ ID NO: 370761 - DNA, 526 bp, Homo sapiens
attgatttctcactattctggaggctggatgtttaacatccagggcttggcaaggctggtcccttctgagacctctgtccttggcttgttggcggccatcttctctctgggtcttcagaggtctrtcacagcgctctgtgtgctaatgtctcattaaaaagacatcactgatgttgagctttttttcatatgcttgctggtcacatggatgttttcttttgaaaagtgtctgtttatgtcctttgcccacttttttatggtgttgtttgttttgttctcataaatatgtttaagtttcttatagatgctgggtataagacctctgtcgaatgcatagtttgcaaagattttctcccgttctgtaggttgtctgtttaccctgttgatagtttcgtttgctggataaagaaatggtggtacatatataccatagaataagctacagccataaaaaaagaatgagatcatgtcctttgcagggacatgaatggagccgaaggccattatccttagcaaactgtcacag

SEQ ID NO: 370762 - DNA, 526 bp, Homo sapiens
attgatttctcactattctggaggctggatgtttaacatccagggcttggcaaggctggtcccttctgagacctctgtccttggcttgttggcggccatcttctctctgggtcttcagaggtctatcacagcgctctgtgtgctaatgtctcattaaaaagacatcactgatgttgagctttttttcatatgcttgctggtcacatggatgttttcttttgaaaagtgtctgtttatgtcctttgcccacttttttatggkgttgtttgttttgttctcataaatatgtttaagtttcttatagatgctgggtataagacctctgtcgaatgcatagtttgcaaagattttctcccgttctgtaggttgtctgtttaccctgttgatagtttcgtttgctggataaagaaatggtggtacatatataccatagaataagctacagccataaaaaaagaatgagatcatgtcctttgcagggacatgaatggagccgaaggccattatccttagcaaactgtcacag

SEQ ID NO: 370763 - DNA, 526 bp, Homo sapiens
attgatttctcactattctggaggctggatgtttaacatccagggcttggcaaggctggtcccttctgagacctctgtccttggcttgttggcggccatcttctctctgggtcttcagaggtctatcacagcgctctgtgtgctaatgtctcattaaaaagacatcactgatgttgagctttttttcatatgcttgctggtcacatggatgttttcttttgaaaagtgtctgtttatgtcctttgcccacttttttatggtgttgtttgttttgttctcataaatatgtttaagtttcttatagatgctgggtataagacctctgtcgaatgcatagtttgcaaagattttctcccgttctgtaggttgtctgtttaccctgttgatagtttcgtttgctggataaagaaatggtggtacatatataccatagaataagctacagccataaaaaaagaatgagatcatgtcctttgcagggacatgaatggagccgraggccattatccttagcaaactgtcacag

SEQ ID NO: 370764 - DNA, 465 bp, Homo sapiens
ttcagagggtggagagtgggaggagggaggggatcaggaaaaataactaatgagtattgggcttaatacctgggtgatgaaataacctgtacaaaaaaaaaaaaaaaaaacccatgaggcaagtttacctaagtaacaaacctgcgcgtgtaccccaaacttaaaaattaaaaaaacaaacaaacgaaaggacatcagtctcattgggtcmaccctaaagaccttgttttacttgcagttacctctttaaagacgctatttccaaaacagccacactctggggtagccgaggtcaggactccagcattagaatttaagggagcacgagccagccagtcacagtctctgttttctgtttgctgaaccaccagcatttttcctctctccccccgccctcagcaagaaattatccataagcaaaagtttcccctaaatgcattgggaggtgaaaagcaaaaatccctc

SEQ ID NO: 370765 - DNA, 572 bp, Homo sapiens
ccttccggggttgaacagttctgccattccctgtggtcctgctcttccctgtggtcactggaagcattttctcctttctcaccgcctctagagaacaagccaagctttaaagcaatgtggccctatggctactggaagtcaggaagcagatgctccaagaaggatggaccaatctcccygatgctgtatgtgtgagacgaagttcgcccatcattacccagcagggaccctggaacagtggtgtcagtggagaatctaattaaaggaagcactacttgagaaggaaatatttccctgtgatgaaaacaagcctctttagctcagcagccctggtgaaggaggcaccagggcactactgcttaggagcaagaacttcagggcaagaaggtgatgacacccaggagcctcagagctgtggcctcacaccttagaagtatcttgacagggtgaaggtctgaccaagagggacatccctgcagggggacagctcagagggcagagttggcagctcacatcagtgggggacatgggcctgcccaaactatgatgcctgccaggcaccaacaaagtga

SEQ ID NO: 370766 - DNA, 572 bp, Homo sapiens
ccttccggggttgaacagttctgccattccctgtggtcctgctcttccctgtggtcactggaagcattttctcctttctcaccgcctctagagaacaagccaagctttaaagcaatgtggccctatggctactggaagtcaggaagcagatgctccaagaaggatggaccaatctccctsatgctgtatgtgtgagacgaagttcgcccatcattacccagcagggaccctggaacagtggtgtcagtggagaatctaattaaaggaagcactacttgagaaggaaatatttccctgtgatgaaaacaagcctctttagctcagcagccctggtgaaggaggcaccagggcactactgcttaggagcaagaacttcagggcaagaaggtgatgacacccaggagcctcagagctgtggcctcacaccttagaagtatcttgacagggtgaaggtctgaccaagagggacatccctgcagggggacagctcagagggcagagttggcagctcacatcagtgggggacatgggcctgcccaaactatgatgcctgccaggcaccaacaaagtga

SEQ ID NO: 370767 - DNA, 572 bp, Homo sapiens
ccttccggggttgaacagttctgccattccctgtggtcctgctcttccctgtggtcactggaagcattttctcctttctcaccgcctctagagaacaagccaagctttaaagcaatgtggccctatggctactggaagtcaggaagcagatgctccaagaaggatggaccaatctccctgatgctgtatgtgtgagacgaagttcgcccatcattacccagcagggaccctggaacagtggtgtcagtggagaatctaattaaaggaagcactacttgagaaggaaatatttccctgtgatgaaaacaagcctctttagctcagcagccctggtgaaggaggcaccagggmactactgcttaggagcaagaacttcagggcaagaaggtgatgacacccaggagcctcagagctgtggcctcacaccttagaagtatcttgacagggtgaaggtctgaccaagagggacatccctgcagggggacagctcagagggcagagttggcagctcacatcagtgggggacatgggcctgcccaaactatgatgcctgccaggcaccaacaaagtga

SEQ ID NO: 370768 - DNA, 572 bp, Homo sapiens
ctgggacttccagcctctaatatttttgttagatttttgttgtttcactcacctggtctatagcattttgttatggaaatctgggcatactaggacaccttcatatggccagcaatatggagttcatcacattttagatgttagccattctgagacatcgggactctggagattcacgaagcatcayggcagtgacaatgtggcgttttttattgctgttgttgttttgttttgtttttaaaagaaaacattattttgagggactggaacaacagttttaactttaatttggatagtagacatagtccaaccttccccttacccaaacattccagaagcttattttgaataaagtcaattattcaaagatgactgactgttttcctactaactttatccaatctaggatcgggggtgaaatttctgaaagtgtttttttcccactgaaaagataacatttcatccaaataaaacatatggtttaatgacagcttgaaccttaaaacatttctattttaattttaaaaagtgtcaaaaatgtcacggtgctgtaatgaaataaaaggcagtga

SEQ ID NO: 370769 - DNA, 618 bp, Homo sapiens
aaatagaaacgtatccaagcaaaataatttgttaactaatgattacttttgctatgaagaagagggagacagaggtattaacatttctgaaatgaaaagagtcaattctggttttgaatttctggcagtgcagagtgttccattactcaaactcrtcagcttttgacccatcattttcacttgtcgggggaagccctccaccccttgttgatttagttatattaccccttatattcccatttcctgctgcatcccctcaactccagagccttgcagtgggtgaggagccacctttctattgctgtgtgatcttatgaaggcccgtcctgttgccatttgcacatgtattttaaatcgatggtaatggctcggatggtgggaatgtaagatggcacagcccctgtcgaatacagtatgggagattcttagaacattcaagatgaaattaccattctaattgtgggtatacccacaaataattgaaaggattgaaagagggccccaaacaggtgtttatccacattccaacagcgttattcccaggggctaagacagggaggcaacccaagcatgtggcgatgcacgaacagatcaacaaacgtggcacgtccatgtgat

SEQ ID NO: 370770 - DNA, 618 bp, Homo sapiens
aaatagaaacgtatccaagcaaaataatttgttaactaatgattacttttgctatgaagaagagggagacagaggtattaacatttctgaaatgaaaagagtcaattctggttttgaatttctggcagtgcagagtgttccattactcaaactcgtcagcttttgacccatcattttcacttgtcgggggaagccctccaccccttgttgatttagttatattaccccttatattcccatttcctgctgcatcccctcaactccagagccttgcagtgggtgaggagccacctttctatygctgtgtgatcttatgaaggcccgtcctgttgccatttgcacatgtattttaaatcgatggtaatggctcggatggtgggaatgtaagatggcacagcccctgtcgaatacagtatgggagattcttagaacattcaagatgaaattaccattctaattgtgggtatacccacaaataattgaaaggattgaaagagggccccaaacaggtgtttatccacattccaacagcgttattcccaggggctaagacagggaggcaacccaagcatgtggcgatgcacgaacagatcaacaaacgtggcacgtccatgtgat

SEQ ID NO: 370771 - DNA, 463 bp, Homo sapiens
cctaagaaccaccacttaaaagttcacccatttatcatgaacatcatatatgaacaagtatgccctctgagcacttttcagtagtttttgaaatcactatttgtgtggtttttctgtgatctgtcacattggaaataagacttcaaattaggtttgtttcaactgatttcttatttactaacccatatggtataaacaacatgtatttgaagaaacgtagactaactgatatttcacattttataattctgtcccatttataatgaacwcaccactatgtaaattttagtgtgccctctttttctcctttttgaaactgggccaatattttatgtctctgttgatgtggctgttttactttctccatgacttctcaaatattttagaaaatctgtgactgcaattatgtctttgaaaaaaacaagaaaacaaaacaaaatttaaacactgcttacaactcatt

SEQ ID NO: 370772 - DNA, 460 bp, Homo sapiens
aatctattgagaacatccaaatatgcctaggatggtgagcaataagattgttaccatagattaaagtttttaaattgcacaagractttgtaaatatgtgataactgtatccacatatggggaggggataaagttacactagtaagtaaatatttgaaaagatgaaggtgcagaaccgtgtgtagtcttctgccactgtgcagaagcaattgtgcatggctatgcggacaagaacgtatctctggcgatacacagatcctagcaatgtcagtttcctattagaaaggaaaggtggctaagccacaggagaggaagggaggtgttttcttttttaaatatccttttatttatttgtttgttttaattatgaaccataatattgtattaggtattcaaaaattttcatgttttaaacacggtcaagtctctgaagggggattaatatagttgtatttgtttg

SEQ ID NO: 370773 - DNA, 460 bp, Homo sapiens
aatctattgagaacatccaaatatgcctaggatggtgagcaataagattgttaccatagattaaagtttttaaattgcacaagaactttgtaaatatgtgataactgtatccacatatggggaggggataaagttacactagtaagtaaatatttgaaaagatgaaggtgcagaaccgtgtgtagtcttctgccactgtgcagaagcaattgtkcatggctatgcggacaagaacgtatctctggcgatacacagatcctagcaatgtcagtttcctattagaaaggaaaggtggctaagccacaggagaggaagggaggtgttttcttttttaaatatccttttatttatttgtttgttttaattatgaaccataatattgtattaggtattcaaaaattttcatgttttaaacacggtcaagtctctgaagggggattaatatagttgtatttgtttg

SEQ ID NO: 370774 - DNA, 603 bp, Homo sapiens
aaggacagaattggatgtaattaataagtggttcttttctaccaaactgagaacatttggcaccgtggtggatgaagggatgyttctctaaagttcggtggagaaaacagaattggagaattttgtcatcagataatacatggtatgtttaacatacagcaaactgaaccctagaaatcacaataatattcacattgtgaagagaaacttaattccaaccaaacaacactgatgctactaatttaaatattattgatagtaaaactgtatttgcatctaattttcaaattttgtgcataaaggtaaatgggaagggttgatactagttttatttgtgtacatcttcaagtaacagaaatcaacatcatttatgccaacagtagagatcactgagaaaatgtatcccctgggcagagagcctatgtaatattcatgtccaagaaaccctgccctgtgggatctctataaactaggaaatccagggttcctttgtgaattgctaagaactcctcgaagcagaaagcagggtagagccaccacaggaagcatttttctaaattgatgcatttcctgaaaaatctctatgcaaagcctcctttcttc

SEQ ID NO: 370775 - DNA, 603 bp, Homo sapiens
aaggacagaattggatgtaattaataagtggttcttttctaccaaactgagaacatttggcaccgtggtggatgaagggatgcttctctaaagttcggtggagaaaacagaattggagaattttgtcatcagataatacatggtatgtttaacatacagcaaactgaaccctagaaatcacaataatattcacattgtgaagagaaacttaattccaaccaaacaacactgatgctactaatttaaatattattgakagtaaaactgtatttgcatctaattttcaaattttgtgcataaaggtaaatgggaagggttgatactagttttatttgtgtacatcttcaagtaacagaaatcaacatcatttatgccaacagtagagatcactgagaaaatgtatcccctgggcagagagcctatgtaatattcatgtccaagaaaccctgccctgtgggatctctataaactaggaaatccagggttcctttgtgaattgctaagaactcctcgaagcagaaagcagggtagagccaccacaggaagcatttttctaaattgatgcatttcctgaaaaatctctatgcaaagcctcctttcttc

SEQ ID NO: 370776 - DNA, 603 bp, Homo sapiens
aaggacagaattggatgtaattaataagtggttcttttctaccaaactgagaacatttggcaccgtggtggatgaagggatgcttctctaaagttcggtggagaaaacagaattggagaattttgtcatcagataatacatggtatgtttaacatacagcaaactgaaccctagaaatcacaataatattcacattgtgaagagaaacttaattccaaccaaacaacactgatgctactaatttaaatattattgatagtaaaactrtatttgcatctaattttcaaattttgtgcataaaggtaaatgggaagggttgatactagttttatttgtgtacatcttcaagtaacagaaatcaacatcatttatgccaacagtagagatcactgagaaaatgtatcccctgggcagagagcctatgtaatattcatgtccaagaaaccctgccctgtgggatctctataaactaggaaatccagggttcctttgtgaattgctaagaactcctcgaagcagaaagcagggtagagccaccacaggaagcatttttctaaattgatgcatttcctgaaaaatctctatgcaaagcctcctttcttc

SEQ ID NO: 370777 - DNA, 634 bp, Homo sapiens
actccacagttccacctgtcaagttcagcctccttagaaatccctcaattaaaactgggctcaggactagaggtgtgcctgtgttgctgggtttgacttggacccgaccggctggggaaggtcatgcctgcctttgctgtttgttgcagtaacacgttgctcacagcaagctgtcttgggggtgtggtagagctgagatgtgagaatgactcataaaacaaatctcaggctggggacttgttcctatgggattcccacgttaygtgggaaagtgtagagcacactgtacacatccaccctggagccaactgtttggatgctatattgtgagtgattggtccctgagtgcaggcaaagtgtcagggtgtttcagcagcaacacccacgtggggtagagttggaagaagtgccagcagctatgtcatgcatccatttttaatagttatttaattccatttttctagcctgagtcaatcaccaaaaaggttgagaaatttcaaagctggatatatcagatttgtatcagatgttcaatttgttataaaacaaacagctttaagagtgttctggtaatacatagagacaactatatgttttaaaaataagttcttaaagttgttatcagcttatgtca

SEQ ID NO: 370778 - DNA, 489 bp, Homo sapiens
taaactggtaaattttatgttatgtatattttaccacaattaaaaaagtcatcgtgttactgtgcaggaaccacaaggtccatatgtaatgctaagtctcytaaaacagtgctctgttcatgcctgctagagaagtcattcaaatgtaactggtgacacatgtgcgtggtaggaggccacagtgacttctgggagccatcggctcattctaaataaagcagattcactaaatgaaaaaaatgagctgcaattgcagaaaattttcctgaacacacgattattgtattaagttcccctgaaccacaagctcttattacatgagttctttgcccatgtctggaactctatcttgtggtcaaaaaagggaaaattttgttaaaactttgaggatatatattgcatgcagaaagaaagaggccaattttttaaaaagcctttcaaagcacttaaaaaatagccatcctcaacaccctctgagaaaacggacag

SEQ ID NO: 370779 - DNA, 287 bp, Homo sapiens
caagacaaagtcaatgttgccatggaaacacttggccataatgaagttccttgctacatggagaacagcctcagtgggctgttcctttcatagcrtgttgtttgcatttaaatgggtaagtatatgtgggggagttttgacagaatggaagactagattgtggaagtgataatattcacaggggcagtgatatttagtggttatatgtggcaccagttttgttttttcaggtatggatttgattcaactacttagcattctatataaaacaattaaaattaattttc

SEQ ID NO: 370780 - DNA, 527 bp, Homo sapiens
actgctagtattgtggctaaatagtctgtatccaaaacccttaaaacatgtctgtctttcatgtgctgcttttccccagctgcagggtaacgtgctatgctttaatttttttccaactgattaattaatctagtctgaacaaggatagaaaaccgaattttccaatggcattaacaaacactatttacgttatctgagccttttctttacgtatacaacctctgtccttackcaccgtccacattctgcacatacagaaaaggagattcagctgggctgtggagttactgaggggcagaggcgggatctgaacccagctctgctctgactgtggcctgttgctctctgttgcaccctgttgccctccgaagggcagcagtagcgttaggcacagttgtagggaaacactcttcatgcttatcatgtgttcttgagttgtggtattcatagctttcaatggattgtttagtcacaccaagcacaattcccgttggatgcttttatttttcatacttgttttgaggatt

SEQ ID NO: 370781 - DNA, 535 bp, Homo sapiens
tttttgtacactttaagtactcacttagagtggttcttttttgtacacaactttttataattaaaattgctacaaggttattttcttttatrtctcctgggttatatgaagtaattttaaaaggcctctttcattggaagatattaaaagtgaattattacatacttttcaagaaatgtattgatatatattcacatggattatgtataaagaggtatatataattcacatgaaatatatataaaaatatacgttctgtgtgaattttattctgattgttaggtgtgatattttcaatgaatctatataatactgtttttaaaattgtgttacaatatatacaacatgaaattaaccattttaaccattttaaagtgtacaattcagtggcattgatggtggtacacactagccatgtgcacaaccatcaccactatgtggttcaagacctttttcattgtcccatgaagaaaacccataaattaggcagtctcttcccattgccgcttctgtccagccctaggcaactacgcat

SEQ ID NO: 370782 - DNA, 535 bp, Homo sapiens
tttttgtacactttaagtactcacttagagtggttcttttttgtacacaactttttataattaaaattgctacaaggttattttcttttatgtctcctgggttatatgaagtaattttaaaaggcctctttcattggaagatattaaaagtgaattattacatacttttcaagaaatgtattgatatatattcacatggattatgtataaagaggtatatataattcacatgaaatatatataaaaatatacrttctgtgtgaattttattctgattgttaggtgtgatattttcaatgaatctatataatactgtttttaaaattgtgttacaatatatacaacatgaaattaaccattttaaccattttaaagtgtacaattcagtggcattgatggtggtacacactagccatgtgcacaaccatcaccactatgtggttcaagacctttttcattgtcccatgaagaaaacccataaattaggcagtctcttcccattgccgcttctgtccagccctaggcaactacgcat

SEQ ID NO: 370783 - DNA, 535 bp, Homo sapiens
tttttgtacactttaagtactcacttagagtggttcttttttgtacacaactttttataattaaaattgctacaaggttattttcttttatgtctcctgggttatatgaagtaattttaaaaggcctctttcattggaagatattaaaagtgaattattacatacttttcaagaaatgtattgatatatattcacatggattatgtataaagaggtatatataattcacatgaaatatatataaaaatatacgttctgtgtgaattttattctgattgttaggtgtgatattttcaatgaatctatataatactgtttttaaaattgtgttacaatatatacaacatgaaattaaccattttaaccattttaaagtgtacaattcagtggcattgatggtggtacacactagccatgtgcacaaccatcaccactatgtggttcaagacctttttcattgtcccaygaagaaaacccataaattaggcagtctcttcccattgccgcttctgtccagccctaggcaactacgcat

SEQ ID NO: 370784 - DNA, 557 bp, Homo sapiens
gattcaatgcaataccaaacaaaatmccataagttatttgtggatactgacaaacagattctaaactttatacagagagacaaaagacccaaaacagccaacccaacttgaaagaggacagagttggaggactgatactactggacctcaagacttactataaagctacaatattcgagacagtgtggtaatgaagaaaaaacagataagtagatgagcggaacagaatagagaacccagaaatagacccacataaatacagtcacctgatctttgacaaaggagcgaaggcagtacaatggagcaaagatagtcttttcaacaaacggtgctgaaataactggacatctacatgcaaaaaagaaatgaatttagacacagaccttacacctgtcacaaaaattaactcaaaatagatcacagacctaatgtaaaatgcaatattataaaatcctagcagataatacaggagaaaatctagatgaccttgggtatgttgtttttagaaacaacacaaaagacacaatccatactgaacttcattaaaatttaaaact

SEQ ID NO: 370785 - DNA, 557 bp, Homo sapiens
gattcaatgcaataccaaacaaaataccataagttatttgtggatactgacaaacagattctaaactttatacagagagrcaaaagacccaaaacagccaacccaacttgaaagaggacagagttggaggactgatactactggacctcaagacttactataaagctacaatattcgagacagtgtggtaatgaagaaaaaacagataagtagatgagcggaacagaatagagaacccagaaatagacccacataaatacagtcacctgatctttgacaaaggagcgaaggcagtacaatggagcaaagatagtcttttcaacaaacggtgctgaaataactggacatctacatgcaaaaaagaaatgaatttagacacagaccttacacctgtcacaaaaattaactcaaaatagatcacagacctaatgtaaaatgcaatattataaaatcctagcagataatacaggagaaaatctagatgaccttgggtatgttgtttttagaaacaacacaaaagacacaatccatactgaacttcattaaaatttaaaact

SEQ ID NO: 370786 - DNA, 579 bp, Homo sapiens
gtggatactgacaaacagattctaaactttatacagagagacaaaagacccaaaacagccaacccaacttgaaagaggacagagttggaggactgatactactggacctcaagacttactataaagctacaatattcgagacagtgtggtaatgaagaaaaaacagataagtagatgagcggaacagaatagagaacccagaaatagacccacataaatacagtcacctgatctttgacaaaggagcgaaggcagtacaatggagcaaagatagtcttttcaacaaacggtgctgaaataactggacatctacatgcaaaaaagaaatgaatttagacacagaccttacacctgtcacaaaaattaactcaaaatagatcacagacctaatgtaaaatgcaatattataaaatcctagcagataatacaggagaaaatctagatgaccttgggtatgttgtttttagaaacaacacaaaagacacaatccatactgaacttcattaaaatttaaaacttctrccctgcagaaaacaatgtcaagagaataagaagacaaaccacagacgggaagaaaat

SEQ ID NO: 370787 - DNA, 414 bp, Homo sapiens
ccacttctttaacattgtactaggggtattacaatacaattagccatgagaattaacttaaaggtttaagaagtgggaaagaagaactaaaatgatctctatttgaaaattacatgatagcatgtctagaaaactctggaaaatcaatggcaaaacgaactaaaaaaaaagaaaccattaaggtaaccrgatataaaactaacattgaaaaatcaacagtctttggatacataaacaaaaatctattagagaatataatggcagacaaaaccccttttactataacaacaaaaaaaatgcttaagaaaaaaatttaacaaaaaatgtgcaaaacctaaggaatgttttaaaacactcctgaaaaacacaaaaatagatctgaacaaatgaaagacaaccgttgttgttgaaaag

SEQ ID NO: 370788 - DNA, 414 bp, Homo sapiens
ccacttctttaacattgtactaggggtattacaatacaattagccatgagaattaacttaaaggtttaagaagtgggaaagaagaactaaaatgatctctatttgaaaattacatgatagcatgtctagaaaactctggaaaatcaatggcaaaacgaactaaaaaaaaagaaaccattaaggtaaccggatataaaaytaacattgaaaaatcaacagtctttggatacataaacaaaaatctattagagaatataatggcagacaaaaccccttttactataacaacaaaaaaaatgcttaagaaaaaaatttaacaaaaaatgtgcaaaacctaaggaatgttttaaaacactcctgaaaaacacaaaaatagatctgaacaaatgaaagacaaccgttgttgttgaaaag

SEQ ID NO: 370789 - DNA, 414 bp, Homo sapiens
ccacttctttaacattgtactaggggtattacaatacaattagccatgagaattaacttaaaggtttaagaagtgggaaagaagaactaaaatgatctctatttgaaaattacatgatagcatgtctagaaaactctggaaaatcaatggcaaaacgaactaaaaaaaaagaaaccattaaggtaaccggatataaaactaacattgaaaaatcaacagtctttggayacataaacaaaaatctattagagaatataatggcagacaaaaccccttttactataacaacaaaaaaaatgcttaagaaaaaaatttaacaaaaaatgtgcaaaacctaaggaatgttttaaaacactcctgaaaaacacaaaaatagatctgaacaaatgaaagacaaccgttgttgttgaaaag

SEQ ID NO: 370790 - DNA, 413 bp, Homo sapiens
cccctacaacaaaatgtacagagctttgtgactatatttcaggcaaaagcctcttacatttcaaactaaccaaaaactgggccggacatggtggctcatgcctataatcccagcattttgggargccaaggcaggtggatcacctgaggtcaggagtttgagaccagcttagtcaacatggcaaaaccccgtctctactaaaaatacaaaaattagccaggtgtggtggcaggcacctgtaatcccagctacttgggaggctgaggcaggagaatcgcttcaacctgggaggcagaggttgcaatgagctcagacggcaccactgcattccagcctgggcgagagagtgaaactctgtctcaaaaaaacataaacaaaaacaaacaaaaaaccttatccaaaaattaccttaa

SEQ ID NO: 370791 - DNA, 413 bp, Homo sapiens
cccctacaacaaaatgtacagagctttgtgactatatttcaggcaaaagcctcttacatttcaaactaaccaaaaactgggccggacatggtggctcatgcctataatcccagcattttgggaagccaaggcaggtggatcacctgaggtcaggagtttgagaccagcttagtcaacatggcaaaaccccgtctctactaaaaatacaaaaattagccaggtgtggtggcaggcacctgtaatcccagctacttgggaggctgaggcaggagaatcgcttcaacctgggaggcagaggttgcaatgagcycagacggcaccactgcattccagcctgggcgagagagtgaaactctgtctcaaaaaaacataaacaaaaacaaacaaaaaaccttatccaaaaattaccttaa

SEQ ID NO: 370792 - DNA, 413 bp, Homo sapiens
cccctacaacaaaatgtacagagctttgtgactatatttcaggcaaaagcctcttacatttcaaactaaccaaaaactgggccggacatggtggctcatgcctataatcccagcattttgggaagccaaggcaggtggatcacctgaggtcaggagtttgagaccagcttagtcaacatggcaaaaccccgtctctactaaaaatacaaaaattagccaggtgtggtggcaggcacctgtaatcccagctacttgggaggctgaggcaggagaatcgcttcaacctgggaggcagaggttgcaatgagctcagacggcaccactgcattccagcctgggcgagagagtgaaactstgtctcaaaaaaacataaacaaaaacaaacaaaaaaccttatccaaaaattaccttaa

SEQ ID NO: 370793 - DNA, 626 bp, Homo sapiens
tctaaataacctttagttcatctccttggcactcctccttcccttcttctcttttatccttccccctgctgctttgcataaagcacaactctgataattcctttctcttgcttaaatatctttggttaaygcatacaggataaagtctgaatttagcacaatgcataagaccctttacctgagaaaaattcatccactatacaagcagaaagttttcaggcttggtttgctaccaaatatactatttaaaattcttggacctgcaagtttattaaaagcctaatgttgacaaggatttggataaaagtgttgtctcacatatagttgcctatgtactatatttttatgatcaagaaaaagttatgctccttgaattaggccccatttcccaaaacaatctagcatcagttcttgacagagtacaggttacatttttagccccatgaaaaaacttaatacaggtgaagaggaaggattggtactctgaaaatgctggggctcaggaccttatattagtggtgctaaaatcagagataatgagataatgttttcagtgttgatggatattacgaaattttaaagggaagagagaaataaataaacatctttagaagaccaagtagtaa

SEQ ID NO: 370794 - DNA, 499 bp, Homo sapiens
atgggtttaatatacattcactcaagtgttaagtgatacaaacaaattaatgagtcaagtgctcaaatcaagaaaaaaattgtrtgtttatatgtgtttcacagagataagacaataaagctggactcaacaagacagggaattctagaggagaaactgcttttataaataaccacagtcccagggctgtctctgaaaattcctctctcctttgatactgtaagtggcctgaattagtaattaagactcacctggattgaaatccttgttgcttaatctctctaagcctcagttttctcatcaataaaatagaaataataattatagtactaacattctcaaagagtcattggagagttaaattagataatatatgtaaagtgctaagcacaatgtctgacatatgaagtactcattaaatgtcaaccaattttacaatcattattccttctcttcacaccctttctgctttcctggctcacacatagaattcctagac

SEQ ID NO: 370795 - DNA, 499 bp, Homo sapiens
atgggtttaatatacattcactcaagtgttaagtgatacaaacaaattaatgagtcaagtgctcaaatcaagaaaaaaattgtgtgtttatatgtgtttcacagagataagacaataaagctggactcaacaagayagggaattctagaggagaaactgcttttataaataaccacagtcccagggctgtctctgaaaattcctctctcctttgatactgtaagtggcctgaattagtaattaagactcacctggattgaaatccttgttgcttaatctctctaagcctcagttttctcatcaataaaatagaaataataattatagtactaacattctcaaagagtcattggagagttaaattagataatatatgtaaagtgctaagcacaatgtctgacatatgaagtactcattaaatgtcaaccaattttacaatcattattccttctcttcacaccctttctgctttcctggctcacacatagaattcctagac

SEQ ID NO: 370796 - DNA, 559 bp, Homo sapiens
attgagacaaaagtttcaaacaagaacttaaaaccatattgataccacattctaacacaatacatggataaaataataagcagttctttcttttgaatttacactttttcatatttacataaaattaatggtataaacattaccttgtctccagratacccgggttctcctagctctcctgctgtgccttgttcaccctggaaagcacaatttcatgcaaagatacttatgtatcacaaacatggcaatattataagaaagcaaatattcattgtagaagaataatttctctatttttcttacttctgaggaaaactaatataattgatactacaaattagactccataaaaacaaaatatttcataaattgtgttgactgaaaagtaaaagacaaatgtgataaaaattatttttataatattaatatttaaatcaccttatcacctttgattccaggtagtcctttattccctgaaaggccctacaaaaaaaggtgacattttgtgatatcatagacagattaaagggaaatatccattatacaaatagaaccatac

SEQ ID NO: 370797 - DNA, 551 bp, Homo sapiens
tttgtctagtccacagagattctttcctcctttgagctcctataatactgtccatgacattcatcttgcaatatttctccaactagatgagacctttaaaaaatattttagtgccatrttcccaggaactagtcaacagatacttcatttgattgtcttagagttttatttcacccacttattcagcaaatattttttgaggagttactatgtgccagacatcctaatgatttgattttataatttcaaatttgcagaatgagaaaatttatcataatttcagggataaactcagaggcaaacaaaaagctctactcttctgggcttatctcgtttattcatcatttaatatttactaagcataatatgtatgagacactgttgaagaaaaaaagagaaaaaagacataatctctaacgtcaaggttctcaatttaatgctctaattcttcagaaacattaccactattatcttctgcaagcaagagacttagaaaaaacttcaatatgtcatcttagaagacaaagggcaatagcaacataagggtatga

SEQ ID NO: 370798 - DNA, 517 bp, Homo sapiens
tttatttcacccacttattcagcaaatattttttgaggagttactatgtgccagacatcctaatgatttgattttataatttcaaatttgcagaatgagaaaatttatcataatttcagggataaactcagaggcaaacaaaaagctctactcttctgggcttatctcgtttattcatcatttaatatttactaagcataatatgtaygagacactgttgaagaaaaaaagagaaaaaagacataatctctaacgtcaaggttctcaatttaatgctctaattcttcagaaacattaccactattatcttctgcaagcaagagacttagaaaaaacttcaatatgtcatcttagaagacaaagggcaatagcaacataagggtatgaaagaaaaatttgaaaaacaaaatggcacttctttgtggtttgggatcagttataatttctgtgtcactgaggtctcctttttcttctttttctcacgatctttctttgcctggcttccttactactcttt

SEQ ID NO: 370799 - DNA, 517 bp, Homo sapiens
tttatttcacccacttattcagcaaatattttttgaggagttactatgtgccagacatcctaatgatttgattttataatttcaaatttgcagaatgagaaaatttatcataatttcagggataaactcagaggcaaacaaaaagctctactcttctgggcttatctcgtttattcatcatttaatatttactaagcataatatgtatgagacactgttgaagaaaaaaagagaaaaaagacataatctctaacrtcaaggttctcaatttaatgctctaattcttcagaaacattaccactattatcttctgcaagcaagagacttagaaaaaacttcaatatgtcatcttagaagacaaagggcaatagcaacataagggtatgaaagaaaaatttgaaaaacaaaatggcacttctttgtggtttgggatcagttataatttctgtgtcactgaggtctcctttttcttctttttctcacgatctttctttgcctggcttccttactactcttt

SEQ ID NO: 370800 - DNA, 517 bp, Homo sapiens
tttatttcacccacttattcagcaaatattttttgaggagttactatgtgccagacatcctaatgatttgattttataatttcaaatttgcagaatgagaaaatttatcataatttcagggataaactcagaggcaaacaaaaagctctactcttctgggcttatctcgtttattcatcatttaatatttactaagcataatatgtatgagacactgttgaagaaaaaaagagaaaaaagacataatctctaacgtcaaggttctcaatttaatgctctaattcttcagaaacattaccactattatcttctgcaagcaagagacttagaaaaaacttcaatatgtcatcttagaagacaaagggcaatagcaacataagggtatgaaagaaaaatttgaaaaacaaaatggcacttcttkgtggtttgggatcagttataatttctgtgtcactgaggtctcctttttcttctttttctcacgatctttctttgcctggcttccttactactcttt

SEQ ID NO: 370801 - DNA, 548 bp, Homo sapiens
tgtatcaatcaggattatttcagtaagtggtggaaacccagcttaaacaggcttacataaatatatgaaaacttcagggattcaatcacaactgaattcaggactctaaacaatttcagaagagcccagtcactccaactctctccatttggtaattcattgatttcattctcaggctgtcccctggatggtttcccactgttcagttttacctcattcttaatgctattcccagcagtgccactgaagtttgaaaygtgcttcagttgggctgaattgggtcccttactcattcctggaccagtcattttttctggggatgcacaatatactgactgacttagatgtctgtcacatgttcacagttacagtcgaaggtggagtcacctcccctcaaacaacatgcactaaaagtgaagagagtttttccttaaggaaaattagggtgcttttgcctgaaaaaggattaacatacattggactggcataagacacaatgtgcccatttccataatctaatccatatcttacttttaaaaataagaaag

SEQ ID NO: 370802 - DNA, 548 bp, Homo sapiens
tgtatcaatcaggattatttcagtaagtggtggaaacccagcttaaacaggcttacataaatatatgaaaacttcagggattcaatcacaactgaattcaggactctaaacaatttcagaagagcccagtcactccaactctctccatttggtaattcattgatttcattctcaggctgtcccctggatggtttcccactgttcagttttacctcattcttaatgctattcccagcagtgccactgaagtttgaaatgtgcttcagttgggctgaattgggtcccttactcattcctggaccagtcattttttctggggatgcacaatatactgactgacttagatgtctgtcacatgttcacagttacagtcgaaggtggagtcacctcccctcaaacaacrtgcactaaaagtgaagagagtttttccttaaggaaaattagggtgcttttgcctgaaaaaggattaacatacattggactggcataagacacaatgtgcccatttccataatctaatccatatcttacttttaaaaataagaaag

SEQ ID NO: 370803 - DNA, 534 bp, Homo sapiens
aacttaacaaccatggtagaaggcaaagggtaagcagaaacatcttacrtggccggagcaggaggaagagagaagggagaggtgccacacacttctaaacaaccaaatcttgcaagcactcagtatcatgagagcagcactgagggtgaaatctgcccccatgattcagtcacctcccaccaggccccacctccaacatagggacacagacccaaaccatatcaatgaacaaaatcaggatagtgaacacacccatcaaacccccaaattttcttgtttacatttgtaatccttcttttctgcctctccttcccccctccctcctcagggtaccatggggggatctgctttttgtcactatggattatccaaacctaaatatcaaataatggccagaatagtttatttttgaattataacttaactataattttatgtggactttagaagactaaaagtagactttccagctaactttgtagtttcccttaaaagtgatgttaaaaacactgtgaatatctgggcacagatcgc

SEQ ID NO: 370804 - DNA, 588 bp, Homo sapiens
tttaagctgctatgacagatttgattatcatgatcttccagacttatttcttatggcacttaattgtggtaggcagactataaaataaaattttcttaaatggttacacagatttgttacattttaatatgctttgatactttcactattctcatattttgtatgtctcataaaatagtaagcatttcttacaaaactttaacatatgatgtgtgctcacttttaagtcttgtttatccataatttctattttcttcattttaataaggactttaatatttttctccaaaaaacatcttaagataattctattttattaaaagtctaataattttaagataaagcgccaaatttgtaaatttaaaaattattggaaataaaaatgatgtatgcatgtaagacatgattctggatgacagtttttctttctaggcttagctcagtcatgactaattaatatgcctctatgttactcttttttctttgttctcttaaaagggagaacgtggaagtccaggcccactaggtccscagggagaaaaaggtgttatggtaagagctcagtgatttgaaaaatatgtttccaaa

SEQ ID NO: 370805 - DNA, 412 bp, Homo sapiens
atcacttgaggccagaagttcaagaccagcctgggcaacaaaacgagaccacatctctaraaaaaaaaaaatttttttaattagctgaacgtggtggcacacacctgtgatcatgccactgtactccagcttgattgacagagcaagaatcaatcttttttaaaaaaaatactgtaaatactatctaaacaaaagtcttatttggaacacagaatatatgttttgtcataaggaattttattgtctttgtagttttgtggattttctctgttgagttttcaggatgctgcacatatggaattgagctgtgctatattttctgctcaaatacatagaattacagaagggaaaatatatgaatagcagtagtcactaaatttctcagcagtatcatgatggaaaatacctggtt

SEQ ID NO: 370806 - DNA, 630 bp, Homo sapiens
gggattacaggctactcagccaccatgcccagctaattttatatttttagtagagatggggtttcaccatgttggccaggctggtctcaaactcctgacctcaggtgatcccacccgccttggcctcccaaagtgctgggattacaggcatgagccaccacacccaggctccatttttagttttatgagaaatctccatactcttttccatagtggctatggaattagtaataattcacattctcaccaacagcatrtaagagttccctttgctgtgcatcctggccaatagctattgatttttgtttttttaataatagtcattcttcctgtgatatgatgatatcttattgtggttttgatttccattttcctgataattagtgatgttgagcattttttcatgtgtctgttggccatttgtctgtcttttaagaaatgtctgctcaggttctttccccaatttttaatagaattattttttaactactgagttgtttgagttccttgtgtattctggatatatagttccttgtcagatgaatagtttgcaaatatgttctctcattcaacaggttgtctcttcacactgttgattgtttcttatgttgtatggaagcttttttgttt

SEQ ID NO: 370807 - DNA, 630 bp, Homo sapiens
gggattacaggctactcagccaccatgcccagctaattttatatttttagtagagatggggtttcaccatgttggccaggctggtctcaaactcctgacctcaggtgatcccacccgccttggcctcccaaagtgctgggattacaggcatgagccaccacacccaggctccatttttagttttatgagaaatctccatactcttttccatagtggctatggaattagtaataattcacattctcaccaacagcatataagagttccctttgctgtgcatcctggccaatagctattgatttttgtytttttaataatagtcattcttcctgtgatatgatgatatcttattgtggttttgatttccattttcctgataattagtgatgttgagcattttttcatgtgtctgttggccatttgtctgtcttttaagaaatgtctgctcaggttctttccccaatttttaatagaattattttttaactactgagttgtttgagttccttgtgtattctggatatatagttccttgtcagatgaatagtttgcaaatatgttctctcattcaacaggttgtctcttcacactgttgattgtttcttatgttgtatggaagcttttttgttt

SEQ ID NO: 370808 - DNA, 591 bp, Homo sapiens
gtttccatttgcttatgtcatctatgatttctttcagcagtgttttgtagtttttcttgtagaggtcttttaccttcttggttaggtatatttcttttttttttgagacggagtctcggaatctcactctgtcacccaggctggagtgcagtggcgtgatcttggctcactgcaagctccrccttctgggttcatgccattctcctgccttagcctctcaagtagctgggactacaggtgcccaccaccatgcctggctaatttttttgtatttttagtagagacggggtttcaccttgttagccaggatggtctcgatctcctggtcttgtgatccgcctgccttggcctcccaaagtgctgggattacaggcatgagccaccgcgcccgccttggttaggtatacttctaagtattttattttttatttttgtagctattgtaaaaggggttgagttcttgatttttattctcagcttgctcgttgttggtgtatagcagtgctaatgatttgtctccattgattttgtatcctgaaactttactgaatctatttatcagagctaggagtttttcggatgagactttag

SEQ ID NO: 370809 - DNA, 460 bp, Homo sapiens
gctaaattaattgtcacaaaatagataatattatttcttatgacttaaaaaattttcttctatatggttgttttataggcttaaataattatrtaaatcttggtcttgtgacaaaacaacaaaacatttctgatgcccattttttgttattaattgttaataaaaataggaagagtatctgtgtagtcctaaaagataattgccatacctaattaatcctgagtcactagaaggagaactttttgttcttgctttttctgggaaagtttcaaggaagtatttgtatgaattaggttattaaaggcttctagtcaaatatgattgtaacatatttctctaagattactcaaattctgccatttctgagtgacaaattgcttaagaaatatatataaagttggcatccgaagttaaaatgctaatgaagaacatattttcctaaagtaatatcttacatatt

SEQ ID NO: 370810 - DNA, 460 bp, Homo sapiens
gctaaattaattgtcacaaaatagataatattatttcttatgacttaaaaaattttcttctatatggttgttttataggcttaaataattatataaatcttkgtcttgtgacaaaacaacaaaacatttctgatgcccattttttgttattaattgttaataaaaataggaagagtatctgtgtagtcctaaaagataattgccatacctaattaatcctgagtcactagaaggagaactttttgttcttgctttttctgggaaagtttcaaggaagtatttgtatgaattaggttattaaaggcttctagtcaaatatgattgtaacatatttctctaagattactcaaattctgccatttctgagtgacaaattgcttaagaaatatatataaagttggcatccgaagttaaaatgctaatgaagaacatattttcctaaagtaatatcttacatatt

SEQ ID NO: 370811 - DNA, 657 bp, Homo sapiens
taatttttatatattaactcagtcagaggtaggagtccaatttcattcttctgcatatggttagcaagttttccagcaccatttattgaacagggtattctttcccrattatttatttttgccgactttgtcgaagatcagtgggtagtagggtgcagctttatcaagtatagatttttagcattaacttaaaatctagttaaaaaggcaaaaatcatagaaacacactcataggatacatgtttttcacttaatttgtgtcctgttactggtaaattctaaatgttatgcattgtacatgaatattttcatgaatcatgataaattagcttttcattggcagttatttgttggtattttttggtattagcagaaatattttgtcaaatgtaaatgtttaaaacacatcataatttttaaacccttctttggcatttccttatgtaataatgtgctagctgcccccaaaagtaaaagtatatagaacctctcccgaccttctggtggtcctgctggtgacacaaaattgcttctaactggatctacaaccttcaaaccaaaaagcaaaaacatgtgttattatttttaatgttctttgtttcattacacggtaaactctagtttcatggtggtattttgagaatgacctcaactctg

SEQ ID NO: 370812 - DNA, 573 bp, Homo sapiens
tttaattttaaaaagtaatgaatgtaagatggaagtaacaatacctgctttatctactttacaactcattgaggagcaaataagatatgtatataaaactactttgaaaggtagaaaggaccatctatatcagtttagaagagatgaggactacaaagatgactcttactatctgatatggtttgggtgtgtccccacccaaaatttcatctgaattgtagtctccataatccccacatgtcaaaggcaggaccaggtggacataatcagatcattggggakgattcccctatgctattctcatgatagtgagtgaggctcatgaaatctgatggttttataagcatctggcatttcccttgttgcactcactccatcctgccaccctgtgaagaagtgcctgcttctcctttgccttccaacatgactgtaagtttcctgaggtcaccccagcaatgcagaactgtgagtcaattaaatctctttcctttataaattacccagtctcggatatttcttcacagtggtgtgagaactggctattacagtaaactggtactgcagagaatggtt

SEQ ID NO: 370813 - DNA, 573 bp, Homo sapiens
tttaattttaaaaagtaatgaatgtaagatggaagtaacaatacctgctttatctactttacaactcattgaggagcaaataagatatgtatataaaactactttgaaaggtagaaaggaccatctatatcagtttagaagagatgaggactacaaagatgactcttactatctgatatggtttgggtgtgtccccacccaaaatttcatctgaattgtagtctccataatccccacatgtcaaaggcaggaccaggtggacataatcagatcattggggatgattccccyatgctattctcatgatagtgagtgaggctcatgaaatctgatggttttataagcatctggcatttcccttgttgcactcactccatcctgccaccctgtgaagaagtgcctgcttctcctttgccttccaacatgactgtaagtttcctgaggtcaccccagcaatgcagaactgtgagtcaattaaatctctttcctttataaattacccagtctcggatatttcttcacagtggtgtgagaactggctattacagtaaactggtactgcagagaatggtt

SEQ ID NO: 370814 - DNA, 521 bp, Homo sapiens
tttgggtgtgtccccacccaaaatttcatctgaattgtagtctccataatccccacatgtcaaaggcaggaccaggtggacataatcagatcattggggatgattcccctatgctattctcatgatagtgagtgaggctcatgaaatctgatggttttataagcatctggcatttcccttgttgcactcactccrtcctgccaccctgtgaagaagtgcctgcttctcctttgccttccaacatgactgtaagtttcctgaggtcaccccagcaatgcagaactgtgagtcaattaaatctctttcctttataaattacccagtctcggatatttcttcacagtggtgtgagaactggctattacagtaaactggtactgcagagaatggttgctgctataaagatacctggaaatgtgaaagcgactttggaactgggtaacaggcagaggctggaacagtgtggagggctcagaagaagacaggaagatgtgggaaagtttggaacttcctagagactt

SEQ ID NO: 370815 - DNA, 521 bp, Homo sapiens
tttgggtgtgtccccacccaaaatttcatctgaattgtagtctccataatccccacatgtcaaaggcaggaccaggtggacataatcagatcattggggatgattcccctatgctattctcatgatagtgagtgaggctcatgaaatctgatggttttataagcatctggcatttcccttgttgcactcactccatcctgccaccctgtgaagaagtgcctgcttctcctttgccttccaacatgactgtaagtttcctgaggtcaccccagcaatgcagaactgtgagtcaattaaatctctttcctttataaattacccagtctcggatatttcttcacagtggtgtgagaactggctattacagtaaactggtactgcagagaatggttgctgctataaagatacctggaaatgtgaaagcractttggaactgggtaacaggcagaggctggaacagtgtggagggctcagaagaagacaggaagatgtgggaaagtttggaacttcctagagactt

SEQ ID NO: 370816 - DNA, 614 bp, Homo sapiens
cccctcctatcacaggcccagaggcctaggagaaaaaaaaggtttttgggctgggcctagagccttgctgctttgtgcagtctcaggacttggtgccctgaatcccagctgtggctaaaaggggtcaacacagagctcaggccggtgcttcagagggtgcaagccccaagccttggctacttacacatggtgttgagcctgcaggtgcacagaagtcaataattgaggtttgggaacctctgcctagatttcacaggatgtcaggaaatgcctggatgtccaggcagaagtttgctgcaggggtgacaccctcatggagaatctctgctaggacagtgtagaagggaaatgtagggtcagaggccccacacagagtccccactagggcactttttagtggagctgtgagaagagggccaccatcttccagaccccagaatggtagatccacsaacagcttgcaccattcacctggaaaagccacaggcactcaatgccagaccatgaaggcagctgggtgggggtctttaccctttaaagctacagggtggtgctgcccaaggctgtgggaacccacctcctacatcagtgtgacctggatgtgagacacggag

SEQ ID NO: 370817 - DNA, 579 bp, Homo sapiens
attttttaagcacttactgtgtatcaggcattgtactagttgcagagaatatggaagtgaataacataaaactgcactcaaagagtttacaatctgattaggaaaacaaaacaagccaaaacactacattaagggaccttataggaccccaggatggtgtgagagttcttagaagcaacctaattcaaggtatggaggtcaaagaaaagtttgcaagtaaaatgttattcagtcgtctagttaaaacataagtgttctaggtgaggaaacttaagggaacattattcaaggtgagggaaacagtatatgcaaaagcccagaattgaaagagagtatatattatsagagtatgaaaattgttcagtgactgaagtgctgggtggtagagagtaaagaagagagataaatagagaccaccaaatcacgaaagaccctgtaaactgtgtattaaagaatttggattctattctgaggccagtaacaaagtggcatgctcagattccatagaatgatcagtctggctacagagtgaaaatgaattttacaggggataggaacatgaataagcaataggaaaat

SEQ ID NO: 370818 - DNA, 634 bp, Homo sapiens
atttaatcacacgtgctctttcagcatgacttaagtgacaattaaaaacatgaaatttctcatccaaatccaagtcataaaagatatcaaagaagtaaattgtttaggcaaagggattccattacattctaatcaattaatacagctggccacagtctagcttattccagttaagtccactgaagtactaaaaatgaagtttaaaagcatgcttttacttgatatagccagatttttgaaactcacttcagtctttgtctctaatgaagaccaccctgacrgaaaaagaggacccactgtttggccacttctggcactgctgtgattagtggtcttgattcatttttgtcataaacaattggccccatataccaagtacatcatccaaaattcaaatatttggcaatctctgtagcccagggggcttaatagctgaatcaacaaacattccaaccatcctgctaccatataagaaggtgctctgctgccagaactgagaggatacatgggattagtgctcaaaactgatacgactatgcttaaagaaatagaaatgattcctgtagagcattttccatatgtttttattaaaagcagacaaaaaccagtatggaaaaaataaatctatgtatta

SEQ ID NO: 370819 - DNA, 634 bp, Homo sapiens
atttaatcacacgtgctctttcagcatgacttaagtgacaattaaaaacatgaaatttctcatccaaatccaagtcataaaagatatcaaagaagtaaattgtttaggcaaagggattccattacattctaatcaattaatacagctggccacagtctagcttattccagttaagtccactgaagtactaaaaatgaagtttaaaagcatgcttttacttgatatagccagatttttgaaactcacttcagtctttgtctctaatgaagaccaccctgacagaaaaagaggacccactgtttggccacttctggcactgctgtgattagtggtcttgattcatttttgtcataaacaattggccccatataccaagtacatcatccaaaattcaaatatttggcaatctctgtagcccagggggcttaatagctgaatcaacaaacattccaaccatcctgctaccatataagaaggtgctctgctgccagaactgagaggatacatgggattagtgctcaaaactgataygactatgcttaaagaaatagaaatgattcctgtagagcattttccatatgtttttattaaaagcagacaaaaaccagtatggaaaaaataaatctatgtatta

SEQ ID NO: 370820 - DNA, 556 bp, Homo sapiens
tacagctgctttgtcagatgtagtatcattgctagagaagattactaagtcttcccataaatggtatatagtcaccaattaagcaaatgtamctttttcctttaaaattaaaaaagataataaaaaactagtttgcattcatgtaggatggacaatagtcacttacagttttcctgtgttctcctgcctctgtcatatgatacaggttcagtctgaagagatctgaaccttcagtgaataccacagaacatcaccccaatccactacatacgtgacgccatgctgattgaacaagatgagcaagagatggctagtacaatagagaatttggcaagacacatgcactcaagatggtaggatatacacccttcaaagattcataagctggccaattttctgaagatttaggatcccagtggttagggatatacttgaatagcccctctaaggcaagagcaagttgagagtcttacatactccaccacaaaaaaaggaaaggcacaccttttggggtctaaggagcaaaccattctatacctaggaatactactctagc

SEQ ID NO: 370821 - DNA, 473 bp, Homo sapiens
aaatggtatatagtcaccaattaagcaaatgtacctttttcctttaaaattaaaaaagataataaaaaactagtttgcattcatgtaggatggacaatagtcacttacagttttcctgtgttctcctgcctctgtcatatgatacaggttcagtctgaagagatctgaaccttcagtgaataccacagaacatcaccccaatccactacatacgtgaygccatgctgattgaacaagatgagcaagagatggctagtacaatagagaatttggcaagacacatgcactcaagatggtaggatatacacccttcaaagattcataagctggccaattttctgaagatttaggatcccagtggttagggatatacttgaatagcccctctaaggcaagagcaagttgagagtcttacatactccaccacaaaaaaaggaaaggcacaccttttggggtctaaggagcaaaccatt

SEQ ID NO: 370822 - DNA, 473 bp, Homo sapiens
aaatggtatatagtcaccaattaagcaaatgtacctttttcctttaaaattaaaaaagataataaaaaactagtttgcattcatgtaggatggacaatagtcacttacagttttcctgtgttctcctgcctctgtcatatgatacaggttcagtctgaagagatctgaaccttcagtgaataccacagaacatcaccccaatccactacatacgtgacgycatgctgattgaacaagatgagcaagagatggctagtacaatagagaatttggcaagacacatgcactcaagatggtaggatatacacccttcaaagattcataagctggccaattttctgaagatttaggatcccagtggttagggatatacttgaatagcccctctaaggcaagagcaagttgagagtcttacatactccaccacaaaaaaaggaaaggcacaccttttggggtctaaggagcaaaccatt

SEQ ID NO: 370823 - DNA, 556 bp, Homo sapiens
tacagctgctttgtcagatgtagtatcattgctagagaagattactaagtcttcccataaatggtatatagtcaccaattaagcaaatgtacctttttcctttaaaattaaaaaagataataaaaaactagtttgcattcatgtaggatggacaatagtcacttacagttttcctgtgttctcctgcctctgtcatatgatacaggttcagtctgaagagatctgaaccttcagtgaataccacagaacatcaccccaatccactacatacgtgacgccatgctgattgaacaagatgagcaagagatggctagtacaatagagaatttggcaagacacatgcactcaagatggtaggatatacacccttcaaagattcataagctggccaattttctgaagatttaggatcccagtggttagggatatacttgaatagcccctctaaggcaagagcaarttgagagtcttacatactccaccacaaaaaaaggaaaggcacaccttttggggtctaaggagcaaaccattctatacctaggaatactactctagc

SEQ ID NO: 370824 - DNA, 545 bp, Homo sapiens
aaggggtggaagcaggtatggtcctatttaccatcactcccaatgacacactgtattctgtgcttccttcaccacaccctgaactctacagggctgaagatcttgttacccaaagtggggggtctctcttgacagaagacacaacaaaggtcttaataaactaaaaattatgactgctaccagagcactttggactttttgtcaccaggtctgaacaaataaaaagagaagtcaccacactggcatgactaattgaccctgataaacagaaggaagcaagactgcttcaatccaataaaggcaggaaggaatayatgtgaaactcaggtgatacactgggcaccttcttgtactcctgtcaaacatacatgctcttcagcaatgaaggtttaggttgtactaccagataagctaccaagacctgctgaggtgatagctgagggtgaggggaatgtaaaatggacagtgaaagagtgagaaaagtaccagttgtggctctgagaacaactggattgacagaggccacagttcatcctattaacaca

SEQ ID NO: 370825 - DNA, 545 bp, Homo sapiens
aaggggtggaagcaggtatggtcctatttaccatcactcccaatgacacactgtattctgtgcttccttcaccacaccctgaactctacagggctgaagatcttgttacccaaagtggggggtctctcttgacagaagacacaacaaaggtcttaataaactaaaaattatgactgctaccagagcactttggactttttgtcaccaggtctgaacaaataaaaagagaagtcaccacactggcatgactaattgaccctgataaacagaaggaagcaagactgcttcaatccaataaaggcaggaaggaatacatgtgaaactcaggtgatacactgggcaccttcttgtactcctgtcaaacatacatgctcttcagcaatgaaggtttaggttgtactaccagataagctaccaagayctgctgaggtgatagctgagggtgaggggaatgtaaaatggacagtgaaagagtgagaaaagtaccagttgtggctctgagaacaactggattgacagaggccacagttcatcctattaacaca

SEQ ID NO: 370826 - DNA, 549 bp, Homo sapiens
ctgtggtcactgtcctggcygttgtttcatgaataatgccaataatattttccagcatgtggatgctgagaatgatcccttctatatcaaaaggagttgaaattaaggatagggctgcctttgcccattgatagagaattctcagttctgtaggactgtcagtcttacagtataaattctcttctcttggggtcagcaaaggtaaagactcttagtagggtgaagggtatagcaagacaactctgctgctaaataattggatggtctggtaatctgtgaccttgagtcacatcagattgcaagtcagaagagaagtttctagaagaaaaatcccaggaccatacttatactagcttatcaccaactcaattacaatatcctggaaaggcgtgacaaagcagatcttaagattataaactatgtctataacataggaaaacccttttaaaaccactttactaatcacaaacttggctaatcctggcctaagaatctatatgagtcaaatcttatcttgccataactatggttcaaataattcaatttggt

SEQ ID NO: 370827 - DNA, 549 bp, Homo sapiens
ctgtggtcactgtcctggccgttgtttcatgaataatgccaataatattttccagcatgtggatgckgagaatgatcccttctatatcaaaaggagttgaaattaaggatagggctgcctttgcccattgatagagaattctcagttctgtaggactgtcagtcttacagtataaattctcttctcttggggtcagcaaaggtaaagactcttagtagggtgaagggtatagcaagacaactctgctgctaaataattggatggtctggtaatctgtgaccttgagtcacatcagattgcaagtcagaagagaagtttctagaagaaaaatcccaggaccatacttatactagcttatcaccaactcaattacaatatcctggaaaggcgtgacaaagcagatcttaagattataaactatgtctataacataggaaaacccttttaaaaccactttactaatcacaaacttggctaatcctggcctaagaatctatatgagtcaaatcttatcttgccataactatggttcaaataattcaatttggt

SEQ ID NO: 370828 - DNA, 618 bp, Homo sapiens
agctccttatgtagtgacttcaaaagtttcattccctctgtactagaaaaactaagtttgtaccttgctcacgctggtcaccaaacaaatcctttctcagccttcttctctcaattgacttgsaagacgattggatagcaattttggtttccattttgtgaagtcttagcctgtgccttgctactcaaaattgcttatgcactagcagcattcttaacctactgaatttgaatctgcatttaacaagatccccagatgatttgtgtatactttagagtcgtagaagcacaggtctattagacattattacatctgatcctcacattaacccttatatagtatgtattccttaaaagaagggaatactgtacaggaggttaagtaatttgtacactatcacgtagccagaggcaggacttgagcccaggtctacccactccacagcttagcctgtaatcactatgcttcactgacctcaaaagctattggtaacttcagcagagggtgtggcacatgtatgtagccaggtgcatgtgtatgtttgcatgtatgtatatagaaaacatgattttaagatcaaatcaatgttctatttattcttacttgatgataaatatt

SEQ ID NO: 370829 - DNA, 618 bp, Homo sapiens
agctccttatgtagtgacttcaaaagtttcattccctctgtactagaaaaactaagtttgtaccttgctcacgctggtcaccaaacaaatcctttctcagccttcttctctcaattgacttgcaagacgattggatagcaattttggtttccattttgtgaagtcttagcctgtgccttgctactcaaaattgcttatgcactagcagcattcttaacctactgaatttgaatctgcatttaacaagatccccagatgatttgtgtatactttagagtcgtagaagcacaggtctattagacattattacatctgatcctcacattaacccttatatagtatgtattccttaaaagaagggaatactgtacaggaggttaagtaatttgtacactatcacgtagccagaggcaggacttgagcccaggtctacccactccacagcttagcctgtaatcactatgcttcactgacctcaaaagctattggtaacttcagcagagggtgtggcrcatgtatgtagccaggtgcatgtgtatgtttgcatgtatgtatatagaaaacatgattttaagatcaaatcaatgttctatttattcttacttgatgataaatatt

SEQ ID NO: 370830 - DNA, 630 bp, Homo sapiens
gaatttatccaaaaaagttaatattaactgaggtgagtgctatctcattgcagttttkttttgcatatctctgatgatcaatgatgttgagcaccttttcacatatctatttgccatctgtatgtcttcttttgagaaatgtttattcatatcttttgcccatttccaaattgaattattagattttttttctcatagagttgtttgagctccttatatcttttggttattaaccccctgtcagatggatagttggcaaatattttctctcattctgtgggttttctcttcactttttttattgcttcctctgcagtgcagaatttttttttaacttgatgtgatcccctttgtccatttttgcttggttgcttgtgcttgtggggtattattcaagaaatctttacccagtccaatgacttagagagtttccctaatgttttcttttagtattttcacagttcgaagtcttaaatttatgtctttaatccattttgatttgatttttgtatatggtaagagatgggggtctagtttcattcttccacatattgatatccagttttcccagcaccatttattcaagagactatcctttccataatgtctgttcttggcacctttgtcaaa

SEQ ID NO: 370831 - DNA, 630 bp, Homo sapiens
gaatttatccaaaaaagttaatattaactgaggtgagtgctatctcattgcagttttgttttgcatatctctgatgatcaatgatgttgagcaccttttcacatatctatttgccatctgtatgtcttcttttgagaaatgtttattcatatcttttgcccatttccaaattgaattattagattttttttctcatagagttgtttgagctccttatatcttttggttattaaccccctgtcagatggatagttggcaaatattttctctcattctgtgggttttctcttcactttttttattgcttcctctgcagtgcagaatttttttttaacttgatgtgatcccctttgtccatttttgsttggttgcttgtgcttgtggggtattattcaagaaatctttacccagtccaatgacttagagagtttccctaatgttttcttttagtattttcacagttcgaagtcttaaatttatgtctttaatccattttgatttgatttttgtatatggtaagagatgggggtctagtttcattcttccacatattgatatccagttttcccagcaccatttattcaagagactatcctttccataatgtctgttcttggcacctttgtcaaa

SEQ ID NO: 370832 - DNA, 626 bp, Homo sapiens
ttcatcaaggataatttatatcaataagtataatgggctatctcattctcctttggccaacacattattcacactgttataggcagtgaatctattagtaaatgaggaaaaaatacgttttgttttctgttttttaaaaaaagactcctgataaatgctgattataagaaaacaggaattttatatcacggacataaaggttaaagaaaatgtgagctcaccataaaacttgctgaaatggaaaattaaggtggattctaaagagataacctgcatccaactgtggcttctccaggaggagcctttgaattgtcctgttcacctrcctagaatgctcttgtcttccatccactccccgtacacttggatgattccattcctccatcagtcattgttttagatggcatgtcttccaagaagtcttccctgaccttctggactgagtaagatgccaatcttaggtcaggtcctccagaagcaaccctgaaataaggattcatgtgaaagtgtttccagaaataacggataggagagtggaaaattaggaccagagaggagaaggagacaagcaaaagtaggatataaagcaaaatctcaggagaattttggcccaatcctgccaggga

SEQ ID NO: 370833 - DNA, 624 bp, Homo sapiens
aatgccactgattttttatgttgattttgtatctgcaactttgctgagtttattagttctaacagttttcttgtagagtctttaggtttttccaaatataagattatatcatctgcaaacaagtataaattgacttcttccttttcaatttgaatgccctttatttctttctcttctatgattgctccagctaggacttccatttccatgttgaataayagtgatgaaagtgggcatccttgtctttttccagatcttagaggaaaggctttcagtttttcccaattcagcatgatactagctgtgggctgttgtatatggcttttgttgtgttgacgtatgtttcttctatactcagttttttgcatttttttttatcatgaagggatgttgaattgtatcaaatgcttcttcagtattaattgaaatgagcatatgatttttgtccttcattctgttggtatgatgtatcacattgattgatttgcatatgttaaaccattcttgcatccctgggataaatccctcttggtcatggtgcatgatctttttcatgtgttgttgaattaagtttgctaggatttcaatgaggatttttgtatcaatgttcatcagggatattgg

SEQ ID NO: 370834 - DNA, 412 bp, Homo sapiens
agcttctgggaactgaaataaatcacgtcacaaataactaaacaaaatttcaggaaaaaagagaaatattgtattatcttaaacttggtttccagacatttagagggtggctggagtaagtctacataaggtcccagccagcagccaattctgcagtgaggagaacccaggatccagacccaggtcagatatgatggttgcccagtggagccaagactgagagaatcccaaggattggcaaggccctaaaatgtcctgatgattttgtgcccaaggataaactagacattcagcccaagtaayccaaagaaatgtcgtggacactagaccagagcagggaccatgacgaatagtagtgataaaacggagggtccagaaccacgtgtgtgaatctggctagatgtctgagtgt

SEQ ID NO: 370835 - DNA, 566 bp, Homo sapiens
atgctaggccagtctctcttttcatgttttyctgtctgctttatatttgctggcagctgattagatggtgcccacccagactaagggtgggtctgcctttcccagcccactgactcaaatgttaatctcctttagcaacactctcacagatacacccaggattaatactttgtatccttcagcccaatcaagttgacactcagtattaaccatcacaacccctaatcagtcaatcaaaaggcatttactcaggtctcatcatgcaactggaattcatgtttttcaataaggttaggaaatctttcctccatatcaaatgaggattttgcaattttaaaagtttagtttgatgttccagtggaaagatcaacatctgttggagttagagctatattaagtagaaattaatgattttagagtttgccttctaaaatccctctctgttagaattgtctttagtgagccattatcatctagaatggatccagtgacatagaacagaaatctggaagtgtggggctctattaataagaagtatgatgcaattactcttccaaagttgatca

SEQ ID NO: 370836 - DNA, 566 bp, Homo sapiens
atgctaggccagtctctcttttcatgttttcctgtctgctttatatttgctggcagctgattagatggtgcccacccagactaagggtgggtctgcctttcccagcccactgactcaaatgttaatctcctttagcaacactctcacagatacacccaggattaatactttgtatccttcagcccaatcaagttgacactcagtattaaccatcacaacccctaatcagtcaatcaaaaggcatttactcaggtctcatcatgcaactggaattcatgtttttcaataaggttaggaaatcttycctccatatcaaatgaggattttgcaattttaaaagtttagtttgatgttccagtggaaagatcaacatctgttggagttagagctatattaagtagaaattaatgattttagagtttgccttctaaaatccctctctgttagaattgtctttagtgagccattatcatctagaatggatccagtgacatagaacagaaatctggaagtgtggggctctattaataagaagtatgatgcaattactcttccaaagttgatca

SEQ ID NO: 370837 - DNA, 617 bp, Homo sapiens
ttcgagggcaggaaggattcaacatgggagaaagatgtaggctggaatgctaggccagtctctcttttcatgttttcctgtctgctttatatttgctggcagctgattagatggtgcccacccagactaagggtgggtctgcctttcccagcccactgactcaaatgttaatctcctttagcaacactctcacagatacacccaggattaatactttgtatccttcagcccaatcaagttgacactcagtattaaccatcacaacccctaatcagtcaatcaaaaggcatttactcaggtctcatcatgcaactggaattcatgtttttcaataaggttaggaaatctttccyccatatcaaatgaggattttgcaattttaaaagtttagtttgatgttccagtggaaagatcaacatctgttggagttagagctatattaagtagaaattaatgattttagagtttgccttctaaaatccctctctgttagaattgtctttagtgagccattatcatctagaatggatccagtgacatagaacagaaatctggaagtgtggggctctattaataagaagtatgatgcaattactcttccaaagttgatcaagtgt

SEQ ID NO: 370838 - DNA, 507 bp, Homo sapiens
ttggctgcaatccagaagagcagggatgtgtgaactgacaagataaagccaacatacccattgcccttccatctcctcctgggcatttcttagtctggcttttgtgagtgtagtaacattttaggacwgtatttgcctacttacagcaatactgcattgaattatcttaaggaaacaggatggcccttgattgttgttttctctctatggatgggttttctgttgttgttgttgctgttgaattgaagaacacagtgggagccaggacataattgctaccatagtcacaaaccacagactcctgggtattctgtgtagtgtttctgaatatgtccagagaccacatgcatccaaattagcaagttgcttgcttcaaaggcagattcttgtaacccactccagacaagttaatcagaatctctggaggtaagtcctggaaatctgaaatttaacaactcttcttaggtgtactaaattcttagacataaaaactttttattgtggttc

SEQ ID NO: 370839 - DNA, 219 bp, Homo sapiens
aatctctggaggtaagtcctggaaatctgaaatttaacaactcttcttaggtgtactaaattcttagrcataaaaactttttattgtggttcctccaatgcaaattagtgttttaacagatgaggactgagacccagaggaatagaatgatctgcccaacgtctcacagctggtacactgggacccaaatctgtgccttcccaggtctgtccttgattc

SEQ ID NO: 370840 - DNA, 219 bp, Homo sapiens
aatctctggaggtaagtcctggaaatctgaaatttaacaactcttcttaggtgtactaaattcttagacataaaaactttttattgtggttcctccaatgcaaattagtgttttaacagatgaggactgagrcccagaggaatagaatgatctgcccaacgtctcacagctggtacactgggacccaaatctgtgccttcccaggtctgtccttgattc

SEQ ID NO: 370841 - DNA, 602 bp, Homo sapiens
atggatcaaattctcataaatccctaataattggtggacctaattatgattatatgtatttgcctaagagctccataaaatgataaagtattgcttgacttcctaaaagctacagttagaagactggtctagactgagtggtatgagaacacagtttgctttttacctttctgacccaattggcctttaattttgatggtctgcatttaraattcattttgtgagtaaacccagcgaggctcctcctccatggaccactttgggtaatttttttttggcgggggggtggggggacaattttaaagagtgtctattatcaaagagaaattttaaaacatgtatatttataccatgtggttggacatcgtagaattagctggtaaaaaacaaaagaaggaaaaaggaaaaagtgccattggaaaggtacatagcagaagtaaactatgaagctatgtggtatagtgaaaagggcccaggatgtgaagaaataaagccagattcacggcctaattcaattcttgctagctctgtgttttggaataaatcaccttcagttgctttattgtatttcgggatcatcatctataaaaaatggaacctcc

SEQ ID NO: 370842 - DNA, 488 bp, Homo sapiens
gatagttaacaattttattgctttaatataattatcccaggctttggaacaaagattgaaaaagagataaagatgcaataccacataactggagaattttagacaggatctcagagagcattcattccaattctcatttccagacacatattttatagagtaggaaactgargtatggaggagttgagaagcttgcccaaggtctcacagcattatcctgagagcttgaaatagaactcaggtctcctgctgtccagctcccagcaacctctacaatccctaaagctgtttctagaatcccatctcttcgatcctgtgcctacaacccatgtcaacaaccattaaagcatattattcagttcaattgcctcctttaataattaaccagtttattacaataccttcccttccccttgcagtgcagagacagggccaaacactcagagaattgtcatagactcaactcagggagaaaggcctcttttgtt

SEQ ID NO: 370843 - DNA, 601 bp, Homo sapiens
cttgcatcaatttayttatttatttgtttgtttgtttgtttgttagaacacttaaaatgagatctactcacttaacaaattgtgaagtgcacaatactatactgttcactgtaagcactatgttgtatattacctctctagaacttattcatctaacatgactaaaactttatacttattaaacaactccccagttcgccaccttccagcccttggcaacctctattgtattctctgcttctatcagtttgactattgtacatgcttcatttaagtggaatcatgcagtatttgtccttctatgactggtttagttcacttaacataatgttctccacgctcacccctgatatggtttggatattcatcccttccaaatctcatgttgaaacgtgattcccaatgttggagatggggcttggtgggaggtgtttgggtcataggggtggagtcttcctgaatagcttggtgcccttcttgctgtaatgagtgagttattgctttgagttcacacaagagctggttgttaaagagtctggctcctcctccctcactctctcatgctcctactctcaccgtgttacatgctggctccccttca

SEQ ID NO: 370844 - DNA, 601 bp, Homo sapiens
cttgcatcaatttacttatttatttgtttgtttgtttgtttgttagaacacttaamatgagatctactcacttaacaaattgtgaagtgcacaatactatactgttcactgtaagcactatgttgtatattacctctctagaacttattcatctaacatgactaaaactttatacttattaaacaactccccagttcgccaccttccagcccttggcaacctctattgtattctctgcttctatcagtttgactattgtacatgcttcatttaagtggaatcatgcagtatttgtccttctatgactggtttagttcacttaacataatgttctccacgctcacccctgatatggtttggatattcatcccttccaaatctcatgttgaaacgtgattcccaatgttggagatggggcttggtgggaggtgtttgggtcataggggtggagtcttcctgaatagcttggtgcccttcttgctgtaatgagtgagttattgctttgagttcacacaagagctggttgttaaagagtctggctcctcctccctcactctctcatgctcctactctcaccgtgttacatgctggctccccttca

SEQ ID NO: 370845 - DNA, 601 bp, Homo sapiens
cttgcatcaatttacttatttatttgtttgtttgtttgtttgttagaacacttaaaatgagatctactcacttaacaaattgtgaagtgcacaatactatactgttcactgtaagcactatgttgtatattacctctctagaacttattcatctaacatgactraaactttatacttattaaacaactccccagttcgccaccttccagcccttggcaacctctattgtattctctgcttctatcagtttgactattgtacatgcttcatttaagtggaatcatgcagtatttgtccttctatgactggtttagttcacttaacataatgttctccacgctcacccctgatatggtttggatattcatcccttccaaatctcatgttgaaacgtgattcccaatgttggagatggggcttggtgggaggtgtttgggtcataggggtggagtcttcctgaatagcttggtgcccttcttgctgtaatgagtgagttattgctttgagttcacacaagagctggttgttaaagagtctggctcctcctccctcactctctcatgctcctactctcaccgtgttacatgctggctccccttca

SEQ ID NO: 370846 - DNA, 601 bp, Homo sapiens
cttgcatcaatttacttatttatttgtttgtttgtttgtttgttagaacacttaaaatgagatctactcacttaacaaattgtgaagtgcacaatactatactgttcactgtaagcactatgttgtatattacctctctagaacttattcatctaacatgactaaaactttatacttattaaacaactccccagttcgccaccttccagcccytggcaacctctattgtattctctgcttctatcagtttgactattgtacatgcttcatttaagtggaatcatgcagtatttgtccttctatgactggtttagttcacttaacataatgttctccacgctcacccctgatatggtttggatattcatcccttccaaatctcatgttgaaacgtgattcccaatgttggagatggggcttggtgggaggtgtttgggtcataggggtggagtcttcctgaatagcttggtgcccttcttgctgtaatgagtgagttattgctttgagttcacacaagagctggttgttaaagagtctggctcctcctccctcactctctcatgctcctactctcaccgtgttacatgctggctccccttca

SEQ ID NO: 370847 - DNA, 366 bp, Homo sapiens
ttgtaaagaattaaagaccataaacacaaatggcctgggtttataaaagatgctcagttaagacaagctatgatgcttaacttcctttatttcaaggattacctagtgttagttgtgtagtttcaggaaagttccttcatctttctgtgcctcagtttcctcatctgtaaaataagcatacaataagttgttctgtggactaagggagttaatatgtatgaagtgctctgaacaatgtctggcacatagtacgcactatatactttttaactattataatttgtgtttgtgtggtagtgatgaaatcaaggaggtacgaaaaccagattttagtccacyctgtactgggtgaactggcagaagtca

SEQ ID NO: 370848 - DNA, 480 bp, Homo sapiens
gggtcaaatcccagctcagctgctctcaacttgtttgtccagaggcaaattcttgcagccacttaagcctcagtttcttcatttgaaaaatggaaataataatagtgctgacttcaagaaawattgcaaggatcaagtagaataatgcacataaaatgcttaacagagcccccggcatggagggagcactcgggatggggaagctgttattactgtggcaagaatctaggaaatgatgggaagaggcaatgcttgtagagaccaacatgttttcagaacaaagggggaaacatacagcgtgaaaacattgtgagagagcacctacgtcctgggcgagtataatagtaaaactgaacttacattgctcaggtttgtcaagtattttactgagttggattttaaatattgtgtgtgtacacacacgtacacgtgtatttattcttctgatactatttttaagtaaaaattgttttaaatcag

SEQ ID NO: 370849 - DNA, 480 bp, Homo sapiens
gggtcaaatcccagctcagctgctctcaacttgtttgtccagaggcaaattcttgcagccacttaagcctcagtttcttcatttgaaaaatggaaataataatagtgctgacttcaagaaaaattgcaaggatcaagtagaataatgcacataaaatgcttaacagagcccccggcatggagggagcactcgggatggggaagctgttattactgtggcaagaatctaggaaatgatgggaagaggcaatgcttgtagagaccaacatgttttcagaacaaagggggaaacatacagcgtgaaaacattgtgagagagcacctacgtcctgggcragtataatagtaaaactgaacttacattgctcaggtttgtcaagtattttactgagttggattttaaatattgtgtgtgtacacacacgtacacgtgtatttattcttctgatactatttttaagtaaaaattgttttaaatcag

SEQ ID NO: 370850 - DNA, 480 bp, Homo sapiens
gggtcaaatcccagctcagctgctctcaacttgtttgtccagaggcaaattcttgcagccacttaagcctcagtttcttcatttgaaaaatggaaataataatagtgctgacttcaagaaaaattgcaaggatcaagtagaataatgcacataaaatgcttaacagagcccccggcatggagggagcactcgggatggggaagctgttattactgtggcaagaatctaggaaatgatgggaagaggcaatgcttgtagagaccaacatgttttcagaacaaagggggaaacatacagcgtgaaaacattgtgagagagcacctacgtcctgggcgagtataatagtaaaactgaacttacattgctcaggtttgtcaagtattttactkagttggattttaaatattgtgtgtgtacacacacgtacacgtgtatttattcttctgatactatttttaagtaaaaattgttttaaatcag

SEQ ID NO: 370851 - DNA, 554 bp, Homo sapiens
agtatttatctcatgtaaagtcatagatgtcgttcagtcatagatggtatcattctacctacctggtagcccccaggaaaacaastgtatttaatttcaaagatagttataaaaagatgtatttagtgacaattaacacaggcccttttccatatacactcacattcattagtatgatacttctacaagctcaatattggtgcagaggagggcaagagctttggagctggatgacaatttgcaaggactagtgtatcaatgctaaaaaaaaaacagctacaggagcctgtcctgatcctaatcctttaagccaggctggtgcagggcacccagcccccagaccaccctatcagtgtgccctgggcctacctactcatccagggagccacttatgccacctgggttggcaggtggcataaggcagtttctcaggacctctcccacagctcccacttttgttgtttccaaccagctttcatttcaatcccatttccaccagctcagaagtactggctgtaaatctaatttagatcgctatctccatggcatttaca

SEQ ID NO: 370852 - DNA, 554 bp, Homo sapiens
agtatttatctcatgtaaagtcatagatgtcgttcagtcatagatggtatcattctacctacctggtagcccccaggaaaacaactgtatttaatttcaaagatagttataaaaagatgtatttagtgacaattaacacaggcccttttccatatacactcacattcattagtatgatacttctacaagctcaatattggtgcagaggagggcaagagctttggagctggatgacaatttgcaaggactagtgtatcaatgctaaaaaaaaaacagctacaggwgcctgtcctgatcctaatcctttaagccaggctggtgcagggcacccagcccccagaccaccctatcagtgtgccctgggcctacctactcatccagggagccacttatgccacctgggttggcaggtggcataaggcagtttctcaggacctctcccacagctcccacttttgttgtttccaaccagctttcatttcaatcccatttccaccagctcagaagtactggctgtaaatctaatttagatcgctatctccatggcatttaca

SEQ ID NO: 370853 - DNA, 424 bp, Homo sapiens
tagagggtggcgggaaaggactgggtgctaatttaggtaggaatgtcaggaagtcagaagaaaatgtaaaagtgtgggcatgagccatgtaaagacatccagaaaagtgttccaggcagagggaagagcaagagttcttatattctgccagaccctatgctgaaagcttygtaccaattatctcatttaatcctcacaaaccccctgagggtaagtgtcattatttcttcattttgctgctaagcatttgaaccttgaagtaacttgcttaggagcacacgattttctaatgagggaggcatgagttaaactgagccttctggctctgagataacatccccacctcaactactaaacagttccatgctttggtcagtctgcaacaacctctttgccagcacttttaacacaagatttagagaat

SEQ ID NO: 370854 - DNA, 585 bp, Homo sapiens
tttcgcaaattgcttataattacagagcttagtttacacagctttagtttaaacctgggtctctcctgctctataatttctgctcttcagtatttaaaaaacagctaatatttactgagcacttaccaggtaccagacattgtgatgggcactttgattaaattttctcattgaacyctgtaattgttctaggttaagcaatgctgcagtaacaaagagcccctgtgtaatagaagttaatttcttgctcacataacaatcaaaggtaaaacttttatatcaatgtttgcctctccttcatgaagtaatccagtaactcaggttgcttctatcttgtggctcatccatatcttagggacttatttttgtttggatccatcaggcaaaaggggaaaaaatatgaagaggcctctctctaaaagttttagctgaaaacaacatctagcattgctgcctatattccaatgggtagaactcagtcacatagccacagtaaatggcaagagaaaccaggaaatgtggcctagtaggatgcctagaaatagaaggaaacagatttttggtgaattggctggctcttccaca

SEQ ID NO: 370855 - DNA, 594 bp, Homo sapiens
taaatttaaaaataaatggcaaattttatgttatgtatcttttaccacaacaaaaattaaatttagaaaaagycttcttcctgttaacatgactttgaacctgctccttgtgaaacaactgcctgacattattgtactacagagtatttaatgcctgcctaaagctggcataccttacctataatggctcttgttctctcagcaatctgggatgagggtatggcagctcctaagcgattctttctgactcccaaattcctcccttttggaaacccttgcatgcaaagggtacagtccttccttgcccaaccattatgagggaagaggccaaaagagatggtacaacctggccaaactgttttattgaaaaaattgtccatggtcatgctctgtctttgatttttttaaaaaatgtttttgaaaaagtcatctttggaaaacactttgcaagtctaaaactaaaagtatcagatgaatgctattcagtgccctgatgaggtctctagttgaaagtaaagaggtagccctcttattatctggctggacatttccctactagagagaatgtccatctaaataagttgcaattgctgc

SEQ ID NO: 370856 - DNA, 594 bp, Homo sapiens
taaatttaaaaataaatggcaaattttatgttatgtatcttttaccacaacaaaaattaaatttagaaaaagccttcttcctgttaacatgactttgaacctgctccttgtgaaacaactgcctgacattattgtactacagagtatttaatgcctgcctaaagctggcataccttacctataatggctcttgttctctcagcaatctgggatgagggtatggcagctcctaagcgattctttctgactcccaaattcctcccttttggaaacccttgcatgcaaagggtacagtccttccttgcccaaccattatgagggaagaggccaaaagagatggtacaacctggccaaactgttttattgaaaaaattgtccatggtcatgctctgtctttgatttttttaaaaaatgtttttgaaaaagtcatctttggamaacactttgcaagtctaaaactaaaagtatcagatgaatgctattcagtgccctgatgaggtctctagttgaaagtaaagaggtagccctcttattatctggctggacatttccctactagagagaatgtccatctaaataagttgcaattgctgc

SEQ ID NO: 370857 - DNA, 593 bp, Homo sapiens
tctccaataaaaatacaaaaaactagtcaggcatggtggygggcacctgtagtcccagctactcgggaggttgaggcaggagaatggcttgaacccgggagacagatcttgcagtgagccgagatcatgccactgcactccagcctgggtgacagagcgagactccatctcaaaaaaaaaaagaaatgtaaattctcagtcaagctccacctaagacctactaaagcagaaattcaagccctctgggtgatgcatgctaaagcttgagaaccaatggtacagactatgccaaaagtgtgtaccttaattacaaaaggctattaaatgggcactgtattagtccactctcgcgctgctatgaagaaataccaagactgggtgatttatatggaaagaggtttaattgagtcactgttctgcagggctggggaggcctcagaaaacttacaattgtggcggaaggagaggcaaataagtccttcttcacatggcggcagcaaggagaagtgccaagcaaagggagaaaagccccttataaaaccatcagatctcatgagaactcactcattatcatgagaacagcagcatggagg

SEQ ID NO: 370858 - DNA, 593 bp, Homo sapiens
tctccaataaaaatacaaaaaactagtcaggcatggtggcgggcacctgtagtcccagctactcgggaggttgaggcaggagaatggcttgaacccgggagacagatcttgcagtgagccgagatcatgccactgcactccagcctgggtgacagagcgagactccatctcaaaaaaaaaaagaaatgtaaattctcagtcaagctccacctaagacctactaaagcagaaattcaagccctctgggtgatgcatgctaaagcttgagaaccaatggtacagactatgccaaaagtgtgtaccttaattacaaaaggctattaaatgggcactgtattagtccactctcgsgctgctatgaagaaataccaagactgggtgatttatatggaaagaggtttaattgagtcactgttctgcagggctggggaggcctcagaaaacttacaattgtggcggaaggagaggcaaataagtccttcttcacatggcggcagcaaggagaagtgccaagcaaagggagaaaagccccttataaaaccatcagatctcatgagaactcactcattatcatgagaacagcagcatggagg

SEQ ID NO: 370859 - DNA, 643 bp, Homo sapiens
caagactgtttccaaatgccaccggtgagatgtgcacaggtaaatatgatttaaccccatttctagggacattctaagggagaggagaagatatgaaagggaagaaaaatgacatttattgagcacctatgtttgccaagtacaggtttaagagctttttatgtggtatcacatttattcatttgtacaactcctatttatcrcgtattaatagtcagcccacttatgcattcactggttcactcttttatttgttaatttgttcattcattcatcattcattttccaaacctttgttgggtgcttgttatgcatgaggtgctggaaaaaaggcatatcaaaaatggacattccactctcacatctgcaacctggaattcatcattgaagtaaaacatacatctaaaaaacaaatgatatagtaataatatatccacaatagaatgtgataagtgatatataatagtgtgtcctggtaaggccaacttattctacctggggacatcaggaaatactttatccttataaactaattatatttgcattttaaaagtgtcttgaatagattatatgaaaccatcacagactgctccattcttaacatgagcatgaactagctgctgggaactgcacgtgtgcatag

SEQ ID NO: 370860 - DNA, 371 bp, Homo sapiens
tgctaagatgcttcataattcaagcagtatgtcctcccataagttatagagtagaagtggaagttggatatcattcaaatagcttttgcaaaacaaaaaaaaaaaaaaagaaaagaaaaataaaaaagaaaaagccctttatagtagcaggtgtttcctggctctatttcttgagytttagatcaaagaataggaacaaatatcatctcatctaagaaatatcacgggaaatattgtccatcactagcaggtttgattgttgttgaaatgcatgaagaattaggaaaatcatccctaatttgttttggcatcaatggctactgcaggttctggggtatgcatcttggtagacttgccaggtttcccatatc

SEQ ID NO: 370861 - DNA, 371 bp, Homo sapiens
tgctaagatgcttcataattcaagcagtatgtcctcccataagttatagagtagaagtggaagttggatatcattcaaatagcttttgcaaaacaaaaaaaaaaaaaaagaaaagaaaaataaaaaagaaaaagccctttatagtagcaggtgtttcctggctctatttcttgagctttagatcaaagaataggaacaaatatcatctcatctaagaaatatcacgggaaatattgtccatcactagcaggtttgattgttgttgaaatgcatgaagaattaggaaaatcatccctaatttgttttggcatcaatggctactgcaggttctggggtaygcatcttggtagacttgccaggtttcccatatc

SEQ ID NO: 370862 - DNA, 549 bp, Homo sapiens
cttgttgagaaaaagaagtcagcgatatttttcccagttgcttttgaaagaagagaaatatggctctgttccgcccagctcaccagcagtcagagtttaaggttctctctcttgttccctgaacattgctgttatcctgttcttttttcaaggtgcccagatttcatattgttcaaacacacatgctccacaaacacttgtgcagttaatgcaatcatcacagggtcctgaggtgacatacatcctcctctgcttacgaagttgacgggattaagattagagcaaagacaggcataggaaatcacaagggtattgattggggaagtgataagtgtccatgaaatcttcacaatttatgttcagagattgcagtaaagacaggygtaagaaattataaaagtattaatttggggaactaataaatgtccacgaaatcttcacaatttatgttcttctgccatggcttcagctggtccctccattcggggtccttgacttcccacaacaccctaagtgttggccggtctaagaaataaagagtacaaagag

SEQ ID NO: 370863 - DNA, 549 bp, Homo sapiens
cttgttgagaaaaagaagtcagcgatatttttcccagttgcttttgaaagaagagaaatatggctctgttccgcccagctcaccagcagtcagagtttaaggttctctctcttgttccctgaacattgctgttatcctgttcttttttcaaggtgcccagatttcatattgttcaaacacacatgctccacaaacacttgtgcagttaatgcaatcatcacagggtcctgaggtgacatacatcctcctctgcttacgaagttgacgggattaagattagagcaaagacaggcataggaaatcacaagggtattgattggggaagtgataagtgtccatgaaatcttcacaatttatgttcagagattgcagtaaagacaggcgtaagaaattataaaagtattaatttggggaactaataaatgtccacgaaatcttcacaatttatgttcttctgccatggcttcagctggtccctccattcggggtccttgacttcccayaacaccctaagtgttggccggtctaagaaataaagagtacaaagag

SEQ ID NO: 370864 - DNA, 611 bp, Homo sapiens
ctaacatacatgaaaaggcgagacttctggctatggctgagtgaggtctgcwaagccccttcccgaaaacagctgtaaacaagaatcttgaaggatttacgctttaaaagcagctgaacttcaagtaaaaactatgggagtctgaggcgttcttgtccggggctgctccagttctttccccaggctcctccagctcggtactcaccaaggtctgcccaggcaggggacagatatttgtgaagatatttgatttggagtggtagagatacacgtgcccaatggcattggtgaaggtgatggtcttggtgattagggagagggagggtcaataattagacttgcccaaggttgaggtcacgactggaaaaagtacattcctggcttgggcttgcatagagctaggggttgggagtagggaataactttaaataagcacaaaggaactttttgggatgatggaaaatttctgaaatcaaaaatcattgaagtgtacacttaccatgggtacattttatatgacatttatatgccaatacaactgtttttataaaactatgtacaaaaggaaaaactttctagtatgaaagagagttggagtctacagctctaat

SEQ ID NO: 370865 - DNA, 611 bp, Homo sapiens
ctaacatacatgaaaaggcgagacttctggctatggctgagtgaggtctgcaaagccccttcccgaaaacagctgtaaacaagaatcttgaaggatttaygctttaaaagcagctgaacttcaagtaaaaactatgggagtctgaggcgttcttgtccggggctgctccagttctttccccaggctcctccagctcggtactcaccaaggtctgcccaggcaggggacagatatttgtgaagatatttgatttggagtggtagagatacacgtgcccaatggcattggtgaaggtgatggtcttggtgattagggagagggagggtcaataattagacttgcccaaggttgaggtcacgactggaaaaagtacattcctggcttgggcttgcatagagctaggggttgggagtagggaataactttaaataagcacaaaggaactttttgggatgatggaaaatttctgaaatcaaaaatcattgaagtgtacacttaccatgggtacattttatatgacatttatatgccaatacaactgtttttataaaactatgtacaaaaggaaaaactttctagtatgaaagagagttggagtctacagctctaat

SEQ ID NO: 370866 - DNA, 611 bp, Homo sapiens
ctaacatacatgaaaaggcgagacttctggctatggctgagtgaggtctgcaaagccccttcccgaaaacagctgtaaacaagaatcttgaaggatttacgctttaaaagcagctgaacttcaagtaaaaactatgggagtctgaggcgttcttgtccggggctgctcyagttctttccccaggctcctccagctcggtactcaccaaggtctgcccaggcaggggacagatatttgtgaagatatttgatttggagtggtagagatacacgtgcccaatggcattggtgaaggtgatggtcttggtgattagggagagggagggtcaataattagacttgcccaaggttgaggtcacgactggaaaaagtacattcctggcttgggcttgcatagagctaggggttgggagtagggaataactttaaataagcacaaaggaactttttgggatgatggaaaatttctgaaatcaaaaatcattgaagtgtacacttaccatgggtacattttatatgacatttatatgccaatacaactgtttttataaaactatgtacaaaaggaaaaactttctagtatgaaagagagttggagtctacagctctaat

SEQ ID NO: 370867 - DNA, 565 bp, Homo sapiens
aagcttaatataattaagtgtgagccatgtaaatctgagaagtcaaaagtatttttatgccattagcaaatgtttaaaattaattaaaaagatgatgtaactaactttctctctctcaatactgctcaattacaaagtctttattctgagccaagaattttatatcataactcaatctatatagctagctacgtgtgtgcatgtgtgcgtgtgtgtgttaatatactgttaataacaataacaataaaatatattgttaatatattttaatatttatttattgttaatatatactattaataacaataacaatgaaaatatattgccaatatattattgcattatttataaaactctccttctgaaactgattttaggtccatctataaagcacataagaaaaccattctaattataatatactacaaactacttcagttccatgtcttcattactggttatgatttattttaagcctacttgtattttgacaaggagcaaagaaaacatsaagttctgaattaagaattcacctgaataaacatctagactctaaattgaaaat

SEQ ID NO: 370868 - DNA, 670 bp, Homo sapiens
aacagaaatacaatgggatccatatatgtcagtttgaattatttagtagccagatttttaaaaggtaaaaagaaataggtaaaattaattttattaatatattttatttagcccagtatagcaaaaatattgtcatttcggcatgtggtcaataaaaacactattaatgagataatgtgtagaaggccttcaaaatccagtctatattgaatgcatacagcacatctgaactggattagccacattgtgagtggctagtggctaccaaactggccagcttagctgcagaaggtgctgataaatcctacctttcgaaatccactgcactgtgaattggaaagaagacatctcagcagggaaaaaaataaactgattctagctataggacagctggtaaatgcaatatacatgtttttcatatttgatatataccccagacacacacacccgacaggagatgggtgagtagtactatcctcacctcacagatgaggcaacagagactcaggagaagaaagaggagacacaattcaaaccctaacacccgggaagactcatttyaggtttctgacctccaaaattgtcagataataaatttgcattatttaagcctctacatctgtgggagttcattacaaggacaacggaagagtaacacaacttccaaatg

SEQ ID NO: 370869 - DNA, 497 bp, Homo sapiens
ggaattttaaaaagacgtgaggggttaaaaatacaaaaactggaagttaccaggtagagatggttccagaagctgtgtggatggaagacattagrcagacagagagtgaaaagaaagagaggacagtcagagaccctgagattaccaacatttaaacagcaagccagtgatccaggttggtggtgaagagtcctcacattgccacttactagctgtgtcactgagcaagcagattaagtattctaatttccaatttcctcttctgtaaaatgggtacaataaccatagcatcttcactgaacaattcacatctctctcttcttgtagatccaatggcctctatcagctacgtaccatatggctgcctggtcatatattgtcatgttcttttctgtaatgttaaattacaaggccagtctttaaatcccttgatgtctctattgaacatagcatggggctatgcacgtgttaagtgccaataatgcagacattattga

SEQ ID NO: 370870 - DNA, 591 bp, Homo sapiens
gtttgttttgtttacttagaagtatatttttcttaggtttttttccctctccccaagtagaaatatacccactctgtcagctttatgactaggttatagcrgttccatcctctgaaggtcttccccacaaaacctacccctctccttcccctttcttttctacccatgctgcattgtcttctggtttcagttcccctcaatgaagtcaggtcaggtttgacctttttttttttcaccatttttgaatgcttattaagtctcacctgtggcagttgtagagttcatgtatttcagtaatccttcaagttattttatttattcattcattcaacagatttgtcagcacctcttacaggccaggtatgccaggagcaaaggatagagtgggaagtgggtgaaaaatctctttccccttatggggctagtttaggggaagaagacagaaatggatcaataatcatagaaataaatataaaaggccaaacaagagagatgcagcaaaagaaaggtacatgtcccctaaggggagcattggcctatcaaagaaggtcaaggaagtgttctggaggaagtgaggattgagctaagatg

SEQ ID NO: 370871 - DNA, 509 bp, Homo sapiens
aaaaaaaaaaaaaactgaaattttatagactccaaaattaatattttcaaggagaaaaactaaacaaatttcatgcattggaaagactaaataagtcttaaggtatcagkgatatcatgaaaatggtagtgctttttgcaagaagaaaccaaaaaaatcaaccagaaaatccaagaaaaacaaataactctacaagaatgtcattatccaaatacaaagcctactaagatgtggaaaaatctggaactaggaattcatttgaccatgaagctgggaaccttctaagtggatcagagataataaatggagagaaagaaatgcaagcctcactcatttcttagctctgcagtgaaaatatttagaatcataagaaagaaaatgctctttatctgctttcaaatttgagagttaatctaaaaccaaactaaataaaactcataacagaagatatgtaaatgttaccaattttgttagtactaaaagtagatgtggctggcgtaagatggaaa

SEQ ID NO: 370872 - DNA, 436 bp, Homo sapiens
tctctggtgtctcttctgataaaggcacyactcccatcatgaaggctcccactgtcatgacctcactaaatccaagtgcctcccagaggctccaactccaaataccatcacactgggggttagggattcaacatacaaatttgggggacacaattccgtccacagcaaggtaactttaacaattttgtcttcaatgtccctaccattcctccctataatctagcttctattgcaatccccaccctttaatagtcagacacatctacttctttcttattgggtattcaagtcccaaggaaatcagaaaatgtgataaagtacttgttttaagtggctctgtatattctatcacagttatcctttttcgcagccaacttccaagatggccccaatgatccccaactcctgggattcacacctttatgtagttccttcc

SEQ ID NO: 370873 - DNA, 630 bp, Homo sapiens
ctttctgtaaagggccagaggggaactatttcaggctttgcaggccatatgtgtgtcacagctactcagccattttcttgcagygtgaaagctaatgagtgagaccatgttacagtaaagctttatggacactgaaatttgaatttcatataactttcacatgtcctaaaatatgtttcttttgattttttttaaacataaaaaccatttcagtgaatgggccctacaatagtgggtcatgggctggatatactgacatctgatatctctcaaagggccaacatcctttcctttggaatatggctggtttttaacttaggtattctcaacatcccctcactaaacacagacaggtgacaaattctaacaacagacttgtaattctcaagtttgatgctacctttctcctttgagaaacagtaagtactagtcatagtcaaggttatttgaaagatttttcatgcatttatcatgcttagaatccaggctcagctgtatccactccagataatctgtgatcctttgttttcatcttcttttttgttgttgttagattgaagattctccatctctgtggctgcaccatcacttctgacctgagcaaaataaaaggagcttacagaagtgtca

SEQ ID NO: 370874 - DNA, 550 bp, Homo sapiens
agctatagttcagtcccatgagtcctggtaaatccggactctggaattggaaaatatatttctctgagttttgaaaaaaagaggttgaaagattgttaattatttatgtagtttactattaataagtaaaatcarcataatctaattttgaagtattagagattgctaaattaaggaggaaccaaggtgtcagtagaattagcatttagttatgtagtagaataccttatattttataatggtaaaatttatttaataaaataatttgaaaagtgctgtttttacaggttgagcatccctaatccaaaagtctgaaattcgaaatgctcaaaggtccaaaactttttgagcactgacatgatctcacaagtggaaaaattccacgcctgatctcatgtgatgggtcacaatcaaaatggtcaaaactttgtttcatgtacaaaattattaaaaatagtgtataaagttacctttaggctatgcgtataagtatacatgaaacaaatgaattttgtgtttagacttgcgtcagaattctaatctgtcccaa

SEQ ID NO: 370875 - DNA, 612 bp, Homo sapiens
ttatcgggtctcaacctgacaacttcctaagcacaaagaaactggctggggggcaaaagagcctactctactcttggcaccctcttatcagggaggaagggacctccagcaacttcctttaatttattggccaattttagaccataaccaattacaggcaaaggggactgggattatctaatcaatcatgatttatctcctggggctgagcacagtgttgcctgaaaaaaagtgggattctgttaacaaaggagaaggggaagtagtgatatgtaggatgagtaagtctagacgtctaawgtactacatgaggactatgcataataaaatcatactatatttgggattcttgcaaaatgagtagattttggttcctcttgccacaaaaatgggtaactgtgtgagacaatagataggttaatttgcttcactatagtaacctttttactgtctggatgtatctcataacatcatgttgtataccttaaatgtatacaataaaatttattttaaaaaaaggagaggaggaaaatggttcctaggtgagcagtcactaaggtttactagaagatcctagcacaaaagaaccaaattacagggagcagaaagaag

SEQ ID NO: 370876 - DNA, 627 bp, Homo sapiens
cttgcaaaatgagtagattttggttcctcttgccacaaaaatgggtaactgtgtgagacaatagataggttaatttgcttcactatagtaacctttttactgtctggatgtatctcataacatcatgttgtataccttaaatgtatacaataaaatttattttaaaaaaaggagaggaggaaaatggttcctaggtgagcagtcactaaggtttactagaagatcctagcacaaaagaaccaaattacagggagcagaaagaagctaaagctgacactgggcttgttggtctctgattgctaaagtttgaagaaaataatatgtctaattcctaaatattttccagtcttcttcttgttagctgaagtactatttgtagattaggttcatcatttttatgttgttctgtattttgcttactgtaacactttctgaartgtttgctttcttaagtaaataatgaaaacatttttggtataggccagcacatccagctataatgagtaaataggtaccttagatggattcagaaagaaaatgatgcacaaaatgcatcataaattgcaaaatggttggaatttttgctgagtagaatttgtggaatttatgaattcatggattcatgtg

SEQ ID NO: 370877 - DNA, 563 bp, Homo sapiens
ctttctaattatgatttcatttatgtcttatctaagtttattatttgtttttgyaattcagttccaagcttgatgagggtaaggattttttctgccttgattgctgctgtatcctcagccctagaacatacgggtgctcagtagatatttgttagatgaattaaacaataagtgaatactgtttcttaatgcagcagtactttttttttttttaaatccagtgccttcaatctttagatgatggtatcaaatttagatataacgggtgtaagaactttggaaaatattttaaattagtcatgtgtattgttcctacttaagaacagattcaaaccaaaatgtttctttccctagtttcttatgtactgatgggaatgaatagatatgagagtagtaagtagctgctttagaatattacatggcaattcacagtttccctcatactttgcatgaaaatctgtcttgccttgtaattgatattgtgattttagccatctggcatgaaaaaaacagaaccaacatttagattaatcttggtttctagtgaagctgaacccagggaa

SEQ ID NO: 370878 - DNA, 584 bp, Homo sapiens
tgcagtatgacacatgagtgcttataaataatagctatttttgttattaataactatcactaagaataattctctgaatacccctaggtatatgttacagtacttttgtgccatggaagacaactaaattttgtgtcagcatacctgggttccagtcctgaaattggctccatgaatttgggtactctyctcaagccacaatttcttcatctataaaataggttcactaaacccattcctgttcaccacacgggaccattatggggctcacaaaggatagtgcatgtacaaaggtcttgtaaattgtaaagggctgtaagtaaaagtaaaggtgtattgttattaattcctggctcacctcccaaggagactctgggtaaataagataaggttgaagtaatattccaagtgattaaggccaaggtgagggctttggactgaaggccaagttcaagcctgactctctctcacggggccaggccattgtttagttcctgattggagagaagcctgagtatctcttcagtgcctcagtggggagagtgtaaatgagggaaaagttcaaaataagacatggcttgttt

SEQ ID NO: 370879 - DNA, 612 bp, Homo sapiens
tgctgtgaacctaaaactgctctaaaaaataaagcctattaataaaaagaaataaaaaamgatgtttagaaataaaaagtacccctatacctgttacccctgctctctggcttcctctgatggaaacagaaagcggcttggtctggtgaggggtttgagcctctgtagaaactaggagctgcagctgagatatttgcctcctcaacttctgccctctgcgcactgtggagtgagtgaggagagggtgctccttttcctgtgggcatgcagctctgtgagggttctccggcctttttgtctttttcttcagcaggatttccacatctgatgtttattttacaaccgtgtcttgtttttcaggttgccatgaacagaagcaaaatagtaggtataaaaaatgtctttagatctgcagaagaaagccaccctataaacccaaggcattattaccagcaataaaatgattcaggacattcatctcctatttgtccactttccaaaaagaaccttttctttcttttgctgacttctctacatctatttcctcccacctgctctagaaaagtaaatatctggtttcaattatttatgggacgtagagttatttttgtt

SEQ ID NO: 370880 - DNA, 601 bp, Homo sapiens
cattgctgagaagagggccactcctctcctaactgacaaagagaaatcccatgttagaacagtccaaaatgctccagtacagttaagaaattggtgaggctgaacttgacacccttagcttcacctcctcatgcattgctggaggccccatatcctggtattcctgtttccaaagacccagccctgctttccagcatctcattacctccacctggtggggcctgtcagtgtaccacaggtctaccttgatttcaagtccatctcctaataatgaagtaaaatgtttttcccctgcattgaagaaatttccagtgtcttggatgggggagcttaaggagcagatgctcattcttggggtatggaggtgataacttgtaggcagactgttcctaggaacacacgtaagcttggccctttcagccactggaaggtaagtccaaagattcaagagggaaaggtggctkgttgtgtctggcagaaggagggacacagtggaataattctgcaagtgtcacagggagccagtctctgagatggcagagataggttggccatcactttagtgggaaaaggagcatgtcttttcaaagcttcaaatggg

SEQ ID NO: 370881 - DNA, 606 bp, Homo sapiens
tacctttgccttttctgtctattcttattttcactttcttccaacaaaacacccactaaaattcagagcaggatgggtcttttctctttctctctctctctcttttttttcagtcttttagtgtgctctccctcgttggattataaatgcttatatacctgtctacatgtggtccatgcagtgacagaattttaggaaattaggaagtgtgggatctctggtctgaaggtggttttaagacatagtcgtacacatggcatcacccactgctgaccacagttgctaatcttggggaccacagcagcctgarttctgaacccttgccttttctgcactgtagctttcaggctcattggtgccaccccagcttcatagcacacaggatgagagagaacacttcacctgcaagactctggttgatgaagccatttttcctccaggtgttcccaggcatgtgtttaagtgtgttcctcatctgctcacacagagctcgaagcaggcatgctcctctcctcttctccttcagatacttcaccactttctgcttttctctcctcagctgtctgcagagaacagacttcttcaccctcaggaacctcactgcag

SEQ ID NO: 370882 - DNA, 591 bp, Homo sapiens
agcaggcatgctcctctcctcttctccttcagatacttcaccactttctgcttttctctcctcagctgtctgcagagaacagacttcttcaccctcaggaacctcactgcagccctacatctctgcggctggacgtccccattgatcacagaccaaggccaggatgtgctccatatgtctttccctttctgctgttttctaggcccraggagttgaccgtgtgagtcctggcttgtcaatggtgcagcgggggctgcagcgactctggctctgtggcttcactgtgcctgtgggtggccgacgaagccatcatcttgagtgcatggtgccaccaatgcgtgtggcaatcagacaggaaatgacatggctatattgaaggccagcctccggcactgtggcttcactgtgcctgcgggtggccgatgaggccatcgtctgagtgcacagtgtcaccagtggatgtggcaatcagacaggaaatgacatggctataccaagggccagccgtgtctatgctgccttcagacagttgggtcaacccttgccagggtccagactcagtctctgaaaaggtcccccttcctcaatgct

SEQ ID NO: 370883 - DNA, 591 bp, Homo sapiens
agcaggcatgctcctctcctcttctccttcagatacttcaccactttctgcttttctctcctcagctgtctgcagagaacagacttcttcaccctcaggaacctcactgcagccctacatctctgcggctggacgtccccattgatcacagaccaaggccaggatgtgctccatatgtctttccctttctgctgttttctaggcccgaggagttgaccgtgtgagtcctggcttgtcaatggtgcagcgggggctgcagcgactctggctctgtggcttcactgtgcctgtgggtggccgacgaagccatcatcttgagtgcatggtgccaccaatgcgtgtggcaatcagacaggaaatgacatggctatattgaaggccagcctccrgcactgtggcttcactgtgcctgcgggtggccgatgaggccatcgtctgagtgcacagtgtcaccagtggatgtggcaatcagacaggaaatgacatggctataccaagggccagccgtgtctatgctgccttcagacagttgggtcaacccttgccagggtccagactcagtctctgaaaaggtcccccttcctcaatgct

SEQ ID NO: 370884 - DNA, 449 bp, Homo sapiens
aagtatagtattttttagagtttattcaaccacctcatttttgttgtcattgtcaaatatattttatttcatgtgttataggccccaaaatacagatagatagatgaataattttatataattgtttctcaaatcagtcaggagaaagaaggagaagaaatatcacattttactatcttttaaattacycgtatagttacttctactggcacactgttttttcatgtggatttaaattactgtgtggtgcctttcagcctgaagaacttcctttagtatttcttatgaggttggtcttcaaccaatacattttctcagttgtgttttttttttttttaaatctgggaatctccttctctcttaatggatagtttttgctggatatgagattctggtttggtagttgtttatcttttctttcagcattttgagtacgttatcccacaaca

SEQ ID NO: 370885 - DNA, 449 bp, Homo sapiens
aagtatagtattttttagagtttattcaaccacctcatttttgttgtcattgtcaaatatattttatttcatgtgttataggccccaaaatacagatagatagatgaataattttatataattgtttctcaaatcagtcaggagaaagaaggagaagaaatatcacattttactatcttttaaattactcgtatagttacttctactggcacactgttttttcatgtggatttaaattactgtgtggtgcctttcagcctgaagaacttcctttagtatttcttrtgaggttggtcttcaaccaatacattttctcagttgtgttttttttttttttaaatctgggaatctccttctctcttaatggatagtttttgctggatatgagattctggtttggtagttgtttatcttttctttcagcattttgagtacgttatcccacaaca

SEQ ID NO: 370886 - DNA, 563 bp, Homo sapiens
actagacaagtgtaatttgtgttctggttgctatactattgatgtatttattgagaagcaatcagcctccgcggagatgtgccgtaggagcaacacctctccagaagagtctcccatgtgtgcccagaagcaggtggctgarggtgtgcctctctggagacccccaacttttctgagggagcacacggggacctgcttaaagcacaggagcagcgtgaacccagagtgctgtaagggccttcaccgctcctgcctggcacccaggagggttgaggaacagcaagtcccaattcctatagccttaaagcactcctgatcaaagcagcttatcctcaacttctatcaagaaataaattcagggacaagtgacattttagacaaaggtaatttgagacattaaatgcagtaggaatggtggtcgtccagctgagggggatcctttaaaacttattctggagacggggtgagaattaaaaccttcaggtgaagcaaatgtcacaaatggtgaagacaagcagaataagaggcacaggcaaggaacggaagcacatgacatgctgctg

SEQ ID NO: 370887 - DNA, 588 bp, Homo sapiens
gtgtgtatgttgtgtcgatcagtcaaaatcagctttcactatgaactgctctgaggctgacatggctgagagcccctgccctgccaatacttggtccaggggtggaagggggctgctgtgcctgagcatggaggaggctggcayctgctccccgcagtgtgggatcatgatggatccatcagagagtttactggggacaaaaaggcactgagcattgggacaaaaatctgtcattagattgatcctttattctgatatagtaatctttattttctgccaaaacatactaaactaaaacaaaatcatgtttgatgacagattgtagacacaaatagaagcccaccagatcaaacaaaaacagttgacaaacagtaaaatattcccccaaaagaactctttgtctaaacttttgattgtttggaggagaataaaacaggtcaggggtcaggcaaagttttacccatcatagtcttcagggatgttgtgctttttaaagaaaatggtagtggggggtggacttagaggaaacttgaaattgtataaaacccttattcaaataaggattgattgttccttgaaagtccaaca

SEQ ID NO: 370888 - DNA, 588 bp, Homo sapiens
gtgtgtatgttgtgtcgatcagtcaaaatcagctttcactatgaactgctctgaggctgacatggctgagagcccctgccctgccaatacttggtccaggggtggaagggggctgctgtgcctgagcatggaggaggctggcatctgctcccygcagtgtgggatcatgatggatccatcagagagtttactggggacaaaaaggcactgagcattgggacaaaaatctgtcattagattgatcctttattctgatatagtaatctttattttctgccaaaacatactaaactaaaacaaaatcatgtttgatgacagattgtagacacaaatagaagcccaccagatcaaacaaaaacagttgacaaacagtaaaatattcccccaaaagaactctttgtctaaacttttgattgtttggaggagaataaaacaggtcaggggtcaggcaaagttttacccatcatagtcttcagggatgttgtgctttttaaagaaaatggtagtggggggtggacttagaggaaacttgaaattgtataaaacccttattcaaataaggattgattgttccttgaaagtccaaca

SEQ ID NO: 370889 - DNA, 576 bp, Homo sapiens
tttgggagccagagcctgagaacctgcatttaacagcgccccattcacatcaagcagactgaagttgtgacccagccctattcagcctcctcctggtgggtctggtgcccacagttcycctccactctgcaccaggctgctgcacacatcccttcaatgcaccagccactctgctcagggcagctctcacctcacctggcccctctaagggatgccctgtaagcccacagtgctgagtcagtgggatcagtgggcatcgggagatagggacctgcctgcagaggacagaggtgccctggacagtgtggtgggggccacacaagagcagcccttgagggtagatacaccacccagttccacactcataactaaccactttcatctggtgagtcgggaacagtgggagcaaattgtgtcgctcagtgttcagcttcacccacagattaaccacaacattagggacccacagtccgtcatctgctacacatcagagggaatgagggatgtgagtcctgcccagcgatgtctcattctgacttcgtgggatttctggcctctgtcagaacaggaaacagg

SEQ ID NO: 370890 - DNA, 548 bp, Homo sapiens
cgaggcgggcggatcatgaggagatccagaccatcctggctaacacggtgaaaccccatctctactaaaaatacaaaaaaattagccaggcgtggtggcgggcacctgtagtcccagctacttgggaggctgaggcaggagaatggcatgaacctgggaagcggagattgcagtgagccgagatcgtgccactgcactccagcctgggccacacagcaagactccgtctcaaaaaaaaaaaaaaatttgaaaactccaagagaaaaacagatcacctttaacagaacataactaagaatgtcattagcctgcatgaggaaggcaataaagcaatgccttcaaaattctgtggaagaataatttggagtgtagaattctaatatccacagcagatattaaataagtatgattacggagtgaagacatttcaggcatgcaagaactcaaaatgtttacttcttattcagtctttcctcagaagttacttaaggttgcacttayctaaaatgaaatactagatcaaatccaccaaatagagcaatgtgtga

SEQ ID NO: 370891 - DNA, 564 bp, Homo sapiens
caccactcattttcacttttattcattcaacattgtttgaaccttcaccctgtaatgggctctttagtggcatcatggctactaatgtgaggaaggtatggagagccacctaacagggctctgctcttctctccgctgcatgttccacaggcgctcatggcaaaactcacccaaatctcttcakggtgaccacttgttcagccttatatcttccctcacaagcatagcccttttctgagacttgcatttgctttaaaattttgaatttccaaattcccaatatggtttacttcataattgagacataaagttcactgcagaagagaagatacccccacaagtcagaaaatgctctttaattgtttattaaaaatgaaagagtggaaattattgagcaaatccaaatagaacaaatctaaaaaatccataccaagacacattgtagtcaaatttctggaacctaaacaaagaaaaattcttgaaagcagtgtgagagaatgacaccttaacatatagaggaaaagtcacttaaatgaaagataatatctcatcagaaaccatgga

SEQ ID NO: 370892 - DNA, 564 bp, Homo sapiens
caccactcattttcacttttattcattcaacattgtttgaaccttcaccctgtaatgggctctttagtggcatcatggctactaatgtgaggaaggtatggagagccacctaacagggctctgctcttctctccgctgcatgttccacaggcgctcatggcaaaactcacccaaatctcttcagggtgaccacttgttcagccttatatcttccctcacaagcatagcccttttctgagacttgcatttgctttaaaattttgaatttccaaattcccaatatggtttacttcataattgagacataaagttcactgcagaagagaagatacccccacaagtcagaaaatgctctttaattgtttattaaaaatgaaagagtggaaattattgwgcaaatccaaatagaacaaatctaaaaaatccataccaagacacattgtagtcaaatttctggaacctaaacaaagaaaaattcttgaaagcagtgtgagagaatgacaccttaacatatagaggaaaagtcacttaaatgaaagataatatctcatcagaaaccatgga

SEQ ID NO: 370893 - DNA, 568 bp, Homo sapiens
tcttcaccactcattttcacttttattcattcaacattgtttgaaccttcaccctgtaatgggctctttagtggcatcatggctactaatgtgaggaaggtatggagagccacctaacagggctctgctcttctctccgctgcatgttccacaggcgctcatggcaaaactcacccaaatctcttcagggtgaccacttgttcagccttatatcttccctcacaagcatagcccttttctgagacttgcatttgctttaaaattttgaatttccaaattcccaatatggtttacttcataattgagacataaagttcactgcagaagagaagatacccccacaagtcagaaaatgctctttaattgtttattaaaaatgaaagagtggaaattattgagcaaatccaaatagaacaaatctaaaaaatccataccaagacacattgtagtcaaatttctggaacctaaacaaagaaaaattcttgaaagcagtgtgagagaatgacaccttaacmtatagaggaaaagtcacttaaatgaaagataatatctcatcagaaaccatgga

SEQ ID NO: 370894 - DNA, 549 bp, Homo sapiens
ttaacataaatcctgtccaagaaatgcgagccctgctgcagcctcaaggaataattcaaatcccaaagagccttgatgtctgacagctgtggcttgttctccacctcagcctttcaccagcctcccccaggaaggtcactccgagtccctgtggatccattgcacactgttccctatcgaaggtcttccaaactattacatctccattaggaaaactgaaaaatacatgttaaagaaaagatgaaaatctccaataatcctaacctcttaagaaaagtattgtatctatcacttatatgttatagatatatatsacttattctaaaaatgatttgtgatttcaaaagtaacgcatttttattggagatgattctctttttctcaacttttattttagatttagagagtacttgttcagggttgttacctgagtacattgtgtgatgctggagtacaaatgaactcatcacccggatactgagcatagtacccaataatttttcaaactttgcttcccctccctctccctctagtgtctattgttctcat

SEQ ID NO: 370895 - DNA, 561 bp, Homo sapiens
tttgggggaatttgacaagttgattytaaaattaatataaaatgcagagtcaatgatagcaaaggcgatcctactgctgtatacacatggataaatcccacaagtatgatgccaagggaaagaagccagctacaagaatccaccctgtatcatctcatttcataaacactgaaaaacaagtgagaccaatttattttaatgaaaatcaaaacagtggttatctttatggttgtaatatttgagggggtgctagggagttttctgtggtgttagaaatggctacatcttgatctgagggtgttcattttatacagactcaatttggctgaatactcatgatttgtgtatgtgggtatgcatgttgtactatgataaaatctgtgtagagttaagactttggtctctcttaatccaacaataccttggcttaaatttgttgagtatatttgatatctaacgattttgacaaagctgtatgggaaatgtacaacaggaaattttgtcttacaagtcataaataaatatagtttaagcctctgatttattaggtaggcaaattaa

SEQ ID NO: 370896 - DNA, 561 bp, Homo sapiens
tttgggggaatttgacaagttgattctaaaattaatataaaatgcagagtcaatgatagcaaaggcgatcctactgctgtatacacatggataaatcccacaagtatgatgccaagggaaagaagccagctacaagaatccaccctgtatcatctcatttcataaacactgaaaaacaagtgagaccaatttattttaatgaaaatcaaaacagtggttatctttatggttgtaatatttgagggggtgctagggagttttctgtggtgttagaaatggctacatcttgatctgagggtgttcattttatacagactcaatttggctgaatactcatgatttgtgtatgtgggtatgcatgttgtactatgataaaatctgtgtagagttaagactttggtctctcttaatccaacaataccttggcttaaatttgttgagtatatttgatatctaacgattttgacaaagctgtatgggaaatrtacaacaggaaattttgtcttacaagtcataaataaatatagtttaagcctctgatttattaggtaggcaaattaa

SEQ ID NO: 370897 - DNA, 582 bp, Homo sapiens
aaatgaaagaagaccaaactcagatgaaagaagaccatccctcaaaagcccactctgggggtaacatcagattcattaggagagagttttctttctcactggaacaatatatctgccttaaaacctggcatcttgttattttattttgttccttgagttcttccctagtagcaaatcctattgtttctgaaaagtttggggagcactggttgccatggatgaataagcttactctggaaattccccaaccaattctctatttcaatgggtctgtaaagagtagaaaatgtgtcccagtgtattctagttatggatttactaaaggtaacttcagggcatctttagcattctcagagtaatgatactgggttaatgctaaaaacygatgtaaatcagattttaattttcactgcatgaacatttcacaggctattgggtaagatctctattaagaaattaatgcagctttattactctcctcctgggcaattcctttaccttcaggcaacaagagacgcacctgagaaacataaatgctcacttcctgcaagcattggacaggtatgagctaagaaatggtga

SEQ ID NO: 370898 - DNA, 553 bp, Homo sapiens
ttgtttgcctcagggaaatactgtgcaaaatattctacaatcttgaaagtgccctgaaaatgagtactccctgtttcaagtcctcaaataccaatgactccagagaaggctgtgttctccaatttcacctaaaaagtaacagatctcctaatgttttaaagtttgtgggttaagcaggagcctgaaacattttttaaaaatcaactttattggctgggcgcggtggctcatgcctgtaatcccagcactttgggaggctgaggtgggctgatcatgaggtcaggagttcgagaccagcctggccaacatagtgaaaccccatctctactaaaaatacaaaaattagtcgggtgtggtggtgcacgcctgtagtcccagctactcgggaggctgaggcaggagaatcatttgaacctgggaggcagaggttgcagtgagctgagattgtgccactgcaccccagcctgggcgacagagcaagactcagtctcctaaaamcaaaaaaaaaaaaaaaaaaaagaaaatcagctttattgagggatgtagaattcac

SEQ ID NO: 370899 - DNA, 553 bp, Homo sapiens
ttgtttgcctcagggaaatactgtgcaaaatattctacaatcttgaaagtgccctgaaaatgagtactccctgtttcaagtcctcaaataccaatgactccagagaaggctgtgttctccaatttcacctaaaaagtaacagatctcctaatgttttaaagtttgtgggttaagcaggagcctgaaacattttttaaaaatcaactttattggctgggcgcggtggctcatgcctgtaatcccagcactttgggaggctgaggtgggctgatcatgaggtcaggagttcgagaccagcctggccaacatagtgaaaccccatctctactaaaaatacaaaaattagtcgggtgtggtggtgcacgcctgtagtcccagctactcgggaggctgaggcaggagaatcatttgaacctgggaggcagaggttgcagtgagctgagattgtgccactgcaccccagcctgggcgacagagcaagactcagtctcctaaaaccaaaaaaaaaaaaaaaaraaagaaaatcagctttattgagggatgtagaattcac

SEQ ID NO: 370900 - DNA, 498 bp, Homo sapiens
aactctttctagaagcccaggtgggctgagggatagcttgcctgcccctcycaccatgccccggctggctgatcagcaggagcaaaggaggtgtctagaaagatggacctgaggtagccaactggtcacttgaaggcacacctgttgagtacaggtgacccaggggtcccaaatgccctggacaggaggcgtgagctaatgaagaaaccactggatggtcagaggcttgaggttgggatgtggaggccatagagtgtgaggaggtcagtgagtggagaaagaaatgtcagaccttgggcttcagcatcaggggctggcaggaagtccaaaaggaaaaatgagccttgttttggctgacacagcaccaggagcttgaggaaaagaccaaacaccactcaatggaacctgttctgccccagagcccagacacagagcaatctccctgagggtgtgcagactcccactccacctgggcaggcaggagggaggtgaggaatg

SEQ ID NO: 370901 - DNA, 588 bp, Homo sapiens
caattcaactttgcacttgtcttacccaaagggctatttagctgaaaaagtgattcgaatcaaacggataagctccgctttaatcaataacagtgctgatacttactgagtgtgtgctgtgtgacagtccctgttcagagtcctcatgacaaccccatttatggtaggtgttactgtttacctccattttccagacaaggcaactgaggctctgagagaaccatggagtgataagcagagaagctggatgtgctcgccattccctgggctcttctggggacacttgcttctrtctctctatcacgagggtagaggagacaccaaacaaggtgagcttgattgggcacacccatgcgaggaaacacgcttctcacacatctgagtcatgtgagtcaatcctctacatggctttccaagcatagccatttcttccccaacacaggaaccaggagggatgccttgtagaaacagagctccacagatgcatcactcttttattttagctaataatagagaacacttgtaccgtcaaggtattgattgtagcttctaaaaagcacatagaacaacaggtgcaggttaaaatcc

SEQ ID NO: 370902 - DNA, 542 bp, Homo sapiens
ttaatcaataacagtgctgatacttactgagtgtgtgctgtgtgacagtccctgttcagagtcctcatgacaaccccatttatggtaggtgttactgtttacctccattttccagacaaggcaactgaggctctgagagaaccatggagtgataagcagagaagctggatgtgctcgccattccctgggctcttctggggacacttgcttctatctctctatcacgagggtagaggagacaccaaacaaggtgagcttgattgggcacacccatgcgaggaaacacgcttctcacacatctgagtcatgtgagtcaatcctctacatggctttccaagcatagccatttcttccccaacacaggaaccaggagggatgccttgtagaaacagagctccacagatgcatcactcttttattttagctaataatagagaacacttgtaccgtcaaggtattgattgtagcttctaaaaagcacatagaacaacaggtgcasgttaaaatccctgcctactttcctggtatgtgtgtaaaggatc

SEQ ID NO: 370903 - DNA, 563 bp, Homo sapiens
tcttttgtaactgtcccacagtttctggatattctgctccattttctgagtctcttctctttgcttttcagtttgtgaagtttctattgacatatcctgaagctcagagattctttcttcagccatgtctagactactaatgagaccatcaaaagcagtcttcatttctttatagtgtttttgatctctagtatttctttttaattctttcttagaattttcatctctctgtttacattacccatctattcttgcattttgcttactttttccattaaagctatcataatatatatcatagttcttttaaccctttttccatttgccccaagaatacttgctggtggcgcttgygactgcaatgtttaccctgagatgactttgccatgaaatattattattttcacattgctctagtatgtcaactttggaaataaaagacatcattccatttatagcattgtttttagtagtggcatttccatttacaaaatatagtaattctcaatcgctgaaaatgtcaaatcctagaaagcagcaatcctacttgtgatgttaacatc

SEQ ID NO: 370904 - DNA, 369 bp, Homo sapiens
attcttgcattttgcttactttttccattaaagctatcataatatatatcatagttcttttaaccctttttccatttgccccaagaatacttgctggtggcgcttgcgactgcaatgtttaccctgagatgactttgccatgaaatattattattttcacattgctctagtatgtcaactttggaaataaaagacatcattcmatttatagcattgtttttagtagtggcatttccatttacaaaatatagtaattctcaatcgctgaaaatgtcaaatcctagaaagcagcaatcctacttgtgatgttaacatcattctcaagtagttgttgcctgaagattcatttgatgaatctgatttttctga

SEQ ID NO: 370905 - DNA, 540 bp, Homo sapiens
gtgcttcttgtatttgcatgtctaggtctctagcaaggcctgggaagttttcctcaattattcccctgaatatctcttccaggcttttagaattctcttcttcctcaggaacactaactattcttagatttggtcatttaacataatcctagactccttggaggctttgttcttattttcttattctttttttkttgttgttgtctttgttggattgggttaatttgaagactttgtctttgagctctgaatttctttcttctacttgttcaattctattgctgagagtttccagagcattttgcatttctaaaagtgtgtccaaagtttcctgaattttttctggtgttttctttaagctatctatttccttgaatatttctcccttcacttcttgtatcattttttggatttccttgcattcggctttgcctttctctggtccctccttggttagcttagtaactaaactcctgaattattttacaggtaaatcagggatttcttctggatttggattcattgctggcaaattagtgt

SEQ ID NO: 370906 - DNA, 553 bp, Homo sapiens
ttattgacttgcatatgttaaaccattcctgcatccctggtttaaaacccacttgatcatggtggattatcttttttatatgttgttggatgatgttasctagtattttcttaagaatttttgcatctatgttcatcagggatattggtctgtagctttctttttggttatgtcctttcctagttttggtatttgggtgatactggcttcatagaatgacttagggaggatttcctctttctctatcttttggaatagtctcaataggactggtaccaattctcctttgaatttttgatagaattcaactgtgaattcctctagccctggactttttttgttggtaattttttaaattaccatttcaatcttgctgcttgttactggtttgttcagagtttctattcctggtttaatctaggagggttgtatatttccaggaatttattagtctcctctaggctttctggtttacacacataaaggtgttcatagtacccttgattgatcttttgtatctctgtagtattggctgtaatacctcctgttcctt

SEQ ID NO: 370907 - DNA, 553 bp, Homo sapiens
ttattgacttgcatatgttaaaccattcctgcatccctggtttaaaacccacttgatcatggtggattatcttttttatatgttgttggatgatgttagctagtattttcttaagaatttttgcatctatgttcatcagggatattggtctgtagctttctttttggttatgtcctttcctagttttggtatttgggtgatactggcttcatagaatgacttagggaggatttcctctttctctatcttttggaatagtctcaataggactggtaccaattctcctttgaatttttgatagaattcaactgtgaattcctctagccctggactttttttgttggtaattttttaaattaccatttcaatcttgctgcttgttactggtttgttcagagtttctattcctggtttaatctaggagggttgtatatttccaggaatttattagtctcctctaggctttctggtttacacacataaaggtgttcatagtacccttgaytgatcttttgtatctctgtagtattggctgtaatacctcctgttcctt

SEQ ID NO: 370908 - DNA, 552 bp, Homo sapiens
ggtcataatatattgcctttctatttgaataatataatatttagttgagggataattattccctaccattgaagcaagacagttctgtgtaacgtgcctaacattttttgaatgtgtattttcagtctggatgattaggaaaggcaccatccccagccctttgtgaacaccaaacactggtacctttacatttctagatagttcactcactggtcttgggtaatttcctcagctgaatggattgattaattaatactcagctgaatggatatcatcaaaaggtaaayacattaagcaaattgtgttacatgcatgaaatgaaatacaactcagcagtaaaaaaaaaggtgtaaactattgataggggctacaatgtggatacatttcaaaataattttgctgatagaaagaattcagatcaaaaccaatgtgtatactcatcttttatttttataaatttctacaaaatgctatttaacttatagtggcagaaaacagaccagtggctgtctatggatgtgggtgcatgggacatggtgagagggagtgatt

SEQ ID NO: 370909 - DNA, 578 bp, Homo sapiens
gttggcaaggatatctacaagttggaactctcaagtattactgggggaaatgtaaaatgattcagtcactgtgaataaatatttcatggtaagtcaaacataggcttaccagatgacccaggaattccacttagggacatacctaagagaattgaaaacaggtatgcagattactctctatatgaacattcagagcagcactattcacaatastcaaaagatagaaacaacccaaacatccatcagtggatgaatggattaataatggatatgaacagaattcatcttgtggcatatcacataatgtaaacatcgctacactttttctgaacaggtatgtttagtgataaacagaattttaatgagccttccatcttttcattgacctatccatccatccatccatccatccacccatccataattcagtcttttttcttcttctttctgtaagtctcttttttttctttgttttaacttatattttaagttcaggggtacaaatgcaggtttgttacatagacttgtgccatgaagttttgttgtacagattatttcattgcccagatattatacaa

SEQ ID NO: 370910 - DNA, 578 bp, Homo sapiens
gttggcaaggatatctacaagttggaactctcaagtattactgggggaaatgtaaaatgattcagtcactgtgaataaatatttcatggtaagtcaaacataggcttaccagatgacccaggaattccacttagggacatacctaagagaattgaaaacaggtatgcagattactctctatatgaacattcagagcagcactattcacaatactcaaaagatagaaacaacccaaacatccatcagtggatgaatggattaataatggatatgaacagaattcatcttgtggcatatcacataatgtaaacatcgctacactttttctgaacaggtatgtttagtgataaacagaattttaatgagccttccatcttttcattgacctatccatccatccatccatccatccacccatccataattcagtcttttttcttcttctttctgtaagtctcttttttttctttgttttaacttatattttaagttcaggggtacaaatgcaggtttgttacatagacttgkgccatgaagttttgttgtacagattatttcattgcccagatattatacaa

SEQ ID NO: 370911 - DNA, 484 bp, Homo sapiens
ttcacggtatttagggggggaaaaaagctgtctttgtaagatacaaatgtaaggtgaagcagcaagtactgatgtagaagctgcagcaagttatccagaaaatctagctaagattattgataaaggtggccacagatttccagtgtagatgaaactaccttaaattggaagaacatgccatctgggactttcatagctagagaaaagtcaatgcctggcttcaaatcttcaaaggacagtcaaaaaaaaaaaaagtgatggatggatcactctatcactttcttttgcatggatgaaaaaagaaagtgattccttttctttacttaaagccccaaaataatctcctttgactccatttcccacatccagggcactctggcacatgaggtgggccytcaaggccttgggcagctctgccccttgtgactttgcagtgtacatgaccatggctgctgtcatgggttggagttgagtacatgtagct

SEQ ID NO: 370912 - DNA, 631 bp, Homo sapiens
gatgagttgtttgttggagcagccagtcttaattacctttatctattcaaaaactagtgccaggrgtggagtgcttacacataaaaaacctgagctatatggtattttcttagttttggtggtaggcgtcaaagaaacaaaaacctaagcctggaaacacggaaatccatgttatgaactggtacatatttggtaaaacatgttaggaggcatgtcatatgcctaattaagctggcagcttgaggagaagtgaatcagaaagattcaaggtgtatctgggctccttttggaaaggtgttccaacaatgaggtgagcccaagaaaaaaccgggctgtttatagggagaaatataatgggactgggaaagtccaaacattctagtcactgcagggttggaagagccaactgctttcagatcacaaacaataagacgagacttgaaaataatttgttcaactacagctataaatctttctcagtgattaaagagaaagatcatagtgagggtatgccattcccacacaagcctgagagcctccagaaagttgagaagaagaggaataagggtgagtaaacattataatacagaaaggtttgagtctatattcaggaaaacacacacacacacac

SEQ ID NO: 370913 - DNA, 631 bp, Homo sapiens
gatgagttgtttgttggagcagccagtcttaattacctttatctattcaaaaactagtgccaggagtggagtgcttacacataaaaaacctgagctatatggtattttcttagttttggtggtaggcgtcaaagaaacaaaaacctaagcctggaaacacggaaatcyatgttatgaactggtacatatttggtaaaacatgttaggaggcatgtcatatgcctaattaagctggcagcttgaggagaagtgaatcagaaagattcaaggtgtatctgggctccttttggaaaggtgttccaacaatgaggtgagcccaagaaaaaaccgggctgtttatagggagaaatataatgggactgggaaagtccaaacattctagtcactgcagggttggaagagccaactgctttcagatcacaaacaataagacgagacttgaaaataatttgttcaactacagctataaatctttctcagtgattaaagagaaagatcatagtgagggtatgccattcccacacaagcctgagagcctccagaaagttgagaagaagaggaataagggtgagtaaacattataatacagaaaggtttgagtctatattcaggaaaacacacacacacacac

SEQ ID NO: 370914 - DNA, 599 bp, Homo sapiens
agatgagttgtttgttggagcagccagtcttaattacctttatctattcaaaaactagtgccaggagtggagtgcttacacataaaaaacctgagctatatggtattttcttagttttggtggtaggcgtcaaagaaacaaaaacctaagcctggaaacacggaaatccatgttatgaactggtacatatttggtaaaacatgttaggaggcatgtcatatgcctaattaagctggcagcttgaggagaagtgaatcagaaagattcaaggtgtatctgggctccttttggaaaggtgttccaacaatgaggtgagcccaagaaaaaaccgggctgtttatagggagaaatataatgggactgggaaagtccaaacattctagtcactgcagggttggaagagccaactgctttcagatcacaaacaataagacgagacttgaaaataatttgttcaacwacagctataaatctttctcagtgattaaagagaaagatcatagtgagggtatgccattcccacacaagcctgagagcctccagaaagttgagaagaagaggaataagggtgagtaaacattataatacagaaaggtttg

SEQ ID NO: 370915 - DNA, 228 bp, Homo sapiens
tgagtctatattcaggaaaacacacacacacacacacacacacacacacatgttatgggcatagtgactgaggtttgaacctgaatggaagctaatggaccagaaatcaattaggtttttggggaaatcatgttccaaagacaccattaacaggagsaacagcaacaaaaatgttgactatttgaggtccaaagacttctgtgggagattacattttccaaaatgatc

SEQ ID NO: 370916 - DNA, 592 bp, Homo sapiens
gcaattttgtatttttcatatatgcatatataacatttataacccatgttggtatctgtcagctaaggaccagtagggacacatctgtggctgacaaagttagatttcttaattgctataacaagagggctcacacacyatggggaaccacgtgtgacctggggtgaagagtggaccttattagcggtttagtgagtatgagggctggagtcagctgcaggatggtcttgcaggcattggtcagactctgtaaatgaggagatgctggaagagtcagtggccttatttttagagtacttgtttccaaataaagttttatcttggaacgcagtcagagaacatttaagagaagggccactggttaccaatcagttgatgacaatgaattcagctccagtttctcgaggaagacctttgagaacatgaacaccttaaatttctctggctttcccaatgtaaaatatggagtcatactggaagttctttacaaaatagaaccatatttaacatttctccttataccttgatgactgtacttctttacaacttgcctacttgggtatttttaaaacagtgattagatgtactagcc

SEQ ID NO: 370917 - DNA, 570 bp, Homo sapiens
tgaatagtataatagatgaatttttaaatgcaataaagggcatcaatagcagaattgctcaaaacagaagagacagacagtgagtttgaagacaagctattcaaaaatacactatcaagggaggaaaaaagaaggagaaagaacaaaaagaactgatgagacctatgagatttcatcaatagagaaaatttacatagcaacggcattaaaaagggactagagaataaaaaatgagtaaaaagcttattcaaagaaataacaaaaactttccaaactatgagaaaggyacaaatattcagagacagaaagatcaaaaatcatcaatcagattcaacccaaataagacacctccaaatcatattataatcaaatttcaaaggtcaaagacaaagagataagactgaaagcagcaagagaaaagaattaaataacacataagagaattccagtacatctggcaacagacaccctacagaccaggagagagtgggataatatattcaaagtgctgaaggaaaaagaagctgccaacaaaatatactttatcagcaaagcaatcattcagaaatg

SEQ ID NO: 370918 - DNA, 442 bp, Homo sapiens
agtcaatctaagaagaaaggaaatgctgggcacaatagctcacactgtaatcccagtactttgggaggctttggcgggccgattgcttgagcccaggagtttaaggccagcctgggcaacatggtgaaaccccatctctacaaaaaataaaaaaattagccaggcagggtggtgcatgcctgtgctcccagctacttgggaggttgaagtaggaggatcacctgagcccaggaggtcgaatctgcagtgagctatgatcacmcaccactgcactccagcctaggtgacagaatgagaccctgtatcaaaataaaaacataataaataaataaaacagagacagagaaagaagattcaaataaatgaaacagagacaaaagagtcattacaacagaaatatgctatgcactattatatgccaacaaattgcaaaacccacaag

SEQ ID NO: 370919 - DNA, 590 bp, Homo sapiens
ctccctcccctggagatcagaggatggggttgcaacttctaactctctaaacatgagttactctttctggcagccagcacccatcctaaggcaatctagtggcccccatccagcagtcatctaattagcatataaaagagactcttaccactctggacattcaaagagttttaagagttgtatgccagaaaccaaagacaaaaagcaaatacaaatttatcawgggacatattcatgaatttcaaaaatataatattctactatctctttgccaaaaacaccttgtatagtacaactgaaatctgcaaacatacttcttcaccttgtactcttgattgcattatgtaatctattataacttttccatggtctatgtgatacttactaaaattttttttccaatggaagtacacaatctccagaatttcataccaaacataaaactatagaaattttacataaaattttataatttctataaaaaactatagaaattattttaatgacttcaaacatcaagctaagatttttaggttgaatatgttaaaaccttttcatgacttttttttctaaaatcaactgaaagcaag

SEQ ID NO: 370920 - DNA, 590 bp, Homo sapiens
ctccctcccctggagatcagaggatggggttgcaacttctaactctctaaacatgagttactctttctggcagccagcacccatcctaaggcaatctagtggcccccatccagcagtcatctaattagcatataaaagagactcttaccactctggacattcaaagagttttaagagttgtatgccagaaaccaaagacaaaaagcaaatacaaatttatcaagggacatattcatgaatttcaaaaatataatattctactatctctttgccaaaaacaccttgtatrgtacaactgaaatctgcaaacatacttcttcaccttgtactcttgattgcattatgtaatctattataacttttccatggtctatgtgatacttactaaaattttttttccaatggaagtacacaatctccagaatttcataccaaacataaaactatagaaattttacataaaattttataatttctataaaaaactatagaaattattttaatgacttcaaacatcaagctaagatttttaggttgaatatgttaaaaccttttcatgacttttttttctaaaatcaactgaaagcaag

SEQ ID NO: 370921 - DNA, 568 bp, Homo sapiens
gtcataccacgaaccaagatctcaaactgaattttaaaaaggaattcaaaaatgtcattaccaaggtgacagatttgttagaattacctgacaaagatttaaagttgccatgataaaaatgcttcaacaattaccaaaaaaagcttgaaacaaatgaagcaaaagaaaacttcagcaaaaaaaatcaaatctcagcaaaaaacataatatattaaaaaatggaaatttcagaactaaaaaatatcacctcaataaaatgctcagtagatgagatcaacagaaaratggaagcaaagggggaaaaatataagtgaattgaaaaataaaacaaaatacattacacaatctaaacatagagatacaataaactagaaacatgaaatgaacagaacctcagggactttagggaatataacaaaaaacctgactcagttaccaccagggtctgagaaggagagagaaaagcgggtaggactataagtatactaaaataaaactggctggaaactttccaaatttgacacaaaaaccccataaaactacagattcaagaatctgaaaacttcat

SEQ ID NO: 370922 - DNA, 550 bp, Homo sapiens
aattttaataaaagatattttaaaactcactttaaataaaattatataggtagattaaaaggaatggaaaattatataccatgcaaatattttagtcaaatgagagtatgaatgacaatactaatatctaaaatcaacttcaaagaaaaaaaagcagggacaaagggacaccatataatgatacaggagttaattctccaggaagacacagcaatcctaaatgcatatgcacaaaatraaataaatgaaatatatgtgaattagtatagccattatggaaaatagtgtggaggttactcaaaaaataatagaactaccatactatccaacagtcccatgcctaagtatatatcccaagaaaatactaattattgtgtcaaacagatatctgcactcccatgctcattacagcattctttacaatagccaagacacagaattaaactaaatatccatcaatgaatggatgaaaaaacacggtataaatatacaatggaacactagcctttaaaaagaaggaaatcttgttattttccacaacattgatgaa

SEQ ID NO: 370923 - DNA, 644 bp, Homo sapiens
atagtgagtggaattgtatttaccagagcctggaaagggtaagaaaaaaaagagatgaaaagaggttggtcaatgggtataaaaatacacttaggtagaagaaataagttccaattttcaatagcacaataaggtgatcattacacattgtatgcatgtatcaaaataccrtatgtacccccataaatatgtacaactgttatgtatcaataaaacaaatcaaaaaagaacatcattgagacagctgataaaatttcgatatgtattagataggagtttgggtctgacatgtaaagagcctggatatcattactcccatcctcacaacaagaaaaaagctgaaaaaataaaaaatttacaactcttcttagacccatcaaagaattaaggccttagggcaagccatcatactgaaaattgagacagatgaatacacaatatcacagcttgtgttccatcacctccccagtggccctgaccttgttagtaagtcctcttatttctccaaacctcctgccttggttgaggtttaggctttcatcgggtgttctttgttgccaactgtcaacaaaggaattttttccttttcagtgagtactcatggggacttctaagggtataggtgccaagtcactcctttctgg

SEQ ID NO: 370924 - DNA, 607 bp, Homo sapiens
aggggataatcattccacgtactaacccatttaataccccgatcctagtgttataaaamtctaataactggggagcgacatttgcccaagactaaagagccatcgtggcattgttataccccatcatcatgttgtaccaaacccacatacattagccaaatcactagataggttttcactgtgattgacatctgcagtgttttctttagcattctagttgatccggatagccaatctttttgctttcatgtgagatggacaatacacctttacagtaatgttccagtggtatactgaaagatttaggtacttctcccaagtcttcaaagcaaacttagcaaacttggaatttcctttgcattctgttctcacctagtgtgtggataacttattactttgcacctctatcctaaaggctccatagaggacagcctttacctactaaagaaattagccaccaaaagccataaagtttcagaagggaagctataactctcttccacacatgtaaaatatttaggatgtctaatttcaagacaggattttttgcttgattccccaaagaataaaaacaatcttggattttcttggccccaccaaaaaagaa

SEQ ID NO: 370925 - DNA, 607 bp, Homo sapiens
aggggataatcattccacgtactaacccatttaataccccgatcctagtgttataaaactctaataactggggagcgacatttgcccaagactaaagagccatcgtggcattgttataccccatcatcatgttgtaccaaacccacatacattagccaaatcactagataggttttcactgtgattgacatctgcagtgttttctttagcattctagttgatccggatagccaatcttttygctttcatgtgagatggacaatacacctttacagtaatgttccagtggtatactgaaagatttaggtacttctcccaagtcttcaaagcaaacttagcaaacttggaatttcctttgcattctgttctcacctagtgtgtggataacttattactttgcacctctatcctaaaggctccatagaggacagcctttacctactaaagaaattagccaccaaaagccataaagtttcagaagggaagctataactctcttccacacatgtaaaatatttaggatgtctaatttcaagacaggattttttgcttgattccccaaagaataaaaacaatcttggattttcttggccccaccaaaaaagaa

SEQ ID NO: 370926 - DNA, 607 bp, Homo sapiens
aggggataatcattccacgtactaacccatttaataccccgatcctagtgttataaaactctaataactggggagcgacatttgcccaagactaaagagccatcgtggcattgttataccccatcatcatgttgtaccaaacccacatacattagccaaatcactagataggttttcactgtgattgacatctgcagtgttttctttagcattctagttgatccggatagccaatctttttgctttcatgtgagatggacaatacacctttacagtaatgttccagtggtatactgaaagatttaggtacttctcccaagtcttcaaagcaaacttagcaaacttggaatttcctttgcattctgttctcacctagtgtgtggataacttattactttgcwcctctatcctaaaggctccatagaggacagcctttacctactaaagaaattagccaccaaaagccataaagtttcagaagggaagctataactctcttccacacatgtaaaatatttaggatgtctaatttcaagacaggattttttgcttgattccccaaagaataaaaacaatcttggattttcttggccccaccaaaaaagaa

SEQ ID NO: 370927 - DNA, 623 bp, Homo sapiens
tccggatagccaatctttttgctttcatgtgagatggacaatacacctttacagtaatgttccagtggtatactgaaagatttaggtacttctcccaagtcttcaaagcaaacttagcaaacttggaatttcctttgcattctgttctcacctagtgtgtggataacttattactttgcacctctatcctaaaggctccatagaggacagcctttacctactaaagaaattagccaccaaaagccataaagtttcagaagggaagctatwactctcttccacacatgtaaaatatttaggatgtctaatttcaagacaggattttttgcttgattccccaaagaataaaaacaatcttggattttcttggccccaccaaaaaagaaagacaactctgtgggatcctgggattagtaggatactacagacaatggattccaagtctctctgccatggctcaggctctgtattcttttttaaagtctgacccatcccaaacctctacaatggctagaggatgccatctcctcttttgataacaataaagagagtcttcgttagccccctatattaagacatcctaattataaccttctcttttccctttttgttcgtgaacaaaa

SEQ ID NO: 370928 - DNA, 623 bp, Homo sapiens
tccggatagccaatctttttgctttcatgtgagatggacaatacacctttacagtaatgttccagtggtatactgaaagatttaggtacttctcccaagtcttcaaagcaaacttagcaaacttggaatttcctttgcattctgttctcacctagtgtgtggataacttattactttgcacctctatcctaaaggctccatagaggacagcctttacctactaaagaaattagccaccaaaagccataaagtttcagaagggaagctataactctcttccacacatgtaaaatatttaggatgtctaatttcaagacaggattttttgcttgattccccaaagaataaaaacaatcttggattttcttggccccaccaaaaaagaaagacaactctgtgggatcctgggattagyaggatactacagacaatggattccaagtctctctgccatggctcaggctctgtattcttttttaaagtctgacccatcccaaacctctacaatggctagaggatgccatctcctcttttgataacaataaagagagtcttcgttagccccctatattaagacatcctaattataaccttctcttttccctttttgttcgtgaacaaaa

SEQ ID NO: 370929 - DNA, 623 bp, Homo sapiens
tccggatagccaatctttttgctttcatgtgagatggacaatacacctttacagtaatgttccagtggtatactgaaagatttaggtacttctcccaagtcttcaaagcaaacttagcaaacttggaatttcctttgcattctgttctcacctagtgtgtggataacttattactttgcacctctatcctaaaggctccatagaggacagcctttacctactaaagaaattagccaccaaaagccataaagtttcagaagggaagctataactctcttccacacatgtaaaatatttaggatgtctaatttcaagacaggattttttgcttgattccccaaagaataaaaacaatcttggattttcttggccccaccaaaaaagaaagacaactctgtgggatcctgggattagtaggatactacagacaatggattccaagtctctctgccatggctcaggctctgtattcttttttaaagtctgacccatcccaaacytctacaatggctagaggatgccatctcctcttttgataacaataaagagagtcttcgttagccccctatattaagacatcctaattataaccttctcttttccctttttgttcgtgaacaaaa

SEQ ID NO: 370930 - DNA, 623 bp, Homo sapiens
tccggatagccaatctttttgctttcatgtgagatggacaatacacctttacagtaatgttccagtggtatactgaaagatttaggtacttctcccaagtcttcaaagcaaacttagcaaacttggaatttcctttgcattctgttctcacctagtgtgtggataacttattactttgcacctctatcctaaaggctccatagaggacagcctttacctactaaagaaattagccaccaaaagccataaagtttcagaagggaagctataactctcttccacacatgtaaaatatttaggatgtctaatttcaagacaggattttttgcttgattccccaaagaataaaaacaatcttggattttcttggccccaccaaaaaagaaagacaactctgtgggatcctgggattagtaggatactacagacaatggattccaagtctctctgccatggctcaggctctgtattcttttttaaagtctgacccatcccaaacctctacaatggctagaggatgccatctcctcttttgataacaataaagagagtcttckttagccccctatattaagacatcctaattataaccttctcttttccctttttgttcgtgaacaaaa

SEQ ID NO: 370931 - DNA, 488 bp, Homo sapiens
atgtaagctttgacctattctacaacatttcctactactactgtgtctactactcacagttccctgggttagtggaacatactaatggaacaattaagatccaatggcaaaatgaatttaatatctcaatcaaccctggccaaaagctctgcccttagtgctgcttaatcttagatctamccctgtcgaaaacatagcttatttccacttaagataattactgaaagacccatggacttagacaaaatactttatgaatcaaagctaatcaaaggtgacacactgacctattgtaaggaatggatccaggtattaacaacaaaaaaaaaggtagagtaatctttctgcagtacacttccaggaaataaaggtcaacatcaatgcaatctacaacctggagattttggatattgaaaatgacatatcatccaggagaacttccccagtctatcaagacaggccaacattcatattcaagaaatgtagag

SEQ ID NO: 370932 - DNA, 651 bp, Homo sapiens
tgtaaccataatattgtgatactttgcctccatagtttttgttattgttaattaatcgagaccatagtctgacttccaatatcacaatgaggaaagtaatataatcaggtagtttgtcatgagaaatgctcatgctattaacaaatccctctaaacccactgccatcaaaactcacccaaacaaacatacgcmaacaaacccagacaaatataccactcacgcacaaataagttagcaaaaaaaaagaagcatataccttagggttgaacatagatcagcatcaagcagtcatgtgcaaacttttcaatgaactagctgaaagattcacttgacttcatattacatatttgaatgaatgtggtcaggtactttcttcttggagttggccatgattattaaaagatggactcatagaggaggaggaaaatctttccaatatatatgatttatgagtaaaccttgactagtgtcattagcaactctttcattcaggtctccagaaataatcaatcaaaatatcaggcacagagacgatacaaagtagagaaggccatcacactgaagtcaaatatctagaatctatgcactatgtaattgcttctcaaaccatcttgtggtgaataaccagttttgtttttttatttccaatt

SEQ ID NO: 370933 - DNA, 651 bp, Homo sapiens
tgtaaccataatattgtgatactttgcctccatagtttttgttattgttaattaatcgagaccatagtctgacttccaatatcacaatgaggaaagtaatataatcaggtagtttgtcatgagaaatgctcatgctattaacaaatccctctaaacccactgccatcaaaactcacccaaacaaacatacgccaacaaacccagacaaatataccactcacgcacaaataagttagcaaaaaaaaagaagcatataccttagggttgaacatagatcagcatcaagcagtcatgtgcaaacttttcaatgaactagctgaaagattcacttgacttcatattacatatttgaatgaatgtggtcaggtactttcttcttggagttggccatgattattaaaagatggactcatagaggaggargaaaatctttccaatatatatgatttatgagtaaaccttgactagtgtcattagcaactctttcattcaggtctccagaaataatcaatcaaaatatcaggcacagagacgatacaaagtagagaaggccatcacactgaagtcaaatatctagaatctatgcactatgtaattgcttctcaaaccatcttgtggtgaataaccagttttgtttttttatttccaatt

SEQ ID NO: 370934 - DNA, 651 bp, Homo sapiens
tgtaaccataatattgtgatactttgcctccatagtttttgttattgttaattaatcgagaccatagtctgacttccaatatcacaatgaggaaagtaatataatcaggtagtttgtcatgagaaatgctcatgctattaacaaatccctctaaacccactgccatcaaaactcacccaaacaaacatacgccaacaaacccagacaaatataccactcacgcacaaataagttagcaaaaaaaaagaagcatataccttagggttgaacatagatcagcatcaagcagtcatgtgcaaacttttcaatgaactagctgaaagattcacttgacttcatattacatatttgaatgaatgtggtcaggtactttcttcttggagttggccatgattattaaaagatggactcatagaggaggaggaaaatctttccaatatatatgatttatgagtaaaccttgactagtgtcattagcaactctttcattcaggtctccagaaataatcaatcaaaatatcaggcacagagamgatacaaagtagagaaggccatcacactgaagtcaaatatctagaatctatgcactatgtaattgcttctcaaaccatcttgtggtgaataaccagttttgtttttttatttccaatt

SEQ ID NO: 370935 - DNA, 598 bp, Homo sapiens
ccagtactatggatggtgtgtttttgtgtaggtcttatgtccccagttagattatagactcttttatggcaaagcttacatcatataaatttgaatctccagttcttaacacattccttacaatcagtatgggttgaaaaggatttgatgacaatgactttgtcagatttttttttttttttttaatgattggatagatgccatcctggagtttaacttgataatatctctaactgtgtatttgttgaataggtagtatcaaaaaattttgtaagctcccttaagcacctgagtagtmaatatttacattttagacaactgatgtgcttgtgggaaatcatatctcttcaataaaaccaggaatttcattaggcaatcttctattagtttagttctagtcacgttattacttgcaaataacagagcaggcatttctttagatacagcctgccaatattaaatatgttactaattcagaatggtttctctcaggccatattaatgagttttgttgaaaaatcaaaatgtatatgatactcatagaactgctgctacaagcacatttaatttatttttatccatttggaggtcattacca

SEQ ID NO: 370936 - DNA, 598 bp, Homo sapiens
ccagtactatggatggtgtgtttttgtgtaggtcttatgtccccagttagattatagactcttttatggcaaagcttacatcatataaatttgaatctccagttcttaacacattccttacaatcagtatgggttgaaaaggatttgatgacaatgactttgtcagatttttttttttttttttaatgattggatagatgccatcctggagtttaacttgataatatctctaactgtgtatttgttgaataggtagtatcaaaaaattttgtaagctcccttaagcacctgagtagtcaatatttacattttagacaactgatgtgcttgtgggaaatcatatctcttcaataaarccaggaatttcattaggcaatcttctattagtttagttctagtcacgttattacttgcaaataacagagcaggcatttctttagatacagcctgccaatattaaatatgttactaattcagaatggtttctctcaggccatattaatgagttttgttgaaaaatcaaaatgtatatgatactcatagaactgctgctacaagcacatttaatttatttttatccatttggaggtcattacca

SEQ ID NO: 370937 - DNA, 551 bp, Homo sapiens
tccatagctataatgaatgaaacgaggcaaatacattgtgacttgtcttattcaatgaaatatttatgccctttggaagtctcaattacaatgctgctttccgccccacccctttactgtttcagaaaataaaaaagaaagraagaaaaaatgcagaatagggttattagaagattttatagcgtagaaaaagaagccaaaggcccttctgaaggcacttgtatgtctgatgatgatatttcctgcctcaaagggatcctgttgcctttacaggcagagctggctgtggcagatgcccctctgttagcaaaggctgtcttcaatgaaggaagaaatttagaggggatgatttcccagttacagtgctgccaacagagagtttataacaaaagggtagtgctgtcatgcatggttggggacatgacaatggcaattgttcttatgatgattataaactattcttgctggatctgaatggcctagccgactgggggaagtttttcagacttggactctgtccacttccctgctgtgtgggaatgcagttgttc

SEQ ID NO: 370938 - DNA, 593 bp, Homo sapiens
ttgaggatagtttagcatttggaacacttcaaaagtgtgacasgggctattctttttacctcccgcctcaaatgcttatccaacattcttgggtaagctttcatatgtaaagtgaaaatgagaactggctctcttatgaaatgtcctgttatttgttatctttcattaagctgggacctgagagtacagaaaagggaaaaacgtaatgatgaagttaggctgatcttttatggagttgaagctcttgttaaacttctgacacttacttttgacagttatccataacagtggtgactgtttaaaactatttcaaatggtagtattgcttttccctattgaattactttgctgattatttccctctggtttggaattttttgaatgaatgaatgaataaatgataaaaaaagaatgaatggaaatgtacatgaatacaatgcccttgccattgccttaatgctaggagcttgcaataccacattaaatagcaaaggagggagaagaatgcttgtttctatttggtgacctttggaagctcgctggtgtataatatgttttcatcacattgaaaacttctgacaatagaaacgtga

SEQ ID NO: 370939 - DNA, 593 bp, Homo sapiens
ttgaggatagtttagcatttggaacacttcaaaagtgtgacaggrgctattctttttacctcccgcctcaaatgcttatccaacattcttgggtaagctttcatatgtaaagtgaaaatgagaactggctctcttatgaaatgtcctgttatttgttatctttcattaagctgggacctgagagtacagaaaagggaaaaacgtaatgatgaagttaggctgatcttttatggagttgaagctcttgttaaacttctgacacttacttttgacagttatccataacagtggtgactgtttaaaactatttcaaatggtagtattgcttttccctattgaattactttgctgattatttccctctggtttggaattttttgaatgaatgaatgaataaatgataaaaaaagaatgaatggaaatgtacatgaatacaatgcccttgccattgccttaatgctaggagcttgcaataccacattaaatagcaaaggagggagaagaatgcttgtttctatttggtgacctttggaagctcgctggtgtataatatgttttcatcacattgaaaacttctgacaatagaaacgtga

SEQ ID NO: 370940 - DNA, 593 bp, Homo sapiens
ttgaggatagtttagcatttggaacacttcaaaagtgtgacaggggctattctttttacctcccgcctcaaatgcttatccaacattcttgggtaagctttcatatgtaaagtgaaaatgagaactggctctcttatgaaatgtcctgttatttgttatctttcattaagctgggacctgagagtacagaaaagggaaaaacgtaatgwtgaagttaggctgatcttttatggagttgaagctcttgttaaacttctgacacttacttttgacagttatccataacagtggtgactgtttaaaactatttcaaatggtagtattgcttttccctattgaattactttgctgattatttccctctggtttggaattttttgaatgaatgaatgaataaatgataaaaaaagaatgaatggaaatgtacatgaatacaatgcccttgccattgccttaatgctaggagcttgcaataccacattaaatagcaaaggagggagaagaatgcttgtttctatttggtgacctttggaagctcgctggtgtataatatgttttcatcacattgaaaacttctgacaatagaaacgtga

SEQ ID NO: 370941 - DNA, 593 bp, Homo sapiens
ttgaggatagtttagcatttggaacacttcaaaagtgtgacaggggctattctttttacctcccgcctcaaatgcttatccaacattcttgggtaagctttcatatgtaaagtgaaaatgagaactggctctcttatgaaatgtcctgttatttgttatctttcattaagctgggacctgagagtacagaaaagggaaaaacgtaatgatgaagttaggctgatcttttatggagttgaagctcttgttaaacttctgacacttacttytgacagttatccataacagtggtgactgtttaaaactatttcaaatggtagtattgcttttccctattgaattactttgctgattatttccctctggtttggaattttttgaatgaatgaatgaataaatgataaaaaaagaatgaatggaaatgtacatgaatacaatgcccttgccattgccttaatgctaggagcttgcaataccacattaaatagcaaaggagggagaagaatgcttgtttctatttggtgacctttggaagctcgctggtgtataatatgttttcatcacattgaaaacttctgacaatagaaacgtga

SEQ ID NO: 370942 - DNA, 541 bp, Homo sapiens
aactctaaaatgggatgaaaatgacttttgcttataaatattgatgtaactggcttatcagcctatcaatatctttgtaagtgtcaaatggaagattgatatcttttactggggaaatgatcaatggtatcacatatctagattgtttatcagatttccttctctgagkcttcattttttcatctataaagtggggataataatagtaaaacctaaagaagattctgggaagatggcagaataggaagtacaagaaatctgtttcctcactcagacagcaattacactgagagaatctgtgtgatgtaactattttggaactagagttttttgaaggcttgcaacatccagtagaagagttggacagtaaattgtggttaactttaggaaactttatctcttagctcatcagtagctacctttacccatctcccacccgcctgttgcttacctatgcctatgttcctggagcaacttccaggaagccagggtggctaataaggaccctgtctttcaaatattggggatctgcaagctaatt

SEQ ID NO: 370943 - DNA, 561 bp, Homo sapiens
aattatattccattcaaataaaaaaaagacctattggaaactatttgtgagaaggacccgatggcaaatakaccaggaaattactttaaaataactgtcctaaagatgctcaaagaaagaaagaaagacatggagaaagttaataaaatgataagtgaacaaagtgaaaatattaataaagaagaaacttaaaaagaaatgaaaaactctggagcagaaaagtacaataagaaacgaaaattcactatagagtttcaaaggcagatttgatcagatagaataaagaatcagcaaatgtgaagataggacaatggaagttatctagtctgagaaacagaaaaaagattgaaaaaaactggacaaaccttaaagaacattgtacaacatcaagcagcccaacatataaattagggaagtcccagaaagatgagaaagagagaaccagaaaaaaaatttgaagaaataatgacagaaattacccaaatttgatgaaagacataaatataaacatctaagaagctcaataaactaccagtagaatgaactcaaacagacccatgc

SEQ ID NO: 370944 - DNA, 605 bp, Homo sapiens
aatttctaatccttggctaatttgttagtcctgcaaaagcartctagtccccaggtaggaaggggtttgttttgggaaagggctgttaattgtctttgtttcaaagctaacttataaactaagtttctcccaaagttagttcagcctacccacaggaatgaacaaagatagcttagaggttagaagcaataaggagttggtttggtctccaaattgatctctttcaccatctcagttataattttgtaatggcagtttcatgatcctgaccatccgaccaaacctttggttacaatccatgaaagagtatggaatctcatgtctggccactttttcttccaaaaaaagtgcacaaactggtacgttgccttaagttctgcctactgaaaagattcacttcaccactgtccttcagggatgtcccagaaaggggctgcagtgctgcagctgtcctctttgggatgatgtctttatctcatacagaaccatctgcaaaccagggacctagtcttctcttcttctgtcagctaatcataaatactccccatgaggccataggtccatcctgagagacagaaggtagtgtagcaggaggagaaaccatg

SEQ ID NO: 370945 - DNA, 605 bp, Homo sapiens
aatttctaatccttggctaatttgttagtcctgcaaaagcagtctagtccccaggtaggaaggggtttgttttgggaaagggctgttaattgtctttgtttcawagctaacttataaactaagtttctcccaaagttagttcagcctacccacaggaatgaacaaagatagcttagaggttagaagcaataaggagttggtttggtctccaaattgatctctttcaccatctcagttataattttgtaatggcagtttcatgatcctgaccatccgaccaaacctttggttacaatccatgaaagagtatggaatctcatgtctggccactttttcttccaaaaaaagtgcacaaactggtacgttgccttaagttctgcctactgaaaagattcacttcaccactgtccttcagggatgtcccagaaaggggctgcagtgctgcagctgtcctctttgggatgatgtctttatctcatacagaaccatctgcaaaccagggacctagtcttctcttcttctgtcagctaatcataaatactccccatgaggccataggtccatcctgagagacagaaggtagtgtagcaggaggagaaaccatg

SEQ ID NO: 370946 - DNA, 530 bp, Homo sapiens
ttcctggtggctttgtttacactgtgaggggaaaatcgcctcctcaagcctcagtaatggcagacgcccctctccccaccaagctcgagcgtcccagtttgacttcagactgctgtgctggcagtgagaatttcaagccagtggctcttagcttgctgggctctgtggggctgggatctgctgagttagaccccttggctccctggcttcagccccttttctagtggttctgtcttgctggtattccaggcactactgggttatgaargaaaactcctgcagctagctcagtgtctgcccaaacagccacccagttttgtggttgaaacccagagccctggttgtatgggcacccgagggattctcctggtctgtgggttgtgaagaccgtgggaaaagtgtaatgtctgggccggtgtgcagcgttcctcacagcacactccctcatggcttcccttggccaagggagggatttccctgatcccttgcgcttcccgggtgaggcaatgccccaccctgcttctgcttgc

SEQ ID NO: 370947 - DNA, 530 bp, Homo sapiens
ttcctggtggctttgtttacactgtgaggggaaaatcgcctcctcaagcctcagtaatggcagacgcccctctccccaccaagctcgagcgtcccagtttgacttcagactgctgtgctggcagtgagaatttcaagccagtggctcttagcttgctgggctctgtggggctgggatctgctgagttagaccccttggctccctggcttcagccccttttctagtggttctgtcttgctggtattccaggcactactgggttatgaaggaaaactcctgcagctagctcagtgtctgcccaaacagccacccagttttgtggttgaaacccagagccctggttgtatgggcacccgagggattctcctggtctgtgggttgtgaagaccrtgggaaaagtgtaatgtctgggccggtgtgcagcgttcctcacagcacactccctcatggcttcccttggccaagggagggatttccctgatcccttgcgcttcccgggtgaggcaatgccccaccctgcttctgcttgc

SEQ ID NO: 370948 - DNA, 495 bp, Homo sapiens
tttcaagccagtggctcttagcttgctgggctctgtggggctgggatctgctgagttagaccccttggctccctggcttcagccccttttctagtggttctgtcttgctggtattccaggcactactgggttatgaaggaaaactcctgcagctagctcagtgtctgcccaaacagccacccagttttgtggttgaaacccagagccctggttgtatgggcacccgagggattctcctggtctgtgggttgtgaagaccgtgggaaaagtgtaatgtctgggccggtgtgcagcgttcctcacagcacactccctcatggcttcccttggccaagggagggatttccctgatcccttgcgcttccygggtgaggcaatgccccaccctgcttctgcttgccctctgtgggctgcatccactctctaaccagtcccattaaggtgagccaggtacctcagttgtaaatgtagaaatcacccgccttctgctttgat

SEQ ID NO: 370949 - DNA, 583 bp, Homo sapiens
ctagctcttccttgatcaacctggagattctcaaacttgycccagcttccactgagaatctcagtaaaatctgaacataatgcagtaaaataatatacactcacttaaaaaccattataataaatatacttgtctcattatgtctaaaatatcaaatccaaagttaaagtaattaagtacaaataatgatttctctttttattggctttaaatgtgatgttttaattgtaaaatattgatcaactctctaatttttctggtctaaatatatgctgtcttatttcttattcctctttccactcagaccctgtccttgtttctacataaatataacctcttttgcacagacccacaatttttctgagatctaattttttactaaacagcaacactttttacataaacctctacagtaagtgtttacagatttccctgattctgattgcctcacccttgtctaactaactgccactctaaatcacaaacatgattgcactatctggtcacattttgaaaatgcttcaagagctcttcgtggcttgtatttgcacctaaattctttctaatcttgtagttcatgcat

SEQ ID NO: 370950 - DNA, 583 bp, Homo sapiens
ctagctcttccttgatcaacctggagattctcaaacttgtcccagcttccactgagaatctcagtaaaatctgaacataatgcagtaaaataatatacactcacttaaaaaccattataataaatatacttgtctcattatgtctaaaatatcaaatccaaagttaaagtaattaagtacaaataatgatttctctttttattggctttaaatgtgatgttttaattgtaaaatattgatcaactctctaatttttctggtctaaatatatgctgtcttatttcttattcctctttccactcagaccctgtccttgtttctacataaatataacctcttttgcacagacccacaatttttctgagatctaattttttactaaacarcaacactttttacataaacctctacagtaagtgtttacagatttccctgattctgattgcctcacccttgtctaactaactgccactctaaatcacaaacatgattgcactatctggtcacattttgaaaatgcttcaagagctcttcgtggcttgtatttgcacctaaattctttctaatcttgtagttcatgcat

SEQ ID NO: 370951 - DNA, 546 bp, Homo sapiens
aattgaggataatgtctccctcttgcccatgaatataactaaaatgagaacttaatattagtttgtgcagtgctgtagaaagcaattggaggcacatacactgtggaatagatmtgatatcattaattttaaagttaaatgccttctcagtgagctacctgtgcaagtaaattaaatcaaacatttaatgttagctgtgcaggttacttcatttatgaaggttaaatagctgaatttcaatgtaattttttagccttgcaatggtggagatctggaaaacaatttctgatgtatggacccttctaaattgcttaaggaaattgtcaatgcatagtaattacttattttctcaccttttcaatgtcataataaaataactgcaggtggcaagtagcataaattaactgcttatttgattagttaaaaaacaaaaaataataatccttctttgtaactatgagaacaacatagctgataaaagaaattctaaatactggttgcctaaagaatataaaaagattatttttttccctaaaatataaagat

SEQ ID NO: 370952 - DNA, 546 bp, Homo sapiens
aattgaggataatgtctccctcttgcccatgaatataactaaaatgagaacttaatattagtttgtgcagtgctgtagaaagcaattggaggcacatacactgtggaatagatctgatatcattaattttaaagttaaatgccttctcagtgagctacctgtgcaagtaaattaaatcaaacatttaatgttagctgtgcaggttacttcatttatgaaggttaaatagctgaatttcaatgtaattttttagccttgcaatggtggagatctggaaaacaatttctgatgtatggacccttctaaattgcttaaggaaattgtcaatgcatagtaattacttattttctcaccttttcaatgtcataataaaataactgcaggtggcaagtagcataaattaactgcttatttgattagttaaaaaacaaaaawtaataatccttctttgtaactatgagaacaacatagctgataaaagaaattctaaatactggttgcctaaagaatataaaaagattatttttttccctaaaatataaagat

SEQ ID NO: 370953 - DNA, 607 bp, Homo sapiens
tccgtattgatctctctaaaaccttggggctaaatgaaaatagcaggagaggcattctgttgggggaaaaaaaatgcagatttgtaccttcccctccatttkttccttgctttccagaatatcagtgcagacagagcaatatcggaaactctgttagtttctttcttccttcttccccaaggctatgttaatagcaaccttttgtgttcctgcatttagaaattcaggaccaaagatcaatcagagtcactgttacaaattttccttggaaagaaccactacccaacccataaataaaatgtgaatttctcctaatgttattcaatgcactaatttctgtgaattacttgcaatgctaatttatttgagtccagttttttgtgcctagttaacattgttcatgattttgaactcactctttaactgcatatttttagaaaagataaggaaaataccatcaggaatgttcaatataacatattatccctgatggtaacatgcattgcaagcaaatgtatttttggatcctgtgatttttatattaatggggtttagaaaactaccccacaacatgatccattggcatttgagaaatatcagaagcagg

SEQ ID NO: 370954 - DNA, 471 bp, Homo sapiens
acgtacgtgtttacccaatccacatccacttggctcccctcataaatatgtatagttttccacccaaacckgctgaatatgtgtgatactggcactgtgaggcataaaacccaacctgttcttcctctctttgaagagaagtccatgctggatactttctcttcctggcttgcaaaccagtatcaccaataaagttttcctttctactctctagccgtcctggtggtctgacttccattttcatttagcatggtgtgaaaagttgagacaaatgtagtcttgaacagctggtgaggtagctaggcagaaaatgaatgcagtaggaattaatggtaaacgttagaaactttatcatcacaatctgatagaaaacttggtgacctccaaattcattttcgaatgaaattagaatacatcagaatgccaagtgaacatttaccacattgtatcactaaatgttttctgtggctt

SEQ ID NO: 370955 - DNA, 557 bp, Homo sapiens
tgtttattcacagagaacttctcactttcactgccactgtctttgttcaggcacttaccatttcttgcctgtattgttacagtaaatgcctaactagttttctttcctattatcttgtgcccttccaatatgaattccactctgttgcccaagagagcttttaaaagggcaaacttgaccatgtcactccactctcctgcttaaaaacccttccgcaatatcccaatgccttgaggattgcaatcaatcagcttcacaaagtgtatcatcatttcactcttgcctctttttaaagttcctatcttgttagtgctttatacttaactttttacttaggcagatgaattactagcagtttcacaaaaagcatatggcttcataggattgtctttttgtttttctctctgccgacatagcctccatattgtctagtaccccattaagagttaattacagtgttaccttcccagkctgaggtaggttacatatttctattctattcagttctccataacgccttgtttacaggtctaatagagttctagctttattgggtt

SEQ ID NO: 370956 - DNA, 503 bp, Homo sapiens
aagaattgcttgaatccaggaggcggaggttgcagtgagccgagatcgcaccactgtactctagcctgggcaacaagagcaaaactccacctcaaaaaaaaaaaaaaagaatatcccatgtgtattttaaggatctacaatgtcatcggagggtcaagattaacttacattttttgcaaaacaatgtttacactttagaaagccatgagaagtttcaaatattagtaacatatattatagcttctttttcacgtagcaaactggaaaattagcaayccatgtatgaatccccaacaccaagccatcaactttacatatccatacagtgaaggcagatatattattataattcatggccatgtagtttcaaaaactcaattctttttttatattaaatcatgtaagcaaatgtatccaaaatatgtgtgtgagaggcagaaaataatgtcaaataattctgaatgactatgaaaactctggatgttgtcttcaaatacatttca

SEQ ID NO: 370957 - DNA, 473 bp, Homo sapiens
taacataaaaactctactctgttatgtaattatagcttcagattaaagtccagatttccttgtacaagtgttcatgactsttgacttcaaaaccaataattttgtgttttgacaagatgactttctgaaaagactgaccacaactcaaactctgtctcttctcttggtatagtattagggagaagaaacaggagccttttggaaaattagtacagcaggtatgcattcttctccagaaactcagctatgccagtcatattacatgatgatcttctaaaactaaattaaatctaacttcaaatggcaagaaatgcaaactcagttattatcaggtcttctttttccccatcctgtgacaatttaccagagttcttagagtttcacaatgcaagaggaccctctgtgcttcagactgtgaacccagaaaatcggaggcaggtctcagttaatttagaaagtttattttgctaagg

SEQ ID NO: 370958 - DNA, 473 bp, Homo sapiens
taacataaaaactctactctgttatgtaattatagcttcagattaaagtccagatttccttgtacaagtgttcatgactcttgacttcaaaaccaataattttgtgttttgacaagatgactttctgaaaagactgaccacaactcaaactctgtctcttctcttggtatagtattagggagaakaaacaggagccttttggaaaattagtacagcaggtatgcattcttctccagaaactcagctatgccagtcatattacatgatgatcttctaaaactaaattaaatctaacttcaaatggcaagaaatgcaaactcagttattatcaggtcttctttttccccatcctgtgacaatttaccagagttcttagagtttcacaatgcaagaggaccctctgtgcttcagactgtgaacccagaaaatcggaggcaggtctcagttaatttagaaagtttattttgctaagg

SEQ ID NO: 370959 - DNA, 473 bp, Homo sapiens
taacataaaaactctactctgttatgtaattatagcttcagattaaagtccagatttccttgtacaagtgttcatgactcttgacttcaaaaccaataattttgtgttttgacaagatgactttctgaaaagactgaccacaactcaaactctgtctcttctcttggtatagtattagggagaagaaacaggagccttttggaaaattagtacagcaggkatgcattcttctccagaaactcagctatgccagtcatattacatgatgatcttctaaaactaaattaaatctaacttcaaatggcaagaaatgcaaactcagttattatcaggtcttctttttccccatcctgtgacaatttaccagagttcttagagtttcacaatgcaagaggaccctctgtgcttcagactgtgaacccagaaaatcggaggcaggtctcagttaatttagaaagtttattttgctaagg

SEQ ID NO: 370960 - DNA, 584 bp, Homo sapiens
gtagagtatggttggatcttgctttttaagttcattcagacactctttcttttttttggagaatttaacccatttacattcaagataattatttataggtaatggtttggtactgtcattttgtaatttgttcattggtggttttgtagatcctttgtttctttctttttctcttgctgtctttctttgtgttttgatagttttctatggtagtatgctttgcatcttttttttaattttgtgctgctactataactttttgttttgtggttactacagtgcttatataaaatatcttatccttataayaggctattttaagctgatagcaacttaattacatagaagaattctatattcactacctcttcaccaccttttataattttgatgtcaatatttacatttataatttgtatctcttaagaatttattgctgctatagttcttttatagtttcttcttttaacatttatagtagagatgaagcagatttttcagtagaaacactgcacgacccttccagtattagagaattctccatatgactatgtattacttataccattgacattgagttttta

SEQ ID NO: 370961 - DNA, 591 bp, Homo sapiens
atcagcctttcatttcagcttgaagtactccttttagcaattcctataaatcaagtctagtartgatgaaatcacttagcttttgcttgtctggagaagtttctatttcttattcatttctgaacagctttgcccggtaagtattctaggttgacagatttttttcttcagcatcttgaatatatttttctactctcccctggcctgcagagtttctactgaaaaatctgctgaagccattttagattctcctgattttgatatgtttctcatctctccttgctttcagtattctttctttgtctttgatttttgatttcattatgatgtgtctggttaatatttttggggttaaattttagtggaacctctgagattcctttatctgaatgtttttgttttttcccagatttgtaaaactgtcagctattattttctttaataggctttctgggccctttttctgtctgttctcttggaactactattatgccaaggttcaatatcttgatgatgtcccataattcccatagaccttttcaattgttttcattcctttgcttggataatttaatatgtcttattgttgag

SEQ ID NO: 370962 - DNA, 407 bp, Homo sapiens
actttaaattatcttggattttaatattcttatagacactgctactttaggctaagattttccttgtcaaggtacaattattctacaactcaacagggatattctagtgataagtcaccatccagtatgtaaatgtgttttagtgcttaaataggaggcagctgtttgaattatcttccactaaatgtctgatttctcttcaaagataagtkccagggaacacacatcaccactactaagtgaggtgcggtatgtgctccatgtatccaggacagaaacactctttctctcatttcttataatcacaatttttgccatagtaattgatactgaatatcctaaaggattctggcagaggactaagataaccttcaatagaacatctggtacatgtggattgtgtttgc

SEQ ID NO: 370963 - DNA, 544 bp, Homo sapiens
tctccatatgatgtttttagaaatgtctacacaaggtagatttttgcaaaatgtatcagaatggctgtctataggccacaactttaaatgaaatacaaggtatcatatacgtaattcatctccttcacattatactgaacttgacagtaatttcattcaaaacttacaaagatgagattatattaagactctgaargcaaaagttgcagttattatattttttcaatctataagtttttctgaatttgtataaactacctcaaaacattttaaatatagtttatcagcatacctttacacctatttccattcctaaaacattccagaaattcaactatttattatcattacaaaatgcatcaagaaaatttctgcatttcagtatgattttccttctgaaaaggtaatataatgtagcctttgttttttagagcacaaattagttaaattgtatctgaagaactggaaaaaaaaatccaagttcttgtgattattataaattataggttctagttataaacatcctatggtgatttcaaaaata

SEQ ID NO: 370964 - DNA, 544 bp, Homo sapiens
tctccatatgatgtttttagaaatgtctacacaaggtagatttttgcaaaatgtatcagaatggctgtctataggccacaactttaaatgaaatacaaggtatcatatacgtaattcatctccttcacattatactgaacttgacagtaatttcattcaaaacttacaaagatgagattatattaagactctgaaggcaaaagttgcagttattatattttttcaatctataagtttttctgaatttgtataaactacctcaaaacattttaaatatagtttatcagcatacctttacacctatttccattcctaaaacattccagaaattcaactatttattatcattacaaaatgyatcaagaaaatttctgcatttcagtatgattttccttctgaaaaggtaatataatgtagcctttgttttttagagcacaaattagttaaattgtatctgaagaactggaaaaaaaaatccaagttcttgtgattattataaattataggttctagttataaacatcctatggtgatttcaaaaata

SEQ ID NO: 370965 - DNA, 574 bp, Homo sapiens
tgtgttttcattatgttgattaaacctcttaattttattatctaccttggacttcccacttcgctgaactctttcaggaagaattttcagctatttcaggaagttgagttggtttttgtttctaaatgggtcaactgtatgagtcctaataaatttgacaatgtttatgaattaaaaatacacacaagacttttgtttctggccgtgatggagtaatagaaatcagttgtaccctctctaattataaacaaacaaaaatgaacaaaaagtatacagaacaaccattttcagagattgaacaacagtcatcccaagacagcaatccctgagaaaagggaaacaagggaggtgaggtgtaaagttgcccatgccttctgcctgccgagtttccaggtctcagtgcaaaatagtggrcaccaaaaagatactcgaaggccttctgaattgaagtgacagggttgggaatatggaaagtccaaagtagccagaattcatagggtggagtaataggagagtgctgcactgagaaagagaattctgaaaatatgcaaggggtttccctagcttcgaggct

SEQ ID NO: 370966 - DNA, 574 bp, Homo sapiens
tgtgttttcattatgttgattaaacctcttaattttattatctaccttggacttcccacttcgctgaactctttcaggaagaattttcagctatttcaggaagttgagttggtttttgtttctaaatgggtcaactgtatgagtcctaataaatttgacaatgtttatgaattaaaaatacacacaagacttttgtttctggccgtgatggagtaatagaaatcagttgtaccctctctaattataaacaaacaaaaatgaacaaaaagtatacagaacaaccattttcagagattgaacaacagtcatcccaagacagcaatccctgagaaaagggaaacaagggaggtgaggtgtaaagttgcccatgccttctgcctgccgagtttccaggtctcagtgcaaaatagtgggcaccaaaaagatactcraaggccttctgaattgaagtgacagggttgggaatatggaaagtccaaagtagccagaattcatagggtggagtaataggagagtgctgcactgagaaagagaattctgaaaatatgcaaggggtttccctagcttcgaggct

SEQ ID NO: 370967 - DNA, 511 bp, Homo sapiens
accttctttgtacaagttaattattcttcaagaatcataaatccctcttctgtaaaggggggaaataacagtaactatccaagcgttactatgagcatgaaatgataatgcaaagagcttagtggccggcacaacaggtgagcattcagaaaatgtgagctattattaccagctcccttcccctaaactctataagcctagagttaaattcttactgcakagaaaattatatttgcttacatggggcctccgcagctacagtctccattcttcaaggagagggaccaggttttattcatccttggtatagcaaactgtatgttctttttttttttttttttagacagtctcgctctgttactcaggctggagtgcgatagcgcaatcttggctcactgcaaccttcgccccccaggttcaagcgattctctcacctcaagcttcccaagtagctaggactacaagcgcgtgccatcaagcccagataatttttttgtatttttagtacaga

SEQ ID NO: 370968 - DNA, 496 bp, Homo sapiens
gttttcagctgttaagttaaatgtttctacacacatctcagctaattttaccttatttccaggagcaagctacaacttattaaaaacaggtgttcctaccggaagaaagagtctctgggcagcacagggtttgaacaatttcttccactcctgagggtttccaacagaaaatgtgatggggtagattctgtgctcaaacttctttgtatatgagtcaggccactggcgtaactgaaaaacatggraagcaagggaagggtgattaggccctaggaaatatggaaaatgcctgcgaagcttctggatggtcaaatggaaattattcaggcaacttacacagaaagtctaacttcatcaccactatgaatgttcactaaatgaaagagtatttgctcctactaaaattgctaagattttaaaaaataacattcaccgttggcaacagtgttgagaaactgcagaggggagtatagatttgaacaaacttccaaaaggt

SEQ ID NO: 370969 - DNA, 496 bp, Homo sapiens
gttttcagctgttaagttaaatgtttctacacacatctcagctaattttaccttatttccaggagcaagctacaacttattaaaaacaggtgttcctaccggaagaaagagtctctgggcagcacagggtttgaacaatttcttccactcctgagggtttccaacagaaaatgtgatggggtagattctgtgctcaaacttctttgtatatgagtcaggccactggcgtaactgaaaaacatgggaagcaagggaagggtgattaggccctaggaaatatggaaaatgcctgcraagcttctggatggtcaaatggaaattattcaggcaacttacacagaaagtctaacttcatcaccactatgaatgttcactaaatgaaagagtatttgctcctactaaaattgctaagattttaaaaaataacattcaccgttggcaacagtgttgagaaactgcagaggggagtatagatttgaacaaacttccaaaaggt

SEQ ID NO: 370970 - DNA, 632 bp, Homo sapiens
ttggtatttttggtgagacctgcacaactatttttcagaaaccagaaacattattactatactaaaagagttatcaaatgtaaccagactacatttgaattgtaggacctaagataagagatttaagctatatgatctaaggatcctcacctgtaaaacctgcaatacttacctcacagacatactgagaataggtgaagtttttttacatatacacatatatataaaaaatcatataaaaaacattatttttcgtgtgtgtgtgtgtgttcttagcatagacyctgacagtcacttatcacctaggtttgcttccatctctgagtttcaagctccaatacatgccaacttacaaacacacctctcactctgcccccacattctttcccaacaaaccatgtctccatcctctctccaaagtgtgtttccctcccccagcttccaaagtactctacctggttcattatcagaattttattaaaaagatggaaaacatacttgtacaatagagcttctacttttaaaaattcaaggaattgcttgaattaccccaaatgatgtaaaaacaacaaaaataacttcctgaacaacaaattctaaacaattgcaactggaaatcatacctcaaacca

SEQ ID NO: 370971 - DNA, 620 bp, Homo sapiens
gtattacctgtggcacttaagaagctgctagaaaatttgatctttcagagaatgctggtgagaataagtaaatgctagagaaggtctcaagttgtaagacttcatgatttcaaatacacaaatacaagaataaaaaatggtaaattttttcaaatatacctaaacactcatcttttcaagatttaatrtgaagcattttttggtcaaagaaaacattttctccaattacagtatctttaaaagacgagtgaaaacaaaaagtattttcagatatattatgcccttaacacactaaattaatagtcatcttggagtcagacacaaatgtcaagaggcaccctagaaattttcagaatcatgacaacaaaaaaaattggtacatagaaaattctaactctaataccatcctagtgctataatgtcaagtgaaaaaagcaggttaaatagtatacacgttaggacctaaggtaaatacacacaatatagacacacgcgcacactgaaagaagattggaaatagatacatcaccatgtaacagcggttatatttctgatgactgaaattacaggaaatcttaattattttcttcatgtgtatattttccttcatatgtgaatta

SEQ ID NO: 370972 - DNA, 620 bp, Homo sapiens
gtattacctgtggcacttaagaagctgctagaaaatttgatctttcagagaatgctggtgagaataagtaaatgctagagaaggtctcaagttgtaagacttcatgatttcaaatacacaaatacaagaataaaaaatggtaaattttttcaaatatacctaaacactcatcttttcaagatttaatatgaagcattttttggtcaaagaaaacattttctccaattacagtatctttaaaagacgagtgaaaacaaaaagtattttcagatatattatgcccttaacacactaaattaatagtcatcttggagtcagacacaaaygtcaagaggcaccctagaaattttcagaatcatgacaacaaaaaaaattggtacatagaaaattctaactctaataccatcctagtgctataatgtcaagtgaaaaaagcaggttaaatagtatacacgttaggacctaaggtaaatacacacaatatagacacacgcgcacactgaaagaagattggaaatagatacatcaccatgtaacagcggttatatttctgatgactgaaattacaggaaatcttaattattttcttcatgtgtatattttccttcatatgtgaatta

SEQ ID NO: 370973 - DNA, 558 bp, Homo sapiens
ctagaacactgtgatagattagctatagaattctttctgtaggattgggggtgtaacgggcttcactaaccttccctaggcactgaaacttcccccaaatctgatggacctagagtcagagaagtccacttttgtacctgctgggacccaaagttgagcagttagtcacattttttctctctgttccctctcttttgaaagtgtaaaataaaatcaaaaatagacaactttttcttaagccattccagtgtagaaaacaaaaccttatgaaaacaggaatgtcaattatgtaatcattattctaattagttaaatagaagtccttatgtatgtgttacaagaatttcccccataacatcctttatgayttaagttcgatgacagtttgcgcttggtggtaaaggattttctccatggcctgaattaagaccattagaaaacaccaggccatgggagcagtaaccatctgatgactgttcttgtgcatctggtgtccagggacatgggcgacgtgcctcatctgtgttagagggtggaacagatgtgtttggcactgca

SEQ ID NO: 370974 - DNA, 541 bp, Homo sapiens
cccggtcaacatcgtatatgcccaggcgtgtttcacctctgttcttcccaataaagcataacctcaatctaaacatgcgaaaacatcagacacccaaattgagggactttgttctaaataaccggccagtgttttcaaagctgtccaggttataaaaaaaaaaaaaaaggaaaggctgagaaattgttacagattggaggagactaaggagatgtgacaaataaattcagtgtttggatcttggaactgaaagaggagatttgtggaaaaactggtgacatctgaataagttctttagtttakttagtagtatttataccagggttaatttcttagatttgattactgttctcttgttatgtaagatgttaacacaagagaaagctgagtgaagaatatatgggaactctctgaactttttacacctcttctgtaaatttaaaatgatctcacaataaaaaatttaaaaacacagccagacacagtgggtgaaaatcagcacagtcaagcagctttgacaacacattttacccaaagagat

SEQ ID NO: 370975 - DNA, 587 bp, Homo sapiens
tgaaatcaaatcacccctgacaattccaaaactaacggaatcctaacataactctatgtaactctaaagctgagtgtgctggtaattaagcttccagcccacccttcccagctctggggtgcagggtcaccatgggctccttcctgtgtgcaccccaccccacccccactgtcagcatcctgtctccaccctgagagtgacagctggttccagtagcgggagttggttccagcttgccattttcctagcactcctataaccagcctgctgatgcccattcagagacagcagcacgggctggccatgtcccctctccagaattctgcgtccagctcctggaccttgagctctgagcccttgggccacgtgtacmattaatagtgcctcctcctcagaggactaacccccagccctagggccaccttcatatttctgagttttgatattttcaacctcttttctttgttgtatgagtccttgggctgggagcttgcagtcaaaatcttcatgatatctcattatcactacttttttttaaatctctactagctggataacaattatttatattaaattctctcttgaaa

SEQ ID NO: 370976 - DNA, 587 bp, Homo sapiens
tgaaatcaaatcacccctgacaattccaaaactaacggaatcctaacataactctatgtaactctaaagctgagtgtgctggtaattaagcttccagcccacccttcccagctctggggtgcagggtcaccatgggctccttcctgtgtgcaccccaccccacccccactgtcagcatcctgtctccaccctgagagtgacagctggttccagtagcgggagttggttccagcttgccattttcctagcactcctataaccagcctgctgatgcccattcagagacagcagcacgggctggccatgtcccctctccagaattctgcgtccagctcctggaccttgagctctgagcccttgggccacgtgtacaattaatagtgcctcctcctcagaggactaacccccagccctagggccaccttcatatttcygagttttgatattttcaacctcttttctttgttgtatgagtccttgggctgggagcttgcagtcaaaatcttcatgatatctcattatcactacttttttttaaatctctactagctggataacaattatttatattaaattctctcttgaaa

SEQ ID NO: 370977 - DNA, 565 bp, Homo sapiens
gagaaaaacacagaaacacagaagactacaaactatatgatttcatttatataaaattctagaaaaactatagtgacagaaagcagattggtggtttcctggatcccagggtttagtgaagggactgattccaaatgggaacaagggaactttttggatgatggaaatgttctgtagtttcattgtggttctgtgattgtattcaattgctaaatcacatgcctacacttcaaatagttacagtttgttgtctaaaattaaaccttaataaagttaggggaaattttttagagcttaatagaatgccaatagatattaacataaggtttagttgccaaacaatctttcaatgggttaccagcaaaagggctttaaaaagaaattcctaggagcccacaatcagggaaaaaaaagttttctttttctccatggggttagggtgagatgggatgtcatggtatgaggctcccaggatcttggtgctctgaggcagtaacatgtggtccacccttgttctcactgttacaagctgaaayggattcataatttgggcttaccatttgct

SEQ ID NO: 370978 - DNA, 413 bp, Homo sapiens
ctaaacaaaatgaaagtcagtggttttagaaccatcagagaattgaggccatggggcaagccttcactctaaaatctggacaagcatgcaagtatagtgagtcacagccagatcagtttacctgctggagccctaacacttgcatgggaattttgaaaaatggctgaggctaagtgtgggccagtgtgcaagtgagaaactccttggggccctgtcttagagggacctcccactttcatgggttttgcctccaggaacctcaccaagttcccacagtaaaaatccaagaaaaaaaaatccctcatgttttacagcagtgggaggggaaaagtaaccaatttgaaagagatccagagcattctatyctccctaacagaagaaatcctaactccaagggagatgttgccagaacc

SEQ ID NO: 370979 - DNA, 481 bp, Homo sapiens
ggtatcatccagtttttctgtgaaatggatattaaaatacaagcacaacaggtttttcttaaagcactaacctactctttaacaaaaattataaaaggttaaaaagagtctataaaaatcttacctatggtcagacattaaaagttgaataaatatgcctacaaagttttattaaaaytaagtttaacattaataacaccaatataaaggtgaaatttagattatctggtataaaaatcatacaggaagcattgtcaaatataaaatggtgtttggctttctttggtctaaaagctaataaaaataggtgctaaaggaaatttctcagtaagaaggcaccaaggactacaaagtccactgctgatgtccccacatttaaaacaaagataaattttttagaaattatatacttggtttatcttccactttagtttccctcaaaactaaaagtcttttatcacaggtaccacccctagaattt

SEQ ID NO: 370980 - DNA, 623 bp, Homo sapiens
cttgttgggtgctgcgtcataccatgcatccgtgggttaatgcagaggctcataaaaacagcacttactaaaacctcctttaactatccttcaccttatccagagaagcttcttcttttgaaaaatcaagcaaaacaactaagccaagacatgttttaaaaaaaagtttgaaaagaaagctgtaaggaaatataaggggaggggttgttagatatgagttctaaatttcttttccaagaatcaatatgtcagtatgttcaattctttatcttctacttttaaacttaacttcctcataaagcaacttttttcattttaaacttaacttcctsataaagcaacttttttcaattacctgcttcaccctgattcatttcaatcacctgctccaccctgactcattctgattacctgctccaccttgactcatttcaatcacctgctccaccctgactcattctgattacctactccaccatgactcattctgattacctactccaccctgactcattctgattacctgctctgtcataaccattttccccacaaaaccactcaccccgtcactctttaaattagccagtcagaattagtttagcctgtgtggcctaaccctagcc

SEQ ID NO: 370981 - DNA, 617 bp, Homo sapiens
atgagtaaatttcaaagtgctagattactggagtttcttgtttatataacarggattttcttaaacaaaaatcaaccatgagtttactgacctcatttccatataataatttattgcatgtatacctgagcattaccagaagattcatcaatcagaatcccttctcaataaattacctcctctaggaaaaaagaatgttaataagaagcagtcacttctatgaatgtgctaagcaaatgctaaagcagatgacagataccattttcatgattaatgtaactaggtctcataatctacctctcctatatagtttaattttacttttctacttttctgattcaaagtaataaagcaagttaagaaaaagccaaaaaagcaattctcagaacacagacaacaaaatttaaagaaaagtggtacaaacaaatatttttaaatcagaaaagtatatttttgccaaaatgagccaagaagccaagaattgcatccttctgctctaaggtgtgcagctcaccatgtgtgtttttctttctgaagaccaagaaaacaaaaaatatcaattgtcaaagaatttggagccacctaaaaccaatttcttctccccaaaacgcctgcag

SEQ ID NO: 370982 - DNA, 361 bp, Homo sapiens
tcaaagaatttggagccacctaaaaccaatttcttctccccaaaacgcctgcagaacttggctcagaaaccactctatcactgtaaaaatamatgagaggattgtgcataataccatagaaatccaagttagtggtgtattgagagggatctgctttcctattcccagatgagtgaattaagacatgaactgcagggaatactttcaaaataactctgttcattatagatgcttttggaggaagaatccaaagtgctctgagtcccaagggctgctctgctacagtgaatggcctttggattgacattcatactagtcaacttacaacaagccatagctcaaatcccacaacagttctgct

SEQ ID NO: 370983 - DNA, 554 bp, Homo sapiens
atcacaattttaaaaagactgacaatgccaaatgctggcatgtattttgaacaacccgaaccctcatatttagttggtggggtacaaaatggtaacaatcacttcagaaaacatgtgggcagttttttatacaggaaccaatgcattgactttataacccagygatttcacacctaggcaattacaggttaagtatcctttacccaaaaatctgaaatctgaaatgctccaaaatccaaaactttttgagtattgacatgacattcaaaggaaatgctcatttgggttatttcagatttcagattttttaattaggtatgctcaaccagtaagtataacaaaaattttcctaaatctgaaaaaaattcaaaatctgaaacacttctggttccaaacgctttagaaaaaggatagtcaacctgtgcccatgataaatgaatcttcatatacagcagctctgttctagtcaaaaactaaaaagcacaaatatctatcaactggaaaacaactacacaatgaaacactacttagcaataacaaaaaacaaactgctg

SEQ ID NO: 370984 - DNA, 382 bp, Homo sapiens
ataaaaaccaaaacaagccagacaaggaagactggcataaataactaatccttcagtgcaaaggcatagatttacatccacaagaaacaacagcaaacagggaaccatgacctcctcaaatggacaatgcaaagaaccaatgattgaccctaattagatggcaatatgtgaactctgtaaccaaagggtaaaaatagcagctttagtcaaacttagtaatctttaaggtaacacggaaaagcaattcaggggcttatcagagaaatttaacaagattaaaataatttttaaaaagcaaacagaggacagaaacacgaactaaaaaaaagaagctctcaacagatgaagygattaagctagaggaaagaatcagtgagctcga

SEQ ID NO: 370985 - DNA, 452 bp, Homo sapiens
atctaataaaaaccaaaacaagccagacaaggaagactggcataaataactaatccttcagtgcaaaggcatagatttacatccacaagaaacaacagcaaacagggaaccatgacctcctcaaatggacaatgcaaagaaccaatgattgaccctaattagatggcaatatgtgaactctgtaaccaaagggtaaaaatagcagctttagtcaaacttagtaatctttaaggtaacacggaaaagcaattcaggggcttatcagagaaatttaacaagattaaaataatttttaaaaagcaaacagaggacagaaacacgaactaaaaaaaagaagctctcaacagatgaagtgattaagctagaggaaagaatcagtgagctcgaccacaggctatttgaaaatayacagtcagaggaaaaagagaaaaataaaaggaatgaagatcacc

SEQ ID NO: 370986 - DNA, 563 bp, Homo sapiens
gcaaaaacaaaacaataccaaacccgaaatgtaaataaccaaacaaaaaatacarcccataccatcatgcattatagtgagatgaaaatcttttttccgaaaaaaagcccaaaaattcagatagaaaaagatatttcttctagagaggaatataattaggctgacagcagacttctcatcaacaacaccaacactaggaattggatgaaaatgaaataatatatttaaagtactgaggaaaagtaaccatcaatctagaattctaaacccacccaaaacaatcattccagactaacggcaaaataaacaacatttaattttgtttttgaggggatttgtcaaagacctgcaaatctactaaaggatgttcttcattcagaatgtgtgtgcggcaagccacccaggtgccaaggcaagagaccgacggcatgagctgttccagtgtaataaagaaaatatataaaataagaatagttatactagatatagatcatagatatgattatatatgaatatcattaatcattagtttgtagaaattactctttattccaatattataa

SEQ ID NO: 370987 - DNA, 630 bp, Homo sapiens
ctcccttctccttcaggtcttctcatgatttaactaggccatgggatgaccagagtaaacataatttctggatgtgtctgtgagtgtacttctgaataacataaacatttgaatccaaggacttagtagtgatgttggtgggcaccacccaatctatggagggaacaaaaatagaacatatcagaggaaggaatattttgtcccctcctgcctgtctgcctgagctgacatttgaagaactcatagaagatttagaaagaaattagtttgtccaagatttttttccaagttacaaattatttgccttattccatattgcaaggtaaggcaatttgtttaatgttcccaatttttcattttttacaacactacaagatttgttttaatattaaatattatgcatcttttactctgattgtgatattttaattaatagggcttacttctttcaagcttagacatttaacagtttgcccaactcaaaccygtaaagagagcacaggcaaagtagtacatactggatggtaatgttgaatgacttccagataaaaggaacatatggctgatatcacatcttctgcccattccttccatgagtatagatgttcttagatttgtggcagccaactt

SEQ ID NO: 370988 - DNA, 581 bp, Homo sapiens
atagacttgattgcagaagactaagcatcacctgagatctcagattctatgattgaagagaattttggagggtagtgcacctctacatgggtcatgcattgcttctcaattttagggacataagtttagttgtaggtctagaattaaaggggggtggtgagggtgagtcccgagaaggttcagtattgtcttgcatggcagttgcctcaaaggaggtaattactgtttcctcaggcaatgcagggttaatyctctcagacagaggtagaaaggccaataccactgtgactggggataccactgccattgggggtggagtgatcacttccactgggtttgggtaggccatttctgatgagggtggagatgccagttctgctgggaatggggaggctgcttctactgacaaagaagactcgtcagaatttaggggctcaatgtcccccatttcacctggatcttcccacatatccccatcccaacttacaagatgccattctttccttttcagtaccttgactttaacatagactccctgagaggctggaaattaactcgtgttgaaatttagccagttattg

SEQ ID NO: 370989 - DNA, 554 bp, Homo sapiens
  misc_feature (1)...(554): n = A,T,C or G
gctttatggtctttaggccactgtgagacatagaagactaagcaaatagcatcttcacttcagccccatttttaaatatgaggccgaataatgatgatatgaggggagtcgttatgtgtcctgtagccttgatagtgatgccaaaccatcagaaatggaatccttggaggaccaaggtcttgtacctcctatgcctaamgctttctattaggtgtttaatgtatatataaatatatagcagggtaaaatgggactttctttctttttttttttttaattgagatagggtctcgctctgtcacccagggtggagtgcagtgatgcaaactcagctcactgcaacctctgcctcacaggctcaagcgatactctcaccccagcctctcaagtaactaggaccacaggtgtgccccaccacacccagctaattttttgtatttttggtggagaaggggttttgccatgttgctcaggctggtcttgaactcctgagctctaacgatccacccacctcagcctcccaaagtgctggaannnnnnnnnnnnnnnnnnnn

SEQ ID NO: 370990 - DNA, 469 bp, Homo sapiens
aaggttgatcactggccggagctcttgagttatgagagcagctccagacatttctgttagaaaaacagtcaccactggcagcacatttcagtgacattgaatgggtcggcaaacttccttacttgtgtgacatattcaacttgctaaccaaactcaatttgttactccaggggagaatgacaactgtgttcaagttggcagataaaatggcttcattcaaagctaaactggaattatgggggtgatgagtsaacattgggatttctgacatgtttcaaacattagcagaaattttgaaagaggctgagccagggccttctttctcccagctggtgcatgatcacctgtcttagcccaagcacaaaggaccacagaactgggaaggaatggatccgccacctatttttgaataagccagctgaatcgactttgtctgtgctagaggaggaccaactgcttgagatcacaa

SEQ ID NO: 370991 - DNA, 469 bp, Homo sapiens
aaggttgatcactggccggagctcttgagttatgagagcagctccagacatttctgttagaaaaacagtcaccactggcagcacatttcagtgacattgaatgggtcggcaaacttccttacttgtgtgacatattcaacttgctaaccaaactcaatttgttactccaggggagaatgacaactgtgttcaagttggcagataaaatggcttcattcaaagctaaactggaattatgggggtgatgagtgaacattgggatttctgacatgtttcaaacattagcagaaattttgaaagaggctgagccagggccttctttctcccagctggtgcatgatcacctgtcttagcccaagcacaaaggaccacagaactgggaaggaatggatccgccacctatttttgwataagccagctgaatcgactttgtctgtgctagaggaggaccaactgcttgagatcacaa

SEQ ID NO: 370992 - DNA, 575 bp, Homo sapiens
tgactcagtatgagatcctgttgatgtgcatatggtctcttgaaattactgattatatcttgcaatttcttctaactattctttgttcccttcctcccacaatgtgatagattctctttctaattactaatacttgcctgtcacatttttctttatggcatcccaatttttttttcaaggaatcctcttccccactatttcccacattattagtcatcatcttggtgaaagctagaatctgcttcttcagcctcccattcattctttgggcccacaatattcttctaataaattctctctccccaagatggtcagagttggttttcatgattataatgaagaatactggcagatatagttatatctttatttaaatgaaagaaacaataaaatgtatgttttaacattagaattccatattacaaagaytgttgtacatttactttagaaagataattaacatgctttatgcagttttatatgaaatgaacctcatgagctttaatcctgttacattgtcaacaaatactatcaaaaagttcaaaaagtattatgaaatagtttgataaaatggt

SEQ ID NO: 370993 - DNA, 610 bp, Homo sapiens
gcttatttgctctagtttgtcattttatgctctcaacaatccagtacatttattccatggatctaatctcaagttgtggcagtcccacttttataaggtagcaacctgacctttctttccctccctagtctgtgaggatgtggcacgtgagctcrgaaagccacagtacaacccaagcaatggctacccaggaagagacacagtgggaggatctgctgcacagatcagcaaccatctggatcgagtcactggatgctggcatctgatgcaaggaggaagctgcagagacatctgggacaccctgtcataaacctagtttctgacccagacttgcaacactggactcatttcactggggaaaaggaaggtcttgatttattttcaattatgtttatccctatcaggaaaagcctcagatacccttttgcttctttggagaagcccacaattatgagccataaaaggcaagttatttgtaataaaacaagacagcaccacatataccagggttatttgccattgctggatgtggttcagataaggtctagccaaatgtccggcttagtctagatacagcctgaaagaaaacattattttatttgaacttgac

SEQ ID NO: 370994 - DNA, 631 bp, Homo sapiens
cttgaaattaaagaaactcaaattctatggtcaggaaattgattttaacaagacaaaatctgtgtcctttaaaaaaaatggaaaagaactcacaaaagcctattcatgattacttgcactagcatcctttttttttcttaatgaaattgatgcctcttctagtaagccttggttccaaggatgttcttcaactttccttttcttctcagagctctttgttcttacagcatgcccattgccattacttctccccattctatagcgattcatgctgattaacagcaaatatatcaacagattcagacttgaacatcttgtatccactccttaagaaattcatttgttctcttagttttttggtattataccagatctatatttccagaaccatgattattttatctccagttttatggttatcactgatccttgtcagttatcactgacatcacattctcatgcatayctaaaaattcagttaaatgggctgaactcaatggggtgcagtcagaaaacagttttatttttctgcactaccatttttgattgctctctgtagaggcacttcagacaaaggaagcaatacagagcagtggtgaaaagtccagattcaggagaagtaaatcagtct

SEQ ID NO: 370995 - DNA, 581 bp, Homo sapiens
ccacaccccagaacaggactcttgctggccgtctaagaaccacctatcagtcagagcatctcctttccagcctctgataaaagcttactctcttttgagtctcactccatcaggcaatatgattttctcctcttccttattgatgtcatttattgattacttgatcatttccctttaccctttgaagtcttttagatgatgaacattcccaattgtcctcttcggtttatctcctgtcatagctgaagccagtgcacttgtagaaagcaatcaagttttaaaattctagccttctttttcttcagttaattttatctctactctgtcattcattttcaaagctccattatgaattgtttcaatacatgaatgtatgaagatcttaattttatatatcttaccatgaccaaaatctcttctctgttaagattctcttcatgcttgttactactataaccgctcttagaactctctagtctctggatttctgccattttctcccatcatctaacctcctccaggcactttacctttcytattcagtctcactcaatggaaagacaagtgtatgatctttttcc

SEQ ID NO: 370996 - DNA, 565 bp, Homo sapiens
tttaaaattctagccttctttttcttcagttaattttatctctactctgtcattcattttcaaagctccattatgaattgtttcaatacatgaatgtatgaagatcttaattttatatatcttaccatgaccaaaatctcttctctgttaagattctcttcatgcttgttactactataaccgctcttagaactctctagtctctggatttctgccattttctcccatcatctaacctcctccaggcactttacctttcttattcagtctcactcaatggaaagacaagtgtatgatctttttcccactaagtagccttgatttccttgaacccctatctttccgctgtaccagtagcatctagtaatccaacccaaaatcagagacataatcctatttcttgagacctctaagtaggtggttgaaggctaacagctcaacccatacattcatgygatttcgtactgctcaattttatgaacttagcactgtgcatattttttccccatgactttggttagctttctttctctggcccttctatatttgtttatgatattttata

SEQ ID NO: 370997 - DNA, 537 bp, Homo sapiens
tggggtgttgtctgatcaatatatttctacttaagaatgccagatacttaaagtgatgatctttcagactactcaatattagaatccattcaagaactcctagcattttaataaggaaaagcatctataaaaacaacttaatttgaagtatggattaaaaataaaataaaattaaactaaaaaggtgctgaattagtcaacaaatagatatatggaagtcacactgctttcctgagaagtaaaagctaattacatttctaaaccctgataytcacctagtgttagcagcctattgctagctacataaccacacacagatgaatacaaaacgacagaacaggaacacattttaaaaatagtgtctgaaaaatgaaatagagaaatgcagcatgaatgtttttatagctactggtagttttccttccatatttttttgttctacaaaataaattcttttgagaaaacacttgtagaagaagccatgcattttgaaatgcaagtgaagtgatatgtcctttacacaaaggtgtttctata

SEQ ID NO: 370998 - DNA, 541 bp, Homo sapiens
gaaaatgtgtggcaaattataggtgctaaattgatatttattaaaggaaaaaataagggactgtgaatcctctgaactgagaagattctctagtccatcaaagcactcacagttatgcaggcatctggaaacaaatttcctagttgccatggttgcttattgcttaagctgcaatattgttaacactttcagcatcagtagtaatcgtgtttgtttyacagtcattattgatctccctgttggaagtctcccctgacacctcagaggaagagtgggcactgtgagggctgcctagaatgccgtgagataaaggatgttctgttcaacatcatgcttcaggaaatatttctgccttatcattcctgaaatgcctccccatctactctggctcttgtttagcatgttttcatttctagaacagtgtcaaggttccctgtggctatttgaaccctctacaggtcctggaatcctgactttgaaattgtctctcttgtcacctgcttggtgacatgtattaaaccccttctgatcatttctcctt

SEQ ID NO: 370999 - DNA, 541 bp, Homo sapiens
gaaaatgtgtggcaaattataggtgctaaattgatatttattaaaggaaaaaataagggactgtgaatcctctgaactgagaagattctctagtccatcaaagcactcacagttatgcaggcatctggaaacaaatttcctagttgccatggttgcttattgcttaagctgcaatattgttaacactttcagcatcagtagtaatcgtgtttgttttacagtcattattgatctccctgtyggaagtctcccctgacacctcagaggaagagtgggcactgtgagggctgcctagaatgccgtgagataaaggatgttctgttcaacatcatgcttcaggaaatatttctgccttatcattcctgaaatgcctccccatctactctggctcttgtttagcatgttttcatttctagaacagtgtcaaggttccctgtggctatttgaaccctctacaggtcctggaatcctgactttgaaattgtctctcttgtcacctgcttggtgacatgtattaaaccccttctgatcatttctcctt

SEQ ID NO: 371000 - DNA, 541 bp, Homo sapiens
gaaaatgtgtggcaaattataggtgctaaattgatatttattaaaggaaaaaataagggactgtgaatcctctgaactgagaagattctctagtccatcaaagcactcacagttatgcaggcatctggaaacaaatttcctagttgccatggttgcttattgcttaagctgcaatattgttaacactttcagcatcagtagtaatcgtgtttgttttacagtcattattgatctccctgttggaagtctcccctgacacctcagaggaagagtgggcactgtgagggctgcctagaatgccgtgagataaaggatgttctgttcaacatcatgcttcaggaaatatttctgccttatcrttcctgaaatgcctccccatctactctggctcttgtttagcatgttttcatttctagaacagtgtcaaggttccctgtggctatttgaaccctctacaggtcctggaatcctgactttgaaattgtctctcttgtcacctgcttggtgacatgtattaaaccccttctgatcatttctcctt

SEQ ID NO: 371001 - DNA, 621 bp, Homo sapiens
  misc_feature (1)...(621): n = A,T,C or G
acagccaataaaaatgttttgtaacacacaagtaaakgattaatttctattcttcaatccttgtctatgattcagtttcctcattctcagttttaaatcttttcctattcattttcttttcttcttcttatggtttccccagaagctgtttgaaggtgaaacgtcataggaatgcactaattgacatgaagaattatataatgcataggatacaaaacaggaaggaaacacacattgtcgttattccctttctgtgattcctcctgaaagaatgaactatagttgaactatgtcttacaattttcatctggaacttattntaagtaaatttaccatcttgcccattactagatacatattttcacaaatcagtcacacaacaatttgacatatctgaagctacaaaatcacttgagtgctctcatcttgattctctcagaatgcaacagacagctcaagagtttaccactggctctcttttagtcttcgtactgccaaggatgtttttaatgttttattaaagtgtaggattcttcttattgttaaatctgcattaggttagagtctgagaccaaatttcctgacgggccttctaagagtatgtcacaaatgatagcagac

SEQ ID NO: 371002 - DNA, 571 bp, Homo sapiens
gccagccttgtgctgtttcagaaataataaattcagctgcttcattctgaaatcaacttaacttctttctagccatctccctcatgtattccattgtgactatttttcagactcacagcaaagccagcttcttgtatctttctgtacttgtttttggctttttgacagccaattttgtttctcttctgttgcccatgtgtgtataaatcataagcttacactggactttctaaatgctaatatagaaaaagatgcatgcatatatatacatatgtatacatatatatgtatatatatatatttgcaaatggacctgcaaagttaagaaaaactgcaatcaaggaatatttcacttaaataattttttttttaatagtggacaattcagacaacttcattcattctttgtttctgttatttaaataagatgtcatcctttaacttattttttttttactttttctccmgttttattttgcaatgattattgagtgaatggaaatattaatgcatgtatgagtgcgttttgggcatggcatagtcatttggacctaaaaattgatcaagtttt

SEQ ID NO: 371003 - DNA, 612 bp, Homo sapiens
atgacactgctgtaatatgaaaaaaaaactcgaagctttagaggaagaaatttatatttccttccttactcaaaatatctctaccaaaaatgtgaaaatgagtgaaccattacagatatcaatatcaaaatgtttatggcagagcatagagataatactcaacttcattcttataaaatttttaaaaatttcrgaacaatttatgcctgttctttaccactttcctccatcatgttgcctgacaatggcaagcttttaatttctgattttaaggcttttatttaaaatgtgcattttattggaatgggttactttcaggataatgcagttcatcattatattgtatagagcattttgaactatattgtcttaaaatgcattcaattagtaaaaaataaagtaaataatatgtacaagatactaagtctacaatgaaaatagcaatacttcgcttaagcctccccagtccctactctctcacaagagggtaaccattttcaaatatttagctgttattagtagtatttaccttatattcataaacagtatgctatgttagtaatttcatatgacaacattttacattttatgtcagatttctgtatggtaggt

SEQ ID NO: 371004 - DNA, 612 bp, Homo sapiens
atgacactgctgtaatatgaaaaaaaaactcgaagctttagaggaagaaatttatatttccttccttactcaaaatatctctaccaaaaatgtgaaaatgagtgaaccattacagatatcaatatcaaaatgtttatggcagagcatagagataatactcaacttcattcttataaaatttttaaaaatttcggaacaatttatgcctgttctttaccactttcctccatcatgttgcctgacaatggcaagcttttaatttctgattttaaggcttttatttaaaatgtgcattttattggaatgggttactttcaggataatgcagttcatcattatattgtatagagcattttgaactatattgtcttaaaatgcattcaattagtaaaaaataaagtaaataatatgtacaagatactaagtctacaatgaaaatagcaatacttcgcttaagcctccccagtccctactctctcacaagagggtaaccattttcaaatatttagctrttattagtagtatttaccttatattcataaacagtatgctatgttagtaatttcatatgacaacattttacattttatgtcagatttctgtatggtaggt

SEQ ID NO: 371005 - DNA, 534 bp, Homo sapiens
gatactaagtctacaatgaaaatagcaatacttcgcttaagcctccccagtccctactctctcacaagagggtaaccattttcaaatatttagctgttattagtagtatttaccttatattcataaacagtatgctatgttagtaatttcatatgacaacattttacattttatgtcagatttctgtatggtaggtaaaatttgattataccaatattcctttaacttcagctccctacatattgccatttatggctgtatcagcattttkttcaatcaaaagctgtatttttattataaattatatatttaaattatttatttctgcatcaataatcatatttagttttctttgttataaaacttactcgtttttctgaaattaatgattgtctcatgttttaacttgtctgtttttttaatctaatttaattgtttccatatgctccattcgacctgatatagatctatcaatgtcactttaaagacatctaaacatactagataataatcagggtcattttccctgccccc

SEQ ID NO: 371006 - DNA, 586 bp, Homo sapiens
aatggccaataccacagtgagtgtgggtaagttgtaagcatttcatttaagaactggaacaagacaaagatgctcactttcctcactcttatttaacgtagtactagaaatccttgttggagcaatcagacaagagaaaaaatagtcattcaaattgctaaacaggaagtcaaattattcttccttgctgatagtataatcttacctctagaaaaaccccataaatttcactaaaaatcatttgatttgaccagtgaattgaataaagtacctggatacaaaataaatgtacataaattggtartatttttatacaccaatgaccaaagaactaaggaccaaatcaagaaagcaatcccatttatagtagccacacacacataaaatatctaggaatatattttgtcaagggagtgaaatacctccacaaggagaataacaaaacactactgagagaaatcatatgtgacacaaacaaaaaaaatcccacgctaatagattggaagaatcaatattaaaatgaccatactgcccaaagcaattgaacaaaattacagacagttttcttctttttttaacttttatt

SEQ ID NO: 371007 - DNA, 586 bp, Homo sapiens
aatggccaataccacagtgagtgtgggtaagttgtaagcatttcatttaagaactggaacaagacaaagatgctcactttcctcactcttatttaacgtagtactagaaatccttgttggagcaatcagacaagagaaaaaatagtcattcaaattgctaaacaggaagtcaaattattcttccttgctgatagtataatcttacctctagaaaaaccccataaatttcactaaaaatcatttgatttgaccagtgaattgaataaagtacctggatacaaaataaatgtacataaattggtaatatttttatacaccaatgaccaaagaactaaggaccaaatcaagaaagcaatcccatttatagtagccacacacacataaaatatctaggaatatattttgtcaagggagtgaaatacctccacaaggagaataacaaaacactactgagagaaatcatatgtgacacaaacaaaaaaaatcccacgctaatagattggaagaatcaatattaaaatgaccatactgcccaaarcaattgaacaaaattacagacagttttcttctttttttaacttttatt

SEQ ID NO: 371008 - DNA, 566 bp, Homo sapiens
cctgtgtgcggagatgagagagtgtagaagtaaagacacaagacaaagagataaaagaaaagacagctgggcctgggggaccactaccaccaagtcgcagagaccagtagtggccccaaatgccaggctgcactgttatttattggatacaagacaaaaggggcagggtaaagagtgtgagtcatctccaatgataggtaaggccatgtgggtcacatgtccactggacagggggcccttctctgcctggcagccaaggcagagagagagagggagagagatagacagcttacgccattatttctgcatatcagagacttttagtactttcactaattttgctactgttatctaaaaggcagagccgggtgtacaggatggaacatgaaggtggactaggagtgtgaccactaaagcgcagcatcacagggaggtggttaggcctccagataactgcgggcragcccgactaatgtcagttcctccacaagaggtggaggagtagagtcttctctaaactccccccagggagactccctttcccggtctgctaagtagcaggtgtt

SEQ ID NO: 371009 - DNA, 352 bp, Homo sapiens
tcctctgttttcttctaggagttttactattttaggttttaagtttttaacccaacttgaattgatttttgtgtatggtgcaatataagggtycaatttcatcattttacatgtatatatcaagttttcccaacttcattttttgaagggatgatccatccaccattgtgtattctttgcactcttttcaaagatcaattgtctgtatatgcaaaggtttatctctgggcaccctatgctattccattggtctgtacatctgtttttcatgccagcaccatattgttttaatttctgtagctttgtaatatattttgaaatcctaaagtgtgatgcctctagcttcattttt

SEQ ID NO: 371010 - DNA, 544 bp, Homo sapiens
aaaacactttttcctggtaagtgaatgataaatgcatacacaatgcactctgagagcagagaggatgggaattaaaattcagccctccctgtgttagttggtcaggaagaacagccttgtraagataattgtaacccaaatgcagagaggagcttgagcaaaaacatgaaatttcagctgcaagaaaactcctatcactggagtataaaaatcaagactagtctcataggagataggctgggtatgtagaacaggagcaagttctgtagtttggcaacaccgaataaatgtgacgttactcacgcagtctgtaagctagaccttgcccataagggcaggtcaatatggaggctctttaaatcacttacactcatagacattaatattctaggtaatattgtgatcacttttataggctatggaaataacccatatttatacaacatgatatatcagaaaatgatgtgtctttgcctcccaagtgcattaaaatgtgcaccttcctacctattgcccctgtttagtgtgggaaggatgaaagcta

SEQ ID NO: 371011 - DNA, 603 bp, Homo sapiens
atatagtctgaaatagcccaaatgtcaataagacttacagcctagctgggagaggggcacgatgaaaacatgtaagaacatactaaatatgtatttatacattgaggagtcaataatttctataggaacttctccatcattacagacattatgaagagcaagaaaatgttgtatgggtactaaaatattgggatatttaaaaacgttttcttcataaggtgcccacacagtaatggatcatctggaaagaaataagtcaagatgcattcattatcaaacaagaatgacagattgacaaacagaaaacactttttcctggtaagtgaatgataaatgcatacacaatgcactctgagagcagagaggatgggaattaaaattcagccctccctgtgttagttggtcaggaagaacagccttgtaaagataattgtaacccaaatgcagagaggagcttgagcaaaracatgaaatttcagctgcaagaaaactcctatcactggagtataaaaatcaagactagtctcataggagataggctgggtatgtagaacaggagcaagttctgtagtttggcaacaccgaataaatgtgacgttactc

SEQ ID NO: 371012 - DNA, 544 bp, Homo sapiens
aaaacactttttcctggtaagtgaatgataaatgcatacacaatgcactctgagagcagagaggatgggaattaaaattcagccctccctgtgttagttggtcaggaagaacagccttgtaaagataattgtaacccaaatgcagagaggagcttgagcaaaaacatgaaatttcagctgcaagwaaactcctatcactggagtataaaaatcaagactagtctcataggagataggctgggtatgtagaacaggagcaagttctgtagtttggcaacaccgaataaatgtgacgttactcacgcagtctgtaagctagaccttgcccataagggcaggtcaatatggaggctctttaaatcacttacactcatagacattaatattctaggtaatattgtgatcacttttataggctatggaaataacccatatttatacaacatgatatatcagaaaatgatgtgtctttgcctcccaagtgcattaaaatgtgcaccttcctacctattgcccctgtttagtgtgggaaggatgaaagcta

SEQ ID NO: 371013 - DNA, 502 bp, Homo sapiens
tattttcttttatgttcatacatttattaacctgtcagttaatttatttatacctgtatggaatcttggattactattttattcaatattacataagccattattactgatatatttcttgatactcaaactactctagatttagcaaacaggagccccttcaagctgacttctgtctcttcttgacatgtcttgttacttctttgggaactttttaaatttttgtcacaaaaatgtgttgyagactcatcttgtacttttcctgatccacccttgaagttagccattcaatgatttcctgaagcactctcattttcttttaatgggtgatggtgttttgagaccaaaatctatgtgcttggcatcctcattgatacagaggtatcacagaatctgggtcatctagatgacagagctaagaaatgtctatctctatatctaatgttacataaatatacatgcatacctatatttatttgtatgtataaatctgtagaggtct

SEQ ID NO: 371014 - DNA, 502 bp, Homo sapiens
tattttcttttatgttcatacatttattaacctgtcagttaatttatttatacctgtatggaatcttggattactattttattcaatattacataagccattattactgatatatttcttgatactcaaactactctagatttagcaaacaggagccccttcaagctgacttctgtctcttcttgacatgtcttgttacttctttgggaactttttaaatttttgtcacaaaaatgtgttgtagactcatcttgtacttttcctgatccacccttgaagttagccattcaatgatttcctgaagcactctcattttcttttaatgggtgatggtgttttgagaccaaaatctatgtgcttggcatcctcattgatacagaggtatcacagaatctgggtcatctagatgacagagctaagaaatgtctrtctctatatctaatgttacataaatatacatgcatacctatatttatttgtatgtataaatctgtagaggtct

SEQ ID NO: 371015 - DNA, 502 bp, Homo sapiens
tattttcttttatgttcatacatttattaacctgtcagttaatttatttatacctgtatggaatcttggattactattttattcaatattacataagccattattactgatatatttcttgatactcaaactactctagatttagcaaacaggagccccttcaagctgacttctgtctcttcttgacatgtcttgttacttctttgggaactttttaaatttttgtcacaaaaatgtgttgtagactcatcttgtacttttcctgatccacccttgaagttagccattcaatgatttcctgaagcactctcattttcttttaatgggtgatggtgttttgagaccaaaatctatgtgcttggcatcctcattgatacagaggtatcacagaatctgggtcatctagatgacagagctaagaaatgtctatctctatatctaatrttacataaatatacatgcatacctatatttatttgtatgtataaatctgtagaggtct

SEQ ID NO: 371016 - DNA, 502 bp, Homo sapiens
tattttcttttatgttcatacatttattaacctgtcagttaatttatttatacctgtatggaatcttggattactattttattcaatattacataagccattattactgatatatttcttgatactcaaactactctagatttagcaaacaggagccccttcaagctgacttctgtctcttcttgacatgtcttgttacttctttgggaactttttaaatttttgtcacaaaaatgtgttgtagactcatcttgtacttttcctgatccacccttgaagttagccattcaatgatttcctgaagcactctcattttcttttaatgggtgatggtgttttgagaccaaaatctatgtgcttggcatcctcattgatacagaggtatcacagaatctgggtcatctagatgacagagctaagaaatgtctatctctatatctaatgttacataaatatacatgcatrcctatatttatttgtatgtataaatctgtagaggtct

SEQ ID NO: 371017 - DNA, 488 bp, Homo sapiens
ttctaaaccaataaatgttgaagagcatatattgatcttagagtaagatggcattgacaaatattaagtcctcaaaaaggctagctattactactatttcttgttgtggaaattgggaatgtgatttgggagaaaaggggttcattttatctattacttactagatctgggctatgcacaaatctgaccaagtgaataataataatcagtcaaagctacattggaaaccaagatcctggcatatacatcaaacaaaatttatgtgaaaaaaattagcaatctattactttaamaagtgaattggcatgtttctttgagtctttatttatttttaatccaagaataaatagtgttagtgaacgattgatggggttgaggtctgttataaccaatatgtcacaggtaggcagggccaatgcccatgtaaagtgactttctccactgtcaggcaataaggctgagacatcctttggcaggagtcagaagta

SEQ ID NO: 371018 - DNA, 488 bp, Homo sapiens
ttctaaaccaataaatgttgaagagcatatattgatcttagagtaagatggcattgacaaatattaagtcctcaaaaaggctagctattactactatttcttgttgtggaaattgggaatgtgatttgggagaaaaggggttcattttatctattacttactagatctgggctatgcacaaatctgaccaagtgaataataataatcagtcaaagctacattggaaaccaagatcctggcatatacatcaaacaaaatttatgtgaaaaaaattagcaatctattactttaaaaagtgaattggcatgtttctttgagtctttatttatttttaatccaagaataaatagtgttagtgaacgattgatggggttgaggtctgttataaccaatatgtcacaggtaggcaggrccaatgcccatgtaaagtgactttctccactgtcaggcaataaggctgagacatcctttggcaggagtcagaagta

SEQ ID NO: 371019 - DNA, 494 bp, Homo sapiens
gtgacaggcccaccagaattcaagaatatttgaagtctaggttgtgccttctggtttctcaccaataacttaattctgggatgatgaatttggaaaaagaagttggttgtaattgttaaattgtaaagtcagtgaagtcagtaatctgcgatcaccttcagcacaaacacaaagtagctaakcttagttttattgcatcctgtcatttaccctttgatgactgttcatttgtatttttagaatcccataagtgaggtagcaccaaccaatgtacaagtcattccttacatcttgctgcataattcactctctattgaagcagaagtaacctcagcatgtaaaaaaacccaacatctttttgacacttcaacattttacaaagtattagtaagcaattttaaaaaatcatatatgatatccgaattgtacttgttaaatggcattatttgcaggaggatctaagagaaatacgcaattccaggttttgcacatta

SEQ ID NO: 371020 - DNA, 610 bp, Homo sapiens
agttctccttgcaaagatcttcagatatattcctaggtacttcactgtttttttggctatggtaagtgggatttacttcttgttttggctctcagttagaacattgttgttgtatatataaatagtactaatttttctacagtgattctgtatcttgaaacttcattgaagttatttatcacttctagatgttttttggtatagtctttagagtttactaygtaaagaattatatcataagcaaagagagatatttgatttcttctttttctaatttgataccttttactttattctcttccctgattgctttggctaggacttccagtactatgttaagtggtgagaatgggcatccctgccaagttccagttctcaaggggagtggttccagcctttgcccattcagtttgatgttggctatgaatttgtcatagatgactcttataattttgatatgttttcctttgatgcctagtttcttgagggtttttaaaatcatgaatggaagtttgattttataaaaagctttttctgcatctatcaagatgatcatatgggttttgtttttaattctatttatgtaacaaatcatgttattgatttgtgt

SEQ ID NO: 371021 - DNA, 560 bp, Homo sapiens
atatattcctaggtacttcactgtttttttggctatggtaagtgggatttacttcttgttttggctctcagttagaacattgttgttgtatatataaatagtactaatttttctacagtgattctgtatcttgaaacttcattgaagttatttatcacttctagatgttttttggtatagtctttagagtttactatgtaaagaattatatcataagcaaagagagatatttgatttcttctttttctaatttgataccttttactttattctcttccctgattgctttggctaggacttccagtactatgttaagtggtgagaatgggcatccctgccaagttccagttctcaaggggagtggttccagcctttgcccattcagtttgatgttggctatgaatttgtcatagatgactcttataattttgatatgttttcctttgatrcctagtttcttgagggtttttaaaatcatgaatggaagtttgattttataaaaagctttttctgcatctatcaagatgatcatatgggttttgtttttaattctatttatg

SEQ ID NO: 371022 - DNA, 610 bp, Homo sapiens
agttctccttgcaaagatcttcagatatattcctaggtacttcactgtttttttggctatggtaagtgggatttacttcttgttttggctctcagttagaacattgttgttgtatatataaatagtactaatttttctacagtgattctgtatcttgaaacttcattgaagttatttatcacttctagatgttttttggtatagtctttagagtttactatgtaaagaattatatcataagcaaagagagatatttgatttcttctttttctaatttgataccttttactttattctcttccctgattgctttggctaggacttccagtactatgttaagtggtgagaatgggcatccctgccaagttccagttctcaaggggagtggttccagcctttgcccattcagtttgatgttggctatgaatttgtcatagatgactcttataattttgatatgttttcctttgatgcctagtttcttgagggtttttaaaatcatgaatggaagtttgattttataaaaarctttttctgcatctatcaagatgatcatatgggttttgtttttaattctatttatgtaacaaatcatgttattgatttgtgt

SEQ ID NO: 371023 - DNA, 570 bp, Homo sapiens
ccagagtttaggagtaaggtgtttaccttccatgtatttgtgtagtagtgagatatcttagtattgatatctatatttattgcactgtgttctgacagtgtgctttgtatgatttcagtttttttgaattttattgagatttgctttatgactgagcatgtggtcaatcttagactatcttccatgtgcaaattagaagaatatatactctgtcaytgttggatggagtactctataaatgtctaatatgtcccattggtcaaagtttgagtttaagcccagaatttctttgttagtatttaccttgatgatctgtctaatgctgtcaatatgttgttgaagtctcccactattattatgtagctttatatatcttgtcataggtcaggaacaacttgttttatgaatctgggtgccccaatattgcgggtgtatatatttatgacacttcttgttgaagtgaaccctttctcattatgtaatgcccttctttgttgatttaaggtctgttttatctggtattagaattgcaactcctgctcttattttttgctctgtttgcatggtaga

SEQ ID NO: 371024 - DNA, 570 bp, Homo sapiens
ccagagtttaggagtaaggtgtttaccttccatgtatttgtgtagtagtgagatatcttagtattgatatctatatttattgcactgtgttctgacagtgtgctttgtatgatttcagtttttttgaattttattgagatttgctttatgactgagcatgtggtcaatcttagactatcttccatgtgcaaattagaagaatatatactctgtcattgttggatggagtactctataaatgtctaatatgtcccattggtcaaagtttgagtttaagcccagaatttctttgttagyatttaccttgatgatctgtctaatgctgtcaatatgttgttgaagtctcccactattattatgtagctttatatatcttgtcataggtcaggaacaacttgttttatgaatctgggtgccccaatattgcgggtgtatatatttatgacacttcttgttgaagtgaaccctttctcattatgtaatgcccttctttgttgatttaaggtctgttttatctggtattagaattgcaactcctgctcttattttttgctctgtttgcatggtaga

SEQ ID NO: 371025 - DNA, 560 bp, Homo sapiens
ctttgttagtatttaccttgatgatctgtctaatgctgtcaatatgttgttgaagtctcccactattattatgtagctttatatatcttgtcataggtcaggaacaacttgttttatgaatctgggtgccccaatattgcgggtgtatatatttatgacacttcttgttgaagtgaaccctttctcattatgtaatgcccttctttgttgatttaaggtctgttttatctggtattagaattgcaactcctgctcttattttttgctctgtttgcatggtagatctttatccctttacttggagcttgttggtattcttacatrtgagacaggtctcttaaagggagcaggcaagtgggtcttgtgtttttatccagccctctatgccttttacttggggggtttagataacttaaattcagagttagtattgctgtgtgaaattttgatattatcatcttgttgttagttagttgttttgtagacttgaacctcttataagaccagtctagtggtaatgaatttccttaacatttgcttgtctgagaataattttattt

SEQ ID NO: 371026 - DNA, 560 bp, Homo sapiens
ctttgttagtatttaccttgatgatctgtctaatgctgtcaatatgttgttgaagtctcccactattattatgtagctttatatatcttgtcataggtcaggaacaacttgttttatgaatctgggtgccccaatattgcgggtgtatatatttatgacacttcttgttgaagtgaaccctttctcattatgtaatgcccttctttgttgatttaaggtctgttttatctggtattagaattgcaactcctgctcttattttttgctctgtttgcatggtagatctttatccctttacttggagcttgttggtattcttacatatgagacaggtctcttaaagggagcaggcaastgggtcttgtgtttttatccagccctctatgccttttacttggggggtttagataacttaaattcagagttagtattgctgtgtgaaattttgatattatcatcttgttgttagttagttgttttgtagacttgaacctcttataagaccagtctagtggtaatgaatttccttaacatttgcttgtctgagaataattttattt

SEQ ID NO: 371027 - DNA, 565 bp, Homo sapiens
tagttaatacatcatgctctacatgataaagtaataagagagggaagtaatcaaaaatattatacaaatgcacatacgtatacacatatatgtaatatgtttacatctgtgtgtgtgtrtatatatatatgcataaatatactcataacaaaattaggagaaaacactcacggcaattactggcttcatttctgaaactggtaatgtgcttataactggtatttattactactttcctccactgtccattttgtgttccctttcctttcagcaagcattttatctggtcacagtctcacacttgatgaggtgacccaaaccttcactcttgaaggatctgagacattaataatcctgcttgaattgattgtaatttcttggaccttaatcgtaggtcatagaggcactaggatccccaaatggctgggcagccgtcttgacttccaataatggaatcatagttgtgtcttccaatggaagcatttctccctttggaactaagacctctaggacggcagggcacaaggtcttcaaacagaaagttcaaattttgttactaagtgat

SEQ ID NO: 371028 - DNA, 565 bp, Homo sapiens
tagttaatacatcatgctctacatgataaagtaataagagagggaagtaatcaaaaatattatacaaatgcacatacgtatacacatatatgtaatatgtttacatctgtgtgtgtgtatatatatatatgcataaatatactcataacaaaattaggagaaaacactcacggcaattactggcttcatttctgaaactggtaatgtgyttataactggtatttattactactttcctccactgtccattttgtgttccctttcctttcagcaagcattttatctggtcacagtctcacacttgatgaggtgacccaaaccttcactcttgaaggatctgagacattaataatcctgcttgaattgattgtaatttcttggaccttaatcgtaggtcatagaggcactaggatccccaaatggctgggcagccgtcttgacttccaataatggaatcatagttgtgtcttccaatggaagcatttctccctttggaactaagacctctaggacggcagggcacaaggtcttcaaacagaaagttcaaattttgttactaagtgat

SEQ ID NO: 371029 - DNA, 565 bp, Homo sapiens
tagttaatacatcatgctctacatgataaagtaataagagagggaagtaatcaaaaatattatacaaatgcacatacgtatacacatatatgtaatatgtttacatctgtgtgtgtgtatatatatatatgcataaatatactcataacaaaattaggagaaaacactcacggcaattactggcttcatttctgaaactggtaatgtgcttataactggtatttattactactttcytccactgtccattttgtgttccctttcctttcagcaagcattttatctggtcacagtctcacacttgatgaggtgacccaaaccttcactcttgaaggatctgagacattaataatcctgcttgaattgattgtaatttcttggaccttaatcgtaggtcatagaggcactaggatccccaaatggctgggcagccgtcttgacttccaataatggaatcatagttgtgtcttccaatggaagcatttctccctttggaactaagacctctaggacggcagggcacaaggtcttcaaacagaaagttcaaattttgttactaagtgat

SEQ ID NO: 371030 - DNA, 522 bp, Homo sapiens
gacagagctatgttattttcagaggctctaggaaggaatacattctttcccttttctggcttctgttggctgctggcattccttggattgtggctacattatttaaatcaaggctcacatcttcaaatctttctctgctcccttttcatattgacttcttctctgtgtgtggctgtgtgaaatcactgtctgcctttctcttataaaattacttgaggttgcagttagataacctttcctggataatccaggagaatcactgtgtttcaacatcgttaatttagtcacatctgcaaagatgcctttcccttataaaaagtaacatttacaggttccagagaatagaacctgatatctcttttttgggggagggggacattaatcaacctattgtagccaccttgcaatacatgattaattttcatttttatgaatgtgttggtaaagataaattatattatggtacwgtaaaaaaaaaaaacccaaagtattgatggctgaaaatgacaagggcttattttt

SEQ ID NO: 371031 - DNA, 600 bp, Homo sapiens
cacattttggacgcaaaaacatatttttaaaaatataaaaatctacaagaggatcatctctgcataaggttatgcatgtgacaaaatgtgcttttaagttctcattgatatacttaagctaaatagatgacaaagtgctctgttgacagtcttcttacaaaatagcttttattctcaaacacctcagcaggaaacgtttaaatcaaagaaaatgattcacttacctgaagtagagttgtatagcaagcacatgtaacggagaggagttgataaaattgtagtaagtctgaaatttcttagcagggaatctgttgttgtccatattaacaagaaatagtgaaggggaaactgaaaggagccaaggcttcaatcaggaaggaatctttaaatgacaatctcaggcctcaaagcctagtgtmttgtgcttcatgacatgtacagacaattgtcatcaaagcgttcctttgggatcattttatatccacttatataacaatacacattctcacattttagggatgacatatttaaaacatatgatagagagaaaaagcatgtggaacatttatttacttaacgtatatttactatggtatttaa

SEQ ID NO: 371032 - DNA, 545 bp, Homo sapiens
agaagctcctcactctgaaaagaaaatgtcaaagcaaggaaggatatcagcaatgttcagaggagaatgacgtgttttcagttatggaaattagtccataattgaatgaagaagagatagatccaatagtattatagtacatatattataatgatggagatagaaaaagataaaagtgaagacagaagccatcaagaaacagacaagattggaaaccaggatacaggagaaaggacaaaatatcttttacttattacaaawtagtattttacttttataaaaaatatttaaatcataagtcttgcatttctcattctcttctatttttttcagccggtcagtgggaaaaaggtagccccttgatatccttgtaatattagaattacacaggctaagtattgcagtaggagctgttatataaaatatctgatgtgttatgtgtgtataagcagaatagtttcctgcccggagggcagtttctcctcttgacatctccagtccatttgtctagcacctgacaacactactattggcagtcatgtcat

SEQ ID NO: 371033 - DNA, 432 bp, Homo sapiens
tttatggtattacttccaaaaatcaataaacccagtgtgataatgagacaatatcagacaaacactaattgaatggctttctagaaaaatgcctgatcatattccttcaaaagtgtcaaggtygtgaaaaataagaaaaagttataaaactgtcatagacaagaacagactaaggagacataacggctaaatgcaacattgtatcctggattggatctttgaatagacgaaaagggccttaaagagaaaactggtaaaatcagaataaatcagtaatttacttaatagtattgtatgaatactaatgtatacttttagtaaatattctgtaagtttgtaagacattaacagtacaaagttgtaagttttataataactctctgtattcttttcaactttctataaatccaaattattaatgcttcaggactt

SEQ ID NO: 371034 - DNA, 610 bp, Homo sapiens
attagatctaaagagagagagagggataaacttcaatacagtaatagttggagagttcaacatccttcttctgcattagaaagtttatttacacagaaaacaaagaaatactagcatttagctgcacactagacttctatagaaaattttattcagcagctagaaaacatatcctcctcatcagtatatggaacttttttttatgatagaccatatggtaggacaaaaaagaagtcttaacaatgtttagaaaatgaaaatcatatctaatttattctcagatagaaatagaatagcattaatattcaataacaagaggaacttcagaaactgtatgagtacatagaaattatacaatacgcttctgaatgaccactgagtcaaggaagaaattaaggaaaaaagagttttaaagttgaarcaaatgaaaatcaaaacacaacttaccaaaatctataggatactgcaaaagccgttataaaaaggaagtttatagcaatatacacatattgaaaaatagaagattctaaataaactatctaaaatgtatctcagggaactagaaatagaataaaagaaacaataaagaacagagcagaactaaataaaa

SEQ ID NO: 371035 - DNA, 583 bp, Homo sapiens
aagtcaaagccagagcaattaggcaagagaaagaaataaatgtcatctaaattaaaaaagagaaagtcgagttgttcccctttgcagaacataaaactttatgtctacaaaaaacctagactccaccaaaatctcagatctgttaaaaaaaaaataagtaaaattgcaggatacaaaatcagcataaaagaatcactaatgtttctgtacaccaataattaactacatggaaaagaaattaagaatccaaactcatttataacagctacaaaagaataaaatacctagaaataaatttaaccaagaagatgaaaggcctctacaaggaaaacaacaaaattctgataaaaaraattagagaacacaagcaaagacaaaaacattccatgctcatggattgaaaaaaattcacatgatcaaagtaccacactacccaaagcaatctacagagtcaatgcaatccctatcaaaataataatggcaaatattacagaaatggaaaaaaaaatcaaaaattcatgtgaaacagaaagagagcccaaatagccaaagcaattctgagtaaaaagaagacagctggagg

SEQ ID NO: 371036 - DNA, 659 bp, Homo sapiens
aactcccaactacaaagttatcatgttaaattactgaattacttcttgagaaattatcaccagtaatgaaacaaatcaagacatgtgccttccaatatgatgtacagcatcacttattcagcatttttttcagttaccataattagaaaattattatgacataaaattacccaaattcatattgagagatattgtataaagctgctatgwactcttcaaaaatgtcagtgccaaagatagaaaacaaaaaacaaacaaacaaaaaaccagaaagattcaggaagtatgtgagactgaaagaaattaaaataggataactgactgcaatgcataattctgaattttcctgttcagtaaaggacgttattgagacaaatggagaaattaataaaatctgtagattagattatcatgttgtaaaggtgttaattttgttgtactgtgattatgtgttttccactgttcctgatgcctagacaaaaagagtggatgaaaccatgtgagaatttagtaaatacagatgacctgacatgcagtgtctgaggtaatatttttataattgcttcagaaaagaaaagagtcttttcttttgctgtagtccaggtcccgtaccattacagcttcttttccttcttggctgagtacaatcttatgaaatc

SEQ ID NO: 371037 - DNA, 533 bp, Homo sapiens
tttttggtctctactaaaaatacaaaaattagctgggcatggtggcggctgcctataattccaggtactagggaggctgaggcaggagaatcacttgaacctgggaggcagaagttgcagtgagctgagattacgcactgcactccagcctgggtgactaagtgagactccgtttaaaaaaaaaaaaaagcttttacttttatttactatgtgccaggacattattctaagaatttttacatgtaacaattaacttttacagtttttatactcctttgtcttcttttctcgaaattttaataatttctgtgtatcattcttgggtcacctcttgctgtgaggctacaaaraggggtggaaagggttattagttttgaagtcaactggatatacattacttagtttgttgaataaattatcacattttctttttttttcctcttccttccattctcctttcctttctctctttggtgggtttttttacttttgttttcttctttcctacactgttcctgccttatttctttttc

SEQ ID NO: 371038 - DNA, 546 bp, Homo sapiens
tagttttagcattccatgtctaaggaaacaaacatggytattgtggataataaaacaatagtagtgaaatataaaaaaaagacacttgaacagttcctgaatagtgaattttgctcccaagatgcatcctggcacactatagatggtaaggaacaataatgaattgacttttattgtcattgatttgttgctatggtgactttttgggatgacagaagtcagcatagtcaaagtgactctaattcgggagtctgtgatccaaaccagagacaaatgaacattgtacagaaattagggacctcattttaatctcctatagatgctgtttattataatattacatttgttttgatagtttttgttgttgttgttgttcacagaaatttacaaattcaccatgaatccactctggaatattcaagagctagtgttcatctagcacaactgataacactaggaaacaatgcctaaaatagcttttggaacatagaatggagaatatttattacaagaattgaatgaagtctggggggtgacaacttagtg

SEQ ID NO: 371039 - DNA, 550 bp, Homo sapiens
agtatttctaagtctggcaatgccattaaacagtctagatgaccttaagtgaccttaggttggcctcactttcctcagctgcaaaatgaaggctttggattaaaccatctctaagcaatttcacctcaaaaatcttacggttctttttagcattgctgtgtctttctttccccagagagtgattccttggactaattggaaataaggtaaaggtttatactgaaaaaggaattggtaggcgacaattcatttgtattactgtatttcttcagagacaatctggarcatatcttttttgtcaaatgtgagatttatttaaaagagatttagtgcaacacagatcaaccacaatttagccatcttcagggaaaagagaaaataaacacagcacagttgtgagtagtaaatggcatattgtaagtttcagcacaaaatgatccaacagaaagtctaatataagtatcaaactattacatatgatatgatatctatttacaacttttctctccataaaatacatttctattggggtttattcattataaaaatt

SEQ ID NO: 371040 - DNA, 604 bp, Homo sapiens
tagtctaacttcagcaagaatatctctgtaggggtaattgtaatatctggtaaatagtaagcataatttatagcttaagagagatttacactaatttatacttgaccagaaattaaaaaaatatgtcaatgaaaatattgttacaataaacaactcaggaaatgggaattgtaaagctcagagcatggctccctaagtttcatttaagtaagatcagaatttttggaatacttcattttaaatcatgcrtattcagaacactggctaatggaataaagtttagtaatatatttaaatatgcagtctcaaaaatgttgtcactatgaaacatacaaaaacaaccaggagtatttaacttgaatacacagtctaagtagatgtacatatacataacccattacaaagtcctaaaaccgaaatcacttcattttatcagtagagtctgaaggccattcagtcatttgtttttcccctgggatattagcactattgcaaaacccaaaaagaatattttttccacaatctaatttttttgactaatctgtttgactttctgacattacatttgcattttttagtaacctctacagttataaaacattgc

SEQ ID NO: 371041 - DNA, 598 bp, Homo sapiens
ccacttagactgtgcatctactatagactactaagtgtagacttcctactctgatccattgttctacttgtttattattatgtcaataacaccatcttgattaatgaagctatattataagccttataatattttatttttatattttaaaattatatttacatatataaacatttcatatttacataatataaaatatttacgttttatcatacttttatattaaatttaaaatttatattttatgtagttatatattaaatacataaatatataattcttattataagaaatcaggcaatgtatgtcctccaaatttatggttgcttttagtgttgttttgactattctaggtcctttgaatttccagaataattggttagtccatttgtaacaaaytggttgttgggattttttattggggtttctttgaatctatagaataattggataacaaacattctaacaatatgtaatcttccaatccatgaaaactatttgtcttgccatagaccttctttaccatttctcccagaaatggttttaatgtttagtgcagatatattgcatgttgtccactaaattcattgctatgatt

SEQ ID NO: 371042 - DNA, 598 bp, Homo sapiens
ccacttagactgtgcatctactatagactactaagtgtagacttcctactctgatccattgttctacttgtttattattatgtcaataacaccatcttgattaatgaagctatattataagccttataatattttatttttatattttaaaattatatttacatatataaacatttcatatttacataatataaaatatttacgttttatcatacttttatattaaatttaaaatttatattttatgtagttatatattaaatacataaatatataattcttattataagaaatcaggcaatgtatgtcctccaaatttatggttgcttttagtgttgttttgactattctaggtcctttgaatttccagaataattggttagtccatttgtaacaaactggttgttgggattttttattggggtttctttgaatctatagaataattggataacaaacattctaacaatatrtaatcttccaatccatgaaaactatttgtcttgccatagaccttctttaccatttctcccagaaatggttttaatgtttagtgcagatatattgcatgttgtccactaaattcattgctatgatt

SEQ ID NO: 371043 - DNA, 535 bp, Homo sapiens
  misc_feature (1)...(535): n = A,T,C or G
cacattttcctgtcttcttctgggctctccaaactgttccaactactacctgttacccagttccaaagttgcttccacattntcaggtatctntagaacagcaccccaatctatggtatcaatttactgtattagtcagttctcatgctactgataaagacatacccaagacggggtaatttataaagaaaaatatatttaatggactcacagttccacatggctgggaagccctsacaattgtggcagaaggtgaaaggcacgttttacatggcagcagacaagagagaattgagaaccaagtgaaaggggtttcccctattaaaaccatcatatctcatgagacttattcactaccacaacaacagtgtgaggaaaaccacccccatgattcaattgtctcccaccaggtccctctcataacatgtgggaattacgggagctaaaattcaagatgagatttgtgtgagggcacagccaaagcatatcacttgttttggagtatgcattgcataaaggaatagaaatgtaactc

SEQ ID NO: 371044 - DNA, 613 bp, Homo sapiens
tagatgatttaaaatatgtaaagctatgacgcatagtaagtagtattgctaccatattacctgatgttaaaagaaatcattcacatagtgttatgttacatgtgaatagaatgtgctcctggagttgcacaaattagcagccttcatawgagcaacaaagttaaccataaaagtatgttcttatgaagagcaacatagctacctgttaatagccagatgtaaagttatcaaatattttatggcctaaacaatactgttataagccaactacaaagcacatttcataaattatttatattattgtattattcttcaaaaaacaattgggtctatctgaacaaaatctttctgccttatctgatcctctggatttggtttctagtacctatcagatttattttttccttcaagcaggatgaccctttttaactttgactttcattttggatctatattttttccctgtctacattttcccatgataccttggtactttcccaacttctccaaaaattgaatagcttctggctgtggtattttcacagcgaatttaataagattgagtgcagtgtcctactctttttgtgctttaccatgtcatattgtccattgc

SEQ ID NO: 371045 - DNA, 562 bp, Homo sapiens
tacctctgtatttaaaagtaatrttacttaggagttttaacttgagactatctgtcttatttcataagctttgaatttctgctttagctgcaatttagaataaggaacaatcttctacataataatgtagatttcatccccatttaaaagcattacatactcttccataggcaaattaggaacgtgctgtttttggcaaaataatgattttgcttcttgcttggtcaaatgtttttttaaaaatcaataattaactacattgttagaactcaactacaaaattagaattgtgaatctgattgctcatggacctgttggaaaggttactactctgtcctggtaagtatatccctgtattatgggatatacttcattcaaatacaatttgaatatccttctagaaatatctttagagatagatagaactttgaaatcccagctcattaaaaataatagagccacaacccataaaaactgctgccacctgtacaaatttcagatcaccaagggaatttttcctatagatcatcaacttatattaaagtttcaacttgagaaaaaa

SEQ ID NO: 371046 - DNA, 551 bp, Homo sapiens
gaacatctgccaaaaaggcaagccaaagtttaaaagaacaacaaaaacaaacaaataattatttgttccttaaaaatctgctttggtgcccttgataacaaaatgtgtgatatatgtttgatagcacaggttggtcagagaaactttagtaaggtatgagaaaagaacatacacagcatttccaaattaactgaagtggatgtcaaatttgaaattttggagaggtatctgtgcagcatttagcagaggcttaaaaggacctgaggatcttccagattttttggtgaggagcaaatccatctgacagggctcacggatccaggatctacatgctgtgatgacgagataacacctcaatttctgctccaactcttgctctgcatgtcaagaaaatttactcctgctttggcatctgatcatcaacagagaccagcaggattcataatctactacatgccttatgttgatgaaaaagatggtctaatgtcatcraaaatgaaatataatgaaataaatactaaagaaacatttggcaatttgcactttcactg

SEQ ID NO: 371047 - DNA, 588 bp, Homo sapiens
cttcccttgggtaggagagagaattccccaaccccttgcacttcccggttgaggggatgccccaccctgcttcagcttgccctccttgggctgcacccactgtccaaccagcccaataagatgaaccaggtacctcagttggaaatgcagaaataacccgcctyctgagttgatcttgctgggagctgcagaccaaagctgttcccattcagccaccacagacagtgtctgtctcttttcttgaaagtgaagcacctaaccaaggctttcttcctctactctgtcaccaagttgaaagcccatattggggatgaaaaaactgggtgaaatgatgggcgcaggatttccttcctccctacatgttcccccaagaagcatatgaaatttcccctattagtttccagaatggaattttcctggccagctcagtcccccaggagcaccaagaaatgtctgcccaccacggggttttcttatgatttttcttcaaaccaaggatttcactccttacaactaattcctgaaaaaagaaatgagtccacttttgggctgaattctacagataaattttcctctgaagatacagaa

SEQ ID NO: 371048 - DNA, 619 bp, Homo sapiens
tgttctctgaggtgcccaaggcaaaataattgatattagatagctgagatttgacaaaccatgtctctgactctaaaggtctactatctcatttctcttccaaccgccccccggccttcatctttccttttttttattatggttttaaagatgttaaaatctattacctaccctaaggaaataatgtgacgtttggtgacaagaaagctactaagatttatggaggtagttgggggtaaccaggcattataaatcatctttgaacccactcctggaaatagcggacaacctaacagaattcatctgttttactgtttagtgacacccctattttatggagaaaatgatacagtcagaagacctcatggatatttttggtagtaatctcaaagatgtgggtaayagctggcatttcggtaccatttctttgggtaccagttgacgaaggaagagtggtacatacatttagcacatatctcattcttttaagataaagataaggttgttaatgaatatatttaaaaaaataaagacaggagacaaagctgagtatgacaatgtggagataatgatattttatggataaaaaaggttcactgagattaagaacaaactgatt

SEQ ID NO: 371049 - DNA, 605 bp, Homo sapiens
tgagcccttaccattatgtgatatgtcccaaggaaaaaaaaccaaactgcttttccttctatcatcstcattgcagaatacttcccctctggtcaccaaaatatgtagggatttctccccaccagccagaatcagttttccagtggacaccagctggatgttctataattcaactctgacactgtctatccagagttagcatcagatccaacagcttagccccacaagactgccccacacttcagatgccaagcacaagtcccaggttgtgacctgtatttctgaccaactggctttatataaattgggggttctcactgccctttccctggattcgattagttaactagagtgactcacagaactcggggaaaaacacttatatttacttattgtctcagtctgttagggctgctataaaagataccttagattgggtaatttataaataataaacacttttttttttacagttctagagactgggaagttcaagatcaaggcaccagcagattcagtgtctggtgagggctactctctccttccaacatggcattttcttgctgcatcctcacatggtagaaggggctgaaagggctgggcac

SEQ ID NO: 371050 - DNA, 521 bp, Homo sapiens
aagctgaaattagaattcattaaagaatttggatgacacaggagcacctgggaacactgctttggagactgtggtgttagacactcagcccaaagtggccacatcttaatgtggtagggatgcaggtggtgctgctgtgttggggcaccattgacctagcatcatgctttgtagctttggcctagcagggtagcattaaggtgctgtagttttggctaagtgactctgaggagcacagtgggagcctgacaccagcaacaaccrtaaggctccttctataagtcttgggagccccagcttcagttattactacatggctactgggaggcctgagctcttgggcacacacaggacatctccatggctcctgggaacagttgggaagacaccaaggggaagtgaaggggccacaatagtgtgtgaaggaaaaatcagagaaatactgttcactttaatgcgatcttctttttacctttcagaccaggcttgggaaaacacaggcaatgcataaacaagatagg

SEQ ID NO: 371051 - DNA, 602 bp, Homo sapiens
atgttgtgcaggccaccagtggtgtccctgacagggagagggtcagatataatttgatttgggaaaatgaagaaaaataaatgtgacatttattacattctgtttccacacagcatcaatgatcacattaatcttactgccatgagcagggagacctggtcagagagtttaagagacttgctcagagctacacagcaggtaaatggagggtcatggcttggacccaggttttctgactcaaatctacttctctttccactaccctgaaattgtgttgtaataattgaatagatccttttttaataccaaaattataccatattcttcaactatgcattttgatttctggcaaaaacatgcctatttctaaacaacctattatagttttgcctaggtcttaaacagatatcaaattaatayattggaaggagataaatttctccctgcctcaaacactgtgtattcacattaggagagatgactgcaggagaagagacagtcaagacatttgtggatctttagtttggcattcagtgggacattgatttaaacttctcatttttttttctcaagaaaaaaaatttaacaagaagaggcaaaac

SEQ ID NO: 371052 - DNA, 602 bp, Homo sapiens
atgttgtgcaggccaccagtggtgtccctgacagggagagggtcagatataatttgatttgggaaaatgaagaaaaataaatgtgacatttattacattctgtttccacacagcatcaatgatcacattaatcttactgccatgagcagggagacctggtcagagagtttaagagacttgctcagagctacacagcaggtaaatggagggtcatggcttggacccaggttttctgactcaaatctacttctctttccactaccctgaaattgtgttgtaataattgaatagatccttttttaataccaaaattataccatattcttcaactatgcattttgatttctggcaaaaacatgcctatttctaaacaacctattatagttttgcctaggtcttaaacagatatcaaattaatatattggaaggagataaatttctccctgcctcaaacactgtrtattcacattaggagagatgactgcaggagaagagacagtcaagacatttgtggatctttagtttggcattcagtgggacattgatttaaacttctcatttttttttctcaagaaaaaaaatttaacaagaagaggcaaaac

SEQ ID NO: 371053 - DNA, 602 bp, Homo sapiens
atgttgtgcaggccaccagtggtgtccctgacagggagagggtcagatataatttgatttgggaaaatgaagaaaaataaatgtgacatttattacattctgtttccacacagcatcaatgatcacattaatcttactgccatgagcagggagacctggtcagagagtttaagagacttgctcagagctacacagcaggtaaatggagggtcatggcttggacccaggttttctgactcaaatctacttctctttccactaccctgaaattgtgttgtaataattgaatagatccttttttaataccaaaattataccatattcttcaactatgcattttgatttctggcaaaaacatgcctatttctaaacaacctattatagttttgcctaggtcttaaacagatatcaaattaatatattggaaggagataaatttctccctgcctcaaacactgtgtattcacattaggagagatgactgcaggagaagagacagtcaagacatttgtggatctttagtttggcatwcagtgggacattgatttaaacttctcatttttttttctcaagaaaaaaaatttaacaagaagaggcaaaac

SEQ ID NO: 371054 - DNA, 613 bp, Homo sapiens
cttcaattttttggaggagtttgtgaaagattgatatttgttctttaaatgtttggtagaattaagctgtaagaccattaggtcctggactttatgggagactttttattactgtttaaataaccttacttgttattagcctgttcatattttctgtttcttcatcattcagtcttggtaggttatatgtgtcttatttatttatttccaggctatccatttttttggtatataattgtccataatagtctcttatgaccctttgaattctgtggtatcagttgtaatatttcctttttcatttctggttttatttacttgagtcttctttttttcttagtctagctaatttttttctattttgtttattttttcaagaagctaactcttcattggccttttcccccccatatgtaattttatttatataaaatgtccagtacagrgaaatgcagacaaagtaggttatttgttgcttaggtctgggggagttgatgggagggaatagaagtgtgatacttaaataatacaggcttcttttgaggtaataaaaatattctaaaattgactgtggtgttacttgcacatacaagtgagtatgtaaaaaacactg

SEQ ID NO: 371055 - DNA, 536 bp, Homo sapiens
ttccctttttagctggggaatcagctttttcttcaaggagtcctggttcctttcagtggtatataatatttgaatcccaaatctsgtcagtgaacatgctaattcctgagctgttattgctttcaagcctttttagtagacaagagctagggaatctgtattaaaacacccataagttaattgtgaaatttccaattccaatttaaatttaatagggtttttacttaacttacaaaattatacatttgcttctttccttttcagtgaaaatcttaattcctaataacaagatatttttatagctttatcttccatatatataatgtataagtataaatagttaaaaataataataccaatactactactaacagttagattactaaattgtttaaggtttttttttttttttttttgcccttaaaaataactcattaaataaatatggcccatatactgggtcttaaagccatttgagttatttcttttttctgtgtggtaaattatcttttctaatgacttatacaacacaacta

SEQ ID NO: 371056 - DNA, 571 bp, Homo sapiens
tggtcactaacaagtatttctccaaagagcctagtgtttgactgaatgctatatttttcaagaaattttatctgygtgtagacagagctttggtcttgtttacataaagcattcaaacattttgacaaattaactgtcatctgccaagccaaagtccaagaacttcctcagggaagaagttggacacaattagcagcttaacaaaacacagctgcaatacagaaagtaccttaattctaatccccttaggctttcaacagaggaaaaaaaagaatgcaaccaaaaacatcccaagggtccctaatattgaggtcacaatattaaagggaagtttctgacaggtcctggaaacacctgccatatcagaggaatactgacagcccacatccccattcaatacacagcaactttgctcttctcctgaaccttagtctgtggtttgaattcatgatttacttagttaacattcctaacataccctttcccagacaaggtgaatatatcagtgtagtccatccatgagaagaaactattgatttttattatatttttattatggaaaagcagactt

SEQ ID NO: 371057 - DNA, 536 bp, Homo sapiens
ttccctttttagctggggaatcagctttttcttcaaggagtcctggttcctttcagtggtatataatatttgaatcccaaatctggtcagtgaacatgctaattcctgagctgttattgctttcaagcctttttagtagacaagagctagggaatctgtattaaaacacccataagttaattgtgaaatttccaattccaatttaaatttaatagggtttttacttaacttacraaattatacatttgcttctttccttttcagtgaaaatcttaattcctaataacaagatatttttatagctttatcttccatatatataatgtataagtataaatagttaaaaataataataccaatactactactaacagttagattactaaattgtttaaggtttttttttttttttttttgcccttaaaaataactcattaaataaatatggcccatatactgggtcttaaagccatttgagttatttcttttttctgtgtggtaaattatcttttctaatgacttatacaacacaacta

SEQ ID NO: 371058 - DNA, 582 bp, Homo sapiens
tatataattttctgaagtagaacctcctttttatgagctaaagcataaattccaatttttgccaatgttcaggattatcaggtcagaataactagtttaagtaaacattcataacatttccattattttgtgtttgaagagctgttctgattcaaatatatgccctatawctttgcaaagcattgtttttattattaccatacttgtatttttactacaaaagttcattgttgctgatgtatggtatttttcttgccatcaaattatttgctacatctatctaatccttttgccctgtgtataatatttcaatttagaaaagaatatcaatatgcagtttcctgtgctgagaatacttttatagtgaaaaaatctaatggcatattcaatcaccttattattgttatcagtatatctttatacaatggtaaatgtcagagaatgctaaagttctgagggaaaaaaaagggaggtcatccacaggggatacatatatagtgattattactgggttcatgttttcagtttaatcacttcctatgacccattcgccctgaggatatgactgttgaaacaaaatta

SEQ ID NO: 371059 - DNA, 569 bp, Homo sapiens
accacaagccaaactaaataggcccccccaaaaggagtctaggtaatcttctatacctcttatttctctatttactttgctcctataaagtaaatgcagtaggattagygctaagtaaaacaagacatctttggagtgactttcctgttgtcccagccaatctgccagaagtagaacaccttcccattagtcatgcaaccaagagacagacaggatcctgagtctctaaatccaagaccatctgtctgtcatgaccatggccagccacttcctccagcaccatggcagttcacccaccccgtgttctcccagagatccatgtaagaagacactccaggaaaatgtgctctgggtcctggtgcctgagtctgcttgcatcccaccccagtgaagtgagtgggagctagctatgaggctcaggatctctcttgccttttgacactggtctggatgatggccagcttttgtcccttcccatctgggtcccactgtggtcttacttcttcccaagggtgcctctaggtagggggtattcccagcatcagcctcccaagatagaaacaagcaga

SEQ ID NO: 371060 - DNA, 593 bp, Homo sapiens
caatgcttagcactttccctattgaccctatcagtatgtgcccacgtcgtatgtctcccatgcattcatttattcaagaaataagcatttcttgaacatcaactctatccaaagccgggcacttcgctaggcactgaggatacagatatgaaataagacattgatatggtttggatttgcatcctcacccaaatctcatgttgaagtgtaattcccaatgttgggggagggacctggtgggaagtgattggatcatgggagtggatttcccccttgctattcttgtgatagtgagttctcacgagatgttgtttaaaagtgtgcagcacttcccccttcagtctcttcctcctgctcctgttatgtaagacagcgtgctggcttcccctycttctgccatgattgtaagtttcctgaagcatccccaaacatgcttcctatacagcctgtggaactgtgagtcaattaagcctcttttcttcacaaattacccagtctcaggtgtgtcttcatagcagtgtgagaacagactaatacagacatgatctctagtgagagtgtgagaggccacagaaggcaataagtgatagcag

SEQ ID NO: 371061 - DNA, 593 bp, Homo sapiens
caatgcttagcactttccctattgaccctatcagtatgtgcccacgtcgtatgtctcccatgcattcatttattcaagaaataagcatttcttgaacatcaactctatccaaagccgggcacttcgctaggcactgaggatacagatatgaaataagacattgatatggtttggatttgcatcctcacccaaatctcatgttgaagtgtaattcccaatgttgggggagggacctggtgggaagtgattggatcatgggagtggatttcccccttgctattcttgtgatagtgagttctcacgagatgttgtttaaaagtgtgcagcacttcccccttcagtctcttcctcctgctcctgttatgtaagacagcgtgctggcttccccttcttctgccatgattgtaagtttcctgargcatccccaaacatgcttcctatacagcctgtggaactgtgagtcaattaagcctcttttcttcacaaattacccagtctcaggtgtgtcttcatagcagtgtgagaacagactaatacagacatgatctctagtgagagtgtgagaggccacagaaggcaataagtgatagcag

SEQ ID NO: 371062 - DNA, 548 bp, Homo sapiens
ctcatcataagattttctttcctctttattgcccctttatggcttagcaaagacaatgcaagtctaagagtgttttgaacaaaaaagaacatgagtatatgaatggaatatctatttattgaattgaatcattcacctctacctcccaaaatactttgccaagaagtgtgttattccaaacctcarttagtaaagctacttctgaaagcctcagccattgctttacacagacagtgggaatatgcagatgagagcgcagtctctgtgagagctggtgtagaatggtggtgaagactctggccctggccccagcctggctgcatttgaatctcagctcctccatttgaatcgcagctcctccacttgccagccatgtcacctttacttaatttccccatgtctcaaattactatctgtaaattagggttgacaataataatagttaacttgcagggttttgagaattaaaaataaacctgtattatattttacagtgcctgacacaaaataaatgcaaacatcaagagctggctataattatttggcat

SEQ ID NO: 371063 - DNA, 548 bp, Homo sapiens
ctcatcataagattttctttcctctttattgcccctttatggcttagcaaagacaatgcaagtctaagagtgttttgaacaaaaaagaacatgagtatatgaatggaatatctatttattgaattgaatcattcacctctacctcccaaaatactttgccaagaagtgtgttattccaaacctcagttagtaaagctacttctgaaagcctcagccattgctttacacagacagtgggaatatgcagatgagagcgcagtctctgtgagagctggtgtagaatggtggtgaagactctggccctggccccagcctggctgcatttgaatctcagctcctccatttgaatckcagctcctccacttgccagccatgtcacctttacttaatttccccatgtctcaaattactatctgtaaattagggttgacaataataatagttaacttgcagggttttgagaattaaaaataaacctgtattatattttacagtgcctgacacaaaataaatgcaaacatcaagagctggctataattatttggcat

SEQ ID NO: 371064 - DNA, 590 bp, Homo sapiens
catggttagcaaagatcagcgaggaacatgattcattcaataattcttgaatggggtgactgagttatgaatggagttcatcacagccagtcatttctgtctaaacagattacaagaggcattggatcaatttctttttcaagcaggcacttgtctaagggctaaatcytctacatctacttaccagggtgacaggttgaaatctgcttgttcatgtgagataaagaatcacctcacagagggcttagacaagggtggtaatacctgaaagctgtgtaagattattttgaggaaagaagtaaggatagaataactcttgactcacctccaggtcttttggtcagtcctgaaatttctacctcattgcttatttatttatttattttttgagacagagtcttgctctgttgcccaggctggagtgcagtggcactatctcggcttattgcaacctctgcctcccagtttcaggtgattctcaggctttagccaaccgagtagctgggattacaggtgtgtgccactacatctggctaaattttttatttttcatagagaaggggttttggcatgttggccaggctggtctt

SEQ ID NO: 371065 - DNA, 656 bp, Homo sapiens
acagtactcagtcttcacgttcattgtctttatgaattgcaaccccagaacttgtgctatgctgtattcatggaaaaacaaatgacttcatgcataatgaggctcatatcttgctaatctgtcttgtataaactaagtccctaaggtataacaatcatttttaactacacatttgtttagattttctgacatgcaactgtagtcatttaaaaagagcttatgcttttataatactgaaataagacattgatttgttattattacttttccggaaatgattccatctatttgcaaaaccgcaattgaactgaatcaccttaaataatgtaaataggtatcatgaataaggtaaaaattcagctgccccttaaaacatgccttattttctagtaaatttatgtttatatgccaattaagatgtgaggtcaaaatttatttcataaccccagaaaagagctgasgaattgtagctaggagtgcaaactgccaaacataagctctgacagctaaatgtaacctccttcccctccctcccatcctccccattctgttctctgtgcatgatcatgcagagctccatgggggaggaaatgaaagctctcaagtcccaggcagccccattgagactgcttcacaggacatttctgaggagattt

SEQ ID NO: 371066 - DNA, 625 bp, Homo sapiens
gcatttagttttccagatttagtgattccagttcccactgtaagttctgtcctacagagaagagtaatcacagagatcttcgaagatgttgggctcctctcataaatttatttctcacagtagtggtgaaagtcatgtcttctgaatcctctgagtatggctgagtatatcttaaatgatagttctgctataacattccagtctgcctaagctttgaatcccttcctctatgttaaaccaaggcatgtccagcatttctagtttgctcactgtgggccatcttctgatccatatttcagccaaccaaccaaaatgttagcgccatttctagccctcagaggtccaacattaaatgtagactctttgcttagtgggaccatatcaataactttggcctgatataacttatgaaagttgtcrtattcagaatggattcacttatgttacaagacaaaataaaacaaaacaaaatgaaataaaaacaactctgacaaatagcatggagaagcccatgaagagaagggttctcatgtacaaatgcccaatagcaaaaactatcaaaaaggctctgcgaaaagtgcaaccttgcacaaaggctaccatgacattacacaaaaaatacttc

SEQ ID NO: 371067 - DNA, 581 bp, Homo sapiens
attggctggggtattgcagcaacctcctaattggtctccctgactaccgtcttgcccactctagtctactcttcattaacagctaacatagtctttcttaaacgtggatctgatcacatcaatctcatggtaaaatactgccatgacttttcattccctttgtgacaaagtgtttagtatgtgaactccagcttaaatttccaacttcatctctctycttccttctgccttacccatccccaaaaatacagttcatgggctagccttactaaaccttttttcagttccaggttagttagggttctacacagaaacagaaccaataggatatatatatatacatatatgtgtgtgtgtgtgtgtgtatacatatacatatatatatatatatacacataaaataaagaattggctcacacaattatggagtttgagaagtcccaggatctgcagttggcaagctggagacctaggacagatggttgttaagtttctatctaagggcagaagaagacaatgttccagttcaagtagtctggctggcaaaattccctcttgatcaaacttttgttctattcagg

SEQ ID NO: 371068 - DNA, 495 bp, Homo sapiens
ttagaattagctgacaaggcatttaaaagttattataactgtattccatatgttcaaaacgttaagtagagaagtgaagatctgaaaagattcaaactgaatgtctatagatgygtattgcaatgtctgagatgaaaaatgcactggatgaaattaatggcaaattagacatcacagaagaaaaggtttagtgagcttgaaaacaactaaatagaaactatccagaatcaaacacagagagaaaagtgaattttaaaatatgaacacagcatcagtgagctgtgggaaagtttcaagtggaatccctcagtggagaagctagaggaaaaaaaatttgaagaaatagtagacaaaattttttcaaacctgataaaaactacagaccactgcggtgattaattttaggtgtcaaattgagtgggataaggattgtccagacagctggtagaacactatttcttggtgtatctgtgagggtgtttccaaaagaggtta

SEQ ID NO: 371069 - DNA, 625 bp, Homo sapiens
gattgattttatttcaaatgctttttttcgatcccaggttaaggtttcttttcttttgctgggtctcatctcatcgagatgcacctgagaaaaaaaattgagagctggaaaaagatggccaaacaatgtccacactgccctaggagaaccagtggggtggtgtttccacaccgtggggtcccggggctgtgctgacttgagaactggcagagggaggaagtgcgtgcgcggttccacctgatgacgtcaagcgtcctgagacctcctcagaagcattcatgaccagactaggagacagcagggcgtctaaatgttagggaagtaccccatatatccccattctctgggtcctaagtgaaacacatactcccttccaaatctgtgaagcctagtgataggtggttaaggcaaaccactcctacacacaaacacgcacacacacagcgatcacgtgttaaacagctcctgttcccaccgccgccatcgcacgctatcaccaaagcaacgagrcaaatccatcccctccaccggtcctagggcagaaactcctacttgagacccccacattgtccctttgtgagttatttgccttcgtttaagcttgcccttaatgttctattaactc

SEQ ID NO: 371070 - DNA, 532 bp, Homo sapiens
ttgtgagttatttgccttcgtttaagcttgcccttaatgttctattaactcttcaaaccgtttttggaaagagaaagtgaatgaatacatttattttatttttatgagaataaaaccactccaattgctctgggaaaggaggaaragggcataactctgccttttccaggcgggctagggccctgctggagaggaccctatgacttgccttctctgttctttagcctgcttgaggcaaagttgactcccactcacaatttgatttgctttcatctgtccaaggcctgctgttgtttcagatttaatcgttcagcctgagactccattccgtatagtgatctcaaagacctctgcctccttcttctaattagtcttactccaattgcagaagccaacttatattttccttctgcattcttttctgggcagcatgcccaaggttaaagaacacacacagttgtactctggcttgatctttaaaagtgcttgttctttcttcccttctgccttgtaaaatgtctcctttctctca

SEQ ID NO: 371071 - DNA, 532 bp, Homo sapiens
ttgtgagttatttgccttcgtttaagcttgcccttaatgttctattaactcttcaaaccgtttttggaaagagaaagtgaatgaatacatttattttatttttatgagaataaaaccactccaattgctctgggaaaggaggaagagggcataactctgccttttccaggcgggctagggccctgctggagaggaccctatgacttgccttctctgttctttagcctgcttgaggcaaagttgactcccactcacaatttgatttgctttcatctgtccaaggcctgctgttgtttcagatttaatcgttcagcctgagactccattccgtatagtgatctcaaagacctctgcctccttcttctaattagtcttactccaattgcagaagccaacttatattttccttctgcattcttttctgggcagcatgcccraggttaaagaacacacacagttgtactctggcttgatctttaaaagtgcttgttctttcttcccttctgccttgtaaaatgtctcctttctctca

SEQ ID NO: 371072 - DNA, 579 bp, Homo sapiens
cttcctcaaaaatcttcatctcacttaattattgcactacccaaaactctttggtttaccaagtcacaaatcaaatttaatagcacacagaaactaagtaatataggtccaatagatggtttgctagtttccctttaatttaagatgatgtccttcttagaagagattcatgtttttaattgtatgttttatttctccaagagggagcttatattgtctctacaaacagcttacctgttggcaataacagtgttcaagtgtgctatacagtagccttccagttgtagttttcaaggtgctagagacaactgttaagtatgttttacacgaggaaggagagtgttggctaatgcagtaggtcaattagktagggaggtttaagaatgcttccactgtacttatcctgtagcacttacatactgtaattacccattagggtatgtggctaagagagtgcactctgacatctgagttcaaaacctggctttgctacttccaagtcacataactttagacaagttatataacagctctgtgtctcagtttcttcatctggaaaataatcataataacagaatc

SEQ ID NO: 371073 - DNA, 579 bp, Homo sapiens
cttcctcaaaaatcttcatctcacttaattattgcactacccaaaactctttggtttaccaagtcacaaatcaaatttaatagcacacagaaactaagtaatataggtccaatagatggtttgctagtttccctttaatttaagatgatgtccttcttagaagagattcatgtttttaattgtatgttttatttctccaagagggagcttatattgtctctacaaacagcttacctgttggcaataacagtgttcaagtgtgctatacagtagccttccagttgtagttttcaaggtgctagagacaactgttaagtatgttttacacgaggaaggagagtgttggctaatgcagtaggtcaattaggtagggaggtttaagaatgcttccactgtacttatcctgtagcacttacataytgtaattacccattagggtatgtggctaagagagtgcactctgacatctgagttcaaaacctggctttgctacttccaagtcacataactttagacaagttatataacagctctgtgtctcagtttcttcatctggaaaataatcataataacagaatc

SEQ ID NO: 371074 - DNA, 587 bp, Homo sapiens
aagtgggattctttacacagatttccagacctcttcgaagggcagaaaactcctggtaatgtagtcagaatccttatttaaatgaagtcatcttctgaaaccttgtaagattgtccattttgaattcaaaatccttcacttacaggttttctccccaaagtttactttaaatatttaaaaaatccatcccattttcctcttgaatgccatgataaaattgagwgttttctctaaacttcctaatagagttgaaagcttttgtcaactagtggccaggactatgacatgctgagtattgaatcgtgggattatttgaactatttgtcctcagcatctttgtcacagataggtataagtggggcaggagggctctcccacccactaggaatgactgatggttctgcaattatcacattgcctctctaaaagtgataaattggcagccagcatcaggaagaggccatttcctgatggtctacacctgttgcactaaaatgttaattgaatgcagatgccagtgagaagcaacttcctgggcatgtgcattaagagacaaaatggcagactagaccttccaggggcagttc

SEQ ID NO: 371075 - DNA, 608 bp, Homo sapiens
aatccttcacttacaggttttctccccaaagtttactttaaatatttaaaaaatccatcccattttcctcttgaatgccatgataaaattgagagttttctctaaacttcctaatagagttgaaagcttttgtcaactagtggccaggactatgacatgctgagtattgaatcgtgggattatttgaactatttgtcctcagcatctttgtcacagataggtataagtggggcaggagggctctcccacccactaggaatgactgatggttctgcaattatcacattgcctctctaaaagtgataaattggcagccagcatcaggaagaggccatttcctgatggtctacacctgttgcactaaaatgttaattgaatgcagatgccagtgagaagcaacttcytgggcatgtgcattaagagacaaaatggcagactagaccttccaggggcagttcaccggaaaagggaagaacgcctcagatgggcaagtgtacaacttcctaaacacattgtacatgttcacttgccaagggtaaggagggcactgtgcatgcaagcagcccatgctaagggaagaatcacgggaaaaaggccagcctgtaaag

SEQ ID NO: 371076 - DNA, 582 bp, Homo sapiens
atgcattactgataatcttatctttgatcatcttggtaaaatgttgtcttccaggttactccactataaagttactatttttcccccttagtaattaaaaagtatttgtaaggtgataatttgagaccatgtaaatacattgttatttcttaagtttttacctaagagatttagaatccattgatgattcctgcctgaattatttattaccatgatgattgctgtcatagcccattgtatgcagctatgccagaataccacagactgggtaatttacaacaagcagaaatctatttggctcatgtgttctagaggctggaagtccaaggttgaggggccacttttttcctgygttatcccatggtgaaaggtatcaagtgggtgagggagagggaaggggaccaagcccatttttttgtaagcaacctacttcccggtaaatggtaataatccattcacaagagcagagccctcatgacctaattctcttaaaggttcaatctggcaacactgttgcacaggggattaagtttccaacatatgaaatttagagatgcattcaaactttggcagttgctaagg

SEQ ID NO: 371077 - DNA, 357 bp, Homo sapiens
catcagtaaatcttacacctaaactcttcaatatgcatattatttacttgacatccatatttatgttatttttcttacaatatgaatgaggtataatttatatgcaataaactacacacattcaagtcacacaattttacaagttttgacataagtatgtatacatgtargaatccaacacttcaatcaacatacggaaaatttgtttcacccacaaaaaaatttctcagatctttttgaaatccctccctctctctaatccctacataaccactgatctgttttttcaacagcatgtattattgttcactttttaaaattttatatggatgaaataatacagtatctgactacttt

SEQ ID NO: 371078 - DNA, 548 bp, Homo sapiens
tcaatttgtcagtttatcttatttttacattacagttccaaagaagttacatacatcagtaaatcttacacctaaactcttcaatatgcatattatttacttgacatccatatttatgttatttttcttacaatatgaatgaggtataatttatatgcaataaactacacacattcaagtcacacaattttacaagttttgacataagtatgtatacatgtaggaatccaacacttcaatcaacatacggaaaatttgtttcacccacaaaaaaatttctcaratctttttgaaatccctccctctctctaatccctacataaccactgatctgttttttcaacagcatgtattattgttcactttttaaaattttatatggatgaaataatacagtatctgactacttttgctcagcataatgcttttgagattcatccacattgttattttatcaacttatttttcctttttattgctgagtagtatttcattgtactcaaaaatgttgctgggaaaactggatatcattatgcagaagaatgaaa

SEQ ID NO: 371079 - DNA, 478 bp, Homo sapiens
tacagtatctgactacttttgctcagcataatgcttttgagattcatccacattgttattttatcaacttatttttcctttttattgctgagtagtatttcattgtactcaaaaatgttgctgggaaaactggatatcattatgcagaagaatgaaactagacccctgtctctcaacatatacaaaaatcaaatcaaaattatttctctctatattcatactacagtttatttaccatgctcttgttgatgagcaaactggactgtttgaagtttggtcaataataaaactgaattttacattttaaaataacttaaagactttaattggattgtttgtaactgaaaggataaatgcttgaggggatagatacctcattttccatgatgtgcttatttcacattgcatgcctgtattaaaccatgtcatgtacctcatgttggaggctcaratgaataaatctactgttcttgtattg

SEQ ID NO: 371080 - DNA, 580 bp, Homo sapiens
acttgaaagagatccagtggttttatttgtatgaaaatagaacagtgtgatgtttgccaaaaaagtgatataaactgcataaatataaatagcatcaaaaacaaggtttgtaagtattacatagtctgctagaccatatgttctacaatatagtcatggtttcctgagctttagatataaatctcccttttcgtctgactaatgttcatgtagagatttatttggtccatcaaacattactggatcagagtatatcaccttttaaatctctgatgtcttcctacattgacatcaatattcatctattcatattaccttgaaaatcacaattattttttaaaggttttcctctctcagaaggccctaacttctttctcataacctttcagtaagcaaacatgttgattttactcttctagtatctattgcatctaacccatcaactttcatccacaaatttcatagtayagtgcaaagagcactaaattagaaatcagaagagtagaatttactgtgattctttaagtgtatctccaaatctacccactatttttaggatattttggagatatgcattatg

SEQ ID NO: 371081 - DNA, 503 bp, Homo sapiens
aattacttagctgttgtcatgggaatgtggctaagaggaaatgaactgcatagtaacattattgttatttgctgccactaatacgttcataaaaatagggaaacacatgaagtctctgaaggacaagcctctcactagaaatttttctatttatgctttcgaaaaatctatccccaacaaagttgaaaacgataacaacaacaacaaagagtcgggtaaaacaatagctttaccagtatgcaccataatatcatatcagaactacaaaygggaattggaagcacattacatatgcaagaaaagtatgtatgtacttataaagatttccataaaatattgcagcacaaaaaggcattgttaatttatcttcacatactgtcatatattatttcagaattatttttaagtgcttccaacttaataaaatatgccattttttctattcttcttcactattacttaatttctttatgatattaacaaaaaattgagttacctactta

SEQ ID NO: 371082 - DNA, 608 bp, Homo sapiens
gggcccaggagtcccttttcgtccaaagactaatgaggtcccactttagcctcttggatgtctgccacaaccccttctcagtttcaggaatatttgaatatccacaattctgacaaatgcaacaactctaataacttctaagctatggtacatttgtatttagagattttgcataaacacctctgtagacattcacttagtttgctaaaacaaagaaacaactacagaaagcaagataccattttaaaaaygctagcttgtctccatttagacctttgagttcatctttctctactctactatattccctttgaagttgagttgtgtgaattctattatctaggttcctttgccattgtatttctttttgagattgcagtggcaaaagatcagaagatggaagagagagagcttaaggtattcagtcccctttgttactttcttaaaaggccttggtgaatgtactctcgaggccttgtactcctttatctgtgcttccagctcttagcaagcagtcaattacccacaattacaaactctacaggttctgataaaagtaaatttatgttgtcccttctggctgacaggtcgtataaaaattgagataa

SEQ ID NO: 371083 - DNA, 608 bp, Homo sapiens
gggcccaggagtcccttttcgtccaaagactaatgaggtcccactttagcctcttggatgtctgccacaaccccttctcagtttcaggaatatttgaatatccacaattctgacaaatgcaacaactctaataacttctaagctatggtacatttgtatttagagattttgcataaacacctctgtagacattcacttagtttgctaaaacaaagaaacaactacagaaagcaagataccattttaaaaatgctagcttgtctccatttagacctttgagttcatctttctctactctactatattccctttgaagttgagttgtgtgaattctattatctaggttcctttgccattgtatttctttttgagattgcagtggcaaaagatcagaagatggaagagagagagcttaaggtattcagtcccctttgttactttcttaaaaggccttggtgaatgtactctcraggccttgtactcctttatctgtgcttccagctcttagcaagcagtcaattacccacaattacaaactctacaggttctgataaaagtaaatttatgttgtcccttctggctgacaggtcgtataaaaattgagataa

SEQ ID NO: 371084 - DNA, 531 bp, Homo sapiens
taataagtaaggtcggcatagccaatgcctgaccttcccccatcccaarttataagagggaatggcttcttttgttatctgcattgcatataaaaatttcactacaattttatttggaaatatattttctattgctttttagcaaatcattggttaggctaactgattgctaatattgtatgtactaagtcatcctcctggcagacctcaatttttcattgcctgttatgcagatgtttactaaggaataaaaagatacctgtgggtaggtttctgtgatgacagcactttagtatcactaaaatattgttgaaaatgtaagaatatggagaatatttaattaatgggatgacaaagattctttgcttgatcaaactttagtcaggcttctaaaccttctcctaggcctatctgtgcatttcattgtaaaatctagattttgcaagaaacttgctaagttagtttagcaagaatcttcatcctcaatatctgattaggtccctcctcttgcaccattccccaggaggtatc

SEQ ID NO: 371085 - DNA, 352 bp, Homo sapiens
tacctagatttctcctcttttcccttcaggagctttcaaacatttgagagagaagttagctgtgttgtctctctattggctcagggaattacagcagtttatttctcctcttcttttaattcttgtttcagtctccaggttttgtttcactgaacttgcaagatggtcataaagtagagtcttcaacataattagtaagatttgyctgacaactcaatgtcatgacatacaaaatagcattgctgatttacatttacattatataaagaaaatatttattaaaagatttagctttatgtctttaacaaaattatggaatagttgaggactggatgcagtggcttacacctgt

SEQ ID NO: 371086 - DNA, 548 bp, Homo sapiens
tatctactggtggtggggattggggaccgggtttgaaccactcattattacaccattcccagaccatccttattgcacttttatagttaaaattgggcatggaaacacaagagatctccagtgaatcgcytaagcactcaacttattatttcctacaagtattgttgtaacagcaacctgtctcctcctaatttcagggtaattacccttgccagtatggtggctaccttctttgcccactgctcttttagcagaaggagccaaaaatcttcaaacaggagccatagcaaaaagttcaatgaaactcttattgtgtcttatgttggaaataccctctgggaatgaagaccttcaccacaactatggttttactttatctacctgcaggacttaagctatcactactatgaggatttataaggtatattatttccaggtatgatatatcaaataacttaacctttaaccaaggaacccatggtacagcaaattaggtacaccatgatcacataaccatggaacccaatgttcctatcatggatatcatc

SEQ ID NO: 371087 - DNA, 557 bp, Homo sapiens
gctcaggcctgattacaccagaagatctaatgaagcatttacaggctttcacctatgcatggaatcaccataaatgcaacagctacaaatgcagcctgagagaggagcactgtattgacaaatcaaatatgtgggcagcattaccacaactgatgcagttttcaaaaatagcagacaacttgataaaattctaaaccaaacaatgcacagccttctttaaatttatacagtagtgattccaaaataaaaacctagtgtattagaaccttgcaaagaagttttgtttatatcaaaaacagaagtggtctctgttatcagatgattrtaaatatgattgtattagggttctccagagtgacagaactaataggatatatgtttacataaaagggagtttagtagtgagaatgggctcacacgatcacaaggcgaagtcccaggatacgccgtctgcaagctggggaagaagccagtagtggctcaatctgagtcccaaagccttaaaagcagggaagccaacaatgcagccttcagtatgtggctgaaggcctgagagc

SEQ ID NO: 371088 - DNA, 666 bp, Homo sapiens
aacggtagttaaatttttagttatttgtgaaccctccatagaggttttccgtagaggttatactaatttatatttccaccaacagtgtctaagtgtttctttttctctgcagtctcaccatcatctgttacatttggaccttttaaataacagccattctgactgaggtaagatgatttctcattgcggttctagttttcatttctctgatgattagtgatgtttatcactttttcatatgtttgatgaccatttgcatatcttcctttgaaaaatgtctatttatgtcatttgcttgctttataatgaggttatttgtttgttgttgttgttgttattaagttgagttccctgtaaattagggattattagtcccctgtgggacatacagtttgtaartattttctcccattctgtaggttgtctgttcactctgttgattatgtattttgttgttagggagctttttcatttaagtcccaattgcctattttttgttgttgctcatgcttttgaggtcttagtcacgaattatttgcctagaccaatgtccacaagaattttccctagattttcttctagtatttgtatagtttcaggtcttatatttaagtcttaaatccatcttgagtaattttttgtatgtggtgacagatcggtatccag

SEQ ID NO: 371089 - DNA, 596 bp, Homo sapiens
gggtcttgctctcccagtccactgactcaaatgtcaatctcctctgacacacccggaaacgatactttaccaggtctctaggcatccttcaatgcaatcaagtagacacctaatattaaccatcacaacagttttcacttttacgaatgccaagtacaataatcaaaagttgcgaggatgtgggatggttatgtatagtgcaggactgtcctgctctgtccatctcaatgccagtcatagtgcaccccaatcattatgacaaccaaaattttcctgaaaatttccaaaactctaggtggcagaactccgctctaaataaatccactcaggatttggattctgctctggtgtaaaatgcatgtttcttagattcctatgaatacagttaaccacagaagatggttataattaaagatcttgtattctaaccttcacagagtctaacttagtaggactcaagtggggtttaaaaatctctgcttttttaacaagagttgaagatgaatctgatgyagatcctttgtggagatactttgagaaaacacttgaaaatatgtaaacctcctttgtgaaaagtagaaacttccatgggagta

SEQ ID NO: 371090 - DNA, 528 bp, Homo sapiens
accaagttatattgattatcctttttagtcagttaaaaatgatatacatcatcccaattatttaaatgaaaaataaggggattcaagattaagcaactagtccacagaaatccatctaataagtaggagagacaagaaaactcagttatatctaatatcaaagtcaatgttattaaatacttctatatacaattccaagaataatgagggaaaaattctaacaaagctatggttaaatgctgattatacacttactgacttgagagagtatttgaaatataaactgaaactgtagttatttacataagtacatgtgcactgacactgagagacactgacaaaacttaagtattttagggctatctatcactatctgtgcatttcataaatcaatgtgcacgtgtcttagagaraaactttctccacagacacacaaaaacagaaatatttaaaactaatgacctcactgtgagtaacatacttgagtatctttcatttaagcgtgctttggagcattttgattattat

SEQ ID NO: 371091 - DNA, 599 bp, Homo sapiens
gggattataaactgtacattaatcatttgcccacaagcagtagtaagagtgcattaactaaaactgagcagtatctgtttgtcactaaagaaactgagcagagtcacatgagaaaataaaccatccaggaaatggactgggtccaattaagaggaaaaaaatcacaaaacatcactatgttttttgtttgtttgttttactggaggaggtgtgatctacttaaagtgcttgattttaaactggtctacttgaaacaataatagtgtgtggagctcagtcaagagatattatagtttcagaggttccattaaatgctctcattccctatattttcaataaaagatttttaaattgattggctttaaagttgatcagaccaaaggaaatgtgacaaaaaataaccttgtaaaacagggagttaaatgacaaatgsaaacacaagtacacatgtatataattttgctaaacattttccaataaacctagaaaccactggtaccccacagaagttttggaagccttgagaagcatgtaaaaataatacaataaaagttaaaatttggagaaagaggtgtctcttatgtttaagctattatagt

SEQ ID NO: 371092 - DNA, 376 bp, Homo sapiens
ccgccctactgctacaactcaatcctatgcactgaccactgactattgtcttgatattcttctttctttagatgagggcagatcagaagacactaagctctaaacttacatgggataggaaagtacatattatgttccttacccsctactcaccaatggaggcctaaatgtagccatcacatggagtacattgtctaaggattctgcactgatttttatagcctatttttcctatgtcctggattttttcatttttagttgtatattatcattgtagtcataattattacattattatttgtatgaagataacctaggatgagtatgatacacttccacattaacttctttcttgttattgtttggtaatgtgtaa

SEQ ID NO: 371093 - DNA, 521 bp, Homo sapiens
tgggctttttaaatttaactgttattttaacttctttatacctacccattactaaatttgtcagtgttctaaaaaacaattaaaaataaagcttcaggaaatcaataatgcacttcagttagtaaggacaattctgtgtcaaatgccttattgtgttttgttggtaatagtaagtttaaataattatttaaacaaggtcaaagaatgataaatctatctgttcacaactgtaaatatttattcaattgctgagatttatcttgtgtcagggttaaaaagcaagactgctcttctartagcctactattattttaacgtatacatttagcttgttgctaaagaaaataggctaaaggatttttatttatttatttattatactgctattcgacaactctaatggatgcttcaagggaacactgaattcctgcataaaattttgtagcatattttatgagttgacacattgtttcgagtagtaagctcaatgttgcgtgaaaggcattgtatgtgtgagttct

SEQ ID NO: 371094 - DNA, 592 bp, Homo sapiens
agagaccttcatgacagcccctcccatcacaggcccagaggcccaggagggaaaagtggtttcctgggccaggtccagggcccccctgctatgtgcagcctagggacttggtgtcctgtgttccagctgctccagcagtggctaaaggggccaaggtacagttttggccatggcttcatggggtgcaagccccacaccttgacagctttcacatggtgttcagcctgtgggtgaccataagccaagaaccgaggtttgggaayctctggctagatttcataggatgtatggaaatgtctggatgtgcaggcagaattttgctacaggggcagggccctcatggagaatctctgtcagggcagcgaggaagagaaatgtggggttagagtccccacacagagtccccactgggacactgcctagtggagctgtgagaagagggccactgtcttccagaacccagaatggtagattcaccggcagcctgcactgtgcacctggaaaagccacagacactcaatgccagcccatgaaagcagccaagagggtgctttattctgcaaagccacaggggcggagctgcccaaggctg

SEQ ID NO: 371095 - DNA, 554 bp, Homo sapiens
ctatggctttgtggtatattttgaaatcaagtagtgtgataactccagctttattcttttggctcaggatgattttggctatttggagactcgtggttctatattaattttatgatttttttctatttctataaggaatatcattggtatttttataataattgcataattgccctaaatctgtagatcactgaccttttaaaaatattaattcttccagtccatgagcatttcccttttttgtgtgccccatttaattttttaatcagtgttttatagttttccttgtatagcactttcacttcttcggttaaattaattcctagatattttatatattgtgtctgttataaattggattagttcgttgagttttttyattcatttgctgttggcatctataaatgacaatttttgtatattggttctgtatcctgcaatgttactaaattcacttttcaattctaaaagttttttgttgatgtctttaggttgttgtaaatataatatcattttacctgtgaacaagatcaatttgacttcttccttcccaa

SEQ ID NO: 371096 - DNA, 584 bp, Homo sapiens
aaaagttaaatataaatttgagattttctaggaaagatcaatgacaastccagagagtggagctttgagccccaaggtcagaggcaaaaaacacataggataattacaaggccttgaaagctgatggagtttgcctagatacattttaaattttgggaatcctttctcttttgttttctctggttttaaagcagaatgtctgtaactattacttatgctttttctgtcattgcattttgggataaggtaacatgattctttaattatgcaagtccagggatggagaaggattgtttcccaagtcagattactcctagagcctcacccataggtgatttacataaattaaattatgagacgtgggactattgagctgatgagatttcaatgaaattttggactttgagttgatgctgtaataatgagacttttgaggaacttaggatgacataaatctattttgtagatgtgctctacatgaatcttcaagggacagaatgtggactcttttatgctagtcttccaccaggatacttaaactaaaaaagaatgactgttttaaatattaattgccctgatgaaca

SEQ ID NO: 371097 - DNA, 584 bp, Homo sapiens
aaaagttaaatataaatttgagattttctaggaaagatcaatgacaagtccagagagtggagctttgagccccaaggtcagaggcaaaaaacacataggataattacaaggccttgaaagctgatggagtttgcctagatacattttaaattttgggaatcctttctcttttgttttctctggttttaaagcagmatgtctgtaactattacttatgctttttctgtcattgcattttgggataaggtaacatgattctttaattatgcaagtccagggatggagaaggattgtttcccaagtcagattactcctagagcctcacccataggtgatttacataaattaaattatgagacgtgggactattgagctgatgagatttcaatgaaattttggactttgagttgatgctgtaataatgagacttttgaggaacttaggatgacataaatctattttgtagatgtgctctacatgaatcttcaagggacagaatgtggactcttttatgctagtcttccaccaggatacttaaactaaaaaagaatgactgttttaaatattaattgccctgatgaaca

SEQ ID NO: 371098 - DNA, 584 bp, Homo sapiens
aaaagttaaatataaatttgagattttctaggaaagatcaatgacaagtccagagagtggagctttgagccccaaggtcagaggcaaaaaacacataggataattacaaggccttgaaagctgatggagtttgcctagatacattttaaattttgggaatcctttctcttttgttttctctggttttaaagcagaatgtctgtaactattacttatgctttttctgtcattgcattttgggataaggtaacatgattctttaattatgcaagtccagggatggagaaggattgtttcccaagtcagattactcctagagcctcacccataggtgatttacataaattaaattatgagacrtgggactattgagctgatgagatttcaatgaaattttggactttgagttgatgctgtaataatgagacttttgaggaacttaggatgacataaatctattttgtagatgtgctctacatgaatcttcaagggacagaatgtggactcttttatgctagtcttccaccaggatacttaaactaaaaaagaatgactgttttaaatattaattgccctgatgaaca

SEQ ID NO: 371099 - DNA, 495 bp, Homo sapiens
tttgcccttcacatttagatcgacacttcacctaatattgatttttgtgaatggtgtgatgtaggtatgargtttattacgttttgtatataggctttcaagtaagccactgtcatttattttaaaaacaaacagaaaagacatatatcactctcctcatgctctgcataaaccactgtcatatagcaagtgtccaaaagtttcctgcctctctatactattccactggtgtattttttgtccttgaaccaagaacacactgtatcaattgctgaggttttacaataagtcttgggatcctgtggaattaatccttccgatttcatttttcacctacattgttttttgttaggcttcatcactcgaattttcatataaagtgaagaattagcttttcagttttcactaaaaagggtctttgtaaatttaattaggatttcatggaaagtatacatgaaattataaaaaaaaaaatttgacatttttacaatattg

SEQ ID NO: 371100 - DNA, 561 bp, Homo sapiens
cattgtgaaccctaaggtctttcctacccacaggagccacctataagggtgagctgagaaatttgctggggaaagcatcgtcacctaaggccaagaggaattgttctgggggttggttagtaagcaggagagagagagagagagagaggaaaaaccacacacggagttggatgcctccagccaaagaagacgaggcatagagatatcttaccactaaggaacatatctgagtcacgtggcaccaaatatgttagtggtggcaaatatcaatatctgagtcacttggcatcaaatatgttaccagtggaaggtatctgtgttaccagtggtgaatctgtataggtcagcagcaatctcaattcttccctcctcaggagaaagaatttgaggaacatattctccaaaagagaccaaagcaagtttcagagcaggagtgaaagtttattttaaaaggctttcraacaggaaagaaaggaaagtatgcttggaagatacccaagcaggtgacttgaaggacaagtgcagtgttgaaccatgatcctaggactttataggctgacc

SEQ ID NO: 371101 - DNA, 445 bp, Homo sapiens
gtgagctgttattgcaccactgcactccagcctgagtgacagcaagactcagtctcaaataaaaaggaaaaaagtgctcaacaccactttgcattaggaaaatgcaaatgaaaaccaccatgagatataatcataccccagttagaatggctagtatagaaagatgaaagataacaagcgttggtgaggatgagaagaaaaggaaaccctgtgcactattagtgttaatgtaaattagtrcagtcattatgaaaaaatatgaagttttctcaaaaagctaaaaatggaactaccaagtagatattttcactttgaagtttatcagagaaaaatacaacattgatgaaactggaaataattaggttaagtgaaataagccaggcacagaaagataaacatcgcatgttctcacatatttgtgagatgtaaaaatcaaaacaactga

SEQ ID NO: 371102 - DNA, 445 bp, Homo sapiens
gtgagctgttattgcaccactgcactccagcctgagtgacagcaagactcagtctcaaataaaaaggaaaaaagtgctcaacaccactttgcattaggaaaatgcaaatgaaaaccaccatgagatataatcataccccagttagaatggctagtatagaaagatgaaagataacaagcgttggtgaggatgagaagaaaaggaaaccctgtgcactattagtgttaatgtaaattagtacagtcattatgaaaaaatatgaagttttctcaaaaagctaaaaatggaactaccaagtagatattttcackttgaagtttatcagagaaaaatacaacattgatgaaactggaaataattaggttaagtgaaataagccaggcacagaaagataaacatcgcatgttctcacatatttgtgagatgtaaaaatcaaaacaactga

SEQ ID NO: 371103 - DNA, 495 bp, Homo sapiens
gctaccctggtttgatagctccccatttttaggatatgaggagtttcaaagaatagacatatctcaaatctctcaggaattctgagaggcactcagcatactcattggtttagagacaaatcttgatcagatttyattttgcattgtgattccttttttaaattcagtaagaattctatgagttctaagttttcagagaatttagccggacttagagcaatcttcttatgattattaaaggctaaatttagcttcttaataatcatatattcttgagttaattcctttttcattgttaaaaaagtgatgtaagtatctatatatctcttacctcacagtgttagtcttcaaacaagccactagaccacctaagaagaagcatgttaaatgctctagcaccacctggagggtgaagggatgtctgggtacattaaagagaccagtttcataacctattatatttatgcataaatgatgcagtgagagttctgtgta

SEQ ID NO: 371104 - DNA, 517 bp, Homo sapiens
aaaccattttattgatttatttctacgaacttttactaataccamggtttcaattatgtaaataaaatggaattttaatatttgacaggaaaaataaccccccaacttcaatcctttttacaaaataatcttttcaatgctgtgtaaggtctgtcaaatgtatgatagacatggcttgttgaatttccatcttgaattgtttttcctgatctttttcttatatatcagcttacagagtactttggcatctctaaaaatgactaatgagggttttgttagtattattatggcaggtaaatagatattatagatggatatcatagagttataattcatatgccataaaatgcacactttccaagtgtacaatgtggtttttaatatatccacaaggctgtgcaaccactgtcactaattcaggaacattttcatcatcccccaaagaaactattagtggttattttccagtccctcattcctccagctctggaaaccacatatcaattttctgtctcca

SEQ ID NO: 371105 - DNA, 364 bp, Homo sapiens
cataataggctgtctgcaagctgagaagcaaggaagccaggccaagtcccaaaacctcaaaagtaggtaagctgatagtgcagccttcgctctgtggttgaagttccaagagtaccaaagctgataaacttggagtttgatgttcaaggccaggaagcatccagcatgggagaaagatggaagccaggagacagccagtatagtctttccgtgttcttctgactgctttttattctggccacactggcagctgattaaattgcamccgcccagattgagggtgagtctgcctttcccagtccactgactcaaatgttaatctcctttggcaacattctcacagacacacccaggaatgatactt

SEQ ID NO: 371106 - DNA, 632 bp, Homo sapiens
ctctttgctggtttgtgtgacaacctgctagaaactctgctttgtcccaaaggggctttaaagagatgtacgctgcttcacaacatgagacagaactgcttgcaacttttctttgctcacaaagcaaatattctaccaatttagaaggccacttaaaccacccagatactatccttcagaataaattgaatacaaagggataagtctcctaaatacaaaatatcgtgataaaaataaggtgctttggttgaaatacttgggtgtcttacagcaatagaatatattctaaacagtgaaaatcctacatctccataattgtataatgcatattaacagattctaagagtttttaatttggagaataatrccctgtggtagaagacattcattttataatgatttgtgattaaggcatatcttcagagtcttagacatatcaaatacatgatggtaatttaatatttctgtaatcatatgtagttgcttattgtttcagaaaactaaattgaaaaagtatatcctttctaatttcttcaggtggctaattaacataagaaagtttattcagatattctcatctctttctccctatttaatttccactttcaaaaaagatggtgtgatttgaaata

SEQ ID NO: 371107 - DNA, 632 bp, Homo sapiens
ctctttgctggtttgtgtgacaacctgctagaaactctgctttgtcccaaaggggctttaaagagatgtacgctgcttcacaacatgagacagaactgcttgcaacttttctttgctcacaaagcaaatattctaccaatttagaaggccacttaaaccacccagatactatccttcagaataaattgaatacaaagggataagtctcctaaatacaaaatatcgtgataaaaataaggtgctttggttgaaatacttgggtgtcttacagcaatagaatatattctaaacagtgaaaatcctacatctccataattgtataatgcatattaacagattctaagagtttttaatttggagaataatgccctgtggtagaagacattcattttataatgatttgtgattaagrcatatcttcagagtcttagacatatcaaatacatgatggtaatttaatatttctgtaatcatatgtagttgcttattgtttcagaaaactaaattgaaaaagtatatcctttctaatttcttcaggtggctaattaacataagaaagtttattcagatattctcatctctttctccctatttaatttccactttcaaaaaagatggtgtgatttgaaata

SEQ ID NO: 371108 - DNA, 600 bp, Homo sapiens
cacttgtagtcaacaaagttaggctcatcacttgcagcaaggaagacagcataccatggagtaatgagtatataaaaattggggagtaatggaagaaacacaggkggttgggggcctggagtgagaaatagagtagtctaggttgaatgatcacagtttgtaaactagggaattgctggaacagttagtgttctctttagagaacccttgagaagctactgttatgtcaatctatctatggtattaccttgaaatatacgggtctgagcgaactagtgctataagtctacaatgggtatcattcagtacaatttatctgttttgcaaggcatggcacaatacgctttgaaaagttgtggtttctgtttcaattctcagttcccactctaacagactgggtgtcagcaaagacatttttcactataaatatgttagttgtataaacatcttgcctgctggttgttctatggtagatctttaattacatttctaatctcctttatggatattagacattgtacattgcaaaaaaattaatgaaagatttaaattaagtgcttcctcagcataattccttggcaaattatcttagctagacta

SEQ ID NO: 371109 - DNA, 600 bp, Homo sapiens
cacttgtagtcaacaaagttaggctcatcacttgcagcaaggaagacagcataccatggagtaatgagtatataaaaattggggagtaatggaagaaacacagggggttgggggcctggagtgagaaatagagtagtctaggttgaatgatcacagtttgtaaactagggaattgctggaacagttagtgttctctttagagaayccttgagaagctactgttatgtcaatctatctatggtattaccttgaaatatacgggtctgagcgaactagtgctataagtctacaatgggtatcattcagtacaatttatctgttttgcaaggcatggcacaatacgctttgaaaagttgtggtttctgtttcaattctcagttcccactctaacagactgggtgtcagcaaagacatttttcactataaatatgttagttgtataaacatcttgcctgctggttgttctatggtagatctttaattacatttctaatctcctttatggatattagacattgtacattgcaaaaaaattaatgaaagatttaaattaagtgcttcctcagcataattccttggcaaattatcttagctagacta

SEQ ID NO: 371110 - DNA, 510 bp, Homo sapiens
cttgcactccctagaacaacatacttagaattctatcctgaggaaatattgcagtagtgaaaatttcattgatttggcccttgtttttcttcattctgcccccccacctacatatatgcatgcggatgcgcgcgcgcacacacacacacacacacacacacacacacacacayaaaccttacctgaattctgatccctgatctgccagatcataaatctctaaaacaatctgcctatttgtaaagtagcaattaaaatatgtcttcacagtattgtaagggttaaaaaatgatgtttgtgaaaactcagcccattgtagatactaagaaaaggtttgttaaattcaaatcctttgtaatttttggctcaaggacttgtttaatagaatacaaatgagaaggactagagctggctttttgcttcatatatgtggaggaaacttcacagaagatcctaatggagacagttccaagaaaacattagaataatatctatgctctacaattaaat

SEQ ID NO: 371111 - DNA, 510 bp, Homo sapiens
cttgcactccctagaacaacatacttagaattctatcctgaggaaatattgcagtagtgaaaatttcattgatttggcccttgtttttcttcattctgcccccccacctacatatatgcatgcggatgcgcgcgcgcacacacacacacacacacacacacacacacacacatamaccttacctgaattctgatccctgatctgccagatcataaatctctaaaacaatctgcctatttgtaaagtagcaattaaaatatgtcttcacagtattgtaagggttaaaaaatgatgtttgtgaaaactcagcccattgtagatactaagaaaaggtttgttaaattcaaatcctttgtaatttttggctcaaggacttgtttaatagaatacaaatgagaaggactagagctggctttttgcttcatatatgtggaggaaacttcacagaagatcctaatggagacagttccaagaaaacattagaataatatctatgctctacaattaaat

SEQ ID NO: 371112 - DNA, 549 bp, Homo sapiens
taacctgtttttgaaactacctttgcaaaaattataaatgaggaaattatgacagtgaaacagattggacytaatccactccttcttgcttctaacctttaaactccttgttcattcctgggcttaggccgaactaactttgggaaggaattcatttcacagtttgactctgaaacaaaattgataatagctcttttctgaaaagatccccttgttgcctggggactaatctgcctttgcaggactaacaaattatctacaagattagaaattaaggttaggggtcatgcagcctctggcgccaagagtctgaacctccgcaaattgctcctggggaaaacatcattattgtaaaaccgaagctcggtgcttgagatattttgcagacccttcactggatggttgagctgacaccacccagacaagtaatctgggtcaactagttctgccatcccacccaggaacagaagatggcaagaaaacctgacttcaaccacactatgattccctgaccaacctgaccaatcagcactccccagttcccgagcc

SEQ ID NO: 371113 - DNA, 629 bp, Homo sapiens
gtaataaaggctccatccatctgaggaaggccctgaataccttccagaattgtccacctgaggatgctccggaagagacatttggccttgggctctcattccccactcattgagggtcttccagggttactacctctaactaccattgtgtgtatacygaatgggacccttcaggactctcagggcacagaactgaaaaagcctgaccagttggttgggttgagacactgtcagcaccaagagaactaaagcaaatactgaactgatcaccacagccatggctggaatcagaagtgaagccaagggaaaaggagattgggtagctgataaaacacagaagccattttgggttaggcataatggaaatatatttataattgatctacctgtgtttgaatctggactcgctcacttgctgtgtgggtcattttttaccagtttctcaatgttttaatttccctgtgtctctctttttgtttctccatgtattcattatacaatggaagtgatatgtgcttcatagcaaggatttaatagttagcgctattataggcaaagtgtttggtccatattacctggaagacagtaagttatatagaagaagaggaggcttgcaatctcctcacata

SEQ ID NO: 371114 - DNA, 629 bp, Homo sapiens
gtaataaaggctccatccatctgaggaaggccctgaataccttccagaattgtccacctgaggatgctccggaagagacatttggccttgggctctcattccccactcattgagggtcttccagggttactacctctaactaccattgtgtgtataccgaatgggacccttcaggactctcagggcacagaactgaaraagcctgaccagttggttgggttgagacactgtcagcaccaagagaactaaagcaaatactgaactgatcaccacagccatggctggaatcagaagtgaagccaagggaaaaggagattgggtagctgataaaacacagaagccattttgggttaggcataatggaaatatatttataattgatctacctgtgtttgaatctggactcgctcacttgctgtgtgggtcattttttaccagtttctcaatgttttaatttccctgtgtctctctttttgtttctccatgtattcattatacaatggaagtgatatgtgcttcatagcaaggatttaatagttagcgctattataggcaaagtgtttggtccatattacctggaagacagtaagttatatagaagaagaggaggcttgcaatctcctcacata

SEQ ID NO: 371115 - DNA, 629 bp, Homo sapiens
gtaataaaggctccatccatctgaggaaggccctgaataccttccagaattgtccacctgaggatgctccggaagagacatttggccttgggctctcattccccactcattgagggtcttccagggttactacctctaactaccattgtgtgtataccgaatgggacccttcaggactctcagggcacagaactgaaaaagcctgaccagttggttgggttgagacactgtcagcaccaagagaactaaagcaaatactraactgatcaccacagccatggctggaatcagaagtgaagccaagggaaaaggagattgggtagctgataaaacacagaagccattttgggttaggcataatggaaatatatttataattgatctacctgtgtttgaatctggactcgctcacttgctgtgtgggtcattttttaccagtttctcaatgttttaatttccctgtgtctctctttttgtttctccatgtattcattatacaatggaagtgatatgtgcttcatagcaaggatttaatagttagcgctattataggcaaagtgtttggtccatattacctggaagacagtaagttatatagaagaagaggaggcttgcaatctcctcacata

SEQ ID NO: 371116 - DNA, 610 bp, Homo sapiens
ttttgtcctttcctctgggagataattcacattccatctctccacagtgcttaccaatgcagtaaggcacaccagtacaagggagtttaaaatactccactgtcaatgaccaagacccactggcttgctcctccccttcttccctcagtatattatagttcagtctaatctggtgtgtagattccatggaaaagagaaaacccaggtagaagtctggagattatacctgaaagaaggcaaacagaagacgaaagttttcaagaatccagtatttatcatcccatatcatgaaggtagaggaacctggataaaatctagtgastaagaaattgtagcagaggatttagtacaacaagaacaattgtaagataacaactggttactttaagcaaaacaaaactggcacactagggacaaaattagtaagcataacacagtacttaaacattaatgataatgtacacagacaaacacacatacatacatacatacacatatatataatttatagtaagaagataaaatgttttcctaaaaattttccaaaataattacactgtaatattagtacattaattctaaacatactcaaaagagttaaaaaatggaa

SEQ ID NO: 371117 - DNA, 610 bp, Homo sapiens
ttttgtcctttcctctgggagataattcacattccatctctccacagtgcttaccaatgcagtaaggcacaccagtacaagggagtttaaaatactccactgtcaatgaccaagacccactggcttgctcctccccttcttccctcagtatattatagttcagtctaatctggtgtgtagattccatggaaaagagaaaacccaggtagaagtctggagattatacctgaaagaaggcaaacagaagacgaaagttttcaagaatccagtatttatcatcccatatcatgaaggtagaggaacctggataaaatctagtgactaagaaattgtagcagaggatttagtacaacaagaacaattgtaagataacaactggttactttaagcaaaacaaaactggcacactagggacaaaattagtaagcataacacagtacttaaacattaatgataatgtacacagacaaacacacatacatacatacatacacatatatataattyatagtaagaagataaaatgttttcctaaaaattttccaaaataattacactgtaatattagtacattaattctaaacatactcaaaagagttaaaaaatggaa

SEQ ID NO: 371118 - DNA, 518 bp, Homo sapiens
tacaacttatctataagtagtataaagcaggaattttaaaaatttaatctaaccatcattctttaacaggtgaatttaatcaatctatattattacaatttctgatgtatgtggacttatttctaacatctttattttgtgttttctgttaactacctctacttctttcttttctttttaatcccttacctttggttgatttgctaaagtattctatattttctacttaaatctgtgctagtttttaaaccttaratcttcatcttaacttgtataattagccatatattgttctaacaaagctattattccacattctgatcctcctcccaacatagcaatatttaacatcacccacaccctatcatattattttgtttaaaatattagtatatagaatttttttaactgcaggtttttttaactgtacataattaaatttaccaatacattatcagtttctatgtttgctgttgtttcttgcatcctttgccttcattcatgtctcatcttgcaaa

SEQ ID NO: 371119 - DNA, 473 bp, Homo sapiens
attcatctgggtcacttctgcacctggaggtgtcacccaaggaggatggagaacagcaaaaatgggtgcctgctccttcctctgggatctctgacctcgaggggcaccaacgtgatgccagtaggaacattcctgtatagggtgtctggtgacccctgttgggkagtctcactcagttgcagggtacaggaaccaggacccatttaacaaagcactttggctgtcccttggtggaggggatgtgctgtgctggggggaaacgcacttgtctaagttgcctggattcctcagagcttgcaggaggaaagactaagactgctggtccttggagaccatggccaaccctcccactaggggctcaggcccagagagatcagagttctgtccctgagcccttggttggagtcgttggagttcctgccgggaggccctgcccagtgaggagggatgagccagggtctggcctaaagagg

SEQ ID NO: 371120 - DNA, 629 bp, Homo sapiens
ggatttactttcatctctgaattgcatcaaatgtcgccagtgacatttagctgacacacaaggaggaggctggcatttttagactgtcagcatgttacagatgtagaagtggattgtgtaggggcatctggcttattgttaattagatggagacagcgaggcctcctccacgagcggctgaataagccccaccatagctctgcttcaaaccgacttcggaccccctcccagaaattaataaggctctgacagctttcccattgtgatagggaattcatttcagaagtttggggagcaaatgacaaagtgaaytgttctccatctgtggatttcttttatatttcacttatgccctgatgacttactgtcctcgtcttttgcaactggagcgataaagtgaagggaaaacagctagatttggacagcaattcacattagttcaacagttacacattcaacagataatttattgaatgcttactagctgcctgaaccctggttcatcccttaacctctctgcctcagttttcttatttgttaattgggataatcatagtcctacctcatagggttgttgtgaggattaaatgaattaaaatattcaaagggcttggaagagagcctggtac

SEQ ID NO: 371121 - DNA, 528 bp, Homo sapiens
caatgaaagttttgcttctacccccatgttacatgtattaaatgcaggactccagcccagctcagcttccacactagtagccctgcttagcccaggccctgcgaccagaggtgctgaggacacttgaaggggctgtcaaacatttgactggcagtgagaacatagggtagtccatcctgkggggtaaaggaggctgtaggtgcacagaagggagtgaagaagcccctaaagaaagaggcttctttcaaacagcgaaggaagtgctccctccattgtgccccaaccagttcagggaactggggagggaaagtggcctcaatcccactttcaagtctccaaccagctctctcctgaagacccaaagaacagttctcacccctccccccactggctgtatgcccctgggaaagtcacctgctctgtatacctcagtttcctctggtataaatccgaggtaaagatgggtaactatgtggcttcggagagggtagaatgcagaggtacttggagagtttgcggagtcagtgt

SEQ ID NO: 371122 - DNA, 593 bp, Homo sapiens
tattaggcctaatttacagataggaaacaggcagagaaagattaagtgacttgtccatggtcatatagctagaaagtggcagagttgagattcaaacccaagtgatctgactccagaatccatcctcttcaccacatccatcctaccttactgaagaaacagggcagtcccaaagaaaagaactccccttttttgatatttatgtgtcccccccacaaaacaaaaggccaagtcctgtctggtccacccagagggaaatcagccccatctgccttcacagacatccaatgccagtcaacttcttggacacttatccttaactatggacaaaagccaaggaccagtaaagattaaagaagcctccawccaacaggaggagagatgcagaaccacagagagaccacaataaagcaaccaaacaaaagagggaagctggaggagacagagataagtcagcaaaccggagggaaaaaaatcactattgatatcctcagagagataaatacagaggctgtatctatgttgtggggtggggggaaggaagaacagagaatgaacaagtatgatagctgaaattaaaaattcagtagaat

SEQ ID NO: 371123 - DNA, 556 bp, Homo sapiens
tagtcaactgatctttgataaaggtgtcaagaacacataatgggtcaagaatggtctctttatacttttaaatttggttttattttattctttgcctactcacatcagcagcaatagaaagattgtctcttcaatacatgattttggggaaattgggtatccacatgcagaagaatgaaactggacccttatctcacacctcacagaaaaatcagttcagatggattaaatatttaaatgtaagcctgaaatcataaaatactagaagaaaacatagaaagaaggcatctttacatttgtctgggcaatgttttcttggctatgacaccaaaagcacaggtaacaaatgcaaaaggatttgcataggattgtrtcaaactaaaaagctctgcacagcaaaggaaataatcaacagaggcaaaaggcaacctacagaatggggaaaatatatttgcaagccatacatctgataaggagttaatatccaaaatatgtaagaaatccaaacaactcaatagcaaaaaaaaaaaaaaagaccccctctcaaaatgggtta

SEQ ID NO: 371124 - DNA, 600 bp, Homo sapiens
tttttatctatctttttaattctagccatcctagtgggtgtgaagtggcatctcgttgtggttctgatttgtatttccctgacaattaataaygttgaacatcttttcatgtgttttctggccacttgtgtatcttctttggaaaaatgtctattcaagtcatttgactactttgaaattgtattttttttttactactgaatcgtaaaatttatttatatcttctagatacaagcctcttatcagttagatgacttacaagtattttcttccattctgtggtttgtcttttcactttcttggtggtgtcttttgtaacacaaaagttttgagttttgatgaagtccagttcatctgttttttttttcttttgtagtttgtattttttgtattacatctaagaagccactacctagaccaaggtcatgaagatttacatctagattttcttcttcaaagagttttatagttttagctcttatatgtaagtttttaattcatttttagttaatttttgcatatgtatgagatattatcttaattcattcttttacatgtgaatatccaacggtcccagcattatttgttgaaaagactata

SEQ ID NO: 371125 - DNA, 607 bp, Homo sapiens
gttgcatttaatgtgagagacagggctaaatgtgcttacttcatcttaactggaaccggaaccaaatgatcacttttaaattacatattcttcactatgcactgtattctacatggaagttcattcagaggaatcccagttaaacagttggtcccaacacatgtagactcagcatataagccacatttatttcaagagtaagtttgtaaaggtttggaactgtgggcgcttgctcagtgtgcagtttgtttctccaacctctgttgtactacatattcctatttaaatggtagatatgaaataaatgatagtttagtgacttgaaggtgaagaatcagaacctgagttatttaaatctgttactttatgtgccctcttagagattttatttgtgttaaaaatttaaaacagtaaaacaaagtgtgaattctgaggcacaatatttttgtttggtatgcatggtgcagttcatgtaaaaatgggagatattaatcccaaatygttacttgtctcttttataatcattctctgaatctttatggtgttcacactttcagaagtgtttttaatgtgtgacatttgttcaaactttgttaaaaaaattatc

SEQ ID NO: 371126 - DNA, 569 bp, Homo sapiens
ggtggtgctgcaaacttttaccaaggagcacaaactgcctaattgtcatctctctttttgttattagcagccgttgatgattactgactagatccattatttcttcagaatttgcatattagtaatatttatttatttatttatttatttattttgagacagtcttgcgccaatgcagtggcatgatcacggctcactgcagcctcgacttcccagctcacgtgatcctcctacctcaatctcccgagtagctgagactacaggcatgcaccaccaaggcaagctaattttttgtattttttgtagagatgaggtttccccatgttgcccaggctggtttcgaactcctgggctcaagcgatctgcccaccttggcctcccgaagtgctgggattayaggtgtgagcccctgcacttagctgtaatcgtttatcatttttttgtttgttagctggacttttataaagggtaacatcctttcataaactacttggttagcctgaagtactgttcattcagggaaggcagggtaaatgcttgattctccctatttgttttcagttttaaaa

SEQ ID NO: 371127 - DNA, 458 bp, Homo sapiens
ctgggaagccctcatatctgggatacaggtttgggcctggctataccagcctcactgtgcaaatatcaataagacagaagacaacatgtgagaaacagaataaagctcagggtagtaattgacatcatctagtcacctactacgcagaggcctcctgctaggtacattatktctattatctcattaaacatagcaatcctggaaaaaggaggatttatccatatttactgattaggaaactgaagcatagagagatgtagcttttcctaggtcatacaacaatattctggaccaagtccatcaatttgtctattcttgaagcaacacattacagaaagttggaaacaaagtaaaagaacttacaatttcatcatcccaacacagcaactattattttgcttatctcctgcatgtttggtacatacttgagattttattattcatacaatttggttttt

SEQ ID NO: 371128 - DNA, 559 bp, Homo sapiens
attgccttaccagtcaaaaatacaagtagtccatctgttcagtcccgaagtatatgccaggttcagaaatccagcataaactgagataaaagtggataatctgcataagcactcaatgtgataacacacagatgaattcatactcctgtcacccagactcttcctgctgaacattgtcaccctttgtagtgagtgagttcatagactgtatccaataacagtggatctttgagtatactattccctatatatttttaatgyctaagttcatttctgaatacaaaaatctttctgaagataaaagtcaaaaagttgttgaattaaaattaggatagagagagcatattcctctatgccccatttttaatatacaatgttcaagtacaagaagtatctcttcttttttgtcattgaaagaatgtagtcaacagtttttgaaattcattactaactggattacaggtaactctatctaaccatgtgggtttcaatggtcttcaatttccctaaaactcatacttcatctttaaaaacttaatgcatacaagaatacaactac

SEQ ID NO: 371129 - DNA, 548 bp, Homo sapiens
aagctgaggtatttaatgtgtgtctgagtgtgtatgtgcacatgccatgcaatctctatagcctcaaaacagttatgtttttaggtagaaagggagaacatctttataagtaatgataataatttgctgtatattttaaaatagcacttttattgatgatagttgcaatagtgatgacattagaaaactctaaattttaacttttaaaaatggtttttatacaaaaaacatttcactcaatatcaataataagagtactygtttttgaattatattttagttgactattttatgagcatactactattaatgttcttaatacagatatatattaatatatgtcattttatgtatagtcttccatcttaagttttgtcttactaaacatataagattttcgtttgatccaaatatagaaatagaatatgtttaattctgaactcaaaacaactttagataaacatattcttctcaaagtacaataatataaaagttacttataattatcataatatcagtatgcaaatatgtaccaacaacaactgtat

SEQ ID NO: 371130 - DNA, 541 bp, Homo sapiens
gtcaaattcacaaattatttgggacatgaagctaagagacaaaacaaaagttatctgaataacagcactgaagacttagggtccagatccctgcagtgggtaacaccctactgattgcaccagtctcccagttggaccacttttcctgttagctaagtcctaagactggggattaattagagctagactaaggcttagcagaygtgcaaccttacctcaggttgggtcaatacatgattaaaagaaagcaatctgtctcttactctatctgcctaggaaaggaaagtgaaagctaacaaaacaaaaaaagagaagtaaatacattcataaataaaaatggtagtttttaacataatttttcagtaactcatagaacaagcaaaccaaaaaataaaaaaataatttgaatatttgaattgtaatattaagaaattcagcttaacaagaatacccagtaactgcaattatacatgaaaacaatttcaaaacatatgcatgaaaagaatgtgaaaacatattctataagagccagagagcaaac

SEQ ID NO: 371131 - DNA, 664 bp, Homo sapiens
taatttgcagttggttaaagtagtaagactctctctaaaacttggagtcatcagacaggaatgttttaagataacagtgctatgtagcaagattgatggccagcaggcttgacttaacctttgccttgcatggcattgggtcttatttgtaatttggaatttcattgccataaggagtgtgtttgtcagtgttataatctccgttttacatgagcactggtcagttgtgcctaaactccaaaaagaagaggatatcatggggcatgtccaacctcccttaaacaatcatggctgaaaatttagttgtcaagatttgtgttggtcaagagggggtccattttcagctagtagggagcttagacttcatttttagtttacatcaaacagtgacttccttctttccagaaatttttctcttagtaaccaatttcaggaataagatggctgatttttgtgtcagtttcatctctctatggaccaaatttgcggaggtctcaagggaactaccaattaaatacgtcttacctagtatatttcctttctcttaggggtaccttccttcccgttcttgcctgcttttagtcactcttaactcttcataaggttgatttttatggtttttctccaagtttataatggtttytgaaatgaggccctttgtcat

SEQ ID NO: 371132 - DNA, 526 bp, Homo sapiens
agcttttggatttctaagcctttgtgaatcatgcatattttgtgaagataaatattctaggacatcgaagtacactgttgagagatttcaataaaatagaatatattagactacttaaaatttaaactgttgtgtcaggaaactttgaataggcatttactccaaagtatacctacctgtgaagcctgatgcaatgaaatttaggtatgtgtgcaggaagcctaattagagttaatgaagcctgatttcaattacacgctagcattctttaagaatttaaattttttacctttcyagttctgcaagttttgcacattttgtctctgctttctttttattcaagttttgcacattttgtctctgctttctttttattcaagttttgcacattttgtctctgttttgttatttatttctgtttgtgtgattttaaacacataatctgttagaatttaagtataataggcaagatcactttttaaatttaatgttatcatgtctaagttatgcagaaaactgaacttgt

SEQ ID NO: 371133 - DNA, 500 bp, Homo sapiens
  misc_feature (1)...(500): n = A,T,C or G
tactgttagttcccatggtgcacaggccttcgggattggaccagaaccagcacaccaccagctttcttgggcttgcagcttgcacgtggcagactggaagattatggaacttcttagctgccataattgtgtgggtcaatcactcatatatatatatgtggtgtgtacacagacacacacacaattnggttctgtttctccagataatgctattatacaggctttcaccaggccaaaaggtttttaattttgatgaggtataatttaacatgttttaatgtrtaatgctgtcagtgtcaagtctaaaacctctttaccgagccctacatcactaatattttcccctatgttttttaaaaagtattgtaattttaagttttatatttaagtctgtgacccatttgagttaaattttatataaggtataagttttatgtcaagtgtcatcattttgacgtttgtccaattgcttgactttatttgttgaaaaggttatgttt

SEQ ID NO: 371134 - DNA, 569 bp, Homo sapiens
aagcttaccatcttagatttttacatagttgtttgattagcagaggaaataattccaagaggatcattgttctttccactgttgttatgtttgggcagaacatgaaatagagattttaatatagaaaacatccagtatcttgcttaacttttggttttgaaaaataaatcaaatttcacacatttcaatatgaaagacatgcttattctcaaaacaattgttccactctctgtgaggtttatatcatgtgtagtgatgccttaaaaattatttgaattcaaccttgtttattaaggatgattacatcaagtgccaagtgacagaaaaaataaaaatataaaaaacttaatttttaatggcttattttttaactgcttaattaattattgatataagtaatttaaaaagagattttcaaggacctacaatatataatacactaacccctgctacatagcattgttaccacaatagttttccatgtaatatgagaatcctcttgtgcacatttcaatttacaatgaaatatattctaactayttaaaagttacaattaaagatgttaagaa

SEQ ID NO: 371135 - DNA, 585 bp, Homo sapiens
tatatttgaaaacatgaagacattattattaaaaagaatagatgggcctttgatcaaccacactaagaaggaaatggaggaggtatgatagaaaacagagtttagaatgacacctatgtcatcagcgtatgtcattgattaattatccatgccatttacaaggtcaggaatagaggaggaggtgtaggttagagagaaggcagctgtgcttctgctacatgcaaaatcggtccattgcttggtgctctgtgagcactctgtaattagaaaaaataaataaattctacctgagcttatttagaatttgtccccgctcctgttcatgtgtgcacgcacacacaggcwcacacattcacgttcacacctcacttcacaaaataaaaagaaaatgtatacgacatggtgaaaaaaaatacgtaaaagcataatagcaattttgagtgtgcccgtgtaaagattaaatttatttctctctccaagagaataagcattttctattctgggggaggctgagacaatcagaagatgaaaattgcagtgttaattttaaaggttatttcccctcatctcacagcatccaaaatc

SEQ ID NO: 371136 - DNA, 471 bp, Homo sapiens
tgcttgccaacacttgcagattctttactgtaattctgagcaaatgattttttgccattgtttctgtatttcttcaaatgcagaataagagtgctcagacagtgtcctcgtttgtttgtttgtttgtttgtttttgagacggactcaggctctgtcaccccgggtggagtgcagtggcacaatgtcgcctcactgcaacttctgcttcctgggttcaagcaattcttctgcctcagcctcccgagtagctgggattacaggcatgcgccaccatgccyggctaatttttgtatttttagtagagatggggtttcaccatattggccaggctggtcttgaactcctgacctcgtgatccgtccaaagtgcttggactgcagacgggagccactgcgccttccctggcagtgtccgtgtttcttagtatccgattctggaatcattaggaaaattctgctaaatgtaacacag

SEQ ID NO: 371137 - DNA, 526 bp, Homo sapiens
tgttggctaggataaggaacaaattatgaaaacctcatcatgcgattgtgggaatggaatataccaccccttcagggggaaaaaaaagtattaggaggggtgcagtgactcacccctataatctcagcactttcggaagccgaggcaggaggatcacttgagcccaggagttccaactcagcctgggcaacatagtgaggccctgtctctacaaagaattaaaaaattagctgggcttggtggtgtgtacttgtggttccagctacttggggggctgaatgggaggatcacttgagcccgggaagttgaagctgcagtgagccatgattgcgccactgcattccaacccaggtaacaaagcaaggctctgtctcaaagaaaataaaaacgttttaaaaaatcattttaartttatatacacttaccctatatcccagtgattctactttgaggtactcaagagatatatgtctgcacaaagatgtgttcacaattgttcatagaagttttatttataataaaaaaa

SEQ ID NO: 371138 - DNA, 521 bp, Homo sapiens
gctacagctttcctctttttagcttctgyctactagaataattttcaaactccaaaaaaaatacacagcaaacctagcatttatttgatatgataactttttaaatctttcattagaaatatgttctcttgggctttctctccaaacacacgaagatatctttttcaactgctctgattatagtattttttgttgttttttgtttgtttatgtttagagacagggtctgacaatgttgccgaggctggtctcaaactcctgggctctagtggtcctcctgcctcagccttccacatagctgggtctataggtgcatgccaccatgcccagccagatcataactttaaaaccttttctatacttggtcactttgtgccaatttcagttattcctctttgaagcatatttcactgaaaatattgttttccttataagataaagaatgttgtatttgttgtatcatttattctggaatttatactttggttaagacaatctaagataggactgttattcattta

SEQ ID NO: 371139 - DNA, 624 bp, Homo sapiens
cagctagaaaaacctttcttcagatattggtaagtctgatatccttcatgttgcataagccttacatcttgtcaaacatcactttatctaaggggccatcataatatcaaatatgtagcccatgtcactccttatctttcaagagcacttctcacagacttatattgtagtagactttgtatctattcatatttctattatcttttcacacatgcaaaaaaaaatgtttcacgaaggcaaaggctttgtttttttcatttgctaacatattgagcacatagaacagctcttggtgcacggtaaatgmcaccaaagtatttggtgaatgaatgaatgaatgaatgaatgaatgttttctaccctgtcatctcagaaccctccaaccagcgagttagtacccaaaactgctgagcaagttatgccaatccagttcacttaaaacagctgaaagtaaaccaagaaggaaatgtccaactgggtaccaactagaaaataattcaaacaaaattaaaaaaaaataaattagcaaaaacaccttttgttcatattaaatattgtgtaaagttctaatatataaacaaccaaaatggagctgtcctggttgtaataaggtagtgaagccag

SEQ ID NO: 371140 - DNA, 567 bp, Homo sapiens
aaatacttctctgaggacctctgcctaggaactgcctgggcaaccactgactggcaccactcctgtcattaatccttgtagtcacggataattatctcaaagccattatgtagtccttctcatatttcctttaaaaatctttgtcttcctttacttccttgaatacagatacagtttactacagcatkcatattgccattgcaatgctctattgctaaataaatatctttttctcttagcctctttctgtttgttaattaggttgacaagcaaaataaataagataaagttcaaatagagctaaaagtgtaattaaaattgcatgctcatctccccttagagatacatttaaagcctcatgatgaggcccttctggcctgctaaataaggaaaaaaatacagtggactctggtttatagttgagtctacagtaaacatcactagattttggactgatacaacacaacccttctcaagatgcccagaagttacagtggaacaaataaatccactgtttgcaggattttatgcggtggaattgttttttcaccttgactgtaaagggag

SEQ ID NO: 371141 - DNA, 567 bp, Homo sapiens
aaatacttctctgaggacctctgcctaggaactgcctgggcaaccactgactggcaccactcctgtcattaatccttgtagtcacggataattatctcaaagccattatgtagtccttctcatatttcctttaaaaatctttgtcttcctttacttccttgaatacagatacagtttactacagcatgcatattgccattgcaatgctctattgctaaataaatatctttttctcttagcctctttctgtttgttaattaggttgacaagcaaaataaataagataaagttcaaatagagctaaaagtgtaattaaaattgcatgctcatctccccttagagatacatttaaagcctcatgatgaggcccttctggccygctaaataaggaaaaaaatacagtggactctggtttatagttgagtctacagtaaacatcactagattttggactgatacaacacaacccttctcaagatgcccagaagttacagtggaacaaataaatccactgtttgcaggattttatgcggtggaattgttttttcaccttgactgtaaagggag

SEQ ID NO: 371142 - DNA, 632 bp, Homo sapiens
tctaaatgctaatctatctcactcccttgccagggccccacttatctcagcacagtgaaaagcaaaatctcccctcagtctctgcccagacagccagtgccaacttctccagattttaatcagacgttggcagttggcccttagtgatttggcatcccgggaactttctatgcaatgcaagagagttaatctaacccgaggcatagtttatcataatgttctgttattggcttatacctgcctgggaagagttgttactgataactctattcataatcatagattactagaaacttaaaatgtgtatgaagtaacaagagccaccttctgccacacctaatcaagtgtaaagaactcaaaaaagcctgcacaatcttctttctcatgtcttcacagaaatacctgcaaaacaaatagaggctttccttatgtcataatttatattttccttttatttttagttgactgtaataactgtacatatttatgggatacagtgatacttcaacacatttgtacratatataatgaccaaatcagggtaattagtatatcgatcagctcaaacattgattttttttttgtatttggaacactgaaatttgtcttttaatttttgaacatatacaatg

SEQ ID NO: 371143 - DNA, 483 bp, Homo sapiens
cagagcaattaggcaggagaaagaaataaacggcattcaaattgaaaaagaggaagtcmctttgtacctctttgcagacaatatgattttatatatagaaaaacctaaaaattcccccaaaatcctctttgaactattaaaaacttcaataaagtttttggatacaaaatcaacctacaaacatcagtagtgtttttataacaataacaaaactagctgaaaaagaaattgagaaagcaatttcatttataataactacaaaaaatacataaaatgtcatagattactaaacatttcagttcacattttccttttatatttagaatgctatgacaattcccttataaatgccttgcttgtaaaaaaaaaaaaaaaaaaaaaaaggatatctcaaatacttgctctaaggttaaaagagatattgcatttaaaaggctcagtgtgtttttatctacttttttcccagaaaaatgtttaaggaag

SEQ ID NO: 371144 - DNA, 483 bp, Homo sapiens
cagagcaattaggcaggagaaagaaataaacggcattcaaattgaaaaagaggaagtccctttgtacctctttgcagacaatatgatyttatatatagaaaaacctaaaaattcccccaaaatcctctttgaactattaaaaacttcaataaagtttttggatacaaaatcaacctacaaacatcagtagtgtttttataacaataacaaaactagctgaaaaagaaattgagaaagcaatttcatttataataactacaaaaaatacataaaatgtcatagattactaaacatttcagttcacattttccttttatatttagaatgctatgacaattcccttataaatgccttgcttgtaaaaaaaaaaaaaaaaaaaaaaaggatatctcaaatacttgctctaaggttaaaagagatattgcatttaaaaggctcagtgtgtttttatctacttttttcccagaaaaatgtttaaggaag

SEQ ID NO: 371145 - DNA, 483 bp, Homo sapiens
cagagcaattaggcaggagaaagaaataaacggcattcaaattgaaaaagaggaagtccctttgtacctctttgcagacaatatgattttatatatagaaaaacctaaaaattcccccaaaatcctctttgaactattaaaaacttcaataaagttyttggatacaaaatcaacctacaaacatcagtagtgtttttataacaataacaaaactagctgaaaaagaaattgagaaagcaatttcatttataataactacaaaaaatacataaaatgtcatagattactaaacatttcagttcacattttccttttatatttagaatgctatgacaattcccttataaatgccttgcttgtaaaaaaaaaaaaaaaaaaaaaaaggatatctcaaatacttgctctaaggttaaaagagatattgcatttaaaaggctcagtgtgtttttatctacttttttcccagaaaaatgtttaaggaag

SEQ ID NO: 371146 - DNA, 483 bp, Homo sapiens
cagagcaattaggcaggagaaagaaataaacggcattcaaattgaaaaagaggaagtccctttgtacctctttgcagacaatatgattttatatatagaaaaacctaaaaattcccccaaaatcctctttgaactattaaaaacttcaataaagtttttggatacaaaatcaacctacaaacatcagtagtgtttytataacaataacaaaactagctgaaaaagaaattgagaaagcaatttcatttataataactacaaaaaatacataaaatgtcatagattactaaacatttcagttcacattttccttttatatttagaatgctatgacaattcccttataaatgccttgcttgtaaaaaaaaaaaaaaaaaaaaaaaggatatctcaaatacttgctctaaggttaaaagagatattgcatttaaaaggctcagtgtgtttttatctacttttttcccagaaaaatgtttaaggaag

SEQ ID NO: 371147 - DNA, 560 bp, Homo sapiens
taaggctaatctataatcagagaaataaaggttacagttgcttaggttacagctgcctattgttgactcaggctctgtattcacattgctttgaggctcaaaataaatttcaacagcttagattttgaatcacttaacttcatataagttaaggaacatagaattgagagactatacatgacaaataatacagatttacaaaaatagtttagaaacaggcacagagcaaaacaagaaataagacagactgtggggataataaattatstgctttccagaattaccacattataatattcaaaatgtctgtttttcaacaaaaaattaggaagcatgtgaagaaacaaaaagtatagaaatatagctcataaaaaaaaacagagactgtccctagaaaaacagacattgtacttactagtcaaacatttcaagtcaaatatacactgaatgactgaaggaagtcatgggtgaagagttaaagaaaattaggaaaatgaggcatgaacaaagaatttcgttaaagagatagaaactataaaaagaaactaaataaaaaatct

SEQ ID NO: 371148 - DNA, 573 bp, Homo sapiens
cgcccggcccacaaacataaatttcacacagcacttagggatgaacarttaacaaatcctgtaatattaaataacaatatttttgagcatgtaaactatttttccaaacaaaacctcattacagaatcttaatacctggacccaaatgcagaacagtggctgaatcctgagaagtggctggagaccttgtcatacagcttctcatttgtaatatattagaccccaaggctgtccagaggcatcctctggctccagagggaatagcttgaaatcctttgccttagactatttaagaatgatgcaaagataataatttttaaaaatatgcacatattcaaaaaggaaccagaaatatttcaggttccagaatgcttctactgaatattgtaatgataatttacatttgcattgcttttatcttctatgaagtccatacatccaaagagtgacagtttaattttttttattttttcagtttgaacttctttacaggtgttcttgcctttactaataagaccccaagagacagcagtccccatactaacatattgagtgctagctaaaaatagtagc

SEQ ID NO: 371149 - DNA, 533 bp, Homo sapiens
gttaacttgtttgattttttttaataagtcggggtacactctaaaataacagtaaaaatatagtattgtaaatacsaggcaataggaattttccagctccattataatcttatgggaccactgaaatgtcattatacagcatgtgactttacataggaaatatgtactttgaagttttatattctatacaatattgtaaaatagtcttcaaacctatgttgctaaaaagagaaatacaaaaactttaagcacaatggaaatgaacgttgctgaattttaaaagaatggcatctctggtaactctattgcagttttcagtccttatattttgttgaatcaagaccttttagaaggagtctgtgctccataaatttgcttttttataataaaagcagctctttaatttatacttgaaattagctaaataaaccaccatatcatagaaccctagcctgtgtccaaattttgtgttttctagaattctgatatccctagaaatgtttctttaatgtcagctgttaaaagccatttga

SEQ ID NO: 371150 - DNA, 533 bp, Homo sapiens
gttaacttgtttgattttttttaataagtcggggtacactctaaaataacagtaaaaatatagtattgtaaatacgaggcaataggaattttccagctccattataatcttatgggaccactgaaatgtcattatacagcatgtgactttacataggaaatatgtactttgaagttttatattctatacaatattgtaaaatagtcttcaaacctatgttgctaaaaagagaaatacaaaaactttaagcacaatrgaaatgaacgttgctgaattttaaaagaatggcatctctggtaactctattgcagttttcagtccttatattttgttgaatcaagaccttttagaaggagtctgtgctccataaatttgcttttttataataaaagcagctctttaatttatacttgaaattagctaaataaaccaccatatcatagaaccctagcctgtgtccaaattttgtgttttctagaattctgatatccctagaaatgtttctttaatgtcagctgttaaaagccatttga

SEQ ID NO: 371151 - DNA, 645 bp, Homo sapiens
tttctttaatgtcagctgttaaaagccatttgaatattctcattataatttactagactatagaaacttagactgatgatgaaagctatagttatttcgttgataattcaataaatccaattacttaaagatgcaaaatgaataaaatatatttaaatgggatttttatttgatacgcattccaactagcatgcactagagctcagaaagggtggytgccctaacatgttttattttgtcattgtgactatggaagaggcatttgcattgggaaaaattccccgtaatcacagttgagggctccttgagcctcacagggaaactcctctgtgcacacagaagccttgtggctacagccaccattgctctgtctctgaagggagcaagatcatctgtgaacaacagcagaaatgacaacatggaaggagaaaggtagctcttgagatggaagggtaggaaaatgtctgtcattctcagtaactactaaggcagctagatcttcaaaacctgggattatattgtatgtcatggaatgttttattgactctgatgccaaaaatcttataaaaatttgggacatttactgccttcttattttcaactttttttctgactctgtaacacccacctcctcctttcctccca

SEQ ID NO: 371152 - DNA, 572 bp, Homo sapiens
tttttcacattgccattgagcccacctcctgtggacatgcatctcagtcttccagttcccagtgatagacacctaaaggaaaaggctcataactggcctaggagagcttatggttatgaatattattcctttcatctctcattctcttgatggcttgtatgtaattttgttaagtaaaaactctcctgagatagagatctctggcaaaacaataataaattatctagccatttctaaaaggttgatatccttcctccagaataaagatttaaaatacygtgagagcagaggttcttaaaggttagcaggcatcagtgaaacctacagagcttgttaatgcacaaattttaagcacctccagagtttccgatttagggggcagaaatttgtactttaggggtgaattctgcactcacattttgtatatggattaataccaaatatttatgtaatagcattcacttcattatttcctgccacagcaatgtcattagtataaaggcaaagaataccttttaggttttagctagagcttaacatactatatagcaatagctactagacacttttcc

SEQ ID NO: 371153 - DNA, 595 bp, Homo sapiens
ggccagcagggcaatggccgcggaaggggacaggacggggcgtgtcttggagggtggcgagaggcacggcagtgctgctgaggcaggagaatagggtctggaggcagggaacctaaggctttccatgccgacttcctagaagtaaattgaaaggaaaatcctaactttcctttttttttttaattttaatttttattattattttttgagatggagtttcactcttgtcgcccaggctgcagttcaatggcatgatccgggctcactgcaacctccacctccagggttcaagcgatyctcctgtctcagcctcctgagtagctgggatcacaggtgcctgccaccacgcccggctaatttttttgtaattttagtagaggcccggcctaatttttgtatttttagtagagacgggatttcaccatattggccatgctggtctcaaactcctgacctcaggtgatccacccgtctcggcctcccaaagtgctgggattacaggcatgagccacctcgcctggcgggaaaatcctaactttccatgcctaagtaacaaaaggaccgaaggcttccctttgaccttttctattgggta

SEQ ID NO: 371154 - DNA, 595 bp, Homo sapiens
ggccagcagggcaatggccgcggaaggggacaggacggggcgtgtcttggagggtggcgagaggcacggcagtgctgctgaggcaggagaatagggtctggaggcagggaacctaaggctttccatgccgacttcctagaagtaaattgaaaggaaaatcctaactttcctttttttttttaattttaatttttattattattttttgagatggagtttcactcttgtcgcccaggctgcagttcaatggcatgatccgggctcactgcaacctccacctccagggttcaagcgattctcctgtctcagcctcctgagtagctgggatcacaggtgcctgccaccacgcccggctaatttttttgtaattttagtagaggcccggcctaatttttgtatttttagtrgagacgggatttcaccatattggccatgctggtctcaaactcctgacctcaggtgatccacccgtctcggcctcccaaagtgctgggattacaggcatgagccacctcgcctggcgggaaaatcctaactttccatgcctaagtaacaaaaggaccgaaggcttccctttgaccttttctattgggta

SEQ ID NO: 371155 - DNA, 633 bp, Homo sapiens
tttgttagagttggtttaaggttgttcaagtatgctaccattttattagataatattaggcaatatctttgtgtgtgtgtgtgtgtgtgtgtgtgtgtgtgtgtgtgtgtgaatggcatagtatctgactattgtttttctaaacccattttctcccaggtccatttttttttaattgtggggatttgaatagcactgtaagttctagaaatactagctaagttatagaagagctggctgtatgtatgaagtgaatacattttattttaggtaaactatacctcagtaaagttgatttaaaaataaattcataattctagggaaaagttaagtcgataagctacccttccttaggataacaaattaatttataaacrgaaagcttttgaaggcttaccactttaaaagagattaaaagaaaatccatcacacttttttctaaatagtatttaaattcatttttttatctccagtagtcttgttatataaatttatcttttctttttaaattcttgagcaaaatgcatctgactttattattatttgttaaagtttaaaaaagttatcaattggcaatacctgaccttaaaattctagctgtcagtcatctcaggctagaaaagcatatttacc

SEQ ID NO: 371156 - DNA, 633 bp, Homo sapiens
tttgttagagttggtttaaggttgttcaagtatgctaccattttattagataatattaggcaatatctttgtgtgtgtgtgtgtgtgtgtgtgtgtgtgtgtgtgtgtgtgaatggcatagtatctgactattgtttttctaaacccattttctcccaggtccatttttttttaattgtggggatttgaatagcactgtaagttctagaaatactagctaagttatagaagagctggctgtatgtatgaagtgaatacattttattttaggtaaactatacctcagtaaagttgatttaaaaataaattcataattctagggaaaagttaagtcgataagctacccttccttaggataacaaattaatttataaacagaaagcttttgaaggcttaccactttaaaagagattaaaagaaaatccatcacacttttttctaaatagtatttaaattcatttttttatctccagtagtcttgttatataaatttatcttttctttttaaattcttgagcaaaatgcatctgactttattattatttkttaaagtttaaaaaagttatcaattggcaatacctgaccttaaaattctagctgtcagtcatctcaggctagaaaagcatatttacc

SEQ ID NO: 371157 - DNA, 547 bp, Homo sapiens
acctacttacctaatcattactggtaatgaatacaagacaatcaaggcaatgagaaaaaaattaacaaaaactttatagaaatctaattttttgttttactaatcwcccagataccatgtgagctgtatattcctatctattcaactgaaagaactgagaggagcccagaagtaaatatgagaggtgaaaaaacggcagaatttccaaatactctgcttttgcttcaaataagaaggtattccaaaatagacaccacctctgctcctgcctcaatttatacaataaattattctggacaacctataatagaatgtgttgagtaaattgcaaaacctccataaaattgaatattacatacagtaattttaaatgataccttagaaatctatttattggcatggaaagatgtttctaaactgttgttgactgaaaaaaataggtgacaaaaataataatatagagaacgttcctgttactagtcagctccaactaccataacaaaataccatcgactgaatggcttaaaaaacagaaatttatttctca

SEQ ID NO: 371158 - DNA, 562 bp, Homo sapiens
gatattggccttcacaaatctaggaaaaagagactgtgttatctcactgagcccaaaaagaaacacctaggatgcagtctaagcttaagactggttgactggcctcagataagtcattaataaatcttctaagtcctcatctgtaaaagggagataatatttagaacctacttaccaaacctgattgtgttgaggctcaaattaggaaaatggatatgaaaatcttttgaaacattaagagcactatgcaagtgtaaagcattattattaggaactttcagctaggtcaggcgtttttatgtgcaaggcagttttaacagtatgaataatcmtcctgttgtaattggatatgtaaatgctcccagaggtctacttcagacgtctattcagatagttctaaactgatgacaatgttgatgatgatgatgatatttctctagtcacgaatgaaaagcaggaagcaaggatagatgatatcatacttggacccatgcaagaaggctgagtacctcttagtgtctttattgtttttaacattttcagtgatgacagaaccagagcc

SEQ ID NO: 371159 - DNA, 604 bp, Homo sapiens
ggctctgccctctggacacaagactctgccttctgggcctaaggctgtactgttatcgtcagcctttctttttcttgaaagaagagaaggacatgtttgmagctgagtagttgtatcagcctgtttcctgcctgtagaattttggagtattgacagacttctttcattcatccaatatttattccttacagtccaagctagcactatttctgctgaaataagagtctcaaaatctttgcaggtctcctgtgtatgtcatgggaatttatgccattaagcaagaggctcctccaaatatatttcctgaataatcacatttctattcatgatttctgctgaaattgccatggagatctatgagtcacatgcttaatctcttcaaagagtcctctgtataaatgaacatccttatcttttgattcttccaaaacactagaaaaacattgtccagccatacccttggctttcttcttatcgcatggcagtgaatctctaactcaaaatattttgcaaaccagatagcctgagaatttcccaaattattgagtcctgtttactttttgcttaacagttctttccttaatttatctcttcattctctcat

SEQ ID NO: 371160 - DNA, 543 bp, Homo sapiens
cttcagggtaggtgaccatgtggaggtcctgggagggtggtgtgcccgcagcgggcatagaagctccgtactccttctccatcccttgccctatgcatcccttccatctgattgttcctgagttgtgtcttctataatcaaccagtaatctaggaagtaaacttttttcctgtgttttgtgtgctagtctagcaaacgattcacctagggaggggttgtggagagcctgatttatagttggctggtcagaaccatgagtgacaacctggacttgggattggcatctgaattgggagcaattttgtgggattaaatccttgacctgtgaaatctgatgctaactctggttagtgtccgaactgtaggagctgatgctaagtctgatgagtgtccgaattgaattgaatgctaggatacctggttggtgtctgcagagaattggagaaytacttggcgtgggaaactttacacacaggcacacacacacacacacacacacacagtatcagaagtgaagtattgagagtgcaaataaagagaaaa

SEQ ID NO: 371161 - DNA, 543 bp, Homo sapiens
cttcagggtaggtgaccatgtggaggtcctgggagggtggtgtgcccgcagcgggcatagaagctccgtactccttctccatcccttgccctatgcatcccttccatctgattgttcctgagttgtgtcttctataatcaaccagtaatctaggaagtaaacttttttcctgtgttttgtgtgctagtctagcaaacgattcacctagggaggggttgtggagagcctgatttatagttggctggtcagaaccatgagtgacaacctggacttgggattggcatctgaattgggagcaattttgtgggattaaatccttgacctgtgaaatctgatgctaactctggttagtgtccgaactgtaggagctgatgctaagtctgatgagtgtccgaattgaattgaatgctaggatacctggttggtgtctgcagagaattggagaactacttggygtgggaaactttacacacaggcacacacacacacacacacacacacagtatcagaagtgaagtattgagagtgcaaataaagagaaaa

SEQ ID NO: 371162 - DNA, 463 bp, Homo sapiens
ccactttatacctgctgggatggctataatcaaaaagaccatatcaagtttgggcaaggatgtggagaaattgaaacccctcatttaatactcatgagaatataaaayggagcagccactttggaaaacaggatggcagttcctcaaaaagttaaacatagagctaccatatgacctagtaactccactcctggtgtataccaaagagaaatgaaaacacaggctcacacaagaactgatacataaatattcatagcaacattatttataatagcctgggactggatataacctgagttccatcaactgatgaatgaacaaataaaataaatgtagtaaacacacacaatggaatattattaggcaataaaaaggaacaaagtactgatgcgtgttacaacatggatggatcttaaaagctttctactgaatcaaagaagccagacacaaaaggtcatgtatc

SEQ ID NO: 371163 - DNA, 553 bp, Homo sapiens
tttcaataccacaaggataatccaggatgacttatcaatatcacacatgtcaatagcaggttgtgatgtaaatgagcaaattctttccaaccatctcagttcagttttattatagcatttattaaaccaaaataaaaacatggtgaagaatgatttgtcacaccatttattagagttgatggagtgtagayagtcttttcaataaggctttaacacactgttatgcaccatagtgcattagtaatgaaaagaaatgcatgagacttacatcagcctttcccccaagtcattctgacattaaattcaaaatcaattttaccctatatggcaagagttcagaaataaatgttaatttctttgctgttcaccaaaacttaagtttataattcaaagtaacaacagaaatccttcctattctacttaatttaataatcatactttttttggagaagggttcaaagtgggaagcaaatgcaaccagaagttaaaaaattgtgtttcagtttgtatctgacaaaaggatgggatctaattttctctctgattaaaagaa

SEQ ID NO: 371164 - DNA, 553 bp, Homo sapiens
tttcaataccacaaggataatccaggatgacttatcaatatcacacatgtcaatagcaggttgtgatgtaaatgagcaaattctttccaaccatctcagttcagttttattatagcatttattaaaccaaaataaaaacatggtgaagaatgatttgtcacaccatttattagagttgatggagtgtagacagtcttttcaataaggctttaacacactgttatgcaccatagtgcattagtaatgaaaagaaatgcatgagacytacatcagcctttcccccaagtcattctgacattaaattcaaaatcaattttaccctatatggcaagagttcagaaataaatgttaatttctttgctgttcaccaaaacttaagtttataattcaaagtaacaacagaaatccttcctattctacttaatttaataatcatactttttttggagaagggttcaaagtgggaagcaaatgcaaccagaagttaaaaaattgtgtttcagtttgtatctgacaaaaggatgggatctaattttctctctgattaaaagaa

SEQ ID NO: 371165 - DNA, 553 bp, Homo sapiens
tttcaataccacaaggataatccaggatgacttatcaatatcacacatgtcaatagcaggttgtgatgtaaatgagcaaattctttccaaccatctcagttcagttttattatagcatttattaaaccaaaataaaaacatggtgaagaatgatttgtcacaccatttattagagttgatggagtgtagacagtcttttcaataaggctttaacacactgttatgcaccatagtgcattagtaatgaaaagaaatgcatgagacttacatcagcctttcccccaagtcattctgacattaaattcaaaatcaattttaccctatatggcaagagttcagaaataaatgttaatttctttgctgttcaccaaaacttaagtttataattcaaagtaacaacagaaatccttcctattctacttaatttaataatcatactttttttggagaaggkttcaaagtgggaagcaaatgcaaccagaagttaaaaaattgtgtttcagtttgtatctgacaaaaggatgggatctaattttctctctgattaaaagaa

SEQ ID NO: 371166 - DNA, 631 bp, Homo sapiens
ctgccccagcaagcttgctgctaaaactgcatctatatgcatcataaccaggaaaatgagcttcttccaaaatcttaaaagcttcagcattcttcccctggggaaataaccccatacaccaaaacaacattccttggacacacatgaggaaaagcatcattaaaacttatgacttgaattttaagataaatgtgtttataaygacatgctataaatacagtaaatatttttcttggtgataagtcagcaaagcctccataatccagtcccatttacttatccaggcttccctgccactgtttgcttacactaagcctccagtccaacccaagaggccaacttagaatcctgtaatatatttacatgtctcaatgcctttgctcattttcattttctacaggagatgtactttgtctagtcaagctctttgaacttgatcccatctcctttgtgaaacttctgcccaccagattatgctcctctgagctcctagcattttgtgcctacatcctccatttgtgaatttattcttgtgtatttcctttctaaggatgttgaaatgttgtatttaccccactacattatatatatgtgtgtgtgtactacatatagagagaatatatacactata

SEQ ID NO: 371167 - DNA, 631 bp, Homo sapiens
ctgccccagcaagcttgctgctaaaactgcatctatatgcatcataaccaggaaaatgagcttcttccaaaatcttaaaagcttcagcattcttcccctggggaaataaccccatacaccaaaacaacattccttggacacacatgaggaaaagcatcattaaaacttatgacttgaattttaagataaatgtgtttataacgacatgctataaatacagtaaatatttttcttggtgataagtcagcaaagcctccataatccagtcccatttacttatccaggcttccctgccactgtttgcttacactaagcctccagtccaacccaagaggccaacttagaatcctgtaatatatttacatgtctcaatgcctttgctcattttcattttctacaggagatgtactttgtctagtcaagctctttgaacttgatcccatctcctttgtgaaacttctgcccaccagattatgctcctctgagctcctagcattttgtgcctacatcctccatttgtgaatttattcttgtgtatttcctttctaaggatgttgaaatgttgtattwaccccactacattatatatatgtgtgtgtgtactacatatagagagaatatatacactata

SEQ ID NO: 371168 - DNA, 560 bp, Homo sapiens
tgctttgtattgtacaattccaaaagaaataagctttgccctctgagagctttcctaaaacagaacagttctacctggaaggcagctgcatgaatgagcctccattaacacagcttccaaaacctcatttctactctcttgagaaaawaagcattccagtgtgatgcccagttctatcaaacatttatcatcacccaataccagatgcagcatccaaaggaagcatatttctctcacacacccaccagcagatgaagttgaggggtttgttgacatgggtactgggtgtagcttctggttgaaagccagagtggaggtcttttcactaatccgtcagttcacataatatggaaaacaaaattcatctctcgactcattatttttttttcttcaggagtacaagaatgattgcaggtctatttgacgtttatatttatggcagggaactttaaagaaaattccagctcaaggtgaattctgtgagagagtgctgatctagaagaagaaatgagcctccctcaaaggaaaactgaggaaaaaccggagacaacaggagtagt

SEQ ID NO: 371169 - DNA, 543 bp, Homo sapiens
ccacaagaacatgactcattaggaacaagcagccacaagttggcatttaaatgttcaggctttatgttgtgttataattcagcatatggctgtgtgcactgtggaatacttaaaatagaatcattttctgaactgacaggacagctcatgtcctgattattgtcaactaggatttagatcaattaatagagtagttaaaatgaaagtgggccaactgttttggaactacggtaagatttggyatgaggctccaactttgacatgtggtagtcccctcccctactctgagccatgtgttaaagaatattttatgactacttgtgtgagtacagttgggtgacattgccacccaagtccataacagtgaatacggatggctgggtccttactaaaggatgtacactatataaggagagtaatgcccagaatccaatcttcagagggcaatggaaatataattgatgaaaataagagtccacaacaacacctctttatttccattgccaggtaattacaaaagccaaaggatgcaaagttacaacc

SEQ ID NO: 371170 - DNA, 582 bp, Homo sapiens
atttctgaatagctctctgacaattttattcaattaaattcccagaagtagaattattgggtcaggccaggtgcggtggcttacacctgtaatcctagcactttgggagaccgaggtgggtggatcacttgaggtcaagagttcaagaccagcctggccaatatggtgaaaccccatctctactaaaaatacaaaagttacccaggtgcagtggcgggcacttgtagttccagctactcaggaggctgacgcaggagaatcgcttgaacctgggaggtggaggttgcartgagctgggatcacgccactgcactccagcctgagcaacagagcaagactctgtctcaaaaaaaaaaaagaattattgggtcagagggtaaaaacatattaaaggcagcctgagactctctaaataaagacttcaaatcctgatggcagtgaaaagagtcacaagagcatggtccagtcccctcatgatgcctgaccatgggcaagatataaagttggggtggattctagaagcctatgtgtaagcaaggggtttaataatttaaactgatttctaaagacctgcacctgcca

SEQ ID NO: 371171 - DNA, 445 bp, Homo sapiens
tcagcagtgaaaagccatttgatgtttctaagcagataaatggtatatctgatctatgttttagaaagaattctagaagagtatgaaacaggagttggcatactttctttgtaaatggtaaggcagtaaatattttaggytttgcaggccaaatggcctctgtcacaattcttccatttctgctgttctggtgtaaaagaaatcatagacaatacataaatgagcacagttatattctaacaaaactttctttacaaaaacaggtggagagctggatttggtttgctgactcctgggacagaagacagactgaaggatgtctgaggaaatgaatgagtaaaagccaccatttttgttttgtaagtttttgctatagcagaagtattttttgttttgtttttttaaagaaagctttgttggatcctgacagacttctggtttccta

SEQ ID NO: 371172 - DNA, 611 bp, Homo sapiens
gagttggcatactttctttgtaaatggtaaggcagtaaatattttaggttttgcaggccaaatggcctctgtcacaattcttccatttctgctgttctggtgtaaaagaaatcatagacaatacataaatgagcacagttatattctaacaaaactttctttacaaaaacaggtggagagctggatttggtttgctgactcctgggacagaagacagactgaaggatgtctgaggaaatgaatgagtaaaagccaccatttttgttttgtaagtttttgctatagcagaagtattttttgttttgtttttttaaagaaagctttgttggatcctgayagacttctggtttcctactatgtatctattatgcagttgagacttagggtttcctactatgtatctactatgcagttgtctggctaagaaatgcattgtcatttaaaatgttttaaaatgcttagcagtggtttcagtagctgatataaactttatatatgcatttgaaacaagtttcttcaagattcacaatgaagactcaaatctgaaaggaaaaaaggcattcagtaccctatattctaaagaaagatgccaacaattaaggccaccaaaa

SEQ ID NO: 371173 - DNA, 502 bp, Homo sapiens
cacatatttatgaattatatgacacacatcaacatataagacatattcttattttgagccacagcttctcctaacatttttgctgctttttaggtgatcttatatttacagaataataactgaatctgaaaaataaaagaatgaaaatataggatgctttctttaaggctcttaaagaggatcttacatattatgcttgatttaataatcaagcrtggtcattcaactgaaaatccactcaccataaaatgcttttcatttattcttaacaattaatgtccaaatagtatttatgggaaagcattcatttatttgttctctcggtggacaaataaaccattctgactttttaaactttaaaattctgttttgatgtagctgatagaaaaatatcaacaggctttaaaaataatttattatgcatatttctctttttgatatttttatcttcaatcttaaatgtatatggcatatatttacatataagaataaaattcacata

SEQ ID NO: 371174 - DNA, 494 bp, Homo sapiens
gagatcagcctgggcagcgtagtgaaaagctatctttacaaaacatttgaaaattagctggacatgttggcatgtagcagtagtcctagcaactcaggaggctgaggtaggatggtcacttgagcccagaaatttgaggcttcagtgagctatgattgtgccactgcattccaacctgagtgacagagcaagaccctgtctttaaaaaaataataattagaagaataaaaataaaacaaaatcttagtgtatatattaatgtaaatgatttcttgatattccatatattgttattcaaaatataaatgaaatacacaataaatgctttgtagaatcactttttgatatttgtcagaagtgctaaatatgggaatcattatcatgttttgttggcctgtgagtaaaacataactcaatataagaatttctattcatttyatttccttcaggcttaatgtaaatagtatgaataacttaaacagcaaaaaacatgg

SEQ ID NO: 371175 - DNA, 551 bp, Homo sapiens
atgttgatgcaaatggaaagagaaagacttcctataataatgaaaggagcaatgaacctgagctaagaatgactgtctatgagaatattatacttgcttatgcagcacagggttcctatctccttttagactctgtccaaacttattagaaatgtaattgcaactgtctgttcaaatactgggtaacagcaattgcatttttcccattccttcctatttcattcacaggtaatctctgcactatgcctgcttatgataagggaagaacatgcaaaccttgaatcccttgtaaccattaggctattcacttctagaataaaacagaatctattgtatctaaactagttttagtttttttaaagtgctctaattcttggtgggcgtttgggtgtattaatgttatamcgttgtaaggagaggataacttttatattggagaggacaaatcagtgtaagttatttgttaaatagtcttagcattcacttcacacttgctccatggcaaaaatgtatttctgccttagaagtaagaatgtattccacacaggtat

SEQ ID NO: 371176 - DNA, 516 bp, Homo sapiens
aattgctttttgtgttttagtcatgaaggctttgcctatgtctatttcaagttacataagacatttccaacaatgtcagatatatggtgatttactatttatatatatatatatatatatacatatatatatataaaatctttatatcttaaccacctcatagccttctctcaaagttcttttgtatatcattttttgttgttttaatagtttacccagataaccatgtatattcatatactctatataaatttaaaasatttttgaagatttactcaaatatcaccatccatagtcaaaatgattttgtgtgtctctacatgcatttccatagtttacagtaaagcatatagagatttaaaatggctgttttcttttttagattatatatctgttaggtatcattttagtcattttactccccccaaaactgatgttgaatatttcttttaatatattagcatattatacaattgagttgaaatcaattgaaattttggcctagttgtacaaatg

SEQ ID NO: 371177 - DNA, 579 bp, Homo sapiens
ggttgttggccatttgtatatcttcttttgaaaattgtctactcatgtccttagcccacttattgatgggaattgtttgtatttttcttgctgatttgtttgagttccttgcaaatcctggatattagtccttagtcatatgtatagattgtgaagattttctcccactctggttattatgctgattgtttcttctgctgtgcagaagctttgtagtttaagtgccatctatttatctttgtcttggttgcatttgcttttgggttcttggtcatgaaatcttttcctaagcaagtgtctagaagggtttttccaacgttatattctacattttcagggtgggtattgtatcttggaactcacattgtgtcttttctttcttgtctttcttatttgactgccctcctaatttttatgtgcacaaattttctgtctctaaacattctgttcgtgttttcytttgtttttttgctttttgttttacaccctgagatttttacaactttattttacaaatattataatgaaatttttcttttggcatttatattgtaatatcaaaacgtgtatttcttggct

SEQ ID NO: 371178 - DNA, 593 bp, Homo sapiens
ctactatggtagctagccttttaggtctactctcaatctcttagatttttcttctaaagctttctgacaatttgatggaaaatgaaaaccaggacctcctyatagggctaagattttgcacctagtcttgcacttgtaaaacattttgcagaccttttggatcgtctagtgcctgaaaaacttggctcagaaataataaagtagttaagatcagaaaaaaaaagtgtcttttaaaggtttaataaagcctacttagattagccagatcacaggatccagtccaactggcaaggagtgatggatgtgtttgtttcaaataaaatatgtctcattagggattctatagagaaaatatttatgtatccttaaaattcatatgttaaaagctaatcctcaatgtgatggtatttggagatggagtctttagcagctgattaggtaatgagggttgagtgcacacaaatgttattagtgcccctttacatgcctttaaatgctcccagaaagctcttttgttcctctgccacatgagaacagaagaagatggccttgactatgaatcaggaagtgggctctcagcagacggtgaatct

SEQ ID NO: 371179 - DNA, 477 bp, Homo sapiens
gacactatctgattctgggagctcctgagagacagtcttagttttaggtctcccattgggatggacttccattcatactagcttttgtatctttttagttgagtagtatgagtgcaaagttagatcccctgatgtttggcaaccatgctagtgataagaagaatgttgtaaatgtccttcctgcagagtttaacattagctttctagtgatgctctcttcagaatactaaatcttcatttcttgattgtggagtggtttggatgagagatgggaggaaaatcatcaacccaacctgctgagattaatgatgggtataattaatatatcttttgcagtattttagaatgtctgggttgactaggttagaatctttgagagttcaggcagyatagggagttcttatggactgtccagttgtccagttattacttcatgtgtagacagttgaaatgacccagcaggagtggactcgaggg

SEQ ID NO: 371180 - DNA, 552 bp, Homo sapiens
tgcatccttcaatccaatctagttgacaatattaaccaacacatcccctctatggtcaaaaatctttttgttttcaataacatgccacactcaggtactacctaaaaaatcatacatacttgctatgtaaatgataactctttttcttcagtcaaagaaatagctcttgtgggagacacaaattcagtgatttgagatgactctgaaacatagtggcatatattgtatggggtttacaaatctataatgggatattgtaccttgatatttcctcctaaaggtgcagagacatgaaccatcaacaaaaaagggtaaggtctggattcgcaagggcattctcaatgttcagggaagaggaaggttgaggcttgagtggctgtaatacaatcgtgtgtttacttcagttgggaaaaggaggatcrtgataggattgagttgacagcaataaacagtgatgggagaaggaaaaagcataagagttaattagaggtgagctgagaagccaaatatttagagtgatatgagttagaagagtctaaattgcatgagata

SEQ ID NO: 371181 - DNA, 529 bp, Homo sapiens
tgagcaagaaaatattctgtgcctataactataatgttatgaaatccttaagtcaaatatgaaactgtaatagcaaaggaaattattatgtaacaaatacattatccctggtggagaaatgtgtgtcgtaaggatggttaaaagtaaacagaatatttttgtgtgtgtgcatttatcatggggatgggaagcctagaaaaaatttaagcagaccatccaatgtcctggytttccaggatggctagaaaatgtagagactgaacaaaggatggcaagcgtagaacaaaataaggtagttaaaaagaaagacaatttgtaataaaggtggcatgtagaggttagaaacatttccttggcttttaaaagttcctacaaaatattgtgtttataaactgagataattatttttaaggatctggaactaagcatataggtaaaaatgtaaagaaactaataagcatgagaatatagtactctgactaaagtaattttgactacagaacggaaactgaggacattaaaaaaaaat

SEQ ID NO: 371182 - DNA, 609 bp, Homo sapiens
agccactatctgaatccagctttctgattggtcctgggccaacgccccaggccaagctgagtcccacattctccaaggcagcccgctgactaagcacgtttcttccccttcccagtccacaaaaatcctgtaccccagcctcatagggggcaccccatttgggtcccctgctctgctggcagagagctttcttctttcacttattaaactttcactctaacctcacctttgtgtctgcactccttaatcttcttggaggtaaaacaaagaaatttgggtgttatctcagacaaggccaagagtattacatcttggtgcactgctgagactacaacatttgtatatttgtagtatcacttgtaatgtttcctttttctctaatttcatctgtttgggtctttctctttttttcttratttgtgtagccaaaagtcaactttgttaatcttttcaagaaatcaacatattttgctgaaattttatatttttaatctcatctatttaaagtctttctaattttttttgatgtaggcatttatagctacaaaattcctttttagtaccactgtagctgctgtatgtcatagatgctggcatgtgttttcatat

SEQ ID NO: 371183 - DNA, 538 bp, Homo sapiens
ttttctattgcattttttatttcaatcattgtatttttagctccaagatttttgcttgattttaaaaatgtcagtctttttgttaaatatctctcattaatttctgaactgatactctgtatattcttgaagtttgttgagtttccttaaaacatctattttgatttttttctttgagacatcacatattccttactttagaatcagtttcaggcaccttattttatctctttggtgagatcacatttttctgaatattcttgatgcttgtgaaagtgtgatggtatctgcacattgatgaattaagygcttattttagtcttcacaatctggctttatttgtgcttattattcttcagagagccttccagggattttaagccaactgacagttttgttccccacacataggaccactgcagccatgtaagccctagaggacactctaagcccaaactcactgtgagtctttcaatggttataatgctgatgtgacttcctggctcaaatgcacttcagaagaccaagaagagttctg

SEQ ID NO: 371184 - DNA, 595 bp, Homo sapiens
tttgaaatttttgcagctttgaccctacatagatgacagtgcattacttataagcatgacctgaatctattcagcatttatacttattggctgtgttttattgagcaagtcatttaaccattggacatttaaaactgaccttctatttstaaaatatagaatataaatgtggaaatctgtgcataaaaatgagaatatgcttaaaatttagctactgtaactatggcagtgaatatgatgttggtaatgaagatgatgatgagggtgcatggtaccctaaactagtgaaatttgaggaaaatatgttagaaataaagcacataaaattgttcctgctagcgtaaatgaaatgcatggaatatctatataactagtgtattcagtcatagatttggaaatgagaatacattaaaatatcttggaaagcaaaaccattttgagaaatacctaatgtagatgacgggttgatggatgcaacaaaccaccatggcacatgtatacctatgtaacaaacctgcatgttctgcacatgtatctccaaacttaaagtataataataaaaaaaagaaggtagaatgacttaatgtgtgaaaga

SEQ ID NO: 371185 - DNA, 595 bp, Homo sapiens
tttgaaatttttgcagctttgaccctacatagatgacagtgcattacttataagcatgacctgaatctattcagcatttatacttattggctgtgttttattgagcaagtcatttaaccattggacatttaaaactgaccttctatttctaaaatatagaatataaatgtggaaatctgtgcataaaaatgagaatatgcttaaaatttagctactgtaactatggcagtgaatatgatgttggtaatgaagatgatgatgagggtgcatggtaccctaaactagtgaaatttgaggaaaatatgttagaaataaagcacataaaattgttcctgctagcgtaaatgaaatgcatggaatatctatataactagtgtattcagtcayagatttggaaatgagaatacattaaaatatcttggaaagcaaaaccattttgagaaatacctaatgtagatgacgggttgatggatgcaacaaaccaccatggcacatgtatacctatgtaacaaacctgcatgttctgcacatgtatctccaaacttaaagtataataataaaaaaaagaaggtagaatgacttaatgtgtgaaaga

SEQ ID NO: 371186 - DNA, 537 bp, Homo sapiens
gagtctctcaccatagccattacaactgggaatatactcatctcacagtctcacccaaggcccatggtatactgtgtgggtattaccgctgtttattcagggcctaasagttccttagtcagcaggcgatgaatctgggtccttcccttcaagacactgggttcttttcttgcccaatgtatgtccaggtgtatcacccagagcaagacctggaatagggacctcacagctgtgacgagtttcctatcctactgtggctaagctggtatccaaatgcaagaaaaagtcttttttactctcccttcccctttcctcaagcagaagaaagaggtctcttttggagtcaggagctatgctgctgccggttggtggagaggtagcacgagcaccattccagcatttctggatatgtcctgggccacatgggagcccattaccctgaaggctgagtcccaggcctggcagcattaagcacaaactgatgtaagagcccttggttcttaagtgaacatcagcggtagcctggcagtacctctg

SEQ ID NO: 371187 - DNA, 588 bp, Homo sapiens
aaacaaacaaacaaacaaaagcaatagctacacttatgtcagacaaaatagttttcaagattaaaaactataaggagagacatagaaggtagttacataatgataaagaggtcaattcagcaagactatataacaatttcaaatatatatgcacccaacactggaacacccatatatacaaakcaaatattattaaagctaaatacaatactagctggaagcttcaacaccccagtctcaacactggacagatcaaccatacagaaaatcaacaaagaaacatcagacttactctacgctgtaggcaaaatatagctaatagatacttatagtacatttcatcaaacggctgaagtatacacattattttccttagcacatggatgattctcaaggataaaggatatgttaattcacaaatcaagtcttaaaacactcaataaaattcaaataatataaaatgtcttctctgaacataatagaataaaactaggaatcaataatgaggaattttggaaattatacaagtatatgaaaattaaacaatatgctcctttatgaccaatgaagaaattaaaaagaaggaaa

SEQ ID NO: 371188 - DNA, 588 bp, Homo sapiens
aaacaaacaaacaaacaaaagcaatagctacacttatgtcagacaaaatagttttcaagattaaaaactataaggagagacatagaaggtagttacataatgataaagaggtcaattcagcaagactatataacaatttcaaatatatatgcacccaacactggaacacccatatatacaaagcaaatattattaaagctaaatacaatactagctggaagcttcaacaccccagtctcaacactggacagatcaaccatacagaaaatcaacaaagaaacatcagacttactctaygctgtaggcaaaatatagctaatagatacttatagtacatttcatcaaacggctgaagtatacacattattttccttagcacatggatgattctcaaggataaaggatatgttaattcacaaatcaagtcttaaaacactcaataaaattcaaataatataaaatgtcttctctgaacataatagaataaaactaggaatcaataatgaggaattttggaaattatacaagtatatgaaaattaaacaatatgctcctttatgaccaatgaagaaattaaaaagaaggaaa

SEQ ID NO: 371189 - DNA, 592 bp, Homo sapiens
agtgtaggccaacatctcagggtaattagttcattcaagctttaaatttacagacaactcagaaacttaacatggagataaagggaaagggaaggtaaaagaccaccatgttgataccacatagtactggtggttcagaacctatgcatawgtgtaaggccacaattttatcatgagtgactacagagaaaatgtgtgagctactactcctgactgaaagtggaacacagctgtcaactccctaaacttgtattctcttcagctacaaacagatccaatggcaaaaggtgggagacgtaccagatcaagtttaaacaaaacctatgacgaatcattaggtagttacttgtctaagttgaaacaggggagatccaaacttaaaaataaaaacaagaaaacaaaaacttggcagtgaaatcagtagctatacagtttggaagaaatacattttaaatgaataattcagggtaatcattgaataaacaatcaaaacacaaaaacaaaggaagtcacttggagataagaaaaataatctatacttgttatgatatattatgctaaaatgtccagtgttttaaaaaaaagatataca

SEQ ID NO: 371190 - DNA, 404 bp, Homo sapiens
ttcaaagaacctctgactgacctctaatgctgttccacatcctttgtagtactacaaaagataagcctctaatcttctcatctgcactcttctttctaaattgtactatccaaatgtcctgttacagcaaacagcatacattacttaaacacacatacatacacataaaataaaacaaaaatgatgcctttatccctgatcagggaaatttgctataagtggcaccacatcaaaatgttcttgggtcatrttttttgtgctttattggtgacactcaaagtaaagcatttcagttcttttcaaagatcatttagttgagtttctagcttattccaccaaagtggcaggcatgctgggctgcttgtctcagaatgcctctgccacaagccaacatcattctacac

SEQ ID NO: 371191 - DNA, 577 bp, Homo sapiens
cacatttgtggagtgaattatgtaatggaaataagctctctggagagttgttctatttagtctcttctcttactcttgctctctcatcttcaatcatttcccttttcctccccagtagctacttctcttccatctacaaatgatacgtttaagtgttccttgccatacaaagaaaactctttcagcatgtctccctataaaagcagccagtcctcctttctcttttctttccacatcaaacttcttgaaagagtggagcayattcctttcttcaccctttgctgctccctttccctggcatggcagcctggctctgccttcaccacaccatgcaaaaacttttcttaccaaaggtactagtgctgtcttactggagagatgccataatctcaatggacctctctgcaggatcttatactcacaactctactctgaaattatctcctccttttgtttccaatctaacattttcttctcgatgctctttctacctttctaatgatcagttcttagagcctacccttaaatgtaacctttcctctaagttcttttacttccctacacaagggcctgcaaa

SEQ ID NO: 371192 - DNA, 590 bp, Homo sapiens
gtataatgagcttcaaatgaatgtaaaaatgctaagacccttggaaaatagtcaaagaacaatttgragaaggaaataatacggtgagttaacaaacgtgtgcaaaatatgccacccaactagaggtatctattgcctgttatgttagcaaacttcttttgggaaatccagaatatttttacttctgcagaagataatctttccactacactagggttcagagtgcttggggagtcaaacaggagctaattcttggttctttctcttagtaacaaatggccactcagaatctcagcttcatctggtgtgtcattagcaagtattcctgagatgttatattatacccataatctggcacagaagccatgcctaatcagtgtaagctcatggaagtagaacttaattttgttcatcgctgtatcccaagggctagaaagtgtctggactttgcaggcatttaataattgcaacccttgaattgaattgcatcaaaatgatttaaattaccacattgctataggttttttatagaaatcccaagtgtttttctataaatgctagggccaaaggtcttcagtttttgtgctaac

SEQ ID NO: 371193 - DNA, 590 bp, Homo sapiens
gtataatgagcttcaaatgaatgtaaaaatgctaagacccttggaaaatagtcaaagaacaatttgaagaaggaaataatacggtgagttaacaaacgtgtgcaaaatatgccacccaactagaggtatctattgcctgttatgttagcaaacttcttttgggaaatccagaatatttttacttctgcagaagataatctttccactacactagggttcagagtgcttggggagtcaaacaggagctaattcttggttctttctcttagtaacaaatggccactcagaatctcagcttcatctggtgtgtcattagcaagtattcctgagatgttatattatacccataatctggcacagaagccatgcctaatcagygtaagctcatggaagtagaacttaattttgttcatcgctgtatcccaagggctagaaagtgtctggactttgcaggcatttaataattgcaacccttgaattgaattgcatcaaaatgatttaaattaccacattgctataggttttttatagaaatcccaagtgtttttctataaatgctagggccaaaggtcttcagtttttgtgctaac

SEQ ID NO: 371194 - DNA, 427 bp, Homo sapiens
ttcttggtttaacaatgttattttgaatctgttgtctctaatatgaaaggtgagaacattagcatgtatacctctctccttgttcytctccaaatctccaccacctcacaacctcagttttgtcaatggtattattactttttcaccttgtcaatcataacaacatttataatttggtttgcaaccgtaattctaatagtttgttagccccttctctttttgtaatagctttctaatgccagagttcttcatttccattctcataattggcataatttctttattaattacagctcaaatgtttgagaatatattactcctgtatttattcataaacaaattggcttgatacaaattctcggattaccctttattatctcctcttagacctctaaaactattgttacattatctcaaaaatttgagg

SEQ ID NO: 371195 - DNA, 589 bp, Homo sapiens
cagagatttacccactttcattatttctagtttttaaaaatgtcagtagactgcttatttgtgtattttatttttttggcttttttcctcctaagattttttttcataggttctcttttatcataatctcaaattcttctcattctatttcccctcccaccatacacactgtgaagcagtgactagctccttcttagctgcggtaaaacctgcaaatctttacggcatttgaacacagtgaccatttgtttcaaggatttagggcaaggaaatgtggagaagtactttttctggaatgtgaatggtattagacacaaccgtggatgtttaggattatagatcatgctgtgacagaatgacaaaggtgtcaatgtggtctttaatataatttgtgtgttggtggtatgatgtgccatttaaagcatcgcttctcaaacattaatggtacatatgcatcacccggagaagcttcttaaaatgcagattctgaatctttagatctcggatggggcctracagtcagcatttctaacaggtgcctgagtgatgctgttgctgttggtccgagatccatctcttgagttgtaag

SEQ ID NO: 371196 - DNA, 606 bp, Homo sapiens
tagtcataaagtagatagagtgaagacaagataaataaactctcataattcttagattttctgtggcattgaccatgctatttgtgaaagcttaaactctttctctttcagttactaaattcagtggtccttatatttgaaatttttaccttgaattttaatttacttttgccatttctcttcttttcattcattctatcaactttgcactaagtgcttactatttactacatgcaagagcctggcagaccagaggtaaaggcaataaccctgttgaaaaaatcccttttcctttaaattttccacttccccagctttcctaatggagaaaactctttcttactcttttccagttttgaaagttcctgatctctctctctctctctctctctctctcaatctgcctctgtgtgtgtgtgtgtctcctaaggatctcktacccatactaaaatttgattccttacacattgcttttctgtccccatacactacccctttgggtgatttcattgacttacattgtttcaactactaattatgtgtctctttcttccaaatgtatttgtcctcttagacctctctttgcagtctaggattcattaatca

SEQ ID NO: 371197 - DNA, 435 bp, Homo sapiens
ggctattttgtctacattgaaaatttgttctttaatgtagctatcattatcaattatcttagctagatcttctgcaaagcttgctgtagcttctccatcakcacttgctgtttcaccttctacttatagagatggtttatttccttaaacctcatgaaccaacctattctagctttaaacttctattctgcagctttaccacctctctcagctttcacataattgaagagagctagggccttgctctgcagtgggctttggcttaagggaatgttgtggctggtttgagcttccatgcagaccactaaagctttctccatattagcaataaggctgttttgctttcttgtcatttatttattcactggagtaacactattaatttcctctatgaactttttctttgcattcacaacttgtttaacttagttttca

SEQ ID NO: 371198 - DNA, 603 bp, Homo sapiens
tgtatgagctcagtctcttttgtgaatgacagcatttgcaatttaagtccatctggaacacctcaagcattcaattcatttattaacttattaccaagcttggcatatgaatcctcagactatcagtgaggcagaaaacttaaatgaaattagataaacagactttaatagaacagtatgtgtattagagatattgaaaagagcttcctgtttttcatttttaaagagtgcacrtctatttatctctttgatgccagattggtaaaaattagctttgccttaactttacagcagattttaaaactattgttgataaaaagaaatgaaataactgttgtggccagaagagggagatcttgtaaaaatatttggagcaaaagtgtaaaagaattttgagatttgcacttagatgagtaaaaagaaagatgattaaagtttaagaagttaatgctttctataattagaaaagtttattttgtaaaataccttttggaaaaatggggcatagcaatgcaatttatacaaactttcatgtataaagtgttatttctaatcataaagtttttattattgataaaagcttgaataaaattcaaacaataa

SEQ ID NO: 371199 - DNA, 539 bp, Homo sapiens
cattttctctctcctgtggttaaaaaatgtagtttattttcaaaggggacagaaaactggaatcaagtcacaaaggcatttacctgtcacagactaggagcataccacagagagcaaaactgatggtactgtgcatctgtgcattcagcattctgtggctcaaagccactagactcttttctgcatgaccaactgactaattgctgtacttggccttttctattytcttcaattaatgcaatgcacaattgcacatagcaacagagtcacccatacagaacagaatctgggccagaattaggctctaaatcccagaagcacctgttacaaatataaagcgtccagatggtccagtctttgtggggaagtgtgaagcattgacttttctgtctttcttacttgtggtttaaggtcaaaatcatgatctgttggaagcagggagccatataaatatcagaaaaaatacctaggattagtgttgaaactcctcaatttgtttgtctaaatctttattgctcagtgaagctcattgttatcat

SEQ ID NO: 371200 - DNA, 596 bp, Homo sapiens
tatttaaattgtactttcacgtattcataatccttcacaataacaatttaaatttwagtgaaccatctagacattttgtactttgtattacaaaagaagttaatgtaatgctttttatttgctacttttcaatatcagttctacatggtgcatgataacttgctcttggaattgatattttttacaatttttctgcaaataaagagaaaaaaggttattttctgaaaatcatcacgtgttcttaattaattctcaaatgtggcaaccaacaggaaaagcgagttttctttcttttgttgcttatgccaaagctctaagaaattttgttaccaaaatgattacactggacttatttcagactgttggaaaggacttaatatatacaatacatactaaagcttttattctgggtcaaaactaccagttcatatctatttttccctttcaaatttttttaaagagatatactttaaagacagatctaaatctttctaatattaatattaaccgataatattagttgtcacacaatattcagattctagatgccttttattaccatttggaaatgttacatattttgctgaagtatattc

SEQ ID NO: 371201 - DNA, 596 bp, Homo sapiens
tatttaaattgtactttcacgtattcataatccttcacaataacaatttaaattttagtgaaccatctagacattttrtactttgtattacaaaagaagttaatgtaatgctttttatttgctacttttcaatatcagttctacatggtgcatgataacttgctcttggaattgatattttttacaatttttctgcaaataaagagaaaaaaggttattttctgaaaatcatcacgtgttcttaattaattctcaaatgtggcaaccaacaggaaaagcgagttttctttcttttgttgcttatgccaaagctctaagaaattttgttaccaaaatgattacactggacttatttcagactgttggaaaggacttaatatatacaatacatactaaagcttttattctgggtcaaaactaccagttcatatctatttttccctttcaaatttttttaaagagatatactttaaagacagatctaaatctttctaatattaatattaaccgataatattagttgtcacacaatattcagattctagatgccttttattaccatttggaaatgttacatattttgctgaagtatattc

SEQ ID NO: 371202 - DNA, 574 bp, Homo sapiens
atcctacacttcctggaagatgtttggcctcaaagtgtcatatgctaagtcacttgtcactgctgccaaatcactcttttgtgcacgatgctacaactgaacaaaaaataagtgttcattttctaccctttggcatggttttggaatttatattaccaggttaatttacagttcttgaatcaccttgaaawccttgaagttgacacatatattgtaaaagtagaaactgcataaataataaggagattgttagagaataccttaagtagttggcattctttagagggtacataccaatgacaggttggcccagagaatccacaggggtcatgatgaagacctccaacaaactagaacggttttctaatttaaatgaatacatttctttacaaaaaataatattcttttatacctcatagcaaatattaattttacattgtgttgctatattgatttctttttgtttggtttgtatatcatattccaacaagttatgcaaccagtttatttaagtttcttctattttgattattgttatgattatttcttcaaaagaaattagagaaactataat

SEQ ID NO: 371203 - DNA, 617 bp, Homo sapiens
atactatggtttggtttctaagagttattgcctgcctgcagcacttcaaatcactgcatttcagtggttaggttactcactgcatatttctagttgctagcattctagtgacagaactgtgtccaaagatatcaaaagtgtgatgatttgggtcccatggaaaatttatcaaagtaaaacaactaacttttctgtccatcaatttttcaaagtaaatgtaaataccagtaaattttatacaacaaaacagggaaaaagtaagaacaagcacacagttatttcttttcagctattttaaaggagcattatcacatatttccaagattagttcctagatacagtactgacaactgattatgtaacttccaccactaaaatcttcttaccagtacaaaagttgtacatattttgttttcaagtacatacatgaaggcccattactgattaacggcttggatcaaagatcactagaaagtctcacaattttttattactacttaatccaagtgaatatcagttaattttaataaaggtaaacacaactgaattagttcragagaaataccaatcacttaaggacaaggctaatctttcctgaacattaaaattttgcaccc

SEQ ID NO: 371204 - DNA, 577 bp, Homo sapiens
ggtcatgacaattacagtcctgtttttatagctggtcacatgccatcgctggtgtttataactactgtcttccactacccattctataatccctgtgccttcagcaagcacctcagctgcttgtgtttctttaccttgtggggtaacctagtctggagcatgagtaggactctacctgaattgggttgttatagtgttccattcactataattacaggacatggtcatactgagggacttcctaaggaatctcttgtattcctagcatactcttcttgatctccattgtagcatagtagtccagtttccyttgggtaatctatatcagttactctcttcagcacagtaactgtcttctttgcctgttgattccagaaacctgaagagtccaaagttgctacatgttagtcttatattccagtctaatggaatcattgtgtctcctggtagaaacattcttctcttaggagctgagatttctagtcaacaagagaataaagttatgaaggcaagaagcaaaagctttcacactacaggtatggtgagtgctctcacttccattttcatgcttttgttt

SEQ ID NO: 371205 - DNA, 508 bp, Homo sapiens
tcttttccaatcaatgccctcactttaacagtagacacctggcgaggctgtgcatgcatcttttgttgcaggttagccactcacataataagagyttgtgtctgtttttccacaatttcagctctttctctacagaagataaaactcttactcagggcaatcttagcaggtttgaggctcagtatctgtttctgaagtggggagttagaatccctgagttcatcattttctttcgtcactttgtccactgaacttaggagcaatcaactagcttcattatgttcctttgttctccacatatggtcaaaggtattatgtatagagtcactaaactcctttcctctcatgagtggtgaatcaggagtgccaaatgcatttattttgcataactctctaaatgatttctgccacggactaccagtgttccccatactattagaagtagagtccttagcattttcaggtctaatcatattaagaagccaactccagaaaccctaaaaccaat

SEQ ID NO: 371206 - DNA, 508 bp, Homo sapiens
tcttttccaatcaatgccctcactttaacagtagacacctggcgaggctgtgcatgcatcttttgttgcaggttagccactcacataataagagtttgtgtctgtttttccacartttcagctctttctctacagaagataaaactcttactcagggcaatcttagcaggtttgaggctcagtatctgtttctgaagtggggagttagaatccctgagttcatcattttctttcgtcactttgtccactgaacttaggagcaatcaactagcttcattatgttcctttgttctccacatatggtcaaaggtattatgtatagagtcactaaactcctttcctctcatgagtggtgaatcaggagtgccaaatgcatttattttgcataactctctaaatgatttctgccacggactaccagtgttccccatactattagaagtagagtccttagcattttcaggtctaatcatattaagaagccaactccagaaaccctaaaaccaat

SEQ ID NO: 371207 - DNA, 563 bp, Homo sapiens
aataatggactaatacagtcttgcacattataaagaccaatactcaagaattgtaatatgcaaaattattcataataacaaaaatttggaaataatgtctatcaacaggacaagcataaataaattgtcatatatttaccaaatggaacattrtaaagattgaagaaagataaattggtgttgtaatgatgacatagattaattctagaaagaaatttatttaaaaaacaagtttcaggaccgggcatggtggctcatgcctgctgtaatcccagaactttgggaggccaaggcgggcggatcacctgagatcgggagttcaagaccagcctgatcaacatagagaaactccatctctactaaaaatacaaaaaaattagccaggtgtggtggcacatgcctgtaatcacagctactcaggaggctgaggcaggaaaattgcttgaatccgggaggcggaggttgtggtgagccgagatcatgccattgcactccagcttgggcaacaagagtgaaactccatcccccccaaaaaaaaagaagtttcaaaatggtactttcag

SEQ ID NO: 371208 - DNA, 563 bp, Homo sapiens
aataatggactaatacagtcttgcacattataaagaccaatactcaagaattgtaatatgcaaaattattcataataacaaaaatttggaaataatgtctatcaacaggacaagcataaataaattgtcatatatttaccaaatggaacattataaagattgaagaaagataaattggtgttgtaatgwtgacatagattaattctagaaagaaatttatttaaaaaacaagtttcaggaccgggcatggtggctcatgcctgctgtaatcccagaactttgggaggccaaggcgggcggatcacctgagatcgggagttcaagaccagcctgatcaacatagagaaactccatctctactaaaaatacaaaaaaattagccaggtgtggtggcacatgcctgtaatcacagctactcaggaggctgaggcaggaaaattgcttgaatccgggaggcggaggttgtggtgagccgagatcatgccattgcactccagcttgggcaacaagagtgaaactccatcccccccaaaaaaaaagaagtttcaaaatggtactttcag

SEQ ID NO: 371209 - DNA, 611 bp, Homo sapiens
catgcaatggagtgtatgtcctcaggaaactgggatgctcccaccagcccagcattctagtagagagccctgatggttatctgctccagcattcccacagcctggggtctttcaatgccctctgccccaccttctgagacaggatatatgcacagaaaacagacatccttttatgtgactcttgacaactctgaatgaagagggagcatctactgyaactcctctgtgcacttttaaagtaactggaaaagttctctggatatgtccctcttctgcttccctgaccataaagtctctagaaaggcttcttgagacttcccccaattctgggatattccactgccctccccagcaaacccatacttgattaggcttcacaaaaaatatggctaatattgaaggccaaaaagatgatagagggggaagagttggtacctgagcctagtgtttgtccagcggagtcaaaggaaagaaccactgaatctgcaacacaagaggacaagttcatttctttctccttcttataataaaaaagcaagctcccactggctctgcccaaaccctccctcaaagcagagtcaactggaagggaactcagtcgaacagcccag

SEQ ID NO: 371210 - DNA, 594 bp, Homo sapiens
acatcacacactggggcctgttgtggggtggggggaggggggtgggatagcattaggagatatacctaaggtaaatgacaagttaatgggtrcaacacatcaatatggcacatgtatacatatgtaacaaacctgcacgttgtgcacatgtatcctaaaacttaaagtataataataaaaaaaaggaaaagaaaaagaaaaaaagacataaaccgcaaatataagggcacagaaatggaaaaaaaagagtatggaataatatactatcaaaatactaaccaaaggaaagcagaggttatcatactagtagcagatagagtagatcttaagactagaagcattattagagaaaaagaggccaattttatcaagataaaatgataaatcagaaatatattccaattgtaaatggctattgtcataggtagatttatggtccctcaaagttatctatgtcctaagtccccaaaaacccatgcaaaaggaatactcagtggtgtgctgtgttgtttgatgaactgtgcatagtaagcagtacccactcatgttcagtacttgctcagatgtcctgctctgtcttcctacagaaatgta

SEQ ID NO: 371211 - DNA, 591 bp, Homo sapiens
ttcacttactgagtgaatatttattgagaagtgatcatgtgccatgtattgccctgagcactggagatgtggccttgaacaaaatcaacatggccctgccttcatgtggcttagggtgtagtggagctgtgtcttaaaatgtcagaatgtgtcttctatgtggacraagtaggaaagggcattctacatggtggaaaagtgcatgaacagagcataaaatggcctgagctaactggactgtgggagctctttagcatggctagagcttcaagtctcagagagaaggatgggtgctaagaccacctatagggtgaaagtcagaccatgagagcttggtaggcccagttaagaaattcaggctttacttaaggccatgggaatccactgaaaagatttaaggtggaaaatgacatagttaagtagtagattattctgaaagctacttgaaatataataaggacagctaaatagtttttgtatcctcactaagtgccaagtacaattctaaagtgatttatatgtactcagttatttcttcctcataataatcaaggtagatgttaccattatttcatacctgtatgaaaactg

SEQ ID NO: 371212 - DNA, 591 bp, Homo sapiens
ttcacttactgagtgaatatttattgagaagtgatcatgtgccatgtattgccctgagcactggagatgtggccttgaacaaaatcaacatggccctgccttcatgtggcttagggtgtagtggagctgtgtcttaaaatgtcagaatgtgtcttctatgtggacgaagtaggaaagggcattctacatggtggaaaagtgcatgaacagagcataaaatggcctgagctaastggactgtgggagctctttagcatggctagagcttcaagtctcagagagaaggatgggtgctaagaccacctatagggtgaaagtcagaccatgagagcttggtaggcccagttaagaaattcaggctttacttaaggccatgggaatccactgaaaagatttaaggtggaaaatgacatagttaagtagtagattattctgaaagctacttgaaatataataaggacagctaaatagtttttgtatcctcactaagtgccaagtacaattctaaagtgatttatatgtactcagttatttcttcctcataataatcaaggtagatgttaccattatttcatacctgtatgaaaactg

SEQ ID NO: 371213 - DNA, 591 bp, Homo sapiens
ttcacttactgagtgaatatttattgagaagtgatcatgtgccatgtattgccctgagcactggagatgtggccttgaacaaaatcaacatggccctgccttcatgtggcttagggtgtagtggagctgtgtcttaaaatgtcagaatgtgtcttctatgtggacgaagtaggaaagggcattctacatggtggaaaagtgcatgaacagagcataaaatggcctgagctaactggactgtgggagctctttagcatggctagagcttcaagtctcagagagaaggatgggtgctaagaccacytatagggtgaaagtcagaccatgagagcttggtaggcccagttaagaaattcaggctttacttaaggccatgggaatccactgaaaagatttaaggtggaaaatgacatagttaagtagtagattattctgaaagctacttgaaatataataaggacagctaaatagtttttgtatcctcactaagtgccaagtacaattctaaagtgatttatatgtactcagttatttcttcctcataataatcaaggtagatgttaccattatttcatacctgtatgaaaactg

SEQ ID NO: 371214 - DNA, 572 bp, Homo sapiens
  misc_feature (1)...(572): n = A,T,C or G
tgtagaaaattgttcatgcgctggttggagattttgctaaggttgaacactgctttcaggtatgagtccagggtactggaatagggaagatggaacaacatgttagtgggtgacacagttattggcaaacaattaccttccttttrtcactgacctgtccaactggatgctgccctggtggctgaaggcacacttcatgatgctgtccagggtcatcagggagacatgttgaaagagctccagacgtgagttttgggcaatgtgttcctcccatttgttctggggcaggggatgaatatcatgatcatacacatgcccatctttcccaatttctaagttattttatgtcccttttagagcttgctgggtttgaaaatataaagcgtacaaaatgaatttgccttattatgacaaccatataaaatgaaacaccttgtcagtactgaaaatgatactgtgccttagatgctatttgtgactttgtaagggtggggaaatagcatttttccctctttttcaagtttcattagtacaatttatatgacttttatcatggaaannnnnnnnnnnnn

SEQ ID NO: 371215 - DNA, 572 bp, Homo sapiens
  misc_feature (1)...(572): n = A,T,C or G
tgtagaaaattgttcatgcgctggttggagattttgctaaggttgaacactgctttcaggtatgagtccagggtactggaatagggaagatggaacaacatgttagtgggtgacacagttattggcaaacaattaccttccttttgycactgacctgtccaactggatgctgccctggtggctgaaggcacacttcatgatgctgtccagggtcatcagggagacatgttgaaagagctccagacgtgagttttgggcaatgtgttcctcccatttgttctggggcaggggatgaatatcatgatcatacacatgcccatctttcccaatttctaagttattttatgtcccttttagagcttgctgggtttgaaaatataaagcgtacaaaatgaatttgccttattatgacaaccatataaaatgaaacaccttgtcagtactgaaaatgatactgtgccttagatgctatttgtgactttgtaagggtggggaaatagcatttttccctctttttcaagtttcattagtacaatttatatgacttttatcatggaaannnnnnnnnnnnn

SEQ ID NO: 371216 - DNA, 572 bp, Homo sapiens
  misc_feature (1)...(572): n = A,T,C or G
tgtagaaaattgttcatgcgctggttggagattttgctaaggttgaacactgctttcaggtatgagtccagggtactggaatagggaagatggaacaacatgttagtgggtgacacagttattggcaaacaattaccttccttttgtcactgacctgtccaactggatgctgccctggtggctgaaggcacacttcatgatgctgtccagggtcatcagggagacatgttgaaagagctccagacgtgagttttgggcaatgtgttcctcccatttgttctggggcaggggatgaatatcatgatcatacacatgcccatctttcccaatttctaagttattttatgtcccttttagagcttgctgggtttgaaaatataaagygtacaaaatgaatttgccttattatgacaaccatataaaatgaaacaccttgtcagtactgaaaatgatactgtgccttagatgctatttgtgactttgtaagggtggggaaatagcatttttccctctttttcaagtttcattagtacaatttatatgacttttatcatggaaannnnnnnnnnnnn

SEQ ID NO: 371217 - DNA, 639 bp, Homo sapiens
caagactccatcaaaaaaaaaaaattgcagatgtgtaacttgatacataggtaggtatcaatagctgtcttatgttcatgatgaattgtggcttttaacattatgaagactaatttttgaacttcaccaatcctgacatggccagctagctwactgactgaggtaaagacctaatttgggttagaatggcaactggaacaccataacagtgctgcatccacacagcaaagatcactttcaaaaaacaaatggccaggtcaccgttaacgaattcttcctaagtgattaatccacatattgctagctaatcaaggacattcaagaaatttgctttcttaacatgggtcagagattttgaagtttagagcttcaaaaacccaatgttatttaactctcccaagcctcaatcatagggtctaacctctatggttggattaggtttatatcctggcagtacacattctttcatttttcaatttttggttccagaagccttgttctcttttaaatggtttctggaagtctcaccaagatcatcagaacagactgcccattgaagttcagtagtagctaatacctaagaagtatgattcacaggctcatcaattattagctcctttgggtgagtctcaaatcatg

SEQ ID NO: 371218 - DNA, 639 bp, Homo sapiens
caagactccatcaaaaaaaaaaaattgcagatgtgtaacttgatacataggtaggtatcaatagctgtcttatgttcatgatgaattgtggcttttaacattatgaagactaatttttgaacttcaccaatcctgacatggccagctagcttactgactgaggtaaagacctaatttgggttagaatggcaactggracaccataacagtgctgcatccacacagcaaagatcactttcaaaaaacaaatggccaggtcaccgttaacgaattcttcctaagtgattaatccacatattgctagctaatcaaggacattcaagaaatttgctttcttaacatgggtcagagattttgaagtttagagcttcaaaaacccaatgttatttaactctcccaagcctcaatcatagggtctaacctctatggttggattaggtttatatcctggcagtacacattctttcatttttcaatttttggttccagaagccttgttctcttttaaatggtttctggaagtctcaccaagatcatcagaacagactgcccattgaagttcagtagtagctaatacctaagaagtatgattcacaggctcatcaattattagctcctttgggtgagtctcaaatcatg

SEQ ID NO: 371219 - DNA, 639 bp, Homo sapiens
caagactccatcaaaaaaaaaaaattgcagatgtgtaacttgatacataggtaggtatcaatagctgtcttatgttcatgatgaattgtggcttttaacattatgaagactaatttttgaacttcaccaatcctgacatggccagctagcttactgactgaggtaaagacctaatttgggttagaatggcaactggaacaccataacagtgctgcatccacacagcaaagatcactttcaaaaaacaaatggccaggtcaccgttaacgaattcttcctaagtgattaatccacatattgctagctaatcaaggacattcaagaaatttgctttcttaacatgggtcagagattttgaagtttagagcttcaaaaacccaatgttatttaactctcccaagcctcaatcatagggtctaacytctatggttggattaggtttatatcctggcagtacacattctttcatttttcaatttttggttccagaagccttgttctcttttaaatggtttctggaagtctcaccaagatcatcagaacagactgcccattgaagttcagtagtagctaatacctaagaagtatgattcacaggctcatcaattattagctcctttgggtgagtctcaaatcatg

SEQ ID NO: 371220 - DNA, 611 bp, Homo sapiens
atttccacagcagaactggggggcaggaggatgggtggataaaatgagttaayacatgcaaaacatatggaacaatgcttagtccctagtaagtactaaatagtttttgtttttgttattacaatagtaaagttgattttgtaggaaacaaatatttaattgctattgggcaactatggtagcacagtagcaattaaatattgctacatttaattagattgcccaatcaaatccaatatttgaaagacggttaaattggaggaagttgtagaaacacatctcgacataggtcaaagataaattctggctcattcctttatgtctctaatgttgcctttcaatccatcttgcattccaccaatgtattaatctttctaaaaaataactataatcatgccacccagcttagacgtcttaaatctgtctgctgcttgattgagaaagactgaacacaaaggttggccttcagaaaactctatgatctggctacatcatggctccaggtatagtcccacaatttccctctgtgaatcctggagtctgtggattacagcaattgctccagtgacatgccctgccggtgtgcgtgagggaagggagaaggcaggctg

SEQ ID NO: 371221 - DNA, 611 bp, Homo sapiens
atttccacagcagaactggggggcaggaggatgggtggataaaatgagttaacacatgcaaaacatatggaacaatgcttagtccctagtaagtactaaatagtttttgtttttgttattacaatagtaaagttgattttgtaggaaacaaatatttaattgctattgggcaactatggtagcacagtagcaattaaatattgctacatttaattagaytgcccaatcaaatccaatatttgaaagacggttaaattggaggaagttgtagaaacacatctcgacataggtcaaagataaattctggctcattcctttatgtctctaatgttgcctttcaatccatcttgcattccaccaatgtattaatctttctaaaaaataactataatcatgccacccagcttagacgtcttaaatctgtctgctgcttgattgagaaagactgaacacaaaggttggccttcagaaaactctatgatctggctacatcatggctccaggtatagtcccacaatttccctctgtgaatcctggagtctgtggattacagcaattgctccagtgacatgccctgccggtgtgcgtgagggaagggagaaggcaggctg

SEQ ID NO: 371222 - DNA, 611 bp, Homo sapiens
atttccacagcagaactggggggcaggaggatgggtggataaaatgagttaacacatgcaaaacatatggaacaatgcttagtccctagtaagtactaaatagtttttgtttttgttattacaatagtaaagttgattttgtaggaaacaaatatttaattgctattgggcaactatggtagcacagtagcaattaaatattgctacatttaattagattgcccaatcaaatccaatatttgaaagacggttaaattggaggaagttgtagaaacacatctcgacataggtcaaagataaattctggctyattcctttatgtctctaatgttgcctttcaatccatcttgcattccaccaatgtattaatctttctaaaaaataactataatcatgccacccagcttagacgtcttaaatctgtctgctgcttgattgagaaagactgaacacaaaggttggccttcagaaaactctatgatctggctacatcatggctccaggtatagtcccacaatttccctctgtgaatcctggagtctgtggattacagcaattgctccagtgacatgccctgccggtgtgcgtgagggaagggagaaggcaggctg

SEQ ID NO: 371223 - DNA, 611 bp, Homo sapiens
atttccacagcagaactggggggcaggaggatgggtggataaaatgagttaacacatgcaaaacatatggaacaatgcttagtccctagtaagtactaaatagtttttgtttttgttattacaatagtaaagttgattttgtaggaaacaaatatttaattgctattgggcaactatggtagcacagtagcaattaaatattgctacatttaattagattgcccaatcaaatccaatatttgaaagacggttaaattggaggaagttgtagaaacacatctcgacataggtcaaagataaattctggctcattcctttatgtctctaatgttgcctttcaatccatcttgcattccaccaatgtattaatctttctaaaaaataactataatcrtgccacccagcttagacgtcttaaatctgtctgctgcttgattgagaaagactgaacacaaaggttggccttcagaaaactctatgatctggctacatcatggctccaggtatagtcccacaatttccctctgtgaatcctggagtctgtggattacagcaattgctccagtgacatgccctgccggtgtgcgtgagggaagggagaaggcaggctg

SEQ ID NO: 371224 - DNA, 572 bp, Homo sapiens
cctaggcacatagccatcaggttatctgaagtcaagatgaaggaaagaatcttaagaactgtgaggcaaaagtgtcaggtaacctgtcaagaaaaacctrtcagattaacagcagatttctcagcagaaaccctacaagttagaagggatttgggtccttttttttttttttttttttgagatagagtctcactctgttgcccacactggagtgcagtggcgcgatcccagctcactgcaacctctgcctcctgggttcaagtgattctcctgcctcagcctcctgagtagctgggactacagggcacaccaccacacgcctggctaatttttctatttttagtagagatggggtttcaccatgttggccaggatggtctcgatctcctgacctcgtgatccacccacctcagcttcccaaagtgctgggattacagacggagccacagtgcccagcctagggtcctatttttagcctccttaaacaaaacaatggtcagccaagaattttgtatccagtgaaactaaccttcatcaatgaaggaaagatagtcttttccagacaaacaaat

SEQ ID NO: 371225 - DNA, 507 bp, Homo sapiens
tcctggcttcaggaactcatggctcaccccttcttgctgctgatcctcctctgcatgtctctgctgctgtttcaggtaatcaggttgtaccagaggaggagatggatgatcagagccctgcacctgtttcctgcaccccctgcccactggttctatggccacaaggaggtaagaggagaaaattagttggggaggttaagggacagaaagatgaggtattaaaaaaaaacagcacagactggtggggcattatgtaatatkcaaaatgctttcacaccaatctcattgtgatttttacaaaaattctatgatatggggaggaaagatattgttattcctgttttacagataagaaaactgaagcctaaaatagaaatgcaactttcctgtgctacccacctcataaatgacagaaatgaaacttgaaccctggtcttctgattcaaggccaaggtctttactattctcaggactctgggtgttctagagagaaatagaccaagccaa

SEQ ID NO: 371226 - DNA, 329 bp, Homo sapiens
tacccttctctagtgtcattaattgatatcatattcccatatgtgcttttcttttaattacattcattttattgtggtaaaatatacataamctaaaaatttaccattttaaatcacttttaagtatacaatttaatggcattaaatacatttacattgttgtgcaactatcaccgccatccatcttcagaactttttcatcttcccaaactggaactctgtacacattaaactctaactccccattttcccctccccccagcctcaggcaacaaccattctactttctgtctttttaaatttccctattctaggtacctccataagta

SEQ ID NO: 371227 - DNA, 329 bp, Homo sapiens
tacccttctctagtgtcattaattgatatcatattcccatatgtgcttttcttttaattacattcattttattgtggtaaaatatacataaactaaaaatttaccattttaaatcacttttaagtatacartttaatggcattaaatacatttacattgttgtgcaactatcaccgccatccatcttcagaactttttcatcttcccaaactggaactctgtacacattaaactctaactccccattttcccctccccccagcctcaggcaacaaccattctactttctgtctttttaaatttccctattctaggtacctccataagta

SEQ ID NO: 371228 - DNA, 536 bp, Homo sapiens
ttaagaaatcagtgtattgaatttcattatcatcatcttttttgatggccaaattgtcccagatatggagaaggagacaaagcaagagaagaggctggtagacatgggcccagtcattcagaactttgtaggctgagtaatggtgagcatcaaaggagagaagtactgtgaatatctgtgtgttttgaaacatcactcagacagctgtatgatgaatggctggagggaatcaaggctggagaccaggaatccaccttatcctgctgcactgtccaaaggacagatgatggaggcctggacaaaggtagaggggtggaggtggaaataattgtatgaattcaagagatactaatgaatgtaccaatatttttgacatgggggtatcaagctgtcaagcagtccctaagctacttagctggttcactgcacattcataaattcagtcagcaaaaagccagygggcctgaatggatttagactgtttattactcatggcataataggtatcatgagcttcacattaacatcggccccac

SEQ ID NO: 371229 - DNA, 518 bp, Homo sapiens
ccagacagaaacctcataccmattttaagcagttattccccattcctcccttgccccagtcactggcaactactaatctgcatttttgtctctatgaatttacttattctggatttttcatataaatggaatcacacaatatgtgaccctttgcattttgcttttttcacttagcataatgttttcaagattcatacattttgtagcattgtttcttttcatgaattatattctactgtatgaatataccacattttgtttatgcattcatctgttaatagacctttgaattgtttcaacttttggccattatgcataatgctgatttcataaaaatgaaaagcttttgtgtgtcaagggccactaaaagcaacctgtgcctcctgggttcaaggtgattctcctgcctcagtctcccaggtagatgggactacaggcgtgcactaccaaacctgactaattttgtatttttagtagagatggggtttcaccatgttggccaggctggtctcaaacta

SEQ ID NO: 371230 - DNA, 518 bp, Homo sapiens
ccagacagaaacctcataccaattttaagcagttattccccattcctcccttgccccagtcactggcaactactaatctgcatttttgtctctatgaatttacttattctggatttttcatataaatggaatcacacaatatgtgaccctttgcattttgcttttttcacttagcataatgttttcaagattcatacattttgtagcattgtttcttttcatgaattatattctactgtatgaatataccacattttgtttatscattcatctgttaatagacctttgaattgtttcaacttttggccattatgcataatgctgatttcataaaaatgaaaagcttttgtgtgtcaagggccactaaaagcaacctgtgcctcctgggttcaaggtgattctcctgcctcagtctcccaggtagatgggactacaggcgtgcactaccaaacctgactaattttgtatttttagtagagatggggtttcaccatgttggccaggctggtctcaaacta

SEQ ID NO: 371231 - DNA, 564 bp, Homo sapiens
attcaagtcctttgcccgtgattaattgggctgtctttttattgttcagttgtaatagtttttaaatatatatagtacacaagtttttttatcagatatatgatttgcaaacattttctattattttgtggtttgtcttttaacccttttagtggcccttgatacacaaaagcttttcatttttatgaaatctaacttatttatttttccttttgtggcctgtgcttttactatcatttttaagaaaccattgcccagtccaaattcatgaagaccctcccctattttttcttctaagagttttatagttttgactcttatacataggtctttagtcctttttttgggtgaaagaagcctaragtaggggcatttgtttatttatttatttatcttttattttagattaagaggtacatgtgcaggcttcttacctgggtatactgcatgatactgtgaagtttggggtataaatgatgccatcacccaggtgctgagcacagtacccaacaattagtttttcaatccttgccccctttccttcctcccccaccccagtagtcc

SEQ ID NO: 371232 - DNA, 533 bp, Homo sapiens
tgttttggtgactatagctttgcagtaagtttgaaatcaaggtgtatgagttctccagctttggcaggcttatcatacatcaggtcaaacttgtggtccaggcaagcccaggcctcagcaactgctgtggtgttgctcagcatgcacacaggtctctataycttgaccaggtctccaccaggtacctcactggggggctggtaattaataccaaccttaaagccaatgggatgccaatccacaaactggatggtaggcttgatcttgatggtggtgatggcagcattgacatctttggggaccatgtccccatggtacaacaggcagcaagccatgtatttaccatggcaagagtcacatttcactatctggttggctggctaaaagcaagcactggtgatctctgctacaacaagctgttcgtgataggctttctcagcagagatggtgggggaatatgtggccagagggaagtggatgcagagacagggcaccattttggtctagacttctgtcagattaactttcagggc

SEQ ID NO: 371233 - DNA, 533 bp, Homo sapiens
tgttttggtgactatagctttgcagtaagtttgaaatcaaggtgtatgagttctccagctttggcaggcttatcatacatcaggtcaaacttgtggtccaggcaagcccaggcctcagcaactgctgtggtgttgctcagcatgcacacaggtctctataccttgaccaggtctccaccaggtacctcactggggggctggtaattaataccaaccttaaagccaatgggatgccaatccacawactggatggtaggcttgatcttgatggtggtgatggcagcattgacatctttggggaccatgtccccatggtacaacaggcagcaagccatgtatttaccatggcaagagtcacatttcactatctggttggctggctaaaagcaagcactggtgatctctgctacaacaagctgttcgtgataggctttctcagcagagatggtgggggaatatgtggccagagggaagtggatgcagagacagggcaccattttggtctagacttctgtcagattaactttcagggc

SEQ ID NO: 371234 - DNA, 533 bp, Homo sapiens
tgttttggtgactatagctttgcagtaagtttgaaatcaaggtgtatgagttctccagctttggcaggcttatcatacatcaggtcaaacttgtggtccaggcaagcccaggcctcagcaactgctgtggtgttgctcagcatgcacacaggtctctataccttgaccaggtctccaccaggtacctcactggggggctggtaattaataccaaccttaaagccaatgggatgccaatccacaaactggatggtaggcttgrtcttgatggtggtgatggcagcattgacatctttggggaccatgtccccatggtacaacaggcagcaagccatgtatttaccatggcaagagtcacatttcactatctggttggctggctaaaagcaagcactggtgatctctgctacaacaagctgttcgtgataggctttctcagcagagatggtgggggaatatgtggccagagggaagtggatgcagagacagggcaccattttggtctagacttctgtcagattaactttcagggc

SEQ ID NO: 371235 - DNA, 577 bp, Homo sapiens
gagttctccagctttggcaggcttatcatacatcaggtcaaacttgtggtccaggcaagcccaggcctcagcaactgctgtggtgttgctcagcatgcacacaggtctctataccttgaccaggtctccaccaggtacctcactggggggctggtaattaataccaaccttaaagccaatgggatgccaatccacaaactggatggtaggcttgatcttgatggtggtgatggcagcattgacatctttggggaccatgtccccatggtacaacaggcagmaagccatgtatttaccatggcaagagtcacatttcactatctggttggctggctaaaagcaagcactggtgatctctgctacaacaagctgttcgtgataggctttctcagcagagatggtgggggaatatgtggccagagggaagtggatgcagagacagggcaccattttggtctagacttctgtcagattaactttcagggctccatcaaatctgagggaagcaatgatggaggacacaatctggctaataaggcagttaaggctagtataggttgggcattcaatattgagg

SEQ ID NO: 371236 - DNA, 620 bp, Homo sapiens
tgatttcaatctttttaaatttattgagactttttttgtgacttaccatatgatctatgctaaagaatgacccatgtgtacttgagaagaacatgtaatctgctgttgttaggtggagcttttagaacatgtctgtttggcataattatagtgttgttcaagttctctatttccttattaattttttgtatcattgttctgtccattattgaaagggatgtagtgaattctccaattataattttagaactgtctatttctcccttcaawgctgtcagcttttgcctcatatactgtggggttctattgttaggtatatatttatatattataactgttatatcttcttgatggattgaccccttaacaatatataatgtctttctttgtgtcacaatattttaaggtatagttaactgataatcacccagctctcttttccttactgtttgcatagaataccttttctacccttttacttttaacctctttgtttcttcagatctaaagtgagtctcttgtaagcagcatattaatgggtcccatttttttactccattctgccagtctctgccttttaattgaagtttaatccatttacatttaaaataattactgat

SEQ ID NO: 371237 - DNA, 620 bp, Homo sapiens
tgatttcaatctttttaaatttattgagactttttttgtgacttaccatatgatctatgctaaagaatgacccatgtgtacttgagaagaacatgtaatctgctgttgttaggtggagcttttagaacatgtctgtttggcataattatagtgttgttcaagttctctatttccttattaattttttgtatcattgttctgtccattattgaaagggatgtagtgaattctccaattataattttagaactgtctatttctcccttcaatgctgtcagcttttgcctcatatactgtggggttctattgttaggtatatatttatatattataactgttatatcttcttgatggattgaccccttaacaatatataatgtctttctttgtgtcacaatattttaargtatagttaactgataatcacccagctctcttttccttactgtttgcatagaataccttttctacccttttacttttaacctctttgtttcttcagatctaaagtgagtctcttgtaagcagcatattaatgggtcccatttttttactccattctgccagtctctgccttttaattgaagtttaatccatttacatttaaaataattactgat

SEQ ID NO: 371238 - DNA, 620 bp, Homo sapiens
tgatttcaatctttttaaatttattgagactttttttgtgacttaccatatgatctatgctaaagaatgacccatgtgtacttgagaagaacatgtaatctgctgttgttaggtggagcttttagaacatgtctgtttggcataattatagtgttgttcaagttctctatttccttattaattttttgtatcattgttctgtccattattgaaagggatgtagtgaattctccaattataattttagaactgtctatttctcccttcaatgctgtcagcttttgcctcatatactgtggggttctattgttaggtatatatttatatattataactgttatatcttcttgatggattgaccccttaacaatatataatgtctttctttgtgtcacaatattttaaggtatagttaactgataatcacccagctctcttttccttactgtttgcatagaataccttttctacccttttacttttaacctctttgtttcttcagatctaaagtgagtctcttgtaagcagcatattaatggrtcccatttttttactccattctgccagtctctgccttttaattgaagtttaatccatttacatttaaaataattactgat

SEQ ID NO: 371239 - DNA, 620 bp, Homo sapiens
tgatttcaatctttttaaatttattgagactttttttgtgacttaccatatgatctatgctaaagaatgacccatgtgtacttgagaagaacatgtaatctgctgttgttaggtggagcttttagaacatgtctgtttggcataattatagtgttgttcaagttctctatttccttattaattttttgtatcattgttctgtccattattgaaagggatgtagtgaattctccaattataattttagaactgtctatttctcccttcaatgctgtcagcttttgcctcatatactgtggggttctattgttaggtatatatttatatattataactgttatatcttcttgatggattgaccccttaacaatatataatgtctttctttgtgtcacaatattttaaggtatagttaactgataatcacccagctctcttttccttactgtttgcatagaataccttttctacccttttacttttaacctctttgtttcttcagatctaaagtgagtctcttgtaagcagcatattaatgggtcccatttttttastccattctgccagtctctgccttttaattgaagtttaatccatttacatttaaaataattactgat

SEQ ID NO: 371240 - DNA, 581 bp, Homo sapiens
aatgccataagatatcttcttacccttagaactcaaggtattttataggttcatttcacctggacttytgcagaaagtgaatctcatgttaacaatcctctcttttcctagatgttcatatgttttctcccccatttttatttccctgtctttatcccacataaagatgttgatggaatgaataaaggacattaattcttgttttcccaaaactgtaaaaccaaggttatgtcccttatcttttcttctgattcatttatatacatctttctcaaacaaatccaacaagggtaaaatctacaatttatctcaaagtcatgttcctgtgtctagctgtacatgtctatgtgaaaaggaactggagctttaaaatgttgtcagagttccccaacaaaaacaaatgtattttttcaacttatgttgaaagaaaattatactctgaaaattatacaaaggaaattatgctctgttttccactgctattgacctcgtagcaccaagtgctgtggagaaagaataaacaagttctcattctaattctgtggcttccctgggactctcggtactgaagaactagcctc

SEQ ID NO: 371241 - DNA, 581 bp, Homo sapiens
aatgccataagatatcttcttacccttagaactcaaggtattttataggttcatttcacctggacttttgcagaaagtgaatctcatgttaacaatcctctcttttcctagatgttcatatgttttctcccccatttttatttccctgtctttatcccacataaagatgttgatggaatgaataaaggacaytaattcttgttttcccaaaactgtaaaaccaaggttatgtcccttatcttttcttctgattcatttatatacatctttctcaaacaaatccaacaagggtaaaatctacaatttatctcaaagtcatgttcctgtgtctagctgtacatgtctatgtgaaaaggaactggagctttaaaatgttgtcagagttccccaacaaaaacaaatgtattttttcaacttatgttgaaagaaaattatactctgaaaattatacaaaggaaattatgctctgttttccactgctattgacctcgtagcaccaagtgctgtggagaaagaataaacaagttctcattctaattctgtggcttccctgggactctcggtactgaagaactagcctc

SEQ ID NO: 371242 - DNA, 581 bp, Homo sapiens
aatgccataagatatcttcttacccttagaactcaaggtattttataggttcatttcacctggacttttgcagaaagtgaatctcatgttaacaatcctctcttttcctagatgttcatatgttttctcccccatttttatttccctgtctttatcccacataaagatgttgatggaatgaataaaggacattaattcttgttttcccaaaactgtaaaaccwaggttatgtcccttatcttttcttctgattcatttatatacatctttctcaaacaaatccaacaagggtaaaatctacaatttatctcaaagtcatgttcctgtgtctagctgtacatgtctatgtgaaaaggaactggagctttaaaatgttgtcagagttccccaacaaaaacaaatgtattttttcaacttatgttgaaagaaaattatactctgaaaattatacaaaggaaattatgctctgttttccactgctattgacctcgtagcaccaagtgctgtggagaaagaataaacaagttctcattctaattctgtggcttccctgggactctcggtactgaagaactagcctc

SEQ ID NO: 371243 - DNA, 603 bp, Homo sapiens
aatcttgctcttgaggatccctttgaaagaatccactctcataaactaagtcttttatgaactcagtggagacctcaaacccacttaccagcaggaatgataaagaaaagcccctttagtcctccatcattgatcctcagcctgaagagaagcacaaaagtgatggaaagaaagcagcacctctgcttcagtctggaactttgtgccagtctaaggcagtatttctcaaagtgtggacctgaactagctgggacccttgtcataactcaaaagtccttgattctacttcaacacctaggaattattggctctgaaggattaagcyaaggaatctgcctctagcaagcacctcgggcaattctcacccaccctaaatttgaactcttatcaagaggctgatgaatctgaccatcaaataggataggatggacctttttttgagttcattgtataaacaaattttctgatttggacttaattcccaaaggattaggtctactcctgctcattcactctttcaaagctctgtccactctaacttttctccagtgtcatagatagggaattgctcactgcgtgcctagtctttcttcacttacctgg

SEQ ID NO: 371244 - DNA, 578 bp, Homo sapiens
gagttcattgtataaacaaattttctgatttggacttaattcccaaaggattaggtctactcctgctcattcactctttcaaagctctgtccactctaacttttctccagtgtcatagatagggaattgctcactgcgtgcctagtctttcttcacttacctggcctstgatagaaacagttgcccctctcatttcataaggtcgaggacttgtgaccctggatggttctaaatggaaaaagcaccgccagattgtgaaacctggcttcaacatcagcattctgaaaatattcatcaccatgatgtctgagagtgttcggatgatgctggtaagaggagaagagagcattcgtacctggcctctgaagtgaggtgctgccagccatatggtgtgggagactctgagttccctcagaaccatgttcacagcagtttatatggggttatttgatgtttagaccatgaccatcatcatcagggcaaggaccctgtcttgtatacccaacacttctcacagggatggactcagggtaggtgctcaatgagaagtagctgaatgaatgagtgagtgagtccag

SEQ ID NO: 371245 - DNA, 274 bp, Homo sapiens
ccaacatagagaaatgtatcatgttcaggaggtcgagtcaggaaacacttcctaagaaaggtgacacgagctgagtcttggagaatggggaggatttctagagatggggactcagagaaaagatggccttgtggtcaaggagaaaagggagctttagctttggctgaggcagaagagggtgcagagatktcacaagacaatctaaaacccatagagaagacacaattgtgtgtctccacacctgtcctcttggagtttggatggcaaagacatg

SEQ ID NO: 371246 - DNA, 274 bp, Homo sapiens
ccaacatagagaaatgtatcatgttcaggaggtcgagtcaggaaacacttcctaagaaaggtgacacgagctgagtcttggagaatggggaggatttctagagatggggactcagagaaaagatggccttgtggtcaaggagaaaagggagctttagctttggctgaggcagaagagggtgcagagatgtcacaagacaatctaraacccatagagaagacacaattgtgtgtctccacacctgtcctcttggagtttggatggcaaagacatg

SEQ ID NO: 371247 - DNA, 274 bp, Homo sapiens
ccaacatagagaaatgtatcatgttcaggaggtcgagtcaggaaacacttcctaagaaaggtgacacgagctgagtcttggagaatggggaggatttctagagatggggactcagagaaaagatggccttgtggtcaaggagaaaagggagctttagctttggctgaggcagaagagggtgcagagatgtcacaagacaatctaaaacccatagagaagacacarttgtgtgtctccacacctgtcctcttggagtttggatggcaaagacatg

SEQ ID NO: 371248 - DNA, 470 bp, Homo sapiens
ataaacttaacaaggaggttaaagatacagggattgaaatgtatggcctgcagtgcaggggattatttctttggcacattttacaggccctgactatctgctcgaaagttttgaaaaggtctggtccagtagataataatttggcctgctgatgggtactatcartgcctaaatgaaaggtttggtgaagggttttaagtcatttccattggttagctgcaggcaaaagtatttttccttctttggtgcctagccatcctgaggagaggaaactatgtcctcatgagtttccccattctatttctcctgctgagtactggggcttggtttcccagaggggattaccccatactaggggtccttctataagtatttctaatggagggtcctaccttgcagctattttggctttgatatccgtttggcagttcccttctatttccctttcttttcctttctgatgaccccgg

SEQ ID NO: 371249 - DNA, 613 bp, Homo sapiens
ttggtgaagggttttaagtcatttccattggttagctgcaggcaaaagtatttttccttctttggtgcctagccatcctgaggagaggaaactatgtcctcatgagtttccccattctatttctcctgctgagtactggggcttggtttcccagaggggattaccccatactaggggtccttctataagtatttctaatggagggtcctaccttgcagctattttggctttgatatccgtttggcagttcccttctatttccctttcttttcctttctgatgaccccggcagcataagattgccacctctttaggtttctgtacagccgrtaataatctcctgatggcttcctgatgtttgatgggtgttcctttggaagtcaggaatttcctttctctccatattgctgtgtgggcatggaggactagctaagcatacttagagtctgtatatatatttaccctttttccttctcctaattctattgcctgagtgagagctattcgttcttccagctaagcgcttcttcctggagtgaggggattattttcaagtattccattatcactgaccactgcataccccacttttcaaagtcctttttctacaaag

SEQ ID NO: 371250 - DNA, 567 bp, Homo sapiens
atgttatgctgttcctaaaccagaccctcacagcagctaaaaatcaggcagctctgcaagcaacagaaaatgttggagatgagcaatatatctcctataatacaccaaaagggaagaaagcagatagggaaagtraagaaatagcaaaaacaccattcccaattgggagagaggcaattctggtaaagacccctaattgcaaccccaataactcagaagataaatggaaaaggaagcactttttaatatgcattttagaaggcctatggaaaaccaggaccaaccctctcaattactctaaactgtctgtaagagaccagaagccagataagaattccgtagcctttacagaaaggctgagagaggctgtactagaaccccaatattagaaggaaagtacagaagcaagctataggaccagatagcaccttagagaacctcctgaatgtggccactttggtcttttataatagggaccagggggaggcccaaaagaagagaaaaagctcaggagaaggagagagacggtagcaacaactttgcaggcttgcaaagtccaggatcccc

SEQ ID NO: 371251 - DNA, 567 bp, Homo sapiens
atgttatgctgttcctaaaccagaccctcacagcagctaaaaatcaggcagctctgcaagcaacagaaaatgttggagatgagcaatatatctcctataatacaccaaaagggaagaaagcagatagggaaagtgaagaaatagcaaaaacaccattcccaattgggagagaggcaattctggtaaagacccctaattgcaaccccaataactcagaagataaatggaaaaggaagcactttttaatatgcattttagaaggcctatggaaaaccaggaccaaccctctcaattactctaaactgtctrtaagagaccagaagccagataagaattccgtagcctttacagaaaggctgagagaggctgtactagaaccccaatattagaaggaaagtacagaagcaagctataggaccagatagcaccttagagaacctcctgaatgtggccactttggtcttttataatagggaccagggggaggcccaaaagaagagaaaaagctcaggagaaggagagagacggtagcaacaactttgcaggcttgcaaagtccaggatcccc

SEQ ID NO: 371252 - DNA, 567 bp, Homo sapiens
atgttatgctgttcctaaaccagaccctcacagcagctaaaaatcaggcagctctgcaagcaacagaaaatgttggagatgagcaatatatctcctataatacaccaaaagggaagaaagcagatagggaaagtgaagaaatagcaaaaacaccattcccaattgggagagaggcaattctggtaaagacccctaattgcaaccccaataactcagaagataaatggaaaaggaagcactttttaatatgcattttagaaggcctatggaaaaccaggaccaaccctctcaattactctaaactgtctgtaakagaccagaagccagataagaattccgtagcctttacagaaaggctgagagaggctgtactagaaccccaatattagaaggaaagtacagaagcaagctataggaccagatagcaccttagagaacctcctgaatgtggccactttggtcttttataatagggaccagggggaggcccaaaagaagagaaaaagctcaggagaaggagagagacggtagcaacaactttgcaggcttgcaaagtccaggatcccc

SEQ ID NO: 371253 - DNA, 622 bp, Homo sapiens
gcagttgggcctcctcctgaggttgatctaagggttctcaaaaaaatagcttgttcatgtgtggttctgcctgcagcactgtttggagtttgattgcttctaggtgaaaagagataaattttacaagaaggtttaaaatatagggttagaatatgagtattaagagtatcactgttaatggggataactataggccataacagagtttgatacctgttacaccaatggattgcaatattggtttgcstccattaggtgtcgctgtgcattaccagaaacattaacataaaagtaacatttttcttaagaaaagcatacatttcccccttgacttgtcattagagaataacttccacaatgtggaattctggttgtaaaattctaattgctgtaatattttgcctaattattatccgtatcctgcacatcctgcacatatacctcggaacttaaaaaaaaattattaaaaaaacccatcacaacaatatttaaaaatatgagaagtagtaaatagaggttcaaatggtgtaagatccttgcattttcagggaagtatttaatgtaattacatatgttagattctaataaataaagactacatgttgtaatttctagcataccc

SEQ ID NO: 371254 - DNA, 621 bp, Homo sapiens
tccacaatgtggaattctggttgtaaaattctaattgctgtaatattttgcctaattattatccgtatcctgcacatcctgcacatatacctcggaacttaaaaaaaaattattaaaaaaacccatcacaacaatatttaaaaatatgagaagtagtaaatagaggttcaaatggtgtaagatccttgcattttcagggaagtatttaatgtaattacatatgttagattctaataaataaagactacatgttgtaatttctagcatacccatgaaaactaaacttatgatctaaaacagaaaaaataataatataaaatgatccagcaattaataaaagaagggataaaaatcggttaaatagaaaacaaatagttacacggcatgttgaaatccaaatattctagtgattacattaaatataagtggtttaaatgctctaaccaaagcacaaakattttcagactacataagcaaaatctaaataaatgctgcatatgagaaataaaccttggctgagcacagtggctcacgcctgtaatcctagcactttgggaggctgacgcaggcaaattgcttgagctcaggagttcgaaaccagcctgcacaaaatggtgaaac

SEQ ID NO: 371255 - DNA, 578 bp, Homo sapiens
ggctacttttctgttctttctaaagagagctccaaattattctcttgtctttcaggaaaaaaaaaaaaagtttatttatccataaattgtctgtcattggttttctaatcaatggtgtgtgaaatgtcttatttctttatttcaccttggctctgatgcattggaaatgaggacttgatccctgggctggcacttagaacttaaacaatagggtccaagtggagctcctcttctgagagagctgaatgattagctgcattatttaaggctcattttagacatctcccagccgcttgtcaccaattttattcctcargattgattttagacttcagacataatattcgatgatatatactatagttaagtttagcaaatatggactgaggacattttaaatactgagactttttttatgactacaatttattgtgggccctgtcttcggtgagctaatggtctaatacaggagacaggagacagacctccaaattgcagtgtagcataatgagggcaatgatagagatatgtgctggctaacacaaagacatagaagacaggtacctaccctggcatgg

SEQ ID NO: 371256 - DNA, 626 bp, Homo sapiens
tcatttcaacttggagaattcacattagcattttttgtaagatgggtctagtagtggtgaacaccctcaacttttgtttatctggagatgtctttacctctgcttcattttgaaatataacttttgttccatgattgaaatggacaaaattgtttttttaattatgcaaagtgccagggtaagcagaattactctttttttttttttctgagaccgagtttcactcttgttgcccaggctggagtgcagtggcgcaatctctcagcttaccgcaacctctgcctcccaggttcaagcrattcttctgcctcagccttcctgagtagctgggattacaggcatgcaccaccatgctcggctaattttgcatttttagtagagacggggtttctccatgttggtcaggctggtcttgaacacccgacctcagatgatccgcccacctaggcctcccaaagtgctgggattgcaggtgtgagccactgcgcctggccagaattactcttatttatcctgagcttgaggaagaaagaattcaaaattaaaatttcacattacctaatggccaaagcctgcattcaaaataagtaatcagaaaaacatataaaaacacaataagataaaca

SEQ ID NO: 371257 - DNA, 542 bp, Homo sapiens
atcctctctgaaatgaatttgcataagagagaactgttgcttgtaggaatgcatcttgatggggcatctgggttattaggaaatactcaggaacccagtgcaactctagaactcacccctgagtgcaatggcaatgtcaggcatgctggtaaaggaccactagaatccagcagccyggacccctttctttgtggtcaagaaaggtgggaaaactggttcaggactgccccattggtgaacgtaactaatccaataagcagaggtccactggtggctatgcaccctagaaaggaactcatctctgagtgcaacagcagtgttggatatgctggtaaaggacctctagaacccagcagccccatcccctttcttagtggtcaggaaaggcaggaaaataggtggaggactgctacatcattgaaagtaactaatctgaaaagcagaggtccttgagtggttacgcacctgaaaggaataagcattagctccatagaggatgctctaggtctaatgctcatcagaaaatgactaagagtgctggc

SEQ ID NO: 371258 - DNA, 546 bp, Homo sapiens
caacgtcagtgccttaaaacagcagaaatttatagtcttaaatgtctggaggtctcacatttgaattggattttcttgctccaaatccaaggtgttgaggggctctagggagaatctcttttcttccactttttcagctsctagagctttgctctacaggcctattagtgattgaattaagtctacataaattatcaagagttatctctttttcttgaagtcaactgattgtagatgttaactacaaccacaaaatctcttcacaacatctggaatagcatttaattgaataactgggtattacagcctgtccaagttaacatgtaaaattaaacaacacatttcataccttgtcaatttggcatctatacacatccccttagggtctacttaatctgccagtaaaaactatgacaaagtcatacttttgctaactctcctatacacaattggaagtacattaacctttccctcacaaaggcaatgcaaagtcattgaatgacattcacccttctctttaatattctgtaacttaaatacagtgat

SEQ ID NO: 371259 - DNA, 622 bp, Homo sapiens
tttgcaaactatgcatgtgaaaaaggactaatttttagaatctataggaaacttaaaaagctcaaaaagaaaaaactaataactctatttacaaatgggcaaatcaggaatttgagaccagcctaggcaacacagggagaccctgtctctacaaaaagtraaaaattaagcaggtgtgatggtgcacgcctgtagttccagctacttgggaagctagagcaggaggatcactcgagtccaggatgtcgaggctgcagtgagctatgatcacaccattgcactccagtctgggtgacctggatgacagaacaagactaggtttctaaaaaacaaacaaacagaaaaacctacaaaaaacaaacaaaaaaacctaataaaccactaatcttcactttatgcataatactaaatcaaaactgtattagctccttatttttaataaaaaacacctcctttcaaaaataaaaaaaatgataaatggacaaagaacatgaacagacccttctcaaaaggacataaaagtggccagcaaaaatatgaaaaaatgctcaacatcaataatcaccagaggaatgcaaattaaaaccacagagatactatctcaagctggtcagaatggcca

SEQ ID NO: 371260 - DNA, 622 bp, Homo sapiens
tttgcaaactatgcatgtgaaaaaggactaatttttagaatctataggaaacttaaaaagctcaaaaagaaaaaactaataactctatttacaaatgggcaaatcaggaatttgagaccagcctaggcaacacagggagaccctgtctctacaaaaagtaaaaaattaagcaggtgtgatggtgcacgcctgtagttccagctacttgggaagctagagcaggaggatcactcgagtccaggatgtcgaggctgcagtgagctatgatcacaccaytgcactccagtctgggtgacctggatgacagaacaagactaggtttctaaaaaacaaacaaacagaaaaacctacaaaaaacaaacaaaaaaacctaataaaccactaatcttcactttatgcataatactaaatcaaaactgtattagctccttatttttaataaaaaacacctcctttcaaaaataaaaaaaatgataaatggacaaagaacatgaacagacccttctcaaaaggacataaaagtggccagcaaaaatatgaaaaaatgctcaacatcaataatcaccagaggaatgcaaattaaaaccacagagatactatctcaagctggtcagaatggcca

SEQ ID NO: 371261 - DNA, 622 bp, Homo sapiens
tttgcaaactatgcatgtgaaaaaggactaatttttagaatctataggaaacttaaaaagctcaaaaagaaaaaactaataactctatttacaaatgggcaaatcaggaatttgagaccagcctaggcaacacagggagaccctgtctctacaaaaagtaaaaaattaagcaggtgtgatggtgcacgcctgtagttccagctacttgggaagctagagcaggaggatcactcgagtccaggatgtcgaggctgcagtgagctatgatcacaccattgcactccagtctgggtgacctggatgacagaacaagactaggtttctaaaaaacaaacaaacagaaaaacctacaaaaaacaaacaaaaaaacctaataaaccactaatcttcactttatgcataatactaaatcaaaactgtattagctccttatttttaataaaaaacacctcctttcaaaaataaaaaaaatgataaatggacaaagaacatgaacagacccttctcaaaaggacataaaagtggccarcaaaaatatgaaaaaatgctcaacatcaataatcaccagaggaatgcaaattaaaaccacagagatactatctcaagctggtcagaatggcca

SEQ ID NO: 371262 - DNA, 513 bp, Homo sapiens
ggcctgggctctaaggcacagagtctaatcacatggatggataaagagttaatcaatggtttgttcactcttccacaaacatttctggttccctagtgtggaggccagttcaggtcactgtagggtgaggatgggccataatcaggcgttccctttatagggagaccgacaggcacccagatcctcagagctgggccaaggcgggtatgggcagcggagtcagaagggctttggggaggcttcctagaggggcagtgggtgggtggtcctcagctgttgccccacctgcctcccactccagggtctaagctcctgccttgcccttacgcctcggtccaatagcacctgtagctttctaattctacttcagaagtttttcttctttgtcatcyctcagtcttcttgcctggactttctggatccctgcttctccttcctccacactgaagccacagtccagctcagaccctcccacgctcttcatcacagcggggacagcgtcccaatacctca

SEQ ID NO: 371263 - DNA, 513 bp, Homo sapiens
ggcctgggctctaaggcacagagtctaatcacatggatggataaagagttaatcaatggtttgttcactcttccacaaacatttctggttccctagtgtggaggccagttcaggtcactgtagggtgaggatgggccataatcaggcgttccctttatagggagaccgacaggcacccagatcctcagagctgggccaaggcgggtatgggcagcggagtcagaagggctttggggaggcttcctagaggggcagtgggtgggtggtcctcagctgttgccccacctgcctcccactccagggtctaagctcctgccttgcccttacgcctcggtccaatagcacctgtagctttctaattctacttcagaagtttttcttctttgtcatccctcagtcttcttgcctggactttctggatccctgcttctccttcctccacactgaagccacagtccagctcagaccctcccaygctcttcatcacagcggggacagcgtcccaatacctca

SEQ ID NO: 371264 - DNA, 456 bp, Homo sapiens
tggttggttacggagtccacctctgagcagactggcgggaggatggggggtgggagggaggagtcatggcctatgtttcctctttggggcttattgctagttcttttacactttactctgccagctgtgacagagagagaaaaagactcaaagatgatctggggtcagggacctaaataagagaggctaggggaagagtcatgttagctgtgacttagatctctcttgataaggcatcattaaataatgattatttaagtaatgtcctgtggccttgaacaagtgacttaacctttttggcmgtaggtttccttggtttcaaaattgtagggtatacagactggtgctagactgagagacatcaattctctgtaaaatgaaaaaagataaagaaaatgtagtgtgtctttcataaagctaaacttaaagaattgtcttttattctgaaattgtctc

SEQ ID NO: 371265 - DNA, 555 bp, Homo sapiens
atatactctccactgaaatatatactgtgtgaggatagggctggctggcagtatctcctttggccaacactgtatccccatcttagcatcatgcctagcacaataaatatttacttgatrgtttgactgatggaatgatggaatggctgcctataggcatgaggagtggtgcaggggataaaatagctatccaggtaaaatttgggggctaataccccacagtcaagatgcaccatatatacagactcagatgaagaatgaaaatattaccatggctggtgtgacctggccatgcctacctctatgatttcatcttgtatgtctaacttcttattcattgcacttcagacatgctggtttttgttcattcaacagtccaggctcactgctcattaagcacctttgaagattattctccaaagtgttgacatggctgtttccttagcatccagctgtcagcttaaaggttagctttgtagaaaactcttccccaaccacacaatctaaagtagctgccccctttaccttctatcatgcagtcttactatattttga

SEQ ID NO: 371266 - DNA, 557 bp, Homo sapiens
atatataacttatatacttatgtaaacgtgtgtgtgtatgtgtgtatctgttactagactcatatataagattttaagtcaatttaagagagaaaaaatatagatcattccagtttctttctttcctgcattagttggatgtgtgtcttagtgatagctgtgattcttgaaatgggggaattagggtgtattatctcatttcaagtttgagatactggtaacacatctgggaaacctaccaagagcctgactatggaggaaaagtaaaacctttttcttctttatggcaaaagcaaatggaggatattcttgcctcccttcttcaaacactgtaatcctagttctgaaattggaaaatgtcactgattactaacagcaatcatactggkaagtaagtaaatgtaaggaaaaatagaaaagggaagcagaattttcagtctagtagatagatctaaactttcatacactaaaaaaaagttataaagttttagaagatgataaatataaaaatgtgtccctgaaattgatgctataatttgagaaaaagtgaaaatttg

SEQ ID NO: 371267 - DNA, 519 bp, Homo sapiens
gtaaaattccccctgcaccaattagatgcaattttttcctatgttgctttaaaaatatacattagaaaaatatttaacactcttatttgtaactgctccaaaagggtcagggctcatgatttttttaaaataaatctttcttaaaattgggcagtttttgctacttgtctcaatatgagtagaaagagacagattactagattaaggacaagagaataggtactataagcccaggtggagaagcaggttgtatggtgcagattagctcaaacagaaaatacattaatagggggttttaaggtgagtactttctgagccctggggatcatcacagagagctgtgaagccaagcaagggcctgaaaagtacagggaaatatttggcgagaagggacaagatattaarcacaaattctaaactttacatttcatcgactagtcttgatagtgatgaaatgttttctgaaacagaagattcttaattatttatttttctaaatgaaatcagaaccaagccttg

SEQ ID NO: 371268 - DNA, 564 bp, Homo sapiens
atattctattcttagtcttgttatataattaagaatagtagaagtatcaagaaacaagactatataatctcatgaaactcttaattgacttacctattaacttttccaatttccctgcagaaattgtttctatcgatattttaatttcatgtgagccgaatgacaggaagtaaagagatttcagcagatggttaccacaaactacatactacatttcagaactggtctacaaaattctgcagcttggcagtgtgtggtrgatcattttactgcctgttaatgccaaaagaaatctggctgaaatgtgtgtgttgttccatttaatttcttctctgactttattaagagctaccagacttgatttacttgtgttgtaaatacagggggcaagtgatgtggtaactaagagtatgcccttatatttttaacctaaatcaatattttctattcttaacaatctcatccaataactccctgtgaagtagaaggcaatgttatctgctgattgtgaaggcagagaaactgggctggaaaccgggaaagatgtgtaaaatgtttaaacat

SEQ ID NO: 371269 - DNA, 564 bp, Homo sapiens
atattctattcttagtcttgttatataattaagaatagtagaagtatcaagaaacaagactatataatctcatgaaactcttaattgacttacctattaacttttccaatttccctgcagaaattgtttctatcgatattttaatttcatgtgagccgaatgacaggaagtaaagagatttcagcagatggttaccacaaactacatactacatttcagaactggtctacaaaattctgcagcttggcagtgtgtggtggatcattttactgcctgttaatgccaaaagaaatctggctgaaatgtgtgtgttgttccatttaatttcttctctgactttattaagagctaccagacttgatttacttgtgttgtaaatacagggggcaagtgatgtggtaactaagagtatgcccttatatttttaacctaaatcaatattttctattcttaacaatcwcatccaataactccctgtgaagtagaaggcaatgttatctgctgattgtgaaggcagagaaactgggctggaaaccgggaaagatgtgtaaaatgtttaaacat

SEQ ID NO: 371270 - DNA, 496 bp, Homo sapiens
gatttctagagataatgattagttctttcttaccagtctgagtctggaataaaggtaatctgctgtcaattcatgctggtcttgaaagacattcttttagaggtgagttctatcccaatgcctattctggtcaaagggagtctttgaatctataagactgaagtgaccatatccttggattacgcctccttgcagaaatcctccctgagaattaaggctttattagaattcctgagaccattgagattaggaaaattgtaatttatttggcaccttaaatttagctcactaaggggagtttcttgtgtaccaataacagctgcattcctgccagtcagttccttgagcagcaggcagcgaggtaaacagcaaaatactctgtagatcaggatccagcctcargcttgactttactttctattttgttatatgaggtaaaatatgattatcacgtgtgagtttgacagttatcattgagctgaatatttgagtcaat

SEQ ID NO: 371271 - DNA, 531 bp, Homo sapiens
ttcaccataagatatctaatattctaactttaattttgtttctgattttaataatgatgctctaatatattttatgttattaatacaatgttttttatcaaataaaaactcaaactcattacagtgagtttgatggaagaaaaaactataaaagacaaagatgccttttcataatttaacagcttttctctggctttaaaattcattttgtgctattattaccaaaactcacctggtctaataattttttatctgatttaagttggtagagtgaaatttatgcaaattgttggatattaaaaatatttgtacttttaagcactgtagaaactatttttgaaatttaaraaggatcatagctttggatccacaaaatccaaaggtatgtgccataacacatccaaaggatgtgtttttggtatacccaaagtgtgccacagtatataaaggaaagaagtatactgaaaacaactttaagttatatcagcgttattactcatgataatgatgcttgatcaggtacaaatttat

SEQ ID NO: 371272 - DNA, 550 bp, Homo sapiens
tttaaactgttatattgtatgattttatttggaagagttcctattgtgaaggtaagagaactataaacataaataartacatctttctgagacttggatttaattatgtggaaacttaggatatgtctgtcctttcatcctccctcttagcagaggcattaggaatacaattaatatttctctaattatattagatatcactctgtttgtgagaataattctgtattttcaaagtttcatgggattaagtaattcgaaacaaatatttgaaacaggttggattaaattttcaattttgctttgtcagtgaaattcctttttgttgtttgaaattcaacaactgaatccagtgccattacgaagatgctcaaatattgtatagtgtttttctaaaactacctatgcagcattgaatttgtcttagaattttctgcagtgacaaatgtaaaatatattttaatttttttaattattgttaaatgctgaaacctgattccaggctgtccaataatgctacatacatagtagctgcctacaggatttctaactt

SEQ ID NO: 371273 - DNA, 580 bp, Homo sapiens
catgccataaacatacacacacacacacacacacacacacacacacacacaaaccccaaaccatttcagatatctaatctaacactcattttaaaagctatatctcttcttaaaagaatgccaaagtgaaaagtatgttgaaaatatcatttacatatataatcaaatgaatcatttattaaggaaagaaactaaggacaatcatgctggtttacagaatttctaaaggctttttctctcaaactatattattgaaataagagatgattttaacrtaagtctatgaaccttcaaaattgtaaaagtttgcaatcaatattttaaaatcgatgctttaaattagtatctaaaataaaatttgatattcaagtttgttaagcattgtctggtgaccataactttctattacaactttcataatcaggaataaagggactcaattattgttcaatcttacattgtctatattaaagagttgttttagtaaataaaagatatgagcacataaaagttaaaaaacagtacttataaagcatatatacaaaacactttgtcgaaataaaaaattctggggttccac

SEQ ID NO: 371274 - DNA, 494 bp, Homo sapiens
tcttctagttgttatttctaactactacacaacgtcactargcttcctatttcctcatgtgttttgtaatattttattgttgacttatctttggtctgatgtgtcttatgtttattgaacttcttgggggattttgttaatttcttctttgaaaacttctactatatgagtatcgggcaggaatttaggtcacacacctatttgtgttataaggctgaaaatcagtcatttcatttgactctgtacttacagccttgcgccagcaggctgaagtttttcattaggacctcctttatcctataattagatttataaaggaagatcaggattagtaactcttagatacaagaagcctatggtctttattctgacctctaaacagaattaaactctatcctttaaggcttatatagggacagctttatacccatgagttacatgggtccactcctaggcactgctgtaaatttcctcttaatttctggcacgtgaag

SEQ ID NO: 371275 - DNA, 494 bp, Homo sapiens
tcttctagttgttatttctaactactacacaacgtcactaggcttcctatttcctcatgtgttttgtaatattttattgttgacttatctttggtctgatgtgtcttatgtttattgaacttcttgggggattttgttaatttcttctttgaaaacttctactatatgagtatcgggcaggaatttargtcacacacctatttgtgttataaggctgaaaatcagtcatttcatttgactctgtacttacagccttgcgccagcaggctgaagtttttcattaggacctcctttatcctataattagatttataaaggaagatcaggattagtaactcttagatacaagaagcctatggtctttattctgacctctaaacagaattaaactctatcctttaaggcttatatagggacagctttatacccatgagttacatgggtccactcctaggcactgctgtaaatttcctcttaatttctggcacgtgaag

SEQ ID NO: 371276 - DNA, 494 bp, Homo sapiens
tcttctagttgttatttctaactactacacaacgtcactaggcttcctatttcctcatgtgttttgtaatattttattgttgacttatctttggtctgatgtgtcttatgtttattgaacttcttgggggattttgttaatttcttctttgaaaacttctactatatgagtatcgggcaggaatttaggtcacacacctatttgtgttataaggctgaaaatcagtcatttcatttgactctgtacttacagccttgcgccagcaggctgaagtttttcattaggacctcctttatcctataattagatttataaaggaagatcaggattagtaactcttagatacaagaagcctatggtctttattctgacctctaaacagaattaaactctatcytttaaggcttatatagggacagctttatacccatgagttacatgggtccactcctaggcactgctgtaaatttcctcttaatttctggcacgtgaag

SEQ ID NO: 371277 - DNA, 589 bp, Homo sapiens
cctcttgcatttgtgtgatacatttattgaaattaatgaaccaatattgatagattattattaacaaaagtccaagtttacattagacactctgtgttgtaccattctctaggatttaacaaattgttatataaatgagccagagatggcctttgcatattggccctttgttgcttacttcttaaatcaggctgagactcattagctcaaaagcccacagtgccaaactgaaatgttttcgcatccagttgttgtaaatatatctccaacaggcagattttttttgccattttatgtcttcctgctttgtacaccttgggaaactgcacccaacatctgccggccatagataagaaaaatcttgtagttacataaactgcaggctgctgcccttcagagccctctgacccagcagcttcctaccatgctgtgaagtgatgttatctaracatgcagcatctcccttcccatccttgggagctcctttgtcctcctgcgttctggatggtggtcccctgtgcttctataaggccttatgctgtgaggactgttctttttgcaaccctgtccaagtagcgtccaagtagaa

SEQ ID NO: 371278 - DNA, 612 bp, Homo sapiens
ttattgtatgataaagccactaaatttaggagtaatttcttacacagcaatagataactagtagagtcactttgcatctcttagggtctatggcaaatgacacataatgaatagagaaattggaacagacaactggttgtctgtttcagtacagaaactggttggtattaagagtgacaatttttattatagttcaagctatagtactgtatgttcttgaataaactatgctaatctaggccatccaaagacttcccaaaatgtatggtgagaataacatttccaagatactaaaccaatgtttgtagctcctgataattcctaattcctggttgccccaagccaccacctgccccaactaaaacaaaagaattgatcacatcataataaaattagaaccttcaaagaacaggcactgatctcttggaatttttattttaaacttaagtttacatgacaatctgcttccacttacatgataatctgaaagcatatgttgaartggcatggttcttggttgcagaaaacagaaatgaaatctacctaagcagaaattaaaattataggagggatattgggagctcataacatccagaggctgactaaacaaac

SEQ ID NO: 371279 - DNA, 559 bp, Homo sapiens
tattgggagctcataacatccagaggctgactaaacaaacagacttcaacgtcaaaagcagcccccaccctggaggctagggatctatgagagcaaattgaacatctgatctctcagctctcaccaaactcacaccatggcagaaccttcacgaagggaggaagagactcagatgctgaacacaaggagaggaaaaaacgtcgtaagatgcttcttctgtttttcaaagacccagagtttgttgtgagaaagagcaaagacctttttcctaactcccaaagctggaattttacacatcagggaccaagcctggtgggatatgaacattaagttcatttgtttaagtcaatgcaaggaggattacatgaggcatgggcagaaactgtgagataaagagaaaggaagaaactcatagggwgtgggtggggaagaggaagccactaaggaagaagggtaggaagtcagattagcatccttttggctcccacatctgaagtgccaggctgaacttcagcagaagacattggggtaggtgtaaggtgcttccagaataggaaac

SEQ ID NO: 371280 - DNA, 559 bp, Homo sapiens
tattgggagctcataacatccagaggctgactaaacaaacagacttcaacgtcaaaagcagcccccaccctggaggctagggatctatgagagcaaattgaacatctgatctctcagctctcaccaaactcacaccatggcagaaccttcacgaagggaggaagagactcagatgctgaacacaaggagaggaaaaaacgtcgtaagatgcttcttctgtttttcaaagacccagagtttgttgtgagaaagagcaaagacctttttcctaactcccaaagctggaattttacacatcagggaccaagcctggtgggatatgaacattaagttcatttgtttaagtcaatgcaaggaggattacatgaggcatgggcagaaactgtgagataaagagaaaggaagaaactcatagggtgtgggtggggaagaggaagccactaaggaagaagggtaggaagtcagattagcatccttttggctcccacatctgaagtgccaggctgaacttcagcagaagacrttggggtaggtgtaaggtgcttccagaataggaaac

SEQ ID NO: 371281 - DNA, 602 bp, Homo sapiens
agcctgtaatttaagaacaatgtaaaaaaaatcagagtgtagggctaaaggggtatctcttgaaacctacaagcmaaagaagtcgccctttttcattttgctaatttaatgtgaaagtgaaataggttcctttgcaaccttgacagctagctttctgggaaggtgtctaatataggacataaaatggagacatgaatcgatgagactcattaatattcatagacagcagattaaggttggtggaaaaaattatttatgaaacgggggtattgtcttcctttcaccaaaaggattttgtttagagaggattgaattgagtgacagggctatgacagattaggtatgaatttgcagatttcttggtttatctcccaaagaaactaaagcatttgcaagcaaagaatgtcctgggctgatcacagtaaacgcttcagcaccacgtgccagtgggtgtaatgaggtgtctcaaacgtgaggttcagaggccacggtgtgatggaaagcacttgggaggaaatgaaagaatggactgagagtgtggttatgtaacaaaggaacaggctgaaagcaaaacagggcttacctgatgtcagagaaaggtg

SEQ ID NO: 371282 - DNA, 475 bp, Homo sapiens
atccttcttccttcatggaaaagcacccggtgctgacccttggggggtcttcagaaaacacagcgttcattaagtttcataaaatcctccacatctgggttgagcagctatctcaaaaatgctttcctggccctctaaactgaagcctattgtgttcctcgtctccttttttgtttggacaccttcattttggctttagctgtataaggtacttgggaaaatgactgccctaatcataatctttaagatctctacagaaggtgtccataactggaatttcctcattactttaatatccttctagtcatagcttcatgggcctattaygtgtaaattagaaacacattattccaccagcaaagcttttctttcaaatgcgtagaattttataacctgtcacaatgtattaaattctggattgtttgtactgaaactgacttttttctgtaagaagatgtcaaaggatcttaatttc

SEQ ID NO: 371283 - DNA, 409 bp, Homo sapiens
aacagacagtggattcatattattcctagaatttaaaaagtagattattttgaagaaatagttattcttgagaagggagaaatttctcatagtcccttaaaaagggagtggtatgtaatataacttattggattcttttttagtttaaaggataaataaagattttcaagcctgttgcctaatgcatttgttctttaaagatgwttttctaagagggaatgctaatcttgggattgctatacttccaacattctgtgtttcacattacaataaataccagactaagggagaacttgaaatccacatcgggaaggagaagtaggatttaacttaggagctgggtttaagtggacaggttggtaacactctcagatgatgtctttatcaattaatgtcattttaagcgtgg

SEQ ID NO: 371284 - DNA, 526 bp, Homo sapiens
ttgccacaaatcttcaatttgtgaaaaaatgcagtatctgcaaagtgcaatgaagtgaaatgcaatagaacgaggatggcctgtggctgaaatggctgtcagtgcggccccatggatgtcctcattagcagtctgtaccagtgtcttttccaaaggaaaccatacttaccctgtgatgtcagagggaaaaatgaacacacagggacatggcaataaccataacaataaaggtaatattgctgtacctgtcacctgagtgtgacagcgtgcatcaaaaacattaactttttcattttcaaatcactcttgtggggtaaagaaaggtagaatgcttctcawaagccctcttccactgcagcatgagaagagacattttgcttcttagcaaagaagtagctaaggcatatccaactcagtgtctcagaaaccacaaagacctcaactagtcaccagaagatccagctcaaagctccacctctgaagggagagagcctccttccccagggcacagccctacagcatcccg

SEQ ID NO: 371285 - DNA, 526 bp, Homo sapiens
ttgccacaaatcttcaatttgtgaaaaaatgcagtatctgcaaagtgcaatgaagtgaaatgcaatagaacgaggatggcctgtggctgaaatggctgtcagtgcggccccatggatgtcctcattagcagtctgtaccagtgtcttttccaaaggaaaccatacttaccctgtgatgtcagagggaaaaatgaacacacagggacatggcaataaccataacaataaaggtaatattgctgtacctgtcacctgagtgtgacagcgtgcatcaaaaacattaactttttcattttcaaatcactcttgtggggtaaagaaaggtagaatgcttctcaaaagccctcttccactgcagcatgagaagagacattttgcttcttagcaaagaagtagctaaggcatatccaactcmgtgtctcagaaaccacaaagacctcaactagtcaccagaagatccagctcaaagctccacctctgaagggagagagcctccttccccagggcacagccctacagcatcccg

SEQ ID NO: 371286 - DNA, 550 bp, Homo sapiens
tgcctgccaagttttcccttatttggaagtagctcatatgaaattctggaactctgtacaggtcattctcagtctgcccattaactttcctgttttctgtcttcttgtctacctgtgtcaacctttcttaatatttaagcagttttcaggaaattcagttttaaaatgacagcaaagcagctttgaattggcaaaagcttcacatttcagaggtgatactaatctaaagaaacacactattatctttgtaatttccaattgctgctggaagcattttgctgcggagaccattgccggctattaagtagaggagacttgttttggttgccagaattagctgaaattaagatcctttgacatcttcttacagaaaaaagtcagtttcagtacaaacaatccagaatttaatacattgtgacaggttataaaattctacgcatttgaaagaaaagctttgctggtggaataatgtgtttctaatttacacrtaataggcccatgaagctatgactagaaggatattaaagtaatgaggaaattccagttatgg

SEQ ID NO: 371287 - DNA, 623 bp, Homo sapiens
ttatctttgtaatttccaattgctgctggaagcattttgctgcggagaccattgccggctattaagtagaggagacttgttttggttgccagaattagctgaaattaagatcctttgacatcttcttacagaaaaaagtcagtttcagtacaaacaatccagaatttaatacattgtgacaggttataaaattctacgcatttgaaagaaaagctttgctggtggaataatgtgtttctaatttacacataataggcccatgaagctatgactagaaggatattaaagtaatgaggaaattccagttatggacaccttctgtagagatcttaaagattatgattagggcagtcattttcccaagtaccttatacagctaaagccaaaatgaaggtgtccaaacaaaaaaggagacgaggaacacaataggcttcagtttagagggccaggaaagcatttttgagatagctgctcaacccagatgtggaggattttatgaaacttaatgaacgctgtgttttytgaagaccccccaagggtcagcaccgggtgcttttccatgaaggaagaaggatcgatcaccaatgccatgaacaataagaaaggctgtatcatttttgggg

SEQ ID NO: 371288 - DNA, 602 bp, Homo sapiens
tgcttgtttctgagcctcagtctcttcctcgacaaaatatggaggtcaaattagacactgtctgagatctccttgctctgatgatctttagctgtagttgcaatgtggcaacggacttgtgtttgaactttaaaatgagccttggtgccttgccctgccctttcaaagaaagggtactgacagctcaaaaggaaccaaagttctttaaacaaaagagctcacctgactgtccaaggtaatccagagaactctcatgaaaagccgccttccaatgctaggagcaaatgcccacttttctctaagaaacagatgagagcaaggatgtctgatggtttttgagtttacacaaaccgggtcccccccactcctacaatcttttgagcatctcgagccaaatgaattcttgatgtcagcaaaattttacmtatgttatgcaaaagccatcaccagaaacacagagaaaaagacataaataatgcaaattgagcatccatcttagccttggccagatgaagtgggggtgggggctgcaattagcaagttggggcccaaaaatgatcattgtgctgcataatctatgggaggaatcttgttagacctgc

SEQ ID NO: 371289 - DNA, 604 bp, Homo sapiens
tattcagccacattggggcataccaggcaggaatctattagaatgcataccatattctctatgtttgtctgttctgccagcctgtgtacttaggccaggggcaytgtgatgctgacatattaacacatctctggcacctagccctatctgcagcacataagccatcccagaacagctgcatttactttttaataaattaaattgaacagaattgacaatataaacattgagacccatccatgttgtctagtccagattccaaacatagaggaatctgactggtcatgccatttccctttgaaacaattatttttttggagcagggttatggagagttaaggtgacctctgatgttccgacctctttcaccctgagatatcgcaagattcaactgtctcattgggaagagcagatggtggagggaactggggtagagcagcccatggccagcctccatcaccctcagcgatccaacacttctcatttgactgagaaaagggcataaaaccctgcccctcgcaagtcttgccctgaaaaactccccaaaacaagccaggagtccaggacttgcacactgtgtaaatctcaaaagtacccctgtgta

SEQ ID NO: 371290 - DNA, 604 bp, Homo sapiens
tattcagccacattggggcataccaggcaggaatctattagaatgcataccatattctctatgtttgtctgttctgccagcctgtgtacttaggccaggggcattgtgatgctgacatattaacacatctctggcacctagccctatctgcagcacataagccatcccagaacagctgcatttactttttaataaattaaattgaacagaattgacaatataaacattgagacccatccatgttgtctagtccagattccaaacatagaggaatctgactggtcatgccatttccctttgaaacaattatttttttggagcagggttatggagagttaagrtgacctctgatgttccgacctctttcaccctgagatatcgcaagattcaactgtctcattgggaagagcagatggtggagggaactggggtagagcagcccatggccagcctccatcaccctcagcgatccaacacttctcatttgactgagaaaagggcataaaaccctgcccctcgcaagtcttgccctgaaaaactccccaaaacaagccaggagtccaggacttgcacactgtgtaaatctcaaaagtacccctgtgta

SEQ ID NO: 371291 - DNA, 604 bp, Homo sapiens
tattcagccacattggggcataccaggcaggaatctattagaatgcataccatattctctatgtttgtctgttctgccagcctgtgtacttaggccaggggcattgtgatgctgacatattaacacatctctggcacctagccctatctgcagcacataagccatcccagaacagctgcatttactttttaataaattaaattgaacagaattgacaatataaacattgagacccatccatgttgtctagtccagattccaaacatagaggaatctgactggtcatgccatttccctttgaaacaattatttttttggagcagggttatggagagttaaggtgacctctgatgttccgacctctttcaccctgagatatcgcaagattcaactgtctcattgggaagagcagatggtggagggaactggggtagagcagcccatggccagcctccatcaccctcagygatccaacacttctcatttgactgagaaaagggcataaaaccctgcccctcgcaagtcttgccctgaaaaactccccaaaacaagccaggagtccaggacttgcacactgtgtaaatctcaaaagtacccctgtgta

SEQ ID NO: 371292 - DNA, 566 bp, Homo sapiens
ttcttccccaggggcacttctggttttggtgtgatcagctccatcctcaactccattgagtgactgtaattgatttaaaacaactgcggtaatcctatttcttttggacagtggttttattggatagctcagataaaccaracctcagctaatcagtgcaggacattaccctagtcaatccgattggcggtgtgacaactggcggagagcagttgtccctctttttctcctgctggcccctaatgaaaaagcagttagcctcacttgctgctggagccagcctgaagctttgagaggaatcggggaatcagtctgaggatggagctgaaacagcagagtagagagaaaaggaactactggtgacattgagctgctgaacaaccaacctggaagcgtcctctgcctctgctccaatatcagctactaacttttggtgttaaagctgtttcacttgttttttctgttacttgcaatcaaaagcattctaaatgacacagcaagattgaaacccaggcttatctgaccccggtgtgaaacctcatgtcctactgctttccactttccta

SEQ ID NO: 371293 - DNA, 603 bp, Homo sapiens
caaaagcattctaaatgacacagcaagattgaaacccaggcttatctgaccccsgtgtgaaacctcatgtcctactgctttccactttcctagctgatggtcttaaactcacatctttatcagcaggcagtagcaccactgctgagtcagccagtctgcagcatttttggggcagtttgttctctggctggaagaatgaagttcaagaggtaactggtggacatctaagggcactctttcaaattggtgactggagatcattagaacaagctgaaggctatttctagatataaagtaatgaaaacctcttcttgggatcaatccagccaaggaaggctgtggagtagggcagatttcaatgaggaccagagaggtaagcagacagctgcaacagctgcttatcagatcttgatgtattgaacatgtaaaaatgctgaactcctctgactgcaacctaatttgtacaagtgcttagaaagaacactgaatttatcagagcttgaagtgcaaaatattaaaaaataaatcactgctagtaaaattgtagagccaacagaagatccattagaaaagacagttagcaaagtctatttgaagcacatt

SEQ ID NO: 371294 - DNA, 647 bp, Homo sapiens
tcaactcatttcgtcccaaattcgctcacatgaaagagataaaaatctttacctccagagagtatataggtatgggaatatttttgtgaatgtgattaggctttcaactagcattttagtttcagatcataaacttgcctatactcttccaaaatccaagtggrtaaggatgagggagaaggaatttctgtacacttgaaatcaattcactaagtgacagtggtctggggactggcccctgaactatctaatccaaacaagcaactacaatggaaataaattacaaaactaaactgtaattcaagtaaagatagaaaatgttataaagtggtgctagagaattgcaactttggaagcccttgacaacaaagtgtcttaagagttttcctaagttaacaattgtagaagagagaaggatagtaacaccaatagagaactgtctggatatgaaaggattaaaagagatctttgggagactgacaccccaaatgtttatgcaaaaaatgaccctcttagtgatcatgctgagaaagcagcagttaactaaaggagctatatggaaaaattatcccctctgtctcagaaaaaataaaaataaataaataaaaggtcacaattcattctttgttctacacattagtagttac

SEQ ID NO: 371295 - DNA, 613 bp, Homo sapiens
tttctcttcatccctataaatccccctccaaagcatttgtattggtttaaaggtttaccaaactttccaggaacagataagactatgttgtagatattacagaaaacagaaaaagagaaaaatatgtccaattaatttttttgatattagcataaccttgataccaaaatagatatgcaccacacaagaacaggtagaaaagcacttcctaagtgagacacaaaaagtccatgatataaagataaattatttatttattttttacgaatctttttgtagcagttagtatatgtcagatagtggtctatatgtttgacaggtattcatttaattggcatggcaaccctatcaactaggtattattattattatttaatagataaggaaacaaataatatgcccaatattatccagctagtaattgatattttgataacctaaaaaatgaagatttctacttaaagaagagcatatagataaaatgaaaagattaaagatgtcagcaatatctgaaattcactaaagatgaatatgtagaacaaataaagaatttccaaaaatcaacaagaaaaaaamccaggtgttctagctattatggctataatacaaatta

SEQ ID NO: 371296 - DNA, 508 bp, Homo sapiens
ttgcactagcaattatgtgtttaattttgttcaaaatttattggccagaacgagtaggtgacatggccccacctgatcacaggggccataaaattgaattctaacaagtgcctagaaggcagagagtggcaaatattgggtgagctactaaagcttataacagcaagctttgaaagggtaacccacwttatagggtaaccaactttctagccacgagagtgaaaagcctctccactccatctcctaccctgacaactaattccatagtttaggtttgttccctgcaattcccaatctcttggtgccaatgtctacagtattcagaattattctggcttttgaatatatggaattattttgtatatatgattaagaaatccaggtttacattgtgctttgggcatagctggagacaacagctcaaatattcccaggatattgtctttctccatattttctggctttgctgctttctatgttggcgtcattctcgaaaagggtcccatat

SEQ ID NO: 371297 - DNA, 562 bp, Homo sapiens
cagtggttccacttaggttacatacacatcacctaccactgtggccaagtcacttagtccattcaggctgctacaacaaaattccttaggtgagtaayttataagcaacaggaatttattattcatggtactgaaggccaggcagttcaaggtcaaagcaatggcagatctggtgtctggttagggcttgctctttgcctcaacgctgtgtccttgtatggtggaaggggcgaataagctcccttgagcctttttacaaagggcactcatcccattcatgagggttctgccctcgtaacctgttctatctctcaaagaccacataataccactgcattgaggattaggtatcagtatatgaattttggggtgacacaaacattcagcccttagcaccaaagacataatgttctctgatgggcagttctgagtcatgggcacagccccaaaccaggaggcagattagctccatcagaacactatgggctgagaataggggaggggtggttcctgagagaaaaggaaatgtcctgggccagaagaggaaatgcatgatggacag

SEQ ID NO: 371298 - DNA, 628 bp, Homo sapiens
tcagtggttccacttaggttacatacacatcacctaccactgtggccaagtcacttagtccattcaggctgctacaacaaaattccttaggtgagtaatttataagcaacaggaatttattattcatggtactgaaggccaggcagttcaaggtcaaagcaatggcagatctggtgtctggttagggcttgctctttgcctcaacgctgtgtccttgtatggtggaaggggcgaataagctcccttgagcctttttacaaagggcactcatcccattcatgagggttctgccctcgtaacctgttctatctctcaaagaccrcataataccactgcattgaggattaggtatcagtatatgaattttggggtgacacaaacattcagcccttagcaccaaagacataatgttctctgatgggcagttctgagtcatgggcacagccccaaaccaggaggcagattagctccatcagaacactatgggctgagaataggggaggggtggttcctgagagaaaaggaaatgtcctgggccagaagaggaaatgcatgatggacaggcaaagccaatagatatttgttacaatcaaatgttgtttatatccccactttctgattgtggaaa

SEQ ID NO: 371299 - DNA, 408 bp, Homo sapiens
aaaaacttgcatataaaacaaaaatgggaagaagagagaagaaaatggataattaccaagtgtgcttactctaattgtttattcaggagctcagaaaataacttyggggtgggcatggaccaagcaaatctactgagagtcagactacagctaagactctatccctgaccatcacaagccccactttgacttatgagccagagtggcattttagatccccaggaaacagcatcagttcagagttagtgccaagtaactccagaactgtctgggtatgtccatttccccattattttggtaaatggtcacaggtccctttggaggaaggtttggaggaagatttacaataagtatttatggcaatgatgcaggctccttcctcaaggggacccggccacccagggattc

SEQ ID NO: 371300 - DNA, 552 bp, Homo sapiens
aggacagcagctgccacctgctagggctactgtggcagttcgcggtgatgccgatgttgtgcccaagccctgycatgagggcacttgatgcatggtagctattagtcataatttaggacctctctgtccctcctatgagaccacgtatgctttggagctaaggaccccacctctttgaagtgcctggagcttacttcatgccatatcggcgcttcccaggctgtgttctgcagacaagaatgttcccaaaaggagtgttctgtaaccaccgtgcatcggaggcattgcgctcagtagccttctcaggatctttaatatggcagaaagcattgtgactctgcaggcggacagggccaggtatccagcatttctcaagcttgaccaataatcagaccttcctgtcctgccttcagaatgcagtgtagtgtgcagtcgagagaatattctggaagcccacaggcctgggtgtggctctggcagcttcctgtacttgctgcctgtttcctctctgaaccctgaatctcatttcttcctctgaggagtggggagatg

SEQ ID NO: 371301 - DNA, 552 bp, Homo sapiens
aggacagcagctgccacctgctagggctactgtggcagttcgcggtgatgccgatgttgtgcccaagccctgtcatgagggcacttgatgcatggtagctattagtcataatttaggacctctctgtccctcctatgagaccacgtatgctttggagctaaggaccccacctctttgaagtgcctggagcttacttcatgccatatcggcgcttcccaggctgtgttctgcagacaagaatgttcccraaaggagtgttctgtaaccaccgtgcatcggaggcattgcgctcagtagccttctcaggatctttaatatggcagaaagcattgtgactctgcaggcggacagggccaggtatccagcatttctcaagcttgaccaataatcagaccttcctgtcctgccttcagaatgcagtgtagtgtgcagtcgagagaatattctggaagcccacaggcctgggtgtggctctggcagcttcctgtacttgctgcctgtttcctctctgaaccctgaatctcatttcttcctctgaggagtggggagatg

SEQ ID NO: 371302 - DNA, 451 bp, Homo sapiens
gttgttttatgccactgcatctgtagtgtttcattacagtagyaatagaaagcaaatccacaaaggcttcaagaaattttattttaaaatttacaccaaagtaaacttgctagctgaaaatcattaaagaagctctctaactgaacacataaatttgaatgtaaatatggtgataggtcctctctaaaaatgtatataaaatacacaaaagaagtcaatcaagatttattcttagcagtcatttttagtcttagcttttagatccatctgaaccaactgatacaagtggattgagtgtagatcaggaaaaaccaaaagcagcaagatgtttagttagttgcatatctcagaacaaatggatttaactttcattagttaaaattctgcatttaccttgacatggttggcacgtttagcagatccatttgtcaactgcttagtgaaactgcag

SEQ ID NO: 371303 - DNA, 444 bp, Homo sapiens
cagaccacagaaaattttctgttaaatatttgtcacctaatctatgaattaaatgggaaatagtatttaaaatgggattattttaaagcatcagttccaaatattaatttaaataaatttaaaaaatcaaactaagtgaacacttccatgtaaactaactaatttttaatctctttkgttctaaataagattgatgggccaaagttaatattaccgtagtacctgaggtcgctgtgaaacttaagatatcttaacagagaaggtcatcattctactgaaagttaacttcattttaaaagagaggtcacattaaaataactgaattccacaaagacacctatctggtcatacaaataacgtttgactcacttaattgtctttttatttaagtttacaaaaacgaaaaaaaatagtgttttagcaagcaatgagcattacattagt

SEQ ID NO: 371304 - DNA, 444 bp, Homo sapiens
cagaccacagaaaattttctgttaaatatttgtcacctaatctatgaattaaatgggaaatagtatttaaaatgggattattttaaagcatcagttccaaatattaatttaaataaatttaaaaaatcaaactaagtgaacacttccatgtaaactaactaatttttaatctcttttgttctaaataagattgatgggccaaagttaatattaccrtagtacctgaggtcgctgtgaaacttaagatatcttaacagagaaggtcatcattctactgaaagttaacttcattttaaaagagaggtcacattaaaataactgaattccacaaagacacctatctggtcatacaaataacgtttgactcacttaattgtctttttatttaagtttacaaaaacgaaaaaaaatagtgttttagcaagcaatgagcattacattagt

SEQ ID NO: 371305 - DNA, 444 bp, Homo sapiens
cagaccacagaaaattttctgttaaatatttgtcacctaatctatgaattaaatgggaaatagtatttaaaatgggattattttaaagcatcagttccaaatattaatttaaataaatttaaaaaatcaaactaagtgaacacttccatgtaaactaactaatttttaatctcttttgttctaaataagattgatgggccaaagttaatattaccgtagtacctgaggtcgctgtgaaacttaagatatcttaacagagaaggtcatcattctactgaaarttaacttcattttaaaagagaggtcacattaaaataactgaattccacaaagacacctatctggtcatacaaataacgtttgactcacttaattgtctttttatttaagtttacaaaaacgaaaaaaaatagtgttttagcaagcaatgagcattacattagt

SEQ ID NO: 371306 - DNA, 627 bp, Homo sapiens
cttaattcgaacttagtttttgttgttgctgttttgttatttttttgccgcagaagacatgattttattctttgttattgctaaatagtattccattgtgtgtatgtatatgtaygtgtatgtgtgtataaacaattttctttatctagtcatcaattggtggacacttagattgatcccacatttttggtatcatgaataatgaatctaagcatacttgtgctggtatctcttttatataatgatttcttttcctttgcgcagatatccggtagtgcaattgctggatcaaatcacatttctgtttttagttctctgagaaattcccatacgattttccacagtggttgtactaatttacattcctatcagcagggcataagcattccatttctctgcatcttcaccaacatctattgttttttgactttttaataatggccattctgattggtataagatgatgtctcattatggttttaatttgcatgtctctgatgattggtgatgttgagcatttttccatatgtgggctggctatttgtatgttttcttttgaaaaatgtctattcatgtcacttgtccactttttaattgggttatttggttgtattttgaagttgttga

SEQ ID NO: 371307 - DNA, 619 bp, Homo sapiens
gctggtgtctttctcataaaaatttttcaagtctgaaaatcaactatttaaccaaattaattgggagaaaactttgtaaaatatgccactgactaaatattagagaaatatgaatactatgtttttaaaaatcagaaatgttgtgatatagagaattttgctttctaagccttttattttctcctccaaaattctgagatatttcaacgataatgatattctyttttatattctcagcttattgtgtttttttttgttttctactcactggatttagattattataacttacactacttaaatttcaatttgatgtattaacataacttcccccacccccatccccaagtcagcttcagcatttattttatttggcttgtgataaatctcaccacatcagtcatgggtaaagttaaggttttcagtttatgtcacaaatataactaaggttttcagtttatgtcacaaatataactaactaagtatgcactgtgactatgaaataagacactgcatttgcagaaatgcataggttgacatatttcaacatataataaaattatattttcttattaattttgaaaaatgatttttaaaatagcaatcacatatttgcatg

SEQ ID NO: 371308 - DNA, 619 bp, Homo sapiens
gctggtgtctttctcataaaaatttttcaagtctgaaaatcaactatttaaccaaattaattgggagaaaactttgtaaaatatgccactgactaaatattagagaaatatgaatactatgtttttaaaaatcagaaatgttgtgatatagagaattttgctttctaagccttttattttctcctccaaaattctgagatatttcaacgataatgatattctcttttatattctcagcttattgtgtttttttttgttttctactcactggatttagattattataacttacactacttaaatttcaatttgatgtattaacataacttcccccacccccatccccaagtcagcttcagcatttattttatttggcttgtgataaatctcaccacrtcagtcatgggtaaagttaaggttttcagtttatgtcacaaatataactaaggttttcagtttatgtcacaaatataactaactaagtatgcactgtgactatgaaataagacactgcatttgcagaaatgcataggttgacatatttcaacatataataaaattatattttcttattaattttgaaaaatgatttttaaaatagcaatcacatatttgcatg

SEQ ID NO: 371309 - DNA, 549 bp, Homo sapiens
gtatagacagcgttgcccttgttgccatatccaaaccattttttcccttctccttctgaaaaccctagccagcagctgtatcctctctctctctctgactctctctccccctccccctctccctggctccttttctagtagcttttctctcagtttctgcttatcctttactaaatgttttagcatctagtttgctgaccttttctttatcaccactgtggtcatattttttgataactttggtatccctcttggaaatccactcactttggttgtttaaattttttgataattattttgctaatttccccctctccttcacctcagtccatctcccatggtcttatcctataagttatcatgcctgtaattgcacaccctgaaatacctttaatttaaattctttcactctctgatccccacttcctgtatttcaagttcactcactcatgtactgtaatgacaaaatttcataaatttttaaaaaagcaacrggacctccaattatatgactacattgacattcctgtgtctagtaccccctgcagg

SEQ ID NO: 371310 - DNA, 561 bp, Homo sapiens
tccccttgcctcttactgccaatttagcagcacgtccaattgatcctactttcaaacagacgtgactacttctctccctttcacagtgacatccaaggccccaacatctattgcctagacaattggcctccagtctacttctacttttgtcttcctccccttgatccctgttcaatttttcttggttgaatagccatattgatcctttcagtatgcattggatcacaatactatcttgctccaaccccttcaggtccctcccattgcactggactatacacactcttggctgggcgtggtggctcatgcctgtmatcccagcactttgagaggccaaggtagacagatcacttgaggtcaggagttcgagaccaggctggccaacatggtgaaacctcatctctactaaaaatacaaaaattagtcaggcaaggtggcatgtgcctgtaatcccagctactcgggaggctgaggcaggagaattgcttgaacccaggaggcagaggttgcagtgagccgagatcatgacactgcactccagcctgggtgatggagtgagac

SEQ ID NO: 371311 - DNA, 519 bp, Homo sapiens
gttcaactgttgcatctgttaaggtggttagaagatggtatttcatggaacaagaatatttactatgccttcctttatctaagtgcctttaatatgtttccttttatttgaataactttgagtgagaaatagacataaaggagagttttcctatgatgcttgactaactctgaatacttcctggcacttgtaagataaacttggtcatgataaattaagtgatcagttattgctcccaaggtttctgtcatctgggtttagggtcagaggtggattttctgtgaagttaggaaaactatagctttagggccgtcactcgcataggtcacttccatggccccrtgcctaattttgtattctttttcttaaatacaaaaaaaagagacctcccaaactctataagtgccatgaaaacctgcattctatcccctcatcccccacccatgtctagggataaacagtctagcatgctagctctagataattgctgctttggataatttccagataaaatgccca

SEQ ID NO: 371312 - DNA, 487 bp, Homo sapiens
atacataaatgcataccattcaatgaattgtccttggatgaacattgctgtaaaactattcaagttaaaaaataatatttccagtatccagaagtcttctgatgtctcctccccatcactactcccttcttcctccccaatgtaactgttacgctcattctaacactggagttcarttgtgtctcttttccaactttctataaatgaaatcatctgtataaatcttgcatctggcttcttttgctccatattatgtttgtgaaattcatctatattattgaatataataactgtggttcattcagtattactgcttcatagtattccactttatgaatttatcacaatatattgtttctagtttttcatttttataaatcatgttgctctgggcattcttggaaatatttttggttaccatgatcccctttctgttgaatatacactttggagtgcaatatctgtgtcataggtatgtacatgttca

SEQ ID NO: 371313 - DNA, 515 bp, Homo sapiens
aaattatctcatttaatccataccgtgattttatgagattggtaytgttaccttcatgttactgatgagggacctgagccaggagaggcaaaatatctcagtcaaagtagcccagctgctaaaagattctgcctttgaaaaatcgcctgccattgacacctttgtcaccgtcacctccatctctgtctgagccaccatgatcttttttgacctattgcaaaatctatttaacggctacctctaccttggcccctgtatagtgaccaaagtgagcctttcaaaaacataaagcagatcatgtcattcctctgcttaaacctttcactggcatatccctcagggtaaaatccagagcattagtagggcttctaaggttctatttaatctattccccactccctcactttcccagtcactctggtctcacctctccctcttgcttcctgaactcagtgctgccattctccacacagcttgacatgttcctacctcagggcctttacacctgctctgtc

SEQ ID NO: 371314 - DNA, 515 bp, Homo sapiens
aaattatctcatttaatccataccgtgattttatgagattggtactgttaccttcatgttactgatgagggacctgagccaggagaggcaaaatatctcagtcaaagtagcccagctgctaaawgattctgcctttgaaaaatcgcctgccattgacacctttgtcaccgtcacctccatctctgtctgagccaccatgatcttttttgacctattgcaaaatctatttaacggctacctctaccttggcccctgtatagtgaccaaagtgagcctttcaaaaacataaagcagatcatgtcattcctctgcttaaacctttcactggcatatccctcagggtaaaatccagagcattagtagggcttctaaggttctatttaatctattccccactccctcactttcccagtcactctggtctcacctctccctcttgcttcctgaactcagtgctgccattctccacacagcttgacatgttcctacctcagggcctttacacctgctctgtc

SEQ ID NO: 371315 - DNA, 515 bp, Homo sapiens
aaattatctcatttaatccataccgtgattttatgagattggtactgttaccttcatgttactgatgagggacctgagccaggagaggcaaaatatctcagtcaaagtagcccagctgctaaaagattctgcctttgaaaaatcgcctgccattgacacctttgtcaccgtcacctccatctctgtctgagccaccatgatcttttttgacctattgcaaaatctatttaackgctacctctaccttggcccctgtatagtgaccaaagtgagcctttcaaaaacataaagcagatcatgtcattcctctgcttaaacctttcactggcatatccctcagggtaaaatccagagcattagtagggcttctaaggttctatttaatctattccccactccctcactttcccagtcactctggtctcacctctccctcttgcttcctgaactcagtgctgccattctccacacagcttgacatgttcctacctcagggcctttacacctgctctgtc

SEQ ID NO: 371316 - DNA, 515 bp, Homo sapiens
aaattatctcatttaatccataccgtgattttatgagattggtactgttaccttcatgttactgatgagggacctgagccaggagaggcaaaatatctcagtcaaagtagcccagctgctaaaagattctgcctttgaaaaatcgcctgccattgacacctttgtcaccgtcacctccatctctgtctgagccaccatgatcttttttgacctattgcaaaatctatttaacggctacctctaccttggcccctgtatagtgaccaaagtgagcctttcaaaaacataaagcagatcatgtcattcctctgcttaaacctttcactggcatatccctcagggtaaaatccagagcattagtagggcttctaaggttctatttaatctattccccactccctcactttcccagtcactctggtctcacctctccstcttgcttcctgaactcagtgctgccattctccacacagcttgacatgttcctacctcagggcctttacacctgctctgtc

SEQ ID NO: 371317 - DNA, 333 bp, Homo sapiens
ataattcttcatgttggttcccacatgaaggcacaaaagaggtaaggtaattttatgtagttgcttttcatttttctctttagcttgtaattgtctgatttttagaaagttagaaatgtttaggttacagattcttmaatattcaaaatatatagtttgcatagtttaaatataacttcgtaaacaaattctcaacagtctacttggaaatttatatttacgtcatacatttataatatgggaaagtaaaaattttgaagaatcattttgttcctagtcttcttgttttttattaatgttataatttgcaggctgactaaagcctctcagata

SEQ ID NO: 371318 - DNA, 463 bp, Homo sapiens
ttatctcccttctgcacagcattggagatgcttaaatgaagaaaaacctattttcaaacacataagaacaaattattatagacagtttaaacaactcacatacttgacaattccacagagccatataattaaaaatctagtgcttcttaatcccagaagcatgaaaatgaaagagaaggttttgtataatacacagtaatctctctattagatatacaggacagagaatctcctcatgaggatttttccctttttgttctattagatctgtcaaataaataatcttgttcatgtcaaaatttccccagggtggtcmctgcaatttcacattgtcctttgagaaattatgccaattagagagatatgtatatggcttacaatatgaggggaggaatgtgtggtgtccaggtataaaagactgagaagaacccgtgaaaacttatgtcagcaagcatttgtacaa

SEQ ID NO: 371319 - DNA, 635 bp, Homo sapiens
ctacaggacacaaagacagtttatgtcctgtctgtataaactggctgaaactggtttgaggcctacaattgcttatcagaaaagtgttttgtaaggcgattctctgtctgataagggttatggtggccttggttgtaaatcagagttagaaatgaaatgacaatttgactgatagctcctattacggagtttagcaagggtgtggtttttcttgtagctctagaaatttagggaattgctgtgccagccaagctttgaacccttgtccaatagttaccttctgtttccttaaccctaggtttcatcttagtagacagagaggcatctatcrtgatctctcaggtcacaattgtaatattgtagtaagtgatgggaattcataacatttttacttctttcgttgctatagatttgtgcaaatggatgcagttgtttgagtgaagaagacagtcaggaatatcggtatctatgttttctcagatgggctggcaacatgtatctggaaaatacaactgatgatcaagaaaatgagtgtcaacatgaagctgtttgtaaagatgaaattaatagacccaggtatttatgtatcatttgagcagataatatcacatatcaaaaagttataattaaattga

SEQ ID NO: 371320 - DNA, 416 bp, Homo sapiens
cccttgtccaatagttaccttctgtttccttaaccctaggtttcatcttagtagacagagaggcatctatcatgatctctcaggtcacaattgtaatattgtagtaagtgatrggaattcataacatttttacttctttcgttgctatagatttgtgcaaatggatgcagttgtttgagtgaagaagacagtcaggaatatcggtatctatgttttctcagatgggctggcaacatgtatctggaaaatacaactgatgatcaagaaaatgagtgtcaacatgaagctgtttgtaaagatgaaattaatagacccaggtatttatgtatcatttgagcagataatatcacatatcaaaaagttataattaaattgatagtcatcgaactgtttcatggtaacaatgtttttgttga

SEQ ID NO: 371321 - DNA, 555 bp, Homo sapiens
atgatagtattataatgatagacactaataatgttgatgatgttaacggacacaaagttaatgaatagygtataaacattttcttttaaagtgtattttaaatgggtgcagattaaaattcattatataaatgatgtattgcaaacaggtctgcatattaccacatttttttgccctgaaatcttcaaaaaatttttctgggggtttataaaatgtttaatgagccaaagactaaatcataccagccatattgttacttaagaccaggaaagatttgctaagtctgggatgttaatttcttaataccatgcccagactgtgaagtgttcatgactcccacctgtttttgaagcctcaaatttatgtctaagtcaccaatccctacttgctaccagaaatatcataacagaatgaaatatattcattcatacatttattatttattgaatctcctctaactggaagatatttttcaaaatgttatgacaatgagacatgatacctgtccccaggtaatgtactatacataggtaagattatacactcttcagaaca

SEQ ID NO: 371322 - DNA, 555 bp, Homo sapiens
atgatagtattataatgatagacactaataatgttgatgatgttaacggacacaaagttaatgaatagcgtataaacattttcttttaaagtgtattttaaatgggtgcagattaaaattcattatataaatgatgtattkcaaacaggtctgcatattaccacatttttttgccctgaaatcttcaaaaaatttttctgggggtttataaaatgtttaatgagccaaagactaaatcataccagccatattgttacttaagaccaggaaagatttgctaagtctgggatgttaatttcttaataccatgcccagactgtgaagtgttcatgactcccacctgtttttgaagcctcaaatttatgtctaagtcaccaatccctacttgctaccagaaatatcataacagaatgaaatatattcattcatacatttattatttattgaatctcctctaactggaagatatttttcaaaatgttatgacaatgagacatgatacctgtccccaggtaatgtactatacataggtaagattatacactcttcagaaca

SEQ ID NO: 371323 - DNA, 555 bp, Homo sapiens
atgatagtattataatgatagacactaataatgttgatgatgttaacggacacaaagttaatgaatagcgtataaacattttcttttaaagtgtattttaaatgggtgcagattaaaattcattatataaatgatgtattgcaaacaggtctgcatattaccacatttttttkccctgaaatcttcaaaaaatttttctgggggtttataaaatgtttaatgagccaaagactaaatcataccagccatattgttacttaagaccaggaaagatttgctaagtctgggatgttaatttcttaataccatgcccagactgtgaagtgttcatgactcccacctgtttttgaagcctcaaatttatgtctaagtcaccaatccctacttgctaccagaaatatcataacagaatgaaatatattcattcatacatttattatttattgaatctcctctaactggaagatatttttcaaaatgttatgacaatgagacatgatacctgtccccaggtaatgtactatacataggtaagattatacactcttcagaaca

SEQ ID NO: 371324 - DNA, 613 bp, Homo sapiens
gagaaaattggttttcatttttctttcttccccacccccaaaaggtggagcttcatagctggcagccttccacagctcaaccaaatgaagaaatgctgttcttatgacagagttctcagcagatcaggttgtttaaaactgtatagcatctccccctttcttcttagaaggtaatgtaatttcaggrggttgtagatgttaggatgtatacaactgaaattaatcgaagtgatttaatctttctaaacagcctttcaataatattgcacattaaatgttcataggattttcttgaagcaaatgtagcaagatactaaataaaaataatctaaagactttctattagaaaacaaagacttatattaataaatggacaccaaaggaacactcattgttctccctgccccaggaacattcaaaacataaggacaccggaggatgcgtgtggttcaggctctggtgtttctgtgctccccagggcttgcatcaggggcctggagctgagactcgatgaccaagtgcagcccttcctcctccttgcttgcagaatgaaatccaaactcattctttgaatgccggaaaaaaaaccagaatgacactccagatagcttaa

SEQ ID NO: 371325 - DNA, 585 bp, Homo sapiens
ttacaggatgtcaggaacagagctatggcactaaagaattttttcagtttgagatgttactttttgttttttttttygagaaggagtctcactctgtcatccacgctggagtgcattggcatgagctcgactcactgcaacctccacctcccgggtccaagcaattctcctgccttagcctccccggtagctgggattacaggcaagtgccactacacccaactaatattttatattttggtagagacagggtttcaccatgttggccaggctggtcttggactcctgacctcaggtgaaccacctgcctcggcctctcaaagtgctgggattacaggcatgagccaccacgcctggccaagatgtcactttttgagatcatgtgagaaattaccagtctagagacctgtgagaatagatcagagaaaggcttccatgaggagaacaaagggaggatcaagagtaaactttaatgagttactgcagtcttgggaaacaaataggaagaaaacgaacaagcaggcaaacaaacaaagaccagaatttaaactgaaaaaggggaggaaaaatgtgggatattagaag

SEQ ID NO: 371326 - DNA, 585 bp, Homo sapiens
ttacaggatgtcaggaacagagctatggcactaaagaattttttcagtttgagatgttactttttgttttttttttcgagaaggagtctcactctgtcatccacgctggagtgcattggcatgagctcgactcactgcaacctccacctcccgggtccaagcaattctcctgccttagcctccccggtagctgggattacaggcaagtgccactacacccaactaatattttatattttggtagagacagggtttcaccatgttggccaggctggtcttggactcctgacctcaggtgaaccacctgcctcggcctctcaaagtgctgggattacaggcatgagccaccacgcctggccaagatgtcaytttttgagatcatgtgagaaattaccagtctagagacctgtgagaatagatcagagaaaggcttccatgaggagaacaaagggaggatcaagagtaaactttaatgagttactgcagtcttgggaaacaaataggaagaaaacgaacaagcaggcaaacaaacaaagaccagaatttaaactgaaaaaggggaggaaaaatgtgggatattagaag

SEQ ID NO: 371327 - DNA, 585 bp, Homo sapiens
ttacaggatgtcaggaacagagctatggcactaaagaattttttcagtttgagatgttactttttgttttttttttcgagaaggagtctcactctgtcatccacgctggagtgcattggcatgagctcgactcactgcaacctccacctcccgggtccaagcaattctcctgccttagcctccccggtagctgggattacaggcaagtgccactacacccaactaatattttatattttggtagagacagggtttcaccatgttggccaggctggtcttggactcctgacctcaggtgaaccacctgcctcggcctctcaaagtgctgggattacaggcatgagccaccacgcctggccaagatgtcactttttgagatcatgtgagaaattaccagtctagagacctgtgagaatagatcagagaaaggcttccatgaggagaacaaagggaggatcaagagtaaactttaatgagttactgcagtcttgggaaacaaataggaagaaaacgaacaagcaggcaaacaaayaaagaccagaatttaaactgaaaaaggggaggaaaaatgtgggatattagaag

SEQ ID NO: 371328 - DNA, 452 bp, Homo sapiens
gcctttttctcttctccgtgacctttgctaacagaagaccataatattttcagaggcaaaaaagggttgctttatttgcctaaagcaatctatagattggggaaacacagcctttgggacaaagtgaaagtgtgctccaagaagaggttggagagtcggagattataaaggcaaaaaactgcaaggccatgaagggggatctggggagtaagtaacagaatgttgattgaaccttgaaccttaggtctaaaacctaagtatcttttattggctgactctagttkgtcagctggggaatttctgggtatagtcttttggcatcaatattcattgatgaggggaactagtttggcttggttgcagaaagggaaattttgtgatatttttgcaacatttttccagaacacagaggtcatgactgcccctcgtcctgctatgactgcctcgttctg

SEQ ID NO: 371329 - DNA, 331 bp, Homo sapiens
tgatagctcgataatagtgagaactagctgtcattgaatggttagcattgtgcaagggactttaccaaggcattgcttcatctaatcacaaaacaaacaagkcagcaattgttcacagggaggaagtggatgctcagagtgattaagtgacttatcagatatttgtgtgagttcaggatgggtgcataaccatcacctcttgctcaggtactgatgtcagatgtttttcccaaaccactggctttcagctcatgtttacaaactgaaatctatgaaccagagtataaaatcactttctaagatctaaaattgttaaacatcattgctgttt

SEQ ID NO: 371330 - DNA, 331 bp, Homo sapiens
tgatagctcgataatagtgagaactagctgtcattgaatggttagcattgtgcaagggactttaccaaggcattgcttcatctaatcacaaaacaaacaagtcagcaattgttcacagggaggaagtggatgctcagagtgattaagtgacttatcagatatttgtgtgagttcaggatgggtgyataaccatcacctcttgctcaggtactgatgtcagatgtttttcccaaaccactggctttcagctcatgtttacaaactgaaatctatgaaccagagtataaaatcactttctaagatctaaaattgttaaacatcattgctgttt

SEQ ID NO: 371331 - DNA, 625 bp, Homo sapiens
caatatttcaccatttttcttgttgttgccaaagtgaacaaagattattaagtcacaaattcacagagacctctgaacccaaaacaggctaaacagaaaataaattaaccactagtaatattataataaaacttgagaattatctaaaaatcagcagattaaaaaatgtgtatcataaaaataacaattaggttgacagtgactttttaatagaagcaatgaaagccaaaacacaagagaattgtttatataaattgatgaaagaaagcatgctattctataattcagtatagaaaacaatcattcaagaataaatgtaaaataacaatttattatttacatacatgctctaaggaaattaataaaagatgactttcaggcattgggaaratattgcagatggaagttcagaaagggtaggaagaaatgaaaagtaaaaaaatagtaattatgcggctaaatctaaatgaatactgcctttataaagaaaaacactaataacaataataatgtctccttgggattaagatctctaatattaaaatttatgcaacagtattatatatatgagataaggagtaaccatagcatatatggaaataatttaaatatatagattaatgtt

SEQ ID NO: 371332 - DNA, 625 bp, Homo sapiens
caatatttcaccatttttcttgttgttgccaaagtgaacaaagattattaagtcacaaattcacagagacctctgaacccaaaacaggctaaacagaaaataaattaaccactagtaatattataataaaacttgagaattatctaaaaatcagcagattaaaaaatgtgtatcataaaaataacaattaggttgacagtgactttttaatagaagcaatgaaagccaaaacacaagagaattgtttatataaattgatgaaagaaagcatgctattctataattcagtatagaaaacaatcattcaagaataaatgtaaaataacaatttattatttacatacatgctctaaggaaattaataaaagatgactttcaggcattgggaaaatattgcagatggaagttcagaaagggtaggaagaaatgaaaagtaaaaaaatagtaattatgcggctaaatctaaatgaatactgcctttataaagaaaaacactaataacaataataatgtctccttgggattaagatctctaatattaaaatttatgcaacmgtattatatatatgagataaggagtaaccatagcatatatggaaataatttaaatatatagattaatgtt

SEQ ID NO: 371333 - DNA, 156 bp, Homo sapiens
attgtagaaccagaatctatttygaatagtattttttaagttggccagttgattgttcagtaccttcttttttactctgttagcaacatacaacttgagagaaaagattgaattatgggcatatacatttatttactagatgagcttctgaaaaac

SEQ ID NO: 371334 - DNA, 570 bp, Homo sapiens
tttactcagcaccaccatggttgagtagctagaatagaaggaaggagcccgattacccaagtgatgatgggttgagacaatgtagcattatctgaaatagacagtggctaggagggagcttattgtcagctggcaaggggtggaggcagagggtgggctggctctgtttttcttgccattaggrgctggcacctctgtgagcatgggaggatgctataaaacaggcctgcagtgaaacacccacgggtggcatgagcatgtcagttaggctgtggaggagtcacatgtggaggaagagcctcagaacggaacttcccagggaggttggaatgggtaacaagattcaagctctaagtttatttcagtaggctgttttggttttcaaggtatcttaaaaaaaagaagggggtcatatatgtactggaaatggagtcgaaactgaaattgtaaaacaaatccaacaaatatttatcaaatgcgctatcctcactactggaaatgccacagtgaacatgacaggtgagctttcttccatcaaggaatttgtatcctagcagtggagccagtcat

SEQ ID NO: 371335 - DNA, 597 bp, Homo sapiens
gtgtccctgagtgtttacatagaagttctcatctattttataagcaactctgctcttccctcagaagttgggacaaataggactcaggtcactcagaggaaagataatgggtccttgcccatgcctctgagatcaggtaagcatccctcacaattcaacctgcccccatggccttctgaacttgggcaccattgtggacccagggagctacgatttggatgggcagagggaaaggaactgctggttgttaatttgtgttttcagaccacacatccagtctcaggaaattaaatcacagattcaagctggatgttccccagtcctgtgattcttaaygttttgaagggccagtactcttggaaatctgatggaaactttggactcatccccagacaacacactcaagcacgatgcacacatgcggatgcataccctatttttcatactatttcagagtatttatgaagccacgtgaaccttctaagatccaaagataatttgattcataagactttttaatccttgaacaggaaatttcaagtgacatccacttaggataaataacagtataaaaacaaacaaacaaaacacatcctt

SEQ ID NO: 371336 - DNA, 561 bp, Homo sapiens
ctcaaaacaatagtttgtgggcttccagaatgaagcatttattccttctatgagctgtgctatgcccattatccaatctagacaaatacctgcctgggacagaaagtcaagaatccctgagaaccrtcccctctgctttcactattctccagccacattgccatccttgctgttccacacacacactaaacaaatgcctgcctcaaggcctttgcacaggctgctccctctccccagagtgctcttctcccacaaggctttctccctcacttccttcagatctccccaccaaaatgtcacttcatcatagaggtctttctcacctcccttatctaaaatagcacttcctaaccctttctaactcccttcgttggagagtttgaggggctacaaaatagcacccttctactccgtgttagttctgatgcaataaagaataagaaaaaaaaaaagcaaggcagatgggagaacaaaatctcacctttatttccagtacagttgatattagaacatgtggctgatatctgtgggcaaaagggcttctgggtgctgacatgcaga

SEQ ID NO: 371337 - DNA, 561 bp, Homo sapiens
ctcaaaacaatagtttgtgggcttccagaatgaagcatttattccttctatgagctgtgctatgcccattatccaatctagacaaatacctgcctgggacagaaagtcaagaatccctgagaaccgtcccctctgctttcactattctccagccacattgccatccttgctgttccacacacacactaaacaaatgcctgcctcaaggcctttgcacaggctgctccctctccccagagtgctcttctcccacaaggctttctccctcacttccttcagatctccccaccaaaatgtcacttcatcatagaggtctttctcacctcccttatctaaaatagcacttcctaaccctttctaactcccttcgttggagagtttgaggggctacaaaatagcacccttytactccgtgttagttctgatgcaataaagaataagaaaaaaaaaaagcaaggcagatgggagaacaaaatctcacctttatttccagtacagttgatattagaacatgtggctgatatctgtgggcaaaagggcttctgggtgctgacatgcaga

SEQ ID NO: 371338 - DNA, 589 bp, Homo sapiens
gagaaagtcatatggtttttctcctttaacctattagtaaaatgaattcattaacagacttcctaatgttaagcaatatctgctttcctggaacaaaactttactctgtcatcatatgttgtacttttaatacttttctggatttgatttgctaatattttatatagaattcttttgcaactacattcataatcatgtgtatctatttggggccagtgctcttgaatgttggaaaacatgatattgaaaatcatagatcctcatgaattaggtggtttattaaaaggatacctgggataaagtaacagaatgtataggtgtatctgaggctgttggtgaatccctcagccaagccaatctactcctcattttagaggctctgccgatgctctggaactagaaaagaaaaccagaacatgtgggagatttgaggtttggtgaatttaatattgaagaygctaaagaggtgttcaatcattgcagtaaaagataatagaggctaaagtaacaaaagaaaccgagactgcacccacgtatctgggtgggacctctctagctgagaataagcagaaaaaggaagcatacagga

SEQ ID NO: 371339 - DNA, 525 bp, Homo sapiens
tcaggtgagcagcctcacaaaggtgagatcaggacccttctgataagaacagcgtcacccctggaggctgaccagtggattaagacagaacaaaaggaggggggtatagagcaagaggacccttcagcacctgtgccgtgaatcccaactctgcctgctcccttgataacctcaccattaccaaagggactgtggattggtaacctgatgggtcagagyccagatttttcagtggggaatttttttttataaagttacttttctttaaaggtcaataactatagagtgctcttttctccttcttacctccaattagggcttcttgtcttcagaaaaaaaaaaaaaaaaatctggccatagctttctttctctctaccttctctgtatttgtccaaaaaaaaaaaaaagggacatgatctattctgcagattgagacagagagacagagaactctctccaactttcagcacagctgaacttgctattcccaagattttgatttaaactggagaagtggaaaaaccc

SEQ ID NO: 371340 - DNA, 525 bp, Homo sapiens
tcaggtgagcagcctcacaaaggtgagatcaggacccttctgataagaacagcgtcacccctggaggctgaccagtggattaagacagaacaaaaggaggggggtatagagcaagaggacccttcagcacctgtgccgtgaatcccaactctgcctgctcccttgataacctcaccattaccaaagggactgtggattggtaacctgatgggtcagagtccagatttttcagtggggaatttttttttataaagttacttttctttaaaggtcaataactatagagtgctcttttctccttcttacctccaattagggcttcttgtcttcagaaaaaaaaaaaaaaaaatctggccatagctttctttctctctaccttctctgtatttgtccaaaaaaaaaaaaaagggacatgatctattctgcagattgagacagagagacagagaackctctccaactttcagcacagctgaacttgctattcccaagattttgatttaaactggagaagtggaaaaaccc

SEQ ID NO: 371341 - DNA, 606 bp, Homo sapiens
tcagaccatagatatgcatcattggtttcgttgctcacaagtttcatgcacctttatcttcccctttgttgggtgtcttgtgctaattatttttttagttggctgaagaacttccttaaggagttatttgtttaaagttacatgagtagcatactggctgagactgggtcttgaatatttatttattttgccttcacataagaagaatcattaaaatgattatagaattatagggtatctattttttccccgctaaactgtataaacattgctccttcgtattgcagcatttagtgttgcggattaaaaatccaataacaraatgaccctctctcctttgtaactggcttatttttcctttttaaaagattgcatgatttttctcttggttagaattccaaaatttcagacgtatataggtttgtaccttgataaaagtgagagtttgagtctaaattcacatttcttctgttacgagaagaaatttttttatgtttccttgattattgtctctcctttatgcactctgttctctacttcagtatatttattttgtggttcttggacctactaaattctatcttataagtttatcatttattctca

SEQ ID NO: 371342 - DNA, 606 bp, Homo sapiens
tcagaccatagatatgcatcattggtttcgttgctcacaagtttcatgcacctttatcttcccctttgttgggtgtcttgtgctaattatttttttagttggctgaagaacttccttaaggagttatttgtttaaagttacatgagtagcatactggctgagactgggtcttgaatatttatttattttgccttcacataagaagaatcattaaaatgattatagaattatagggtatctattttttccccgctaaactgtataaacattgctccttcgtattgcagcatttagtgttgcggattaaaaatccaataacaamatgaccctctctcctttgtaactggcttatttttcctttttaaaagattgcatgatttttctcttggttagaattccaaaatttcagacgtatataggtttgtaccttgataaaagtgagagtttgagtctaaattcacatttcttctgttacgagaagaaatttttttatgtttccttgattattgtctctcctttatgcactctgttctctacttcagtatatttattttgtggttcttggacctactaaattctatcttataagtttatcatttattctca

SEQ ID NO: 371343 - DNA, 541 bp, Homo sapiens
gctgagactgggtcttgaatatttatttattttgccttcacataagaagaatcattaaaatgattatagaattatagggtatctattttttccccgctaaactgtataaacattgctccttcgtattgcagcatttagtgttgcggattaaaaatccaataacaaaatgaccctctctcctttgtaactggcttatttttcctttttaaaagattgcatgatttttctcttggttagaattccaaaatttcagacgtatataggtttgtaccttgataaaagtgagagtttgagtctaaattcacatttcttctgttacgagragaaatttttttatgtttccttgattattgtctctcctttatgcactctgttctctacttcagtatatttattttgtggttcttggacctactaaattctatcttataagtttatcatttattctcataatttctatctttgtatttttgctctgcattctgggaaatttctctaagttgtcttctaattcactaatcttatttttagctatatgccc

SEQ ID NO: 371344 - DNA, 456 bp, Homo sapiens
tctttcttttttagaggcagaatcagttgctccaacctttgagtcacatgacatgatgctttatgcatgttttaatgagcagttacttttctcaactacacttctgtgttctcaatgtcaatcacccctactagaaggctataaacttcttggggacaataatcataattcattcttctttttatcgtaatttactttttattgaggtttgacttactgckatggtttggatgtttgtcccctttgaatctcatgttgaaatataacccccaatattggagtgggggcctggtgggagatgattacatcgtgggggcagatccctcatgaacggctcagcaccatccccttggtgatgagtgagttctcgctcagttagttcacacgatatctggttgtttaaaagagcctgggacctcccccttctctctctctctctctctcattccctctctg

SEQ ID NO: 371345 - DNA, 456 bp, Homo sapiens
tctttcttttttagaggcagaatcagttgctccaacctttgagtcacatgacatgatgctttatgcatgttttaatgagcagttacttttctcaactacacttctgtgttctcaatgtcaatcacccctactagaaggctataaacttcttggggacaataatcataattcattcttctttttatcgtaatttactttttattgaggtttgacttactgcgatggtttggatgtttgtcccctttgaatctcatgttgaaatataacccccaatattggagtgggggcctggtgggagatgattwcatcgtgggggcagatccctcatgaacggctcagcaccatccccttggtgatgagtgagttctcgctcagttagttcacacgatatctggttgtttaaaagagcctgggacctcccccttctctctctctctctctctcattccctctctg

SEQ ID NO: 371346 - DNA, 567 bp, Homo sapiens
atcagcagcgtgaaaaagaacgaatgtagaagctttgaggtctacctggggggactgggggctgtgtcaggtcaagcactgagtcttgactttatctcatgagtccctgggatatttttaatgaaataggacaaagcagtgttaaaggaagatgagtctggcagggttagtggaaaagatggaaaagggaaagactggtgasaaagggagctgccagctacggcagtgccccaggtgtgtggcaacaagggtaagaatgaaaaggcaggggtgcaaagggggacactgggccaaagtgtcaagactcagtgacggagtggaggtacagagcaagaacagggaagaggaggagaggatggtgagggtttgaactcgagcagcagggacagaaaagaagtcatactcgtcctccagaggttctgattcctggttacccagcactttatccagataggatctctgcaacaagaggcagcacagggcaggatttcccaacacaggcttgagagtcagacagctcagggtttcctgctaagctgtgttatcttcaccaagttttaaccagag

SEQ ID NO: 371347 - DNA, 567 bp, Homo sapiens
atcagcagcgtgaaaaagaacgaatgtagaagctttgaggtctacctggggggactgggggctgtgtcaggtcaagcactgagtcttgactttatctcatgagtccctgggatatttttaatgaaataggacaaagcagtgttaaaggaagatgagtctggcagggttagtggaaaagatggaaaagggaaagactggtgagaaagggagctgccagctacggcagtgccccaggtgtgtggcaacaagggtaagaatgaaaaggcaggggtgcaargggggacactgggccaaagtgtcaagactcagtgacggagtggaggtacagagcaagaacagggaagaggaggagaggatggtgagggtttgaactcgagcagcagggacagaaaagaagtcatactcgtcctccagaggttctgattcctggttacccagcactttatccagataggatctctgcaacaagaggcagcacagggcaggatttcccaacacaggcttgagagtcagacagctcagggtttcctgctaagctgtgttatcttcaccaagttttaaccagag

SEQ ID NO: 371348 - DNA, 586 bp, Homo sapiens
tttttttccaattctgtgaaaaatgatgttggtagtttgatatgaatatcattgaatcygtagattgcttggggcagtatggccattttaatgatactgattcttccaagtcatgaacatggaatgttttcatttgtttgtgtcatctctgatttcttgagcagtgttttgtagttctccttatagggattctttcacctccttggttagatgtattcctaggggtgtgtgtgtgtgtctattgtaaatgggattgagttctttatttcgctctcagcttgaatgctattggtatatagaaatgctactgatttttgtacattgattttgtatcctaaaactttactgtttacagttccaggagccttttggcagagtctttagggttttctaggtatagaatcatatagtccacgaagagatggtttgagttattattttcctattcagatgccttttatttctttctcttgcctgattgttctggcgagcacttctagtactatgttgaataggagtggtgagagtgggcatggcatccttgtcttgttccagttctcaagaagaatgcttccagttttcatga

SEQ ID NO: 371349 - DNA, 586 bp, Homo sapiens
tttttttccaattctgtgaaaaatgatgttggtagtttgatatgaatatcattgaatctgtagattgcttggggcagtatggccattttaatgatactgattcttccaagtcatgaacatggaatgttttcatttgtttgtgtcatctctgatttcttgagcagtgttttgtagttctccttatagrgattctttcacctccttggttagatgtattcctaggggtgtgtgtgtgtgtctattgtaaatgggattgagttctttatttcgctctcagcttgaatgctattggtatatagaaatgctactgatttttgtacattgattttgtatcctaaaactttactgtttacagttccaggagccttttggcagagtctttagggttttctaggtatagaatcatatagtccacgaagagatggtttgagttattattttcctattcagatgccttttatttctttctcttgcctgattgttctggcgagcacttctagtactatgttgaataggagtggtgagagtgggcatggcatccttgtcttgttccagttctcaagaagaatgcttccagttttcatga

SEQ ID NO: 371350 - DNA, 586 bp, Homo sapiens
tttttttccaattctgtgaaaaatgatgttggtagtttgatatgaatatcattgaatctgtagattgcttggggcagtatggccattttaatgatactgattcttccaagtcatgaacatggaatgttttcatttgtttgtgtcatctctgatttcttgagcagtgttttgtagttctccttatagggattctttcacctccttggttagatgtattcctaggggkgtgtgtgtgtgtctattgtaaatgggattgagttctttatttcgctctcagcttgaatgctattggtatatagaaatgctactgatttttgtacattgattttgtatcctaaaactttactgtttacagttccaggagccttttggcagagtctttagggttttctaggtatagaatcatatagtccacgaagagatggtttgagttattattttcctattcagatgccttttatttctttctcttgcctgattgttctggcgagcacttctagtactatgttgaataggagtggtgagagtgggcatggcatccttgtcttgttccagttctcaagaagaatgcttccagttttcatga

SEQ ID NO: 371351 - DNA, 586 bp, Homo sapiens
tttttttccaattctgtgaaaaatgatgttggtagtttgatatgaatatcattgaatctgtagattgcttggggcagtatggccattttaatgatactgattcttccaagtcatgaacatggaatgttttcatttgtttgtgtcatctctgatttcttgagcagtgttttgtagttctccttatagggattctttcacctccttggttagatgtattcctaggggtgtgtgtgtgtgtctattgtaaatgggattgagttctttatttcgctctcagcttgaatgctattggtatatagaaatgctactgattttygtacattgattttgtatcctaaaactttactgtttacagttccaggagccttttggcagagtctttagggttttctaggtatagaatcatatagtccacgaagagatggtttgagttattattttcctattcagatgccttttatttctttctcttgcctgattgttctggcgagcacttctagtactatgttgaataggagtggtgagagtgggcatggcatccttgtcttgttccagttctcaagaagaatgcttccagttttcatga

SEQ ID NO: 371352 - DNA, 568 bp, Homo sapiens
agtgagcagggatttcattctgccttgccatgctatgtcagtttatgactttggatacagccattctgctccctgggccctgggcccccaactgtcagagcaagaattgcagaagacaaacattcctacaaacttctcttgttctagacccatcctcattatgtttgccctatactcccctaccaccttgattcactgcattttatttaacagttacctatgtgatgcttagtgtgagctgggacatgttgtaagtgcttacatgaactaactcatkaagtgggtactactgttattccttaaagataaggaaactgcagcacagtgaagtacttacccactgtcccataactggtaagtgtggtgctgggagtctgaccatgcatccgtcttcagagttcattctcttaactactatgctatgctgcttcccttaacaattttctttaaacagattcacttttttaacattatttttaaaaaaccattatgaccactgattgaaaacctatatgacttgccataaatagaagagacattaaaatgcatgactattacatttaaaacc

SEQ ID NO: 371353 - DNA, 558 bp, Homo sapiens
tgctatgctgcttcccttaacaattttctttaaacagattcacttttttaacattatttttaaaaaaccattatgaccactgattgaaaacctatatgacttgccataaatagaagagacattaaaatgcatgactattacatttaaaacccaatagtcctccaagtgactcctaagatcatctctcagatgactggggacacttgcggacacctggggaggaagcactaatggcttttctgacactttaggtacctgcaggcctcccaggaagaagctcgggggcagacagcctttatgcctctgtggccctcctctyctgcctacaatagtgccactcagcaatacacaaggtaaaggcttcaaggaacttggctaccaccagtctggggcttcaatgactcactgccaatccctgggcatgatgcatccactcaggggctggtgacagcctagccagaggcttcctttgctctctgctttctggagcgacagcccactggaggcatgtccaatccctgccagagtaacggacaagtctccactgtctccagtgat

SEQ ID NO: 371354 - DNA, 558 bp, Homo sapiens
tgctatgctgcttcccttaacaattttctttaaacagattcacttttttaacattatttttaaaaaaccattatgaccactgattgaaaacctatatgacttgccataaatagaagagacattaaaatgcatgactattacatttaaaacccaatagtcctccaagtgactcctaagatcatctctcagatgactggggacacttgcggacacctggggaggaagcactaatggcttttctgacactttaggtacctgcaggcctcccaggaagaagctcgggggcagacagcctttatgcctctgtggccctcctcttctgcctacaatagtgccactcagcaatacrcaaggtaaaggcttcaaggaacttggctaccaccagtctggggcttcaatgactcactgccaatccctgggcatgatgcatccactcaggggctggtgacagcctagccagaggcttcctttgctctctgctttctggagcgacagcccactggaggcatgtccaatccctgccagagtaacggacaagtctccactgtctccagtgat

SEQ ID NO: 371355 - DNA, 564 bp, Homo sapiens
acccttcattcattcattcaacaaacatttattaaactcctattgtgctaggctctcttccaaacaatcagaaaatgaagatactgaagatttagtctctgatctcaaggagtccatagttgagtaaaaaacaagcctgtagagagatatattactatatagggatgttaacagttatagtcaatgcccacaccaggagcaggacaaggacaaaaagtctaagcatcagttcatgattcatagaggaggtggcccctggtctggacctcaaaagatgagaagttcaccaaataaatgacactgcattctgattcttatttgtttaccagtgaatggktgtatttatttctgcacgtgcatacacacacacacacacacacgccattaactttgtcttcttcattgctaaccagtgagaaaaactcagcaagaaaaggaccattgatacctgatatagtttggatatttgttcccacccaaatctcaagttgaattgtaatccccagtgctggaggtggggcctggtgggagatgtttgggttggggggcggatcccttatggct

SEQ ID NO: 371356 - DNA, 480 bp, Homo sapiens
gtaatgcatcgtgttaatggaatagtttttcaatttaataatatagtgtgaagcagtcagtgtgtttgtatgtgaactaattgatctatattttaagtttatttggcaactattgtgttgtttgtagtaatccattgatttgttcaggccaaaacaccactagatattaccggaataaatgttcatgtacttgactgaaaaattgccaaaggaagrctgagtaaactaaagctggcttttggctctacgtcagcatgaatctgagctaaatagaactaattttgatttaatctcattttttccattattaacactataattattttcaactggcctggtcataaggtccaaattatcaggtctgatgagatgagctaaagagtttcacaactatggagagttctttctttctgtaccatatgttctcaaaagagaaaataattaatcaagatgggagaacaaggggactttatcttctta

SEQ ID NO: 371357 - DNA, 565 bp, Homo sapiens
attaaattactcacatattgaggaaagctaaagaatcaatagactcagattgcaaagaggctgagtaggtaatttaattgtttttgcttttcataattgttggggaggctatcttgctttataaaacaagattaacttcaataatatctatgtgttttagaggtgaaaacaatgtctaaagcatttatgttaaacttggttggatttgayttcttcttatgaggttatccttccattagaaatttaaacagtgagcagaggctaagaatccttttattactcataaaattttggctttgatggacaagtgtttatagttcatggcgagggaccagtcttttaaagcattttcatctttgccaaagtctcttcctggatttaactggtcatctcagcaggtattggagcactttatggctttatgatgacgaattttttctctctagaagtgatggcagaaattttaggtgtttttcagctgtatttatccaccaaactcaagtgcatgtaaccaaactgaagactacagaacaaagacttcttaataagtcaaacagaagaattc

SEQ ID NO: 371358 - DNA, 458 bp, Homo sapiens
ggccttccattcaaattttgtaatcattttagcacatttcttggaaaattcttttggaatattaattaaaattatagatcaagttgaaaattaattgagatgatgaagagtctccttgtgcatgaatatgctatttccctcaatrcatttacacgtttaaatttttcaaaatacagatatgcattgactatctcatgttagatttgtttcatagttaatatgtatttttggttaatattataaaatatttctctttaaattgtgttttcaatagcctattaatgtaattataaacacatattttaaaaataaatatgtacataaaaaatagaattatttttttcattacaggggtagaataagaattacttcgaagataggcagcatatttgagtcaacataaaatatgctctcatcaattgcagacatgcaacagtaaaaggggcaccattatggtg

SEQ ID NO: 371359 - DNA, 558 bp, Homo sapiens
gttgttcagcagaaatactactggcaatttggacaaatttttctttgttcatacaaattatttgagggaagttaaacatcacttgccctatccactaaattccaagtactccctagtatttgcaaaaagctgatacaaacacaactcacccatttctcccatcacttttccaagtgcctccatcaggaattgtaatctgcacacatacacacactgcacggcattaagggccaacgtgaagtactgaggaatttggrcaatattcaatgacaaatgaagataaagaagttagatgactaacatgattgtattatgctttataattttccaattttaattccttaatatgattagcccaaactgtaagaggaaagctgaaatcattcttaaaactgtgaaaagttttattaaaattcattgagattgcagttatgaaatgtgctaattttcaggttaggacaacttaacacttgtccattactgcttcattgacatgaaactgcattagaacatgtccttattctattaacacttttttatggccttcaaagataaaca

SEQ ID NO: 371360 - DNA, 487 bp, Homo sapiens
aaggagtcataaagatgttcccagaaccaaaggagactatgactgaagaggtaaagatggtagaagaatgttgcaaaaaataaaaaaaaaaaaaacctggtaaaaatatagaaataaccatatggaaattccgctgttggaaaagtaaaataactgaaataaaaactcattcgtggggtttaactgtagattccaacatcaggaaaaggaataagcaaactgcaaaacagatccatagatgttctgcaagctaaagcagagacaggaaagaagacagagacaactgaaggagctcagaagcatagggcacctagagcacacaaacacaagcacaatgagaacatcagaaggaggtaagagaaagcagcaaaaaagatatgcaaaaaataatagctgaaaacctcccaaacatactgaaaaacaataaygtacacatccaggaagctccacaaactccaacaaggataaaagcaaagagagttacaaa

SEQ ID NO: 371361 - DNA, 621 bp, Homo sapiens
gtgtttctggagcccagggctgttttcatttctcagccgcagcaaacaggtcagaagctctgctattcgctggtgtcagcagagctggcagcggcagccagtggttggtcacaaaagagatttttctgcaaaacccggggtgtcatcccaaaaccccattctaatttctaagctgtgggtttgaaaatttacataacgaaggccacctgaaaggccgtctgtaaggcyaccacaagaagtacggaaagctcctggagccatgacagcatctacagcaaaaaccaaaaaggccaaaaatcagaaatatttatccttcttatttctttaatttggaaacaacaatctaaacctaaaaccaaatttagtatttaaagaaatcatcttaattagcagtaactttaatctactttttaccaccattaacactaataagctccaaaaacaaacaaacaaacaacagcaacagcaacacctcaatactggaaatgttacgggaagcccacataagcccatgtgtctcatgtgtgcgtttataaacccagccacgtcttccgtcttccatctcggctgcctgtgaggtggcccctacaccgcacctcactctaattagggttgccagtt

SEQ ID NO: 371362 - DNA, 582 bp, Homo sapiens
acagctgaatccaacctgccattgcagactgcagacagccctggccctccatgtcccctcacccctgcatgaaagcacatatgcacacacatgtgaacacacacagacacatgyacacacaaaaagacacgtacatgcatgaacatgcacacacatgcgtgcacatacaacatgaacacacaaacatatgcagacacatgcacacatgaacacacatgtcagtccggccctctctcacccactctctcactctcacccacctccccccttctgctacaggacaatacagcaaggccctcaccagacacagcctcctggcctcagactgcagcctccagcctgtgagggtctcaggtattgtgttatagccacacaaatggaccaagacagagcccactctgtcctttttgcctcctgaataaaaggataaggatacccactgaaggcccccactcagcagctcctccttgctgggccttgctctaaggtcccctacacaagccccactaaccccgcaatgcgctgtccccctcatggtggtgagcccaagtcccctctgctgtgcagtcctcctacagggtc

SEQ ID NO: 371363 - DNA, 580 bp, Homo sapiens
aaggccagcactaaacttcaccgggcttacagtcctgccctaacagtcaccacacaacaggaccccacaacattgtccctccccatccaccccacccaacgtccaagcccagggctccgagaggatctggccccaacatctgctaacctgctgtcggtactgccctctcgcctccaaaaacgtgagccggaggacagagatggcctcactgtcttctacccacatcacctaggaagggccagtatctctgggattgactgaattaacgtcacctccttcaagacataatcagcagtggctgtgagggacgtagctggtgttgctcccaagtggagaccctaaaatggactagaaactgaaaaccagagacatctttccatgaagctccctccaaacrtgcacttctcatgtttataggctcctatctacagccatcaatacgcaatggatgctgtcatgtgacattcatcagtaactacggaattcaaagcaatgttaacagcatcattgatttaacttaagaacattaagctggatccctctcttcagaagataatttctgtttgagctgaccctgaaa

SEQ ID NO: 371364 - DNA, 560 bp, Homo sapiens
atgcgtggtcacagcctgatgtgtgtcccctsctgggactctgtggggagcagctctggaagcttccacctggtttccctggacctctctcctccaccttctcgctctgctgaccatgctccgcgtgctttctctgtaacaaatcatggccatcctgctgggcatgagctccaggagtcctcccagtgaatcgctgagtgggggtgctcctggggaccccaatgctagttatagacatggggtggaagggagttattaaaactgctacccaggtttcaaagacatttccattttaaaggcatttcttagtaaagggaaagatttcagtagtgaggaaatggaagaaaatattccagacaccacagagagcacagccacatggcagagccttctgtgtcctgcagaggaaagagaggcgggtggtggcgagcacggcccagcagctcacaccccatgcaggctggtctttctgaccatcttccctggtgcagtttcctccagggacttgctgcttctcggccggacggatcccgggcacaccggggccccatcctgtactg

SEQ ID NO: 371365 - DNA, 577 bp, Homo sapiens
tcaaaaaaaaaaccacataaaatcaaattatggtgaggctttgttccttttgtgtggtcctatcctgtccatggtgtttgcattgtcaaggaggcttcctattttgtggcttcctggttaatctctgtgatggcatcattttggttttttcttttccactttccatcctgaattctgtcagcttgggccctactttcctccatctcactcgctcctctgagtcttcctcctatgcttaaattctgctttagagatcagcagtttctttttgagtatggaaatttatttttttgaactcttgagctggtcactgaatcattcaattcttcctcagacatttgcttatgtctttttttttacatttttgttagtattttcttttttaatttttaaaaacttttaatggacacataactgtgtttatttctggagtgcaatgtaatgtttcaatagatgtttacatcgtgtaatgtttaaaytgggtaattagcatacgcatcaaacatttaccatttctttgtggtgggaacacacaagatcctctcttctcatagtatattgtacagtaggataacta

SEQ ID NO: 371366 - DNA, 569 bp, Homo sapiens
acacttccaaacaagcctcaaagccactgctcagggctcaaagtgaacacgacaatctctgctgccgtggtagcctcttcttgcccttctctttgtctttctcatgcccacctgttccttgtctggggcaytcacccttcctctgggttaagggactttggggcattccaaacatacctcaagaggcatgaggctggtggctgtacagtctcatcaccaccatctgctgcttgctcgagtccaagcatctgtgtcccacagttcctgtttcttgttcaaacttgcccaggtttatgccttaaatcaaaaccttcaagaaggcaacagctggctctttaagtctgtaaacactcttagtcaatgattttaaacgttctgttcatcaatgccaaatcaataccaaatcaatgaagtgagacctcatatctgagtcagacacaaaaaatggaaatgaaacatctgtccttccctctgaatatctgcaataccaatggagagagaaaggtcaagacagcatttcaggatgttacaatgttttaggtcctacaaagtgctttcacatgcctgaa

SEQ ID NO: 371367 - DNA, 628 bp, Homo sapiens
atgccaaatcaataccaaatcaatgaagtgagacctcatatctgagtcagacacaaaaaatggaaatgaaacatctgtccttccctctgaatatctgcaataccaatggagagagaaaggtcaagacagcatttcaggatgttacaatgttttaggtcctacaaagtgctttcacatgcctgaatggatctgtgtctgacaatgaccttgaggggtactgtcttcattttacatatgacagaagtgaggctcagactsgtcaattttgaaagattagagaatgctgcaaaataaaatggccaaggtcaacactggaactaagcaattggagctacatcttttttctctgctacagaatgaaagatcttaattaaaattgtttcaccctgttgttcctgaactgacctcccacttataccacaatgatgtggtgatagtacacaaagatgtgagctcagtttccagaatccagtatgaagagacacatttactgaagatgtcctatgtgtatgctgtgcctgatgtcattgtcagaattttcttagtcatcaccatcactcagtgacatcgttgccatgttatgcacaaggaaagtgagtgtgagccaacaggttaatattacaaactc

SEQ ID NO: 371368 - DNA, 628 bp, Homo sapiens
atgccaaatcaataccaaatcaatgaagtgagacctcatatctgagtcagacacaaaaaatggaaatgaaacatctgtccttccctctgaatatctgcaataccaatggagagagaaaggtcaagacagcatttcaggatgttacaatgttttaggtcctacaaagtgctttcacatgcctgaatggatctgtgtctgacaatgaccttgaggggtactgtcttcattttacatatgacagaagtgaggctcagactcgtcaattttgaaagattagagaatgctgcaaaataaaatggccaaggtcaacactggaactaagcaattggagctacatcttttttctctgctacagaatgaaagatcttaattaaaattgtttcaccctgttgttcctgaactgacctcccacttataccacaatgatgtggtgatagtacacaaagatgtgagctcagtttccagaatccagtaygaagagacacatttactgaagatgtcctatgtgtatgctgtgcctgatgtcattgtcagaattttcttagtcatcaccatcactcagtgacatcgttgccatgttatgcacaaggaaagtgagtgtgagccaacaggttaatattacaaactc

SEQ ID NO: 371369 - DNA, 623 bp, Homo sapiens
cagtatgaagagacacatttactgaagatgtcctatgtgtatgctrtgcctgatgtcattgtcagaattttcttagtcatcaccatcactcagtgacatcgttgccatgttatgcacaaggaaagtgagtgtgagccaacaggttaatattacaaactcaatcacattggagcacagctgagaacatgggatagaagtttgggatgttagtacaagggcatggtaatcaaggcagtgtggtaatagcaggaccaacaatggaacagaataaagggcccagaaatagaccctcacttacatgaccatttgatttttgacaaaggcaccactataattcgtcatggataggatggtcttttcaacaaatgatgctgaaaaatttgggtatccacatagaaaaaagaaacttgaatccctacctcacactatacacaaaaattagagatgaatcacaatgctcaatgtaaaagctaaactataaagctttaataaagaaaacagaatatcttcatgccttagcataggcaaaagtttcttaggacacagaaacaacaaccacaaataaaaaaataataaatcagacttcgtaaaaattttaaaattttacttccccaaaaaactag

SEQ ID NO: 371370 - DNA, 623 bp, Homo sapiens
cagtatgaagagacacatttactgaagatgtcctatgtgtatgctgtgcctgatgtcattgtcagaattttcttagtcatcaccatcactcagtgacatcgttgccatgttatgcacaaggaaagtgagtgtgagccaacaggttaatattacaaactcaatcacattggagcacagctgagaacatgggatagaagtttgggatgttagtacaagggcatggtaatcaaggcagtgtggtaatagcaggaccaacaatggaacagaataaagggcccagaaatagaccctcacttacatgaccatttgatttttgacaaaggcaccactataattcgtcatggataggatggtcttttcaacaaatgatgctgaaaaatttgggtatccacatagaaaaaagaaacttsaatccctacctcacactatacacaaaaattagagatgaatcacaatgctcaatgtaaaagctaaactataaagctttaataaagaaaacagaatatcttcatgccttagcataggcaaaagtttcttaggacacagaaacaacaaccacaaataaaaaaataataaatcagacttcgtaaaaattttaaaattttacttccccaaaaaactag

SEQ ID NO: 371371 - DNA, 582 bp, Homo sapiens
ttgtaaacttctctgtgacccgataccattcctaggcattaacccaagagaaactaaagaatccgttcacagaaagccttgtacaagaacgttcacagtagccttattccaacaagctccaaactgggaagagcccaggattctagccacaggaaagtagccaagcaacccctggcacggtgaggcaatggaatgcagacagtgacgaaaaggagcaggacactgataaagcagcggcacagatggatcacaggggcrttccgccgagcaatgactgcccattgtggatccctttcatgtgaagttctagaataggcaaaattaatctgtgatggagaaatcagacaggttgcctggcggaagggctggggcagggcatgagggagatttctggtatgatgtgaatgtgagtgttctgtatcttgatatggacttggattacacaggtgtatggatttgtcacggctcatctcatttgtgcatttcattttacctcaaaagaaaaagaaaaagttgggctggtaggttgagaacctgggccagtgttgcagggagcccttacctccaagcttgacccagagg

SEQ ID NO: 371372 - DNA, 629 bp, Homo sapiens
tttattccctttcaaaattatatattccactttgttctccaaactgccctattgtttggacctaaatatagatatttcacatacgcacacacacatatacacacatacacatacatacaaacacacatacacatatatacccacatacaaatacataggtatatacatgtacacacatatatatacatacacacatacatatatctgtatacacatacacatgtatgcatacacacatacacatatgtaaacatacacacacagacacacacacatgggttgagtatcccttatccaaaatggcaaaatgcttgggacaagaggtgtctgggatttgggaatatttgcagyatacttactagatgaggatccctaatctgaaaatctgaaatccaaaatacccccaatgagcatttcctttgagtatcatgtcagcattcaaaaagttttggattttggaacatttcagatttcagatctttggattaggggtgctcaacctgtatatacacaagttgaggagactaactcaatatttaaagcatatcccctgtgataacaccaccgagaaaccaaaactttttttccgaaacacagcactgtttcataattcgcctctgattcaagac

SEQ ID NO: 371373 - DNA, 618 bp, Homo sapiens
gacttttggatcaaagtgagtctatgtgggaatccttactctgccactgggcactctgggctttagtaaagtggaactaaaccactgtccctgtggaattgttgcctgtaggagagttaactcacccttaaagcagtaagcacgatcaatgtaattgtgggcactcagcaagtaacatttattttccttagtgagatagataggggatttaggcccatgggaagaatctttttaactccattcaaataaatttgaaaaccaagttaagatggataaatctctaggaaaatatgacctaacaaaattaaaccatatagagatagaaagactgggcagagcaatttccacaggaaaaaattagaggaaggtgtaaaagagctccctgaaaaagaaggaccaggaagattgatttgtgggtcaaatctaccaaccttcagatatcraatggccctggtgctacttaggttaatccagagcattgaaaataaagtgaaactttcaattttgttttatgtatataatattaactataaagcctgacaacgattacacataaaagtaaaaaccatagctcaatctagtttattaatattaatttaagaattttacagaaaacca

SEQ ID NO: 371374 - DNA, 607 bp, Homo sapiens
gttagaaattcatcaatgagtgctaaagctagtagataaccactagataaaagtttaatgagcaaaatcctattaattacaaagggaaataattttacaggggagaaacttccactaccttaaccaagtgaccaaaattaacataaccagtaatgggacaaatcaacaccatacgcctttttgatgcaatgcactgagggacataacatcacttccgtggcactgctggcaaaaatccataacaggactttaagaaacctcrgaaaaatcaaattggcagacatcctacaaattaacttgtccatgctcttggaaaacaccaaatcaagaaagagaaaggcttaggatctgctccagattaaaagagactaagaagacatgacaattaagtgcaacctaagatcctggattgaaccctggaccaggaaaataatggctataaaagacattattgagagaattgataaaattgaatatggagtgtagattagatactagaattgtatgtgttaaattttctgattttaataattgcactatagttatgaaagagagtgtcctttttataaaagaaaatatgcactgaaattttctgtggtaaaggggc

SEQ ID NO: 371375 - DNA, 645 bp, Homo sapiens
cactggggcagcgtggaaggagagagggacccgagtagcaagaagctagaggaggacttcagatgcctagtacgctgacactgcagaaagtgactgttaagaggaggcgtgcagctgcctgcggtaggaatgctgcacgtgagtgaccccaccgtggaaatctccaaagaggctcccaggagagcagctgagcctcctccggtggccggaccccaagcccgagacaggacatgaagcagtcccttcagtccaaaatgctccttcccccacctccacaccactaccccagagcagttagcagaagacagatgccaggcacagcaccttccccaggaaggaccctttggaattctctcaactaaatgcattttaaaggggccagaaagagatttaaaacaataagtaaataagttgcattttgattacatccccaaagtcctgctctttcagttttcctttgagcagttaacwactgaccctctgcaccgccctaagcagaggtagctgatcactcaggagggtcactcttgtgtgaggggaagcctcccactagcccagaagtgctctgggccatagttgagctttcatattgctgcaccatgtagacgctcaagtgagacagaaacacaaaaacacaataaccgc

SEQ ID NO: 371376 - DNA, 505 bp, Homo sapiens
aacgtgagccatttccaggcctggccccagtctcccactgcatccccacttctcccttatctcttatttgccagctcagctcattagagaggattcagcagrgagtcagtgactccaggggatagtagagctgctggatgggagaaatgtgggtccctacatgatggtgtggtctctatcaggctggcacatggcaagaaataaagctgccttgtgttaaagtgctgagatttgtgggtatgttcattttagcatttagccagccctaactaataaataaagcctttttaagagctaaaaagtgaaggtccatccaatatggtttgggctgtgtccccacccaaaatgtcatcctgaattgtaatccccataatccccatgtgtcaagggtgggatcaggtggaggtaattggatcatgggggtggtttcccccatgctgttctcatgataatgagtgagttctcatgagatctgatggtttttataagtgcctggcatttcccc

SEQ ID NO: 371377 - DNA, 505 bp, Homo sapiens
aacgtgagccatttccaggcctggccccagtctcccactgcatccccacttctcccttatctcttatttgccagctcagctcattagagaggattcagcagagagtcagtgactccaggggatagtagagctgctggatgggagaaatgtgggtccctacatgatggtgtggtctctatcaggctggcacatggcaagaaataaagctgccttgtgttaaagtgctgagatttgtgggkatgttcattttagcatttagccagccctaactaataaataaagcctttttaagagctaaaaagtgaaggtccatccaatatggtttgggctgtgtccccacccaaaatgtcatcctgaattgtaatccccataatccccatgtgtcaagggtgggatcaggtggaggtaattggatcatgggggtggtttcccccatgctgttctcatgataatgagtgagttctcatgagatctgatggtttttataagtgcctggcatttcccc

SEQ ID NO: 371378 - DNA, 505 bp, Homo sapiens
aacgtgagccatttccaggcctggccccagtctcccactgcatccccacttctcccttatctcttatttgccagctcagctcattagagaggattcagcagagagtcagtgactccaggggatagtagagctgctggatgggagaaatgtgggtccctacatgatggtgtggtctctatcaggctggcacatggcaagaaataaagctgccttgtgttaaagtgctgagatttgtgggtatgttcattttagcatttagccagccctaactaataaataaagcctttttaagagctaaaaagtgaaggtccatccaatatggtttgggctgtgtccccacccaaaatgtcatcctgaattgtaatccccataatccccatgtgtcaagggtgggatcaggtggaggtaattggatcatgggrgtggtttcccccatgctgttctcatgataatgagtgagttctcatgagatctgatggtttttataagtgcctggcatttcccc

SEQ ID NO: 371379 - DNA, 506 bp, Homo sapiens
tgccctgtgtcccagctgtggctaaaacgggccaatgtacagctcaggttgttgcttcagagggtgcaagccccaagccttggcagctttcatggtggtggttggcctgcagctgcacagaagtcaagaattgaggttaacctctgcctagatttcagaggatctatggaaatgcttggatgtccaggcaaaagtttgctgcaggggcaaagccctcatgaagaacctctgctagggcagtgcagaggggaaatgtggggtcacagcccccacacaagagtccccactgaggcactgcttagtggagctgtgagaagagagccactattctccagatcccagaatcgtasatccaccaacagcttgtactgtgcacctagaaaagtcgcagacactcaacacaagcctgtgaaagcagccaggagcgggtctataccctgcaataccacagggatggagctgcccaaggctgtaggagctcacctgttccatcagcatgacctgga

SEQ ID NO: 371380 - DNA, 496 bp, Homo sapiens
agactaggtgtgcctgtatgtttaggtgtccatgtgtgagcatgtgcatgcatgtgctgtgtgtgtgcatgtccatgtgagtgtgcatgtgtttaatagtgtgtatgtgtatttgtgacttctgtgtgcatgtttatgttgagtgtgtgtgaatatatgtgcatgtttgcatgcgcatgtgtgtatgaatgtatgtgcacattcgcataactgtgtgtgactgtgcgtgttaaaaagggacacagggaagggtgtctaagggacatttggttagaaattccagtgggctggttgcttatacttggaagtttccagaccacttagagtaagtggaatcaagatagtcaayggcagtggctctttccattaagaaaaaataatttagatttcacaaatacaggagaatttcagcttttgggctttcttatcggcccatattagtggactacttacacatgtcagcgactggtaaaattcagtgttttattttagtgtc

SEQ ID NO: 371381 - DNA, 470 bp, Homo sapiens
tcagagcaaccacgtgagaagagtcagagagagcctgagcaagacagaagtcgcagtgtttgtatcctggtcttggaagtgacatctgtcacttctgctgtattttgtttattaacagcaagtcaccatgtccagcccacacccaagggcaggggacaacacaaagatgcgatgtcaggaggcaggaatgsttgggagctgtgtcagaagctgcctcccacacatggccttgcagtatctacaccggagctcaagtgcattgtgcaggccaaaaagcagcaccttcacccggtgctacgtgatcactcacaacttgtcaatcaccatattttagctgattgttatggaaacgttgattccaaacttgaaaaagggaaaaatgatgatttctggaatctgtgatattctgctagaatgcaaataagtctgattgatcccattctgaagctcttgagcagtgtgacaaatat

SEQ ID NO: 371382 - DNA, 402 bp, Homo sapiens
caacacaaagatgcgatgtcaggaggcaggaatgcttgggagctgtgtcagaagctgcctcccacacatggccttgcagtatctacaccggagctcaagtgcattgtgcaggccaaaaagcagcaccttcacccggtgctacgtgatcactcacaacttgtcaatcaccatattttagctgattgttatggaaacgttgattccaaacttgaaaaagggaaaaatgatgatttctggaatctgtgatattctgctagaatgcaaataagtctgaytgatcccattctgaagctcttgagcagtgtgacaaatatttatctaatcattcacaattggttaaaataaagaggtttacagccctgtgagattagcctgcagaattgatagcttatgacttttact

SEQ ID NO: 371383 - DNA, 402 bp, Homo sapiens
caacacaaagatgcgatgtcaggaggcaggaatgcttgggagctgtgtcagaagctgcctcccacacatggccttgcagtatctacaccggagctcaagtgcattgtgcaggccaaaaagcagcaccttcacccggtgctacgtgatcactcacaacttgtcaatcaccatattttagctgattgttatggaaacgttgattccaaacttgaaaaagggaaaaatgatgatttctggaatctgtgatattctgctagaatgcaaataagtctgattgatcccattctgaagctcttgagcagtgtgacaaatatttatctaatcattcacaattggttaaaataaagaggtttayagccctgtgagattagcctgcagaattgatagcttatgacttttact

SEQ ID NO: 371384 - DNA, 593 bp, Homo sapiens
agatggacatagggaattcagcaaagtgctgaatagacactgggttcctggccttctcttgactggctgacccaccttcacacacttatggggcacaatgtctgtgtggatcgcaagcccccaggggatttaagaactgccctgagggtgtgtcttcaagccttttgtgaatttatacttatgccatctcacgggggactgtgtctctttccatggctcagcaccagggctttgaagagtaagacccaaaaccaagttctgggtgtgagggtttcctggctggtgatgctgttgaayccacactggggaacacatactgccaggctgctgctatgcagaagggaacaggaagagggagaggcctggcccagggctgtggagaaggaggggtccttttcccctgagtgtggccaagcacctgcaagcctcctgggagtgggcctctctgcaggggctttgccttggcttccagccacctccatttggttctccagcacacaggccatgagcgtggagctcactcaagactagagagctcaggtttccaagtggacagacattctgcaggatgtgctttgggaaactgaaaaaaa

SEQ ID NO: 371385 - DNA, 291 bp, Homo sapiens
ttattacttgtaacacaactgtgttttggtgtttgctaactgatcaygaataatttgcatatctctcattggtcctttattaagttttaattttactagaaggcttgagtagtactttcaaaatgattttgtaggcaataaattttctgacttctaatgcaaaagaacagaatcaatagccaagacaatcttgaaaaagaagaataaagttggaagtctcacacatcttgatttcaaaacatactatgaatctatggtaatcaaagcatgtggtgtgggcataaagacaga

SEQ ID NO: 371386 - DNA, 291 bp, Homo sapiens
ttattacttgtaacacaactgtgttttggtgtttgctaactgatcacgaataatttgcatatctctcattggtcctttattaakttttaattttactagaaggcttgagtagtactttcaaaatgattttgtaggcaataaattttctgacttctaatgcaaaagaacagaatcaatagccaagacaatcttgaaaaagaagaataaagttggaagtctcacacatcttgatttcaaaacatactatgaatctatggtaatcaaagcatgtggtgtgggcataaagacaga

SEQ ID NO: 371387 - DNA, 495 bp, Homo sapiens
gcttacctaagaacagcctttgacccaggggtcctgtctcccatgctggacttggtcccctgcccacctctggggtgttcactccacggacgtgcagtcccctggctgaaagaatgaaggatgcccatccccaccactaacaaccctcacacacttgcactgggacagacacttttcctggctttatctcttggtggatggctttatctcttagtcttcctaaaagcttcaagagaagagtgagtttctaggaaatgggctttaattcacacagtgatcactcggtctgtctctcaggaaggtgcaggagagatgctcaggccaggtgttcatctctgcctcaggcctgctrgtaagtggttttgtttatggttccctaatggaataaaaacttacagcatgtccaggaaaaattttcaggaaatttaaattcaggagaagtctgtaacaacttctggaaataaagaggagagtctcttttttttgtactctaag

SEQ ID NO: 371388 - DNA, 604 bp, Homo sapiens
gaaaaactcggtgaaaggtaaatgggaactctaaactttttacaattttttcctaacttaaaaaattattatttaaagttattataatttaaaaawatatttaaaataaaaagtttaaaaagatgacacaaatgatcaatatctggaatgaaaaaggaatattggccctggaggcatcaaaaggataatatggtaatattatgaacaattctacatatataaatttagcaacttagatgaaatggaccaattccttgagaagcccaaactaccttaattaatctaatatgaaaccggtcatttggatagtcctacaactatggaaaattaaattcagaatttaaaagcctcctccaaagaaatgtccaggcctagatggtttcactggagaattctaccaaacatttaaatatgaattaacacctattctactgtctcttccagaaaatagaagaaatgaaaacactttccgacacttctacgaagccacaattactctcataccaaaaccagacaaacccaatgtaaacaaataaaactatagaccaatatccctcatgaatatagatgcaaaaatctttaacaaaatattactgatgggatt

SEQ ID NO: 371389 - DNA, 604 bp, Homo sapiens
gaaaaactcggtgaaaggtaaatgggaactctaaactttttacaattttttcctaacttaaaaaattattatttaaagttattataatttaaaaatatatttaaaataaaaagyttaaaaagatgacacaaatgatcaatatctggaatgaaaaaggaatattggccctggaggcatcaaaaggataatatggtaatattatgaacaattctacatatataaatttagcaacttagatgaaatggaccaattccttgagaagcccaaactaccttaattaatctaatatgaaaccggtcatttggatagtcctacaactatggaaaattaaattcagaatttaaaagcctcctccaaagaaatgtccaggcctagatggtttcactggagaattctaccaaacatttaaatatgaattaacacctattctactgtctcttccagaaaatagaagaaatgaaaacactttccgacacttctacgaagccacaattactctcataccaaaaccagacaaacccaatgtaaacaaataaaactatagaccaatatccctcatgaatatagatgcaaaaatctttaacaaaatattactgatgggatt

SEQ ID NO: 371390 - DNA, 604 bp, Homo sapiens
gaaaaactcggtgaaaggtaaatgggaactctaaactttttacaattttttcctaacttaaaaaattattatttaaagttattataatttaaaaatatatttaaaataaaaagtttaaaaagatgacacaaatgatcaatatctggaatgaaaaaggaatattggccctggaggcatcaaaaggataatawggtaatattatgaacaattctacatatataaatttagcaacttagatgaaatggaccaattccttgagaagcccaaactaccttaattaatctaatatgaaaccggtcatttggatagtcctacaactatggaaaattaaattcagaatttaaaagcctcctccaaagaaatgtccaggcctagatggtttcactggagaattctaccaaacatttaaatatgaattaacacctattctactgtctcttccagaaaatagaagaaatgaaaacactttccgacacttctacgaagccacaattactctcataccaaaaccagacaaacccaatgtaaacaaataaaactatagaccaatatccctcatgaatatagatgcaaaaatctttaacaaaatattactgatgggatt

SEQ ID NO: 371391 - DNA, 604 bp, Homo sapiens
gaaaaactcggtgaaaggtaaatgggaactctaaactttttacaattttttcctaacttaaaaaattattatttaaagttattataatttaaaaatatatttaaaataaaaagtttaaaaagatgacacaaatgatcaatatctggaatgaaaaaggaatattggccctggaggcatcaaaaggataatatggtaatattatgaacaattctacatatataaatttagcaacttagatgaaatggaccaattccttgagaagcccaaactaccttaattaatctaatatgaaaccggtcatttggatagtcctacaactatggaaaattaaattcagaatttaaaagcctcctccaaagaaatgtccaggcctagatggtttcactggagaattctaccaaacatttaaatatgaattaacacctattctactgtctcttccagaaaayagaagaaatgaaaacactttccgacacttctacgaagccacaattactctcataccaaaaccagacaaacccaatgtaaacaaataaaactatagaccaatatccctcatgaatatagatgcaaaaatctttaacaaaatattactgatgggatt

SEQ ID NO: 371392 - DNA, 551 bp, Homo sapiens
ttctacatattgactacatcaacattaatgtcctggttgtgatattggaccatagttttgcacaatgctaccattgggagaaaacaggtaaaggggacactggaactctattatttcttacaactgcagatcaatatacaatcatctcaaaataaaatgtttaattaaaaacatactttgcccactcctggagaccctttacagctcttccttaaatactgatttttccttaagtactgcctgtatcagggcactactgtcactgaacattttgaggcactttttttttttatcttaccaagtctctgcctagctttattgggctttcacatcttgacctgtgccgacctatttctcaaatatacctatttgagttacgtaagttctgaatttttgttacagtcactcayagcagtttaatctggacaaatcatggactctgccaatttctgtttcctcatccacttccttgctgttcacagagctactttaattaaagatatctctttaattaaaggtacggtgaaaattcagacatataatgtccccag

SEQ ID NO: 371393 - DNA, 457 bp, Homo sapiens
ttatatgaaatgatgctaataacttattaaacattgtttctccttggattctatgtatgagcaccaggtctagtttaccatgtagtgcacacttgtcttatcctgagagttgctaccacggtatgccatgtgtcttgcatgtcaagattctattcagatctattcaagatattatggaatgtgttttctacttttgaaatataatttcaaagaactgtggcttgtgtttaaaaatggtaagttctaattaaatgacagcacawgtataaactggaacatagatactgaaattacatttttgaagttttatatttcttggggaaacacttaggaagtgaaaaaaatcaagagaaaaccatatatattaaaaaacctcaagaatgtaaaactgcatatgtaaaagactaaaggaaaagatgctaaactgttttcatatagccatatctgccactctatt

SEQ ID NO: 371394 - DNA, 414 bp, Homo sapiens
ggaatgccacagcatacaaggtaatgcaaaagacctgcaggacagagagggagagaraacacaggccactcccaggtcgtgcccaggaagagctgtgtgcgctcctgcagagggctgaacaggccagacctcctagctacgcctgctagagcaaggatgctatggcctaggaccacaggatgaatccccaagactcagggctggaaaagcaggactggcagactcagaagcagagagctgagggacccaggggcatgagcactcacaggaaagggcaggaactccatgagatgcagacgtccacaaaggtgccagcggggcaccacaggtgtggacaaacccagcagcattctctggacaccagcctgcacacacgtggggcacctgggaacctgcatagggacagctatgaga

SEQ ID NO: 371395 - DNA, 569 bp, Homo sapiens
atttgcacaacagatgatgtggccarggaaccaggaggagatggggtcctgaagaaccgggcattcaccaaagaggatttacagccgcagagcatgggatgacactgatggaaaggctgagggcgggaagagacagaacacagagcacaggaggacacatcagttagaggaaaataaagctccatttgctttgcatatctgtgtgtggtggttctatatgcaggcctgctgcccatgaaagaggactgtgcagctgccttaaaaaatgtttttgtatgtgtgtatatgcaaatatatgtgtatatatatatacacacacatacattatacacacacacaagtgtgtgtgtatctgggaatgcttccatagtttattgttaactaaagaaaacaagttgcagaggaatatatggtctaagtccttttgttaagacaaaacaaacaaaacaaaataaaaccctataaatagtcatgtttgtgtaagtacagaaaaagttatggaagtataaactgcatcctgggagatagaacagaagtgggaaaagaatacgacaaatagagtcactggt

SEQ ID NO: 371396 - DNA, 569 bp, Homo sapiens
atttgcacaacagatgatgtggccagggaaccaggaggagatggggtcctgaagaaccgggcattcaccaaagaggatttacagccgcagagcatgggatgacactgatggaaaggctgagggcgggaagagacagaacacagagcacaggaggacacatcagttagaggaaaataaagctccatttgctttgcatatctgtgtgtggtggttctatatgcaggcctgctgcccatgaaagaggactgtgcagctgccttaaaaaatgtttttgtatgtgtgtatatgcaaatatatgtgtatatatatatacacacacatayattatacacacacacaagtgtgtgtgtatctgggaatgcttccatagtttattgttaactaaagaaaacaagttgcagaggaatatatggtctaagtccttttgttaagacaaaacaaacaaaacaaaataaaaccctataaatagtcatgtttgtgtaagtacagaaaaagttatggaagtataaactgcatcctgggagatagaacagaagtgggaaaagaatacgacaaatagagtcactggt

SEQ ID NO: 371397 - DNA, 569 bp, Homo sapiens
atttgcacaacagatgatgtggccagggaaccaggaggagatggggtcctgaagaaccgggcattcaccaaagaggatttacagccgcagagcatgggatgacactgatggaaaggctgagggcgggaagagacagaacacagagcacaggaggacacatcagttagaggaaaataaagctccatttgctttgcatatctgtgtgtggtggttctatatgcaggcctgctgcccatgaaagaggactgtgcagctgccttaaaaaatgtttttgtatgtgtgtatatgcaaatatatgtgtatatatatatacacacacatacattatacacacacayaagtgtgtgtgtatctgggaatgcttccatagtttattgttaactaaagaaaacaagttgcagaggaatatatggtctaagtccttttgttaagacaaaacaaacaaaacaaaataaaaccctataaatagtcatgtttgtgtaagtacagaaaaagttatggaagtataaactgcatcctgggagatagaacagaagtgggaaaagaatacgacaaatagagtcactggt

SEQ ID NO: 371398 - DNA, 600 bp, Homo sapiens
aacacttacacacaagggttgctagttaatacaattaatacttttcactgcttcatcaaagatattcttaaactgttttcggtttctgtttgggttttgttctttggcttttgtaagtttgagtgtttgatggtgaagaatatgaagactactggcacagtggttgctattgccttaatttgtgcggcttcttccattgcttcgataccatgaatgtcaacacagcgaaaagcaaatctctccttagaatgatcattgaatgatcatgaaaatagtcttgaccttttggaacctctgctttgggattcctrcatgacattaaaaggtaagcccctagacgggggagagattgtcccctccacactccttcagcagcaagtattggtgttaagctctgattttccatttcttctggtttctaacagctgagaaattctttcctttgttgccagtcttctttaagcattcttttcccttgatctccagaatgccactgctttttggtttcttcccggctcagtggctgttcccttcccttctccttgctggtttatggtatttccttttctatctgacctttaaatgcaggacttcacaaag

SEQ ID NO: 371399 - DNA, 589 bp, Homo sapiens
gattccatagccagtaacgtgtccctcaaaaggtggaggttcctctacacagttcaccttactaagcagaaaacatcaattacaaaagcaaaaccaacactcccaaccttccgtaaaggaaaagacctgatgccacataggtrgatgggtcccacaggaggccacgagaggcaatgccctgccaggaacagtgcaaatcctttcttcctgtcactcagggccctgcttactgcctcggggaccattcccaggacttggtgtccccatctgtgagctggagacatggctaccactggcagagctcccataagaattcatgtgggatacaaggaagaccctgctacccccagcaaacagagagcctcctgtatgagctcttctctccttcacagtcgataggaggcaccctccatggtgggctcctgagagagccccgaaataggctgccttcttgccattcaaaccccttctggttcccatgttacagctggtttaaaataataattaaaaagcaggattcttcagcatgccagccatccctcctccccaggcactgggcatcctctcacctgcgctaggcgacataaac

SEQ ID NO: 371400 - DNA, 589 bp, Homo sapiens
gattccatagccagtaacgtgtccctcaaaaggtggaggttcctctacacagttcaccttactaagcagaaaacatcaattacaaaagcaaaaccaacactcccaaccttccgtaaaggaaaagacctgatgccacataggtagatgggtcccacaggaggccasgagaggcaatgccctgccaggaacagtgcaaatcctttcttcctgtcactcagggccctgcttactgcctcggggaccattcccaggacttggtgtccccatctgtgagctggagacatggctaccactggcagagctcccataagaattcatgtgggatacaaggaagaccctgctacccccagcaaacagagagcctcctgtatgagctcttctctccttcacagtcgataggaggcaccctccatggtgggctcctgagagagccccgaaataggctgccttcttgccattcaaaccccttctggttcccatgttacagctggtttaaaataataattaaaaagcaggattcttcagcatgccagccatccctcctccccaggcactgggcatcctctcacctgcgctaggcgacataaac

SEQ ID NO: 371401 - DNA, 425 bp, Homo sapiens
gagcaacccctgaaagttgctcatgaactcttgggcttacccttgagctctacatgtatggatccgaccctacacggaccacacagactttgagtgctgaaatgtgggatagattaccaccagagtcccaggctggccactaggtggcgcttgtgcgagacagatccacatctcacagactcacagcaaccacaatccacacaagtcttgcaggaacttggaatttgtggtctgaacccatttggggtgattatcttctaaaataaagttaataatgttcactgtaagattttaacaataaccrgaatctcaaaacatagtatttaaaatgtctaggatacaattcagcatactgaaaccatactcagcatacaaaaagccaacagctactctgagatgaaacagatactggaattatttgacaa

SEQ ID NO: 371402 - DNA, 566 bp, Homo sapiens
aacacaagcggctgcatttgcaagcacccaaggcagtggcagagggcagtgagggagaggatgagcacagcgggtgacacaggtggaaatgatgggctgatgggaggaaatggagcggctcttagacacggttctggtggccggccatgggtaggacagcaggatctaggggtatcatcagtctccagaagaggcctgggctgggggattgatctgcccagtcatcagcaccatgggaatggccgaatgtgcagagagtaattctaaggacaagagcccaagaatacgcatagagagaggggtacaagtaccatacccaaggaactcaatagcccataccttgtctacaaggctgttctgcaggaattccgggggtcagcagggatggctctgactggtcactttgtagcaataatcttcacaggtaaaaccatggagagagacaacaggtgargagaaatataccatggggtgcagctgggggattccatctggatccctcaaagtgatgggaaggaccaggaatagcaaactcactcactgcaaattgtatatccaaaggaaag

SEQ ID NO: 371403 - DNA, 608 bp, Homo sapiens
ttgcgtctcactgcaccactgcactgtgggcagcacccgttcttattgtaccctcagaacagcgcacagcctagcacctgtaggaaggactcgatagaattttcttgaatggaaatagcagtgtacccttcaagaaagggtcactttggagttaggaaaaggatgaaatgctcagagataaagcagaggaatgtgttgaatggccagttgactttataattttcatttatttcttcaacttgttttcactgagtggctgcagcatcccctgaactgtgtactaaggtcccaaggrtagaaaagacaaaacaagcaagttcccagaacttaaattctccagggaacagaatggcatatatgactggctggatggatcaatgaatggacagatgatgtatgtagtgttattacagacaatggtagtgctacaaaagaagtgattggtactgcagtgaaataatggggaatgtagttcagcaaggaagtcagagaaggcttcttagcagtggtgaaattgaagcagacacttgaactaaaaggagggggaagggaagcactgtggaagctcttccaggtgaagtcagtcccagggcacagaggccaaggaa

SEQ ID NO: 371404 - DNA, 619 bp, Homo sapiens
tgtcagaagccggggtccacttgcagagcccacttgtttgttaatgctccctcaacccctgctgcttccaccagtgcagaaggccttgctctggtcaccacctgccccatccctgggaaggctgggtgaagcaaggcagcagtgaccagcatcctcccgcagcctcagtcctctctcaggtctcctcaggggtgggctccagcgagagtgaagctgacccctcccgctgtgcagagtgagcgagtgagtgaatgctcactgttgctctgtgtacagctctgaaaggctgataggaaaaagcaggttgccctagtccagggaacatggtgttctggccaggcggactgcccgcagcagggcctrgccagctggcggcactgggcggatggcagacctcattgtgctctgtatcctccctacagagtgaggatggtgaggcagttgtgagggcaagaggaaggcacctctctactaccctttaaccagcacccggagccccgggagtgcggtggagatcctgctcactcctgcggcttctcactgtctccttttccagccacacatgccaaatgcccataaacgcacactcacatacacatacgcacacacaccccacaga

SEQ ID NO: 371405 - DNA, 541 bp, Homo sapiens
gatcattttgaggctgtaaaccagatcaaacaattgcctttcttaaaatactccagtaccttctccttacactgcgagttcagtactgactccctcttttggcttctctgtgcagctcaagtttgtctttctgttgtgctgttctcaccactgtcctacagactccagccasgcaagcttttctgctcctgcctcgcccaggttgcttctttctaacaccttatatactagctcttccctgtgcttgatacatgtttactattaatatttgccaagtcacctccttcttgtcattttattcctcttgacatcttattaattaacattttattaaggtttttcttggttatcatttttgtagaatgtaagttttctgataccaggattgtatctgccttgttcaccattggatctttattgccagtaatactctgtcacagaataaagcttttgatatgtttaatttatttggtgaaaatatgaacaaaagaatatgtaaattgactaaatcaaaagcaaataaatatatgaaagaagagag

SEQ ID NO: 371406 - DNA, 619 bp, Homo sapiens
gacctagcagagcaactcccagattattaatccacataaactgtgagattacgtgtcatgtgacttaaatttgttctgatctgttgtgcagcaatagaaaactaatacacacagtcatatgcaaattgctattgaaaactgactttttaaactctattttcccaccctgaaattacaacatgctttccattttaattcactgattttgccacatagtgtattttagtaatatgatagtacaagaagcaatagattctcataartagtttcacctatgtaaatgtgtttttaatacctgtatatgtagaagataccttctacattaaacatatactagtcaaagttgggcttttttcaacagccatgcttatttctccctaaaagtggatgcccttatttttgcagcatcatctcttctgcatgcacaactctaaatctagtagtgcgttctgtgcatcaggcacaaaataatctttacttgatgtagtagcagataactctcagttcattggtaattaaattgggtaacatgttttcatctcctctaggatgatctgaacaccacttctttcggtacttatgatgttacacctccattgcccatactgttcatatttct

SEQ ID NO: 371407 - DNA, 289 bp, Homo sapiens
atttaaaatattatatcttttaataaagtacaaaatatcttcaagctaggttgtgaattctcaaatagaaagtcctaacacccctcctattgaagtgcatttaagtatgttaatgtttgtgaaatactgatcagtcttttgtgttctttctccctgtctgggcctgggtttcaaaattgccagtgaaccacattcagggacaaactttgttaaactcagtgtcatgaaataaacsactcatgcatgtatcagcacaactacagatactcccaataactgaaaatttgaa

SEQ ID NO: 371408 - DNA, 591 bp, Homo sapiens
cctttggttctctgccttcttaccataaatatcattcctggaaccatgtaccaggagaaggctcctggtgctcatcaacaggtccagtgacagctgaaaataatttatggagttactaactcctgagtcattttatacatgagaggagaaaagcaaaggctgctacatccaagagtttgctgtgctgttgtaaagcagctgaacgaagccttctatttggtaactgctattttattacattaggtttcaatatagaatttgtaaaataaattataactggtcaatacattaaaatagcttaaaataatctttagtatgtyacgtgtagcctgatttctctggtgtgtgcatgttattcagattaacaaagacaaaagaagagattacagttgagttcttgataagattggagtaaaaggaattggcatttcaattacttacttttctcagaatttgtgttcaattttgcatgattcgccacgtgccagtgctcttccccacttgtgctcacaagtggcctcatggctatttgattttcattagtagcaatacagctataaggatggcaccttcttattagcacaagaaaca

SEQ ID NO: 371409 - DNA, 522 bp, Homo sapiens
gtagctgtagaaccaggcttccattatatatcatttatgcatactgttgcaatttaaaatcctttcaagtttgtttatgtgaaaatctctacagctttaaataattaaatccatctaaattaaatcctcaaacaaaatatttctgttacagtaatggtattcaattaagggaaatgaaattgtatttattatctaaatattatatctgaaaacataaaaagctttagaaaatttgaaaaacatttataattggcactccccaaatgtttgtagatattttctacataatgctgaaaatataatgaaatgaaaataatgaaaaataactttgataataaccayaggaatgcatgttatcctcttttggttttagtatgctacccagctgccagagcggctcaaatataagcaggcagaaacatatgaaaagagagactggcctagcctcccagcctacgtctttctcccatgctcaatgcttcctgccctcgaacatcggactccaagttcttcagttttgga

SEQ ID NO: 371410 - DNA, 622 bp, Homo sapiens
caagaattctggagagaactatagttataattaaacattgattaggctgcacttggactcactttcttataaccataagccacacagcactggatgctgaccatctgcatccccatcattcccatggataggacctctgacatgagaatcataaggcttttgtttaagaattgataaattgttttcagaccctgaattccagtgaaacagctgacaccaactagtttgaagacccccacagtaatagttgcattactatcagttacccttgtcccaatcccccaggggcaatgtgatgagagccagaagtcaccctacatgcacagagtaatgggaaaggaagccagccacaattatgactatggccctataggacagtttacagagttgccaactctccccttctaagacagagagagaaacctagtcatcactgayagttcccttgggatataaaccctggctccttggctgggaatattattcctctctgtaatgtaaatgcattttctcaggaaaaaaaaaagccgttgcccattctccttcaagttaagcatttgattctttagcagatgactccaggtctcataccctttaaatcacaaggctttcccttaaccca

SEQ ID NO: 371411 - DNA, 496 bp, Homo sapiens
gaataatatcaaaaataaaatttatttcaataaaatcaaatacaatttatgatccaaataagaatttaacaaagacatagataccttaaaaaagaaccaatctgtaacattagagctgaaaaatctcaattaatgaaataaaaaatacaattgagagattcaacagattaaatgaagcagaagaaaatytgaacttgaaggcagattttttgaaataacccagcacagctggaaaaaaaaaaaaaaaaacagaataaaaaatagcgaagaaaagcctgtgagattctcggaacaccaataagtgaacaaatctttgtattatgtaaattccagagaatcaagagatggagaggggcacagaaagcttatttaacaaaataattgcaaaatatttcctaagacttgggagatatatgcatatctagacccataaagcttaaaaatccccaaataggttcagcccaaagaagtcacaactgaggcacaatataatcac

SEQ ID NO: 371412 - DNA, 496 bp, Homo sapiens
gaataatatcaaaaataaaatttatttcaataaaatcaaatacaatttatgatccaaataagaatttaacaaagacatagataccttaaaaaagaaccaatctgtaacattagagctgaaaaatctcaattaatgaaataaaaaatacaattgagagattcaacagattaaatgaagcagaagaaaatttgaacttgaaggcagatyttttgaaataacccagcacagctggaaaaaaaaaaaaaaaaacagaataaaaaatagcgaagaaaagcctgtgagattctcggaacaccaataagtgaacaaatctttgtattatgtaaattccagagaatcaagagatggagaggggcacagaaagcttatttaacaaaataattgcaaaatatttcctaagacttgggagatatatgcatatctagacccataaagcttaaaaatccccaaataggttcagcccaaagaagtcacaactgaggcacaatataatcac

SEQ ID NO: 371413 - DNA, 400 bp, Homo sapiens
gacaatgcaaaaactattgaaataagtaggattgaaaaaaaaacttagtggataaatcatgctttatatttcaattgaacaaaacgttacaaatatattcccctttattaaaagaaggaatttggaggcactgctaccctcaggcaaaaaaccaatataatgtttgacattttggggatagtgaacaaagaaggtgataaacgtagtgacagcaatacgcattttttctgytatgaacattaatatttatgcctaatttgagaagctgcaacaataataatacaaaatgcatttggggaaattataataaggtaattttaatgctcttgtattatattaaaagggagtagtaataatgattaatttcagccttcaataatttaataatgcatagtaaaat

SEQ ID NO: 371414 - DNA, 505 bp, Homo sapiens
agacccattgatctggtttttccccacgtatttgaaaaatgatgcattttgccaaagtataaaattataagatacagaactaaattctggttacccaaaggctagagatttgatatgctatgaataatcatgttgctgttcactattataaggatttatatcttgcaaagtatcttatcaattacctcatttcttctttacaagtttctaggtgtgcaggaatgctcatcctatcatctttttctraggagtgaaacaagctccttaggccctgaactaatagaaatcacaagctacaatgaaaggaatgtgactagaacccacctgcatgactcttttcattagatcatactcactctttgattaaaaagaatgcacaactaaatatatttgttgaaaacaatttttattgaagaacataccaggaatattactcattattgccaggtacaacagcatatttagcctgtgtttaatgtatatatcatgtgattagaacatggga

SEQ ID NO: 371415 - DNA, 642 bp, Homo sapiens
aaataattgagtttcaattgtgcggtgattttattgtgttgatacaaatctgttctccatttaaccctgaacactgaaccttgattgatatgaagacaaagattttcaacccctcctctatttataaagtattggtgctgcagagttttgttgcattttgaagggaaactctgaaaatttctaaaccattaaacattgtaattttttttctcatcaaaactttaaattctttcctaaatgaagaacactttgagatgattagatgaaagcacgaaaatgggtagtcaacttgacgtgagaagaacgagagaccgtgaggaaaatgagactccagctcatcactttcttagcacacaacgctgcaaatcacccgctcatttctccaagctacagatttgactaagcataagaatttgaatacattcttgaaccaattcggagaactctaatgtgcattcttctattttccataatgcggacgtcgcttctctgacaagcctgtatgtrctctttgagactctagttctggttcgatttgtgaccttaggcaaatcacatttttttctatcatagatttctcatctgtaaaatgataatgccatgttccctcacatcaagacacaaatgactgtttaatagctg

SEQ ID NO: 371416 - DNA, 599 bp, Homo sapiens
gactttcatcacctacaggagctggcaacctatggatttgataagtggkttggcacattggtgtttttgcactaaatattacaatcaattcaccacatgtgtattgttgtgtgccatgtcccaggatttgtgttaaggaataaaggcattaagaagatgaatccattggagtttctgccctcaagagatctgtagtttaatgaggagaggagtttatagatagtcacaaaacaatcaaagtaaggtactgcatacagagctcaaagaataggaaaattatacacaaggtggaaaggaatgctgtgtggggagtggtcaggaaagtctccatagaaaaattgcattaaggatatttcttaaggaatggaaaggttttgtagggcagagttggatcattgagaaactcactgtggtggcaggtatgtcataagcaaagttgaagggctgcaaaaccatgacacagactcagtccaagaaacaatccatctacctattacaagtcacccggggaaaaaggaaaacaggctgataaggcaaaatgacacagcatgcaccctccccctgtgagtgtgtgaatactgaagcctcacactcgtgtg

SEQ ID NO: 371417 - DNA, 599 bp, Homo sapiens
gactttcatcacctacaggagctggcaacctatggatttgataagtgggttggcacattggtgtttttgcactaaatattacaatcaattcaccacatgtgtattgttgtgtgccatgtcccaggatttgtgttaaggaataaaggcattaagaagatgaatccattggagtttctgccctcaagagatctgtagtttaatgaggagaggagtttatagatagtcacaaaacaatcaaagtaaggtactgcatacagagctcaaagaataggaaaattatacacaaggtggaaaggaatgctgtgtggggagtggtcaggaaagtctccatagaaaaattgcattaaggatatttcttaargaatggaaaggttttgtagggcagagttggatcattgagaaactcactgtggtggcaggtatgtcataagcaaagttgaagggctgcaaaaccatgacacagactcagtccaagaaacaatccatctacctattacaagtcacccggggaaaaaggaaaacaggctgataaggcaaaatgacacagcatgcaccctccccctgtgagtgtgtgaatactgaagcctcacactcgtgtg

SEQ ID NO: 371418 - DNA, 591 bp, Homo sapiens
agtttaatgaaattaggtttgtgttttagaattataatataacctgaaccaagcactgttcagaacattttgttaatactttttttagttggttgtgtttcagcattattgggtataactgacaaattaaaattatgcatatttgaggtatatattgtgatgctytgatataagtattcattgggagatgatcactattatcaagctagttaacacatccaacacttcatatgtttgccttgtacatgtgtgtgggggtggggtggggagaatagttaagatccatttttagcagtttgaatacacaatggagtattgttaactataatcaccctgccgtacattagatctccagaacttattcatcttaaaactgaaacttggtatcctttgaccaatgccactcccgggactccccagccctggtaaccaccactctaccctgcttctgagctcaacgtttttagatttcacatatgagtgagatcatgttgtatgtgtctttctgtgcctggcttatttcacttagtgtaacaacattcagattggtccatgctgcaaatagcaggatttccctccacatttttttta

SEQ ID NO: 371419 - DNA, 553 bp, Homo sapiens
gtttcagcattattgggtataactgacaaattaaaattatgcatatttgaggtatatattgtgatgctttgatataagtattcattgggagatgatcactattatcaagctagttaacacatccaacacttcatatgtttgccttgtacatgtgtgtgkgggtggggtggggagaatagttaagatccatttttagcagtttgaatacacaatggagtattgttaactataatcaccctgccgtacattagatctccagaacttattcatcttaaaactgaaacttggtatcctttgaccaatgccactcccgggactccccagccctggtaaccaccactctaccctgcttctgagctcaacgtttttagatttcacatatgagtgagatcatgttgtatgtgtctttctgtgcctggcttatttcacttagtgtaacaacattcagattggtccatgctgcaaatagcaggatttccctccacattttttttaatttacttgtgatagttaattttatgtatcagcttggctgagctaaggaatgtcattg

SEQ ID NO: 371420 - DNA, 553 bp, Homo sapiens
gtttcagcattattgggtataactgacaaattaaaattatgcatatttgaggtatatattgtgatgctttgatataagtattcattgggagatgatcactattatcaagctagttaacacatccaacacttcatatgtttgccttgtacatgtgtgtgggggkggggtggggagaatagttaagatccatttttagcagtttgaatacacaatggagtattgttaactataatcaccctgccgtacattagatctccagaacttattcatcttaaaactgaaacttggtatcctttgaccaatgccactcccgggactccccagccctggtaaccaccactctaccctgcttctgagctcaacgtttttagatttcacatatgagtgagatcatgttgtatgtgtctttctgtgcctggcttatttcacttagtgtaacaacattcagattggtccatgctgcaaatagcaggatttccctccacattttttttaatttacttgtgatagttaattttatgtatcagcttggctgagctaaggaatgtcattg

SEQ ID NO: 371421 - DNA, 415 bp, Homo sapiens
cagtcgttatatttttaattttttgaagaactcttatattgtttttcataatgagagtagtaatttacattcccaagaaaagtctgaaagtgtttccttgtcttcacatcctcaccaatacttgttatcttttgtctttttagtaatagctctttaacaaacaagataagatctcattgtggktttgatttgcatttccctgataattagccatgttaagcattttttcatatatctattgttcatttgtgtgtcttctttgagaaacatctattgaaatttttttgcccatttttaaaaataggattatttgttaagttgtttgagttttgtgtacattttaaatattaatattttgtcagatgtatgatatgcaaatattttcttccattctacaggtgtctcttcactctgt

SEQ ID NO: 371422 - DNA, 588 bp, Homo sapiens
acaagagcacacccggaggggcacagggtgtcttggtaagaggaagaaatagggattattagaggacttggggtcatattagggtatttggggtagggttcaaggaagaatgggtttgctccagactgggcactgtcaatagctgggaaaactatgattgttctctcyatgatttcatttacagagtagagagcgtgaacgggccaaggtgttaaagaagccacagtgtgtagacgagcccaggaaggagggcatggggccatctgcatggcctggccagtgttctcaagctcatctttcctatgctcatcacagagtggccttgcctgatgcggtgtctgtgaaactctctatggtaacaagagagtgcctcggccctcaatgcctgacccactcccagtaaatggcagtcagggctgctttctctgcaatgcattttttacacatgcaatttcacctcttggatggcttcattgccatctgtgtgctgaagagttctaaattaaacccaggttgtctctccagcagcatttttaaactgtacctccctaactcatacgcagttttaagtgtcaaagtggtggacca

SEQ ID NO: 371423 - DNA, 588 bp, Homo sapiens
acaagagcacacccggaggggcacagggtgtcttggtaagaggaagaaatagggattattagaggacttggggtcatattagggtatttggggtagggttcaaggaagaatgggtttgctccagactgggcactgtcaatagctgggaaaactatgattgttctctctatgatttcatttacagagtagagagcgtgaacgggccaaggtgttaaagaagccacagtgtgtagacgagcccrggaaggagggcatggggccatctgcatggcctggccagtgttctcaagctcatctttcctatgctcatcacagagtggccttgcctgatgcggtgtctgtgaaactctctatggtaacaagagagtgcctcggccctcaatgcctgacccactcccagtaaatggcagtcagggctgctttctctgcaatgcattttttacacatgcaatttcacctcttggatggcttcattgccatctgtgtgctgaagagttctaaattaaacccaggttgtctctccagcagcatttttaaactgtacctccctaactcatacgcagttttaagtgtcaaagtggtggacca

SEQ ID NO: 371424 - DNA, 588 bp, Homo sapiens
acaagagcacacccggaggggcacagggtgtcttggtaagaggaagaaatagggattattagaggacttggggtcatattagggtatttggggtagggttcaaggaagaatgggtttgctccagactgggcactgtcaatagctgggaaaactatgattgttctctctatgatttcatttacagagtagagagcgtgaacgggccaaggtgttaaagaagccacagtgtgtagacgagcccaggaaggagggcatggggccatctgcatggcctggccagtgttctcaagctcatctttcctatgctcatcacagagtggccttgcctgatgcggtgtctgtgaaactctctatggtaacaagagagtgcctcggccctcaatgcctgacccactcccagtaaatggcagtcagggctgctttctctgcaatgcattttttacacatgcartttcacctcttggatggcttcattgccatctgtgtgctgaagagttctaaattaaacccaggttgtctctccagcagcatttttaaactgtacctccctaactcatacgcagttttaagtgtcaaagtggtggacca

SEQ ID NO: 371425 - DNA, 633 bp, Homo sapiens
atgttcagtttgtcaactcagttgccttttgtctaagtgaatcccagctttaccttggaagcttccagcagcctgaactcttggtggtgatttacaagcccctcygtgcacctgccccaacctacctctcccattttattcccaacaacctccctgttcacactcagtgtttcagctaacctaaccctctacttatttcctaactcctcagtctccacgatttttcttatgatgtgtaccactggaatccacccattccacttggggtctccagccacacatccacgtgtgtcaaggctgaagaccattgtcctcacgaaccccggcccacacactccttagagatgacatctgtgctgttgacttaaggcaccttctcagtggcactgtcttggggtttacctggatttaccttgactccctcagagtcctcttttctatgcaacaaagaaatggattgttgcgtctgatgagtatttttatgctttacaatatttaacaatggcttttaaaatatattatgcactcaaaacatacaatactttgtattaaagatattttatattaaaagtccttatataaattatttcatatgtcattttcttgtgatatgttccaccctgatttataaca

SEQ ID NO: 371426 - DNA, 633 bp, Homo sapiens
atgttcagtttgtcaactcagttgccttttgtctaagtgaatcccagctttaccttggaagcttccagcagcctgaactcttggtggtgatttacaagcccctccgtgcacctgccccaacctacctctcccattttattcccaacaacctccctgttcacactcagtgtttcagctaacctraccctctacttatttcctaactcctcagtctccacgatttttcttatgatgtgtaccactggaatccacccattccacttggggtctccagccacacatccacgtgtgtcaaggctgaagaccattgtcctcacgaaccccggcccacacactccttagagatgacatctgtgctgttgacttaaggcaccttctcagtggcactgtcttggggtttacctggatttaccttgactccctcagagtcctcttttctatgcaacaaagaaatggattgttgcgtctgatgagtatttttatgctttacaatatttaacaatggcttttaaaatatattatgcactcaaaacatacaatactttgtattaaagatattttatattaaaagtccttatataaattatttcatatgtcattttcttgtgatatgttccaccctgatttataaca

SEQ ID NO: 371427 - DNA, 573 bp, Homo sapiens
ggtgccagtggggagctacggtcaggagagacaggtaaaacctggtgacagggctcaaaggccagctcttcatgatggttggctcttaacatgagggcaatgagcagccaaggaagggatttcagcagagagatagatttagatcttagaaatgtcattcttgatactgcagcatggctaatgcatgaaasgagagcaagaatggtgtaagaggagctcctcagcagtctgtgctggctatcagctgtgggtgcagagacagccctggggcagtggcacaggctggagaagccccacagtcaagagcttcagaaagtggccaaatccagaggactgatgtggactgacatgagggtaggcctggtgtgctcctgtttgataaccagctttgtggggctggagagaagccgtgtttgtagttttcctggtgtctgttccccagcaaggctaattcaagctctcagcagaggctggaagttcaactctctgccccatcctgccaatcctactgcaaggaatcagagtagccacccacaaacttacactcacggcgatgagtccccccgccgctga

SEQ ID NO: 371428 - DNA, 565 bp, Homo sapiens
ttgatctgtagctcctataatccccgtgtgtcatgggagggacctggtgggaggtaattgaatcacgagggcaggtctttccattggtgttcttgtgatagtgaatatgtctcaagagatctgatggttttataaagggcagttcccctgcacatgccctcttgcctgccgccatgtaaggcatgactttgctcctcctttgcctcccaccatgattgtgaggcctccccagccatgcggaactgtgagtcaattaaacctcctttctttatacattacccagtcttgggtatgtcttyattagcagtatgagaacagactaatacaacatctcaggtttgaccatagtgggacatatttttgaaagacgtgaaagtacaaagaaactaaaggcaggcagatagcctctaaattcttgggcataccatttacactccattgacatcttggtttctttctaaggactgcactataatatccctacaatcattaaagcaaaaagcaggcttcctcgatctttcacaaaacgatcttgcctttgtcaatcttagcttttgtttctagg

SEQ ID NO: 371429 - DNA, 557 bp, Homo sapiens
aaggagcagtgttggtgattcaacaccatttctccgaccctcttcagtgcctccttcagtgatatgaagttaaaaccaggtactattattattaacctgattttttggttctcatcaagttgcttttttgtgtagatagttgttcgatttggtgttcttgctgtagtgatgattggtgaaggcttctatcttgctatcttgctctcccctctcctcaggcacctcttgttggaagtgcatagcacccccacaggctgacttaccaaaaatgtgataggaaagatgacttcattcctggagttggaragcaaggccttgactgatagactcaatcaaggattcacctgggcgatggtgaagagtagacatcaacacttccaggtacaactgggagattatttccaccaccgaggaagactgttcctattagataaggcagtttcagggactggctggtgtgccgtggagagcatatgaatgctgtcgggggttataccaaaacactcccggaatggccaagacgagaagcagagagacagaaaacgtaaaagaaacaa

SEQ ID NO: 371430 - DNA, 578 bp, Homo sapiens
tttccaataataactcttattttgtaaaataaaaaaagacaaatgtacagtcacaatagtcacatcatttagtgactattcaactcagggatttattgttacacattacagtaaataatgaaaatgccttgatatcacatagtgaagaaaaagatttcaccctgcaaagcctttatgaatacttatattaagagaacaaacaatccaygtcattgccttagttttattactaagccaaaaaatgtatgggtaagtgaaactaataatttagagataactctttctctcattcaggagaaaaatgtctcacatcttgcttgaaaattttctcagagataaagtggcatactatattttgctttcttgcaggcctgaggggaatacctccaatccaatggtgcttgttgggtgcagttcactcattctgaagtcggttcctctgcaggatacagttcagtagacggagttgaaggtaaagacctaggtgtgcaggtttccaaaggaggcactgtagaccctccaaagagcctctgtctggactgacaaaacttaaactgtgcaaatacattcaagactta

SEQ ID NO: 371431 - DNA, 643 bp, Homo sapiens
ctgggttcattcaatcagagaaaatggaaagttggaggctgtcattactgcaaggtttaaagtcatgtttatcatctcagttggctgaaaagtatttaatgctggaaatgtaattgagtttgctgcaaaaggccatgaagttacygtgaattaaggattctctaggagggcatcaaagccaaaaattttaaaagcacatttctaatactgaaatctcaaacacgccatgaagaacattcattttataaactgagaatatattgtctttcatagaattttccaggcatgaacatcaactgctgcttctttttttaagaaaagggtcatctggaaaattttatgcaattaacaaaaatgccttactttattattatgttcctaaagaatcaatgatcagttatgctgcttttaagaaaccaatgcatggagatacacttgacaggatataaaattaaataaagttgttgcatctttaccagaccagcttcagtctcctttttgtgtattttttagtatatttcaaaaacaattattaaataatttttcaaagcccaaagtaaaatgagaaaaactattcaatttataagtttggaagaacttctacacagtaactttaaatatttctagagcttttctggtcaac

SEQ ID NO: 371432 - DNA, 643 bp, Homo sapiens
ctgggttcattcaatcagagaaaatggaaagttggaggctgtcattactgcaaggtttaaagtcatgtttatcatctcagttggctgaaaagtatttaatgctggaaatgtaattgagtttgctgcaaaaggccatgaagttactgtgaattaaggattctcyaggagggcatcaaagccaaaaattttaaaagcacatttctaatactgaaatctcaaacacgccatgaagaacattcattttataaactgagaatatattgtctttcatagaattttccaggcatgaacatcaactgctgcttctttttttaagaaaagggtcatctggaaaattttatgcaattaacaaaaatgccttactttattattatgttcctaaagaatcaatgatcagttatgctgcttttaagaaaccaatgcatggagatacacttgacaggatataaaattaaataaagttgttgcatctttaccagaccagcttcagtctcctttttgtgtattttttagtatatttcaaaaacaattattaaataatttttcaaagcccaaagtaaaatgagaaaaactattcaatttataagtttggaagaacttctacacagtaactttaaatatttctagagcttttctggtcaac

SEQ ID NO: 371433 - DNA, 419 bp, Homo sapiens
gacaggggaacttctttcgctgaaacttgctgcaggcacaggcaaactscgttgccgggcgtcaccatgcaatgcacctatcgcatttgaggaacacgtttgccagaggacaaacactctgagcatgctggagcacaaatgcacagcacagaagcatcctgggagtgggccagttccccagcccagagacacccatcttgaagtctcctggaactacccttggagaacttaaggacgagtaaaattcctagtacaatatatataaatgaaaaccagactgttcttgctgtctttgtcctgttgcttatagtttgcattttactgtcatgtcccttaggctaataatgtaagaatattcccaaactatggcctcaagtaccttattatccctttctgggcttctaatgcataaagggaag

SEQ ID NO: 371434 - DNA, 419 bp, Homo sapiens
gacaggggaacttctttcgctgaaacttgctgcaggcacaggcaaactccgttgccgggcgtcaccatgcaatgcacctatcgcatttgaggaacacgtttgccagaggacaaacactctgagcatgctggagcacaaatgcacagcacagaagcatccygggagtgggccagttccccagcccagagacacccatcttgaagtctcctggaactacccttggagaacttaaggacgagtaaaattcctagtacaatatatataaatgaaaaccagactgttcttgctgtctttgtcctgttgcttatagtttgcattttactgtcatgtcccttaggctaataatgtaagaatattcccaaactatggcctcaagtaccttattatccctttctgggcttctaatgcataaagggaag

SEQ ID NO: 371435 - DNA, 494 bp, Homo sapiens
ctgttacttaagttccaggaaacgcaagaattgcagacagcattgttgacatgtgggccagtgacattgccactcctacgcactctgtctcagttgtcaggcttctactgaaataattgattgcgtaacttttgtccattcccagaacgtgggctccatcagggccgctctcatgcctgtctctgtgaccccttgatctccagtgctgagatcacagtcggtctstctctgtttttattggttaagtgaataccatagttgtgagaagcattataagcagtttgtttgcatcactgtgatggtccctcacttattttccatcggttcctgtgagagtttgttgggtatccactcaatctagttgatgtttttacacaggagaaaacaaagtcatttgttttgttgaaaaacatttgcaggtacaggaaattaacttggtttcctaatgaggaaggaccgctggaccccttggcctggaaggcaggctgccattc

SEQ ID NO: 371436 - DNA, 494 bp, Homo sapiens
ctgttacttaagttccaggaaacgcaagaattgcagacagcattgttgacatgtgggccagtgacattgccactcctacgcactctgtctcagttgtcaggcttctactgaaataattgattgcgtaacttttgtccattcccagaacgtgggctccatcagggccgctctcatgcctgtctctgtgaccccttgatctccagtgctgagatcacagtcggtctctctctgtttttattggttaagtgaataccatagttgtgagaagcattataagcagtttgtttgcatcactgtgatggtccctcacttattttccaycggttcctgtgagagtttgttgggtatccactcaatctagttgatgtttttacacaggagaaaacaaagtcatttgttttgttgaaaaacatttgcaggtacaggaaattaacttggtttcctaatgaggaaggaccgctggaccccttggcctggaaggcaggctgccattc

SEQ ID NO: 371437 - DNA, 597 bp, Homo sapiens
tttcataatgccagtgtattctcccacaattaatgttaatagcaaagaaaaggttttcttcacctcacccaagtcatcaaatgtagtatcaccaatagtgagaagatctcaccttattttctttgatgtggcatgttatgaggaagacagcatgtgctgaatcgttcttgccaacttagtttaacctgaatctaatcaagaygtcagagttaatattcagcttagataaatcaaggagtcagataaacaagtttaaaaaagtaaatgaaaatagtcagacaaatctagaatctaaaataaattatagaacaattgctctggttgcttcaaaagtcaaaaacatcaaaaaattatgtggtaaaactgttcaaaattaaaagaagctgaaaagatataatattcagaaaaaatattttaaaagatttagccataaaagtcacttttgaggtaatcggaaacacaggcatgtggctggatagtggatgatattaaggacctgctgttaattttcttagacttgataacaacatttggctgtgctgggaaatatccttatttttaggaaacaaaagctgaggtatttatggtaagttgtca

SEQ ID NO: 371438 - DNA, 554 bp, Homo sapiens
tagttttaaattttatctttatgtctattgtgaattaattttgtgtatggcgagtaaggagctgagcttcacttttgtttctacatatagtacacttatttcagcaatatttcttgyaaagattatccttttcctgttgaatctcattaccaaatttattggaaaagtgttggctctagaagtgtgaaactttgttttggcacctttgatttatttgcttatgcttttgccaataccacattgactcgataatagtagttttatagtaagtcttagaatcagatagtagtagttctccagctttgttctttttcaaattcatttagctattctagaccctttgaatttccgcatatatattttaaattatcatttaaatatttataaaaggccttctgtggttttgattagcactttctgaaatctatagatcagtttagtgaggacacaaaccttagctattctgcaatgaatacatatttcaaaaatatgttgcacatgataaacatacaatttttatttgcatgtttatatagtaaaaaattaaaatgaaa

SEQ ID NO: 371439 - DNA, 554 bp, Homo sapiens
tagttttaaattttatctttatgtctattgtgaattaattttgtgtatggcgagtaaggagctgagcttcacttttgtttctacatatagtacacttatttcagcaatatttcttgtaaagattatccttttcctgttgaatctcattaccaaatttattggaaaagtgttggctctagaagtgtgaaactttgtttyggcacctttgatttatttgcttatgcttttgccaataccacattgactcgataatagtagttttatagtaagtcttagaatcagatagtagtagttctccagctttgttctttttcaaattcatttagctattctagaccctttgaatttccgcatatatattttaaattatcatttaaatatttataaaaggccttctgtggttttgattagcactttctgaaatctatagatcagtttagtgaggacacaaaccttagctattctgcaatgaatacatatttcaaaaatatgttgcacatgataaacatacaatttttatttgcatgtttatatagtaaaaaattaaaatgaaa

SEQ ID NO: 371440 - DNA, 554 bp, Homo sapiens
tagttttaaattttatctttatgtctattgtgaattaattttgtgtatggcgagtaaggagctgagcttcacttttgtttctacatatagtacacttatttcagcaatatttcttgtaaagattatccttttcctgttgaatctcattaccaaatttattggaaaagtgttggctctagaagtgtgaaactttgttttggcamctttgatttatttgcttatgcttttgccaataccacattgactcgataatagtagttttatagtaagtcttagaatcagatagtagtagttctccagctttgttctttttcaaattcatttagctattctagaccctttgaatttccgcatatatattttaaattatcatttaaatatttataaaaggccttctgtggttttgattagcactttctgaaatctatagatcagtttagtgaggacacaaaccttagctattctgcaatgaatacatatttcaaaaatatgttgcacatgataaacatacaatttttatttgcatgtttatatagtaaaaaattaaaatgaaa

SEQ ID NO: 371441 - DNA, 602 bp, Homo sapiens
gttggaactttaagtccattaaagctctttcttttgtaaattgtccagtctcagatatgtctttatcagcagtgggaaaacagactaatacaaatggcttaatggtaaatataaggggttttcaaaaaagttcatagaaaatgtatcctttaaaaaccrtgcatagatttcaaaagttttttgcatcgaagtcaacttgtactaagctactgcaagatgtctgaacaaactctagtttgaatcactcaaaaggataagacatcattttgaaaagagcacctaacagagcaaaatgaattctgctaaaattgaagcatgaatgcacatcagatttatagtgaagcaatggtaacatcactgattgctttacaagaagtttaccatgacaatgccccagataaatcagcagtttacaaatggataatgtattatatagagggacaagacaatgttgaagatgatgcccacaacaacagaccattcacattaatttgcaagaaaaaacttgctgtttatgtcctaattgaaggggactgatgactaagagcagaaacatgagccaacaccatagacatctcaattcattcagcttacacaattct

SEQ ID NO: 371442 - DNA, 602 bp, Homo sapiens
gttggaactttaagtccattaaagctctttcttttgtaaattgtccagtctcagatatgtctttatcagcagtgggaaaacagactaatacaaatggcttaatggtaaatataaggggttttcaaaaaagttcatagaaaatgtatcctttaaaaaccgtgcatagatttcaaaagttttttgcatcraagtcaacttgtactaagctactgcaagatgtctgaacaaactctagtttgaatcactcaaaaggataagacatcattttgaaaagagcacctaacagagcaaaatgaattctgctaaaattgaagcatgaatgcacatcagatttatagtgaagcaatggtaacatcactgattgctttacaagaagtttaccatgacaatgccccagataaatcagcagtttacaaatggataatgtattatatagagggacaagacaatgttgaagatgatgcccacaacaacagaccattcacattaatttgcaagaaaaaacttgctgtttatgtcctaattgaaggggactgatgactaagagcagaaacatgagccaacaccatagacatctcaattcattcagcttacacaattct

SEQ ID NO: 371443 - DNA, 602 bp, Homo sapiens
gttggaactttaagtccattaaagctctttcttttgtaaattgtccagtctcagatatgtctttatcagcagtgggaaaacagactaatacaaatggcttaatggtaaatataaggggttttcaaaaaagttcatagaaaatgtatcctttaaaaaccgtgcatagatttcaaaagttttttgcatcgaagtcaacttgtactaagctactgcaagatgtctgaacaaactctagtttgaatcactcaaaaggataagacatcattttgaaaagagcacctaacagagcaaaatgaattctgctaaaattgaagcatgaatgcacatcagatttatagtgaagcaatggtaacatcactgattgctttacaagaagtttaccatgacaatgccccagataaatcagcagtttacaaatggataatgtattatatagagggacaagacaatgttgaagatgatgcccacarcaacagaccattcacattaatttgcaagaaaaaacttgctgtttatgtcctaattgaaggggactgatgactaagagcagaaacatgagccaacaccatagacatctcaattcattcagcttacacaattct

SEQ ID NO: 371444 - DNA, 493 bp, Homo sapiens
gttttttaaaagtgcctgttaccacccccagcactctctttctctccagctgtgtgaggtgtctgctccccctttgccttctccatgattgtcagtttcccaaggcctccccagaagctgagccratgacagcatcatgtttctgtacagcctgcagaactgtgagccaatgaaaccatttttctttatcaattacacactctcaggtatttcattataggagtgaaagaatggcctaatacacgctcacaaggtaaaagaccatgggagatattttggaaatagataagcagataagagactggtacctcacttattaccaaacctgagaaatgtgattctaagctgccagtggggaaaacataagcaagctaatgtatactgtgggcttatcaaaggctcaggaacgagtggcagtaggtacatgaggatggtcaagtagtgggtgattacggagcttaaaagagagcgagtgattgacagcctggcaggg

SEQ ID NO: 371445 - DNA, 622 bp, Homo sapiens
gttaaagaatatattttgggttcacccacatttttgtccattagataatttggttgagcctggactttgaagatagatggacctgggttcaaatctcagttttaatacctacaagctcggtgatcttggaactaactgttaattaaactgtgggagtccrttgttctcatttggaaaggaaattaatggagtgattttctagggtattgtaacagttaataataatatatgcaatgtgcctaatacattttttggctttagtgagaattcaaaatttcaaaaattctttgaaagttggagtggctaacaggcacttgaacagaaattgcttaaaaatgcttatccctataccattgcaattgatgcgtttcttagattctgatatagatttttctaggcaagcctgcaagggatttttgtctactccctcggggttttatgatgactgttttgcttgttctctatttgtgccagaaatggtcaggaaatatttcaccagtgtagaaagatgcgcctctaattctgacaaccagcaattctcttcttgcagcacatcttttggacataaaagtgaagagttagagaagtacatatacctcattcatcacagcttcagagaagc

SEQ ID NO: 371446 - DNA, 592 bp, Homo sapiens
caattttaggagtcatgtcaggatatgtaagctctttgggtgtcatttttytcacctatgaattatgaagagtaaaaagctatagtccagatgtacataaggttaatggaaataatacatgtaagaatgcggtgacacaacgcaagcactctgtgaatcttatttgctcagcacagtgatggtctctttctctgaatgcttggaatatattgatgaacataacaaagttgagtcagatagcaaacaacggacaaattaacaaagtttacactatgcgataagtgatttgtgccatgtttttaaaaagtggaaaaaagtataaacaggagaatcaagagtgcaggagggggtgatgggagaggtgtaggccggagtattaaagaggaggatgagtgagagggttagaaagttagccaactgatatctgaaaaaagagagttgtgggcagaagaaatagccactgccaatgggaaattcagggaacaataaagaggacggtgctcttggagtgaatgatggaggaagagactggttggagatgagatcagagaggttagagggatgggatatgtagacctggaggccattgtaa

SEQ ID NO: 371447 - DNA, 592 bp, Homo sapiens
caattttaggagtcatgtcaggatatgtaagctctttgggtgtcatttttttcacctatgaattatgaagagtaaaaagctatagtccagatgtacataaggttaatggaaataatacatgtaagaatgcggtgacacaacgcaagcactctgtgaatcttatttgctcarcacagtgatggtctctttctctgaatgcttggaatatattgatgaacataacaaagttgagtcagatagcaaacaacggacaaattaacaaagtttacactatgcgataagtgatttgtgccatgtttttaaaaagtggaaaaaagtataaacaggagaatcaagagtgcaggagggggtgatgggagaggtgtaggccggagtattaaagaggaggatgagtgagagggttagaaagttagccaactgatatctgaaaaaagagagttgtgggcagaagaaatagccactgccaatgggaaattcagggaacaataaagaggacggtgctcttggagtgaatgatggaggaagagactggttggagatgagatcagagaggttagagggatgggatatgtagacctggaggccattgtaa

SEQ ID NO: 371448 - DNA, 592 bp, Homo sapiens
caattttaggagtcatgtcaggatatgtaagctctttgggtgtcatttttttcacctatgaattatgaagagtaaaaagctatagtccagatgtacataaggttaatggaaataatacatgtaagaatgcggtgacacaacgcaagcactctgtgaatcttatttgctcagcacagtgatgstctctttctctgaatgcttggaatatattgatgaacataacaaagttgagtcagatagcaaacaacggacaaattaacaaagtttacactatgcgataagtgatttgtgccatgtttttaaaaagtggaaaaaagtataaacaggagaatcaagagtgcaggagggggtgatgggagaggtgtaggccggagtattaaagaggaggatgagtgagagggttagaaagttagccaactgatatctgaaaaaagagagttgtgggcagaagaaatagccactgccaatgggaaattcagggaacaataaagaggacggtgctcttggagtgaatgatggaggaagagactggttggagatgagatcagagaggttagagggatgggatatgtagacctggaggccattgtaa

SEQ ID NO: 371449 - DNA, 592 bp, Homo sapiens
caattttaggagtcatgtcaggatatgtaagctctttgggtgtcatttttttcacctatgaattatgaagagtaaaaagctatagtccagatgtacataaggttaatggaaataatacatgtaagaatgcggtgacacaacgcaagcactctgtgaatcttatttgctcagcacagtgatggtctctttctctgaatgcttggaatatattgatgaacataacaaagttgagtcagatagcaaacaacggacaaattaacaaagtttacactatgcgataagtgatttgtgccatgtttttaaaaagtggaaaaaagtataaacaggagaatcaagagtgcaggagggggtgatgggagaggtgtaggccggagtattaaagaggaggatgagtgagagggttagaaagttagccaactgatatctgaaaaaagagagttrtgggcagaagaaatagccactgccaatgggaaattcagggaacaataaagaggacggtgctcttggagtgaatgatggaggaagagactggttggagatgagatcagagaggttagagggatgggatatgtagacctggaggccattgtaa

SEQ ID NO: 371450 - DNA, 659 bp, Homo sapiens
acaatttagcttactattctgccacacatctaaccatgtttaacagcctcactgggttttaatggatgtacaaataacttaacctatttattgtgtatagtttgatgactttggaaatatgcaaacgcctgtggtaccatcagcacaatcaaagcaaaagacaaattcaacaccttccaaagtgtcccattgtttttattttgttgttcttgttttattttattttattttattttattttattttactttttctgctaagtacatttaacatgagatctaccctcttaacaaatcttaatatatgtaataccatattaactgtaagcactaagttgtataattagatctctagaacttattcatttagcataattgaagctgaatacccattaaacaacaamtttccatttcccccaccgcccatcccctggaaacactcttatattctctgcttctatgagtttgactattatattcaatccacaagttccacagctatggattcaaccaacaataaatcaaaagtatttggaagaaatacacatatatatttggaaaaaaacacaaaaacaatacaatactaaataatataaatttaaaagtacactataacaactatattgtattaggtattataaataatctagagatgattta

SEQ ID NO: 371451 - DNA, 343 bp, Homo sapiens
tgcccaatccaccatactttgatattttgttttttaaatatcttcttgtctatgaacatactattcttgccacatgatatgtcttctttctccctgttcttttgaaatctcatgtgttcttctaggtctaggtcaaatgttttctataaacmttttcccttctccacttgtatctacaaacgacagagttaattgctcttcctttatacttccagtatactttatacacatttctattttacaacatgtactctcttgttaaatactaaggaccaaatattgttcatttctgtgattccagtgcctggcatagagtttgctgtcgatacgtctttgttgaaca

SEQ ID NO: 371452 - DNA, 638 bp, Homo sapiens
atcattggacataatatctcatttagttgatagaacaaacatgtgacacgtgtactgttatctcttttctacacataaggaaactgaagttatgccattttaatgttaagattaggaaaacagtgtaggaaatattccttgcttgtagagattgctgatcctaagatgctagaggcatttgggtaatagcctcatctgtttgattgacagggtaatgtacaactcaaatgctaccttaattctagctctaaattgtaatcatctaaaacttttacttccaaattctctaagacttcaattcatttaacctaatttattctttcagagacatcaaaataaaaaatattaaataaaaatatttgaaaggaatcttgaaccaaaacataaatgatatactgaattttgactcaggtagacctggatgtgaaacctctagtctgaagctctgtgggctttggttgctatatctataagattatcccacaaattctaagaatagatgaattaaatatgtgcaatatatgtacaatgtgtgaaaatrccacataattcaaatggttattgatgttattattatgaataaactgacaaagaagtaaagttacataaggaggaagtaggatgcattgtaaaaatta

SEQ ID NO: 371453 - DNA, 585 bp, Homo sapiens
ggaaagccagaggaactcccaaatcatgccctttagcctagctatgttgcattaagtagccaaagctgatgtgatctcacaaataaaagacatacatgctactgacccagcatctagctaagcctggccaaacagtctcattttccaacagtttcatcaaaaccaaattattagtgcagaaccaccaaatatgccaagcccaggtgtctgtactttaagcaatatatccaaataggcccaaggagaaatttgggggtgggttagaggaagtgttggaacctttggttaacaaaacactaagctmcaaagcgccaatgttttcctgaaagcaaatgccaccaaatgaaattcagtcaatatatcttccacatgacaaagctactaccaacattttccttctgtaaagtgtttagactacagacttttactagccttttccagcctggtgtttctcaataatgaagccaactctatcaatgcttcaagtatcaatgtctggtaactctgtaaggattagcacccacttagtggtcaggaaaattcattccaagatgctaaagaggtgctttgtttttaattttttta

SEQ ID NO: 371454 - DNA, 564 bp, Homo sapiens
aattagcccatttgggaaatatatgggggcatttgtctccgtgccttgaaagtagactgcatgaagaattattattattattttttctttctttctttctttctttctttctttctttctttctttctttctttctttctctcttttttcttttttctttttctttttttgaggagagagggagaaagaaaaaaaaaagcagtctgacaaagatgagcagattccagcctggtgagagttcagaaccgtggacagcgacctaccatccctgcttgggtggggagataggctggcagaagaggtctctcctctggaagcagaagcatggtgcctgaatttttatgtcactacccactcatttactaatgaattctgcaattattaagtgtcttatatgygtcaaacactgtggcaagatgcttgggctttgtaattgaaaatgcattatccttgctttcaaaaaaatctgcagaccatatatccctctatattctgctttaagagccaatgccagtaaaataatactttatttccaccctttcagtctgcatactcacctccagc

SEQ ID NO: 371455 - DNA, 241 bp, Homo sapiens
atctggtaaccagtgacaagttagcctcaatgttattcctttctaccagctcttcagataactatttataaacattgtaacttattttggaaaaattccctgcaaacgcatggactaaaatgatgaggggaattgccasagttctgaaaccaatgtggagatggtaggagaagcggaaacaaaccttggtggtacctcaaatcatggagtagaatggacagcgacacaaagggcagacctg

SEQ ID NO: 371456 - DNA, 475 bp, Homo sapiens
ttgcaattcttagcaaagattcttccaattgctcatttataaagcacttctgtmgttttttattaatcttccatttctttgtctgaagttaatagctgtctttatctgaaggaggatgtcccaaatgatttatttcatatctagaagtagccactttttttttagtgcttgatctaaacctgctaaacacatcttcctaactgtttccatgtaggcagtcatattcagtggtcactaagacagactcttattaaaattacctaggataattgcatcttattaaaattatctaggataattaccttttatcattgctacaggtatatgttgagtcctgggctaagcttctgaaatatagaccccggaatatagttactcaagcataatggtgttttattattattattttttctctctctcttttataacaatccagaggtttaagggttgttagaaggggaacaagtgggtagct

SEQ ID NO: 371457 - DNA, 475 bp, Homo sapiens
ttgcaattcttagcaaagattcttccaattgctcatttataaagcacttctgtagttttttattaatcttccatttctttgtctgaagttaatagctgtctttatctgaaggaggatgtcccaaatgatttatttcatatctagaagtagccactttttttttagtgcttgatctaaacctgctaaacacatcttcctaactgtttccatgtaggcagtcatattcagtggtcactaagacagactcttattaaaattacctaggataattgcatcttattaaaattatctaggataattaccttttatcattgctacaggtatatgttgagtcctgggctaagcttctgaaatatagaccccggaatrtagttactcaagcataatggtgttttattattattattttttctctctctcttttataacaatccagaggtttaagggttgttagaaggggaacaagtgggtagct

SEQ ID NO: 371458 - DNA, 595 bp, Homo sapiens
gactgagttaataaaacagaatcagcagatgctaaaggaaagttcatctcccatccccccgagtcagttaactgttctcagggagggatggggagaagggaagtgattggaagctaaccacagatcaaatgcagggaaggagaggatggacagtgataatttaggagcagttgcatgtaagaagacttaggtattcaccctggggggctgttaccaaatatgcttgtcaaatgtactggtatcctaaaggaatagtgactttaagaagcagaggcctgtgattgtcctatttctgaatttgttcctgattatttaagtgacattgggcaaatyattttacctctcattgttttcatgtcttctcttaaaaaatactgtgaattttatgaaacttgctctgaactgtctccaagggaaggtgtgtggataaaataaactgcgagttgtgaaaacgctgcagaaaatgtcatttaaagtgctatgcaaatacagtgatgcagagtgtgaatgtagatggagggcactgccttcatttcttctgggttgaatcatttttggtcaaaacacctgactgtacttcttcggtgaccctaca

SEQ ID NO: 371459 - DNA, 453 bp, Homo sapiens
tcatgacaatgaggcagccataaaaatacatgcctgggcaatgaatgactgtacatacaaggtatcctcagagtatgtaataatagtaagggccagaatgcctcttaaracaacaggctggcagaaactcaaccatagcttaaacaatgatattacatcaaaagagaaatatgtgtcaaataaggaggtagaggttgtgatcaactgcaaaaatactattgttgaagcttctatgcatccatgacttttgcagtataactttagaactcctcttcaaggtaggagtccttgaatataaactaaacttttcatcccctttggctgataaaatgcaatagaattcatggtgttgttaaaagataaatggagatacattaaaattttaaggagtatatttcagcaggtaacatattgtgaattaggcagaccaaagagagttttggggctctgcca

SEQ ID NO: 371460 - DNA, 456 bp, Homo sapiens
atgatggcctactgatggtcttgtttggtttggtttggtttggtttctgcttcattcactacagaagcagcatttagcgcaatgattgccagtcttttattaagcaaatgagtaaatgaacaaacgaattaaattattaacactacagacattcacctatcttccaaatacttaataagcacagatcaatgtactagagaggattcagaattacattaaacagcccacactttgaggggcttatagtataataagatgaaatgtcaatagctttgatatttattacaatcacatgatctaggaagaagtgtcaaatgtcttaagaaattattatagaaccaatgaaagacwtgagaagaccaggatagaggttggagatgagagatggcttaagggaaaataaagacattttaactgggcatgaggaagaagttgcatagccttcaatattcaaca

SEQ ID NO: 371461 - DNA, 620 bp, Homo sapiens
attacaaacccatctattgacacacatttaaaaatgtgattataccaactgtggccaaaagatgtgttttaaattgttataaccactttagagagatctaatttgttccaagataggcatactctacaattaagcaatcctgcttctcagcatccattctagattttttaaaaatgggatatcctagttcataaacaatgagatctacacaaggatattcattgcagcataatttaaaatagctaaaaatggcagaagtggggtggatccagctatttatttgtaagcaaatggacaaatccatgatcatttatacattgcagttaaaatgaatgaattgtatcattgcagttaaaatgaatgaattgtatctgcattatgataaatgaaaaaagcaagttacaaaggatagatagggctagatgcattttctataactttaatgatacctcatagcatattatgtgaagactttggatagaaaaccaaaagcatatttgcaaatggctttgaccaacctcagaaatgagatgcctcaagggaggggagagaaagagaaagcatacakagtagaacttcaaccctatctgtaattatttttttcaagaaataaatcttag

SEQ ID NO: 371462 - DNA, 608 bp, Homo sapiens
ataaattcttattcaggaaactggtatagttacaaatatatttccatttgccatgacagagtgctgtttggttgattacttgctttttaaattgagattaacatataaaatgcacaaatcttaattgtacagatgaattaattttacacatgtatatactacataactatcacaccaatcaaaatatggaacattttcatcactccataggttcacccccatcccttcccagtcaattaccaacacccttcrccctcacccaatagaggaaaaaaatattctgacctttataactatgaacttgttttgcctgttttaaaacttcatataaataacatcatgcagaatgtactctttgtgtctggcttctttcactctacaacctgagactcacctatgttgttcaaggtaggaattgttgattcttttaatgtgtaatttgtaggccattgtatgaatgtacaaaaatgtgtttctctgttctggtgtcagtagacatatgggttgttcagtctttggctatgataaataaagctgatgtaaacattcttgtacatgtgttttagtagacatgtgcactaatattttttgcatctatacctaggagt

SEQ ID NO: 371463 - DNA, 481 bp, Homo sapiens
gttctggctcatgcatggggtggaggatggcagtgrcatccatggtgccagggcacagtggaagaggcagctgtcatgcataacctgagctctgctttgagtcacacagagaattgcaaaatactgtgaagggaagaggcagatgtgcagttgtaggaggggagagaaaaagaaataataacctaagaaagagaagatgattctttctcccagagagtatgccagggcataagaacaaacttactattattattatttttaactaatattggcagaaccactattactagctgctggtattgattgtttagttcatgtttaaactttacaatagccttcaattcttaccgaaatcatgtgggtaggcattatttatcatgcctatagaggtgaacagactgagactcagtgatattaaataatttagttaaagacagaaagcttgtgggtggatgagctaggctttgaacccaagtttggc

SEQ ID NO: 371464 - DNA, 481 bp, Homo sapiens
gttctggctcatgcatggggtggaggatggcagtgacatccatggtgccagggcacagtggaagaggcagctgtcatgcataacctgagctctgctttgagtcacacagagaattgcaaaatactgtgaagggaagaggcagatgtgcagttgtaggaggggagagaaaaagaaataataacctaagaaagagaagatgattctttctcccagagagtatgccagggcataagaacaaacttactattattattatttttaactaatattggcagaaccactattactagctgctggtattgattgtttagttcatgtttaaactttacaatagccttcaattcttaccgaaatcatgtggrtaggcattatttatcatgcctatagaggtgaacagactgagactcagtgatattaaataatttagttaaagacagaaagcttgtgggtggatgagctaggctttgaacccaagtttggc

SEQ ID NO: 371465 - DNA, 603 bp, Homo sapiens
gtttgtgattacatactaaaaattctagaaggatacataccaaattgataacagtaatcacttcatggttggggtaaggttatsatgagggaacagaataggtaaaaggaacttgagccttttaattactgtctgaattattgtgagcatgtgttcacatcttattgtataattgcaaataaatatacaaatatataagtaaagaggccagtgctctcctctatttgctacattctctcctcacttctagtcagctttcaaaaaagttgacatcaaaacattctttagcaaaatgtaatatagaaaaggcattgcttagtttatttttatgtattaatcctttataaagctacataaagtatgctgcaattttttgaaattttgcaaacagttgcaaaattaaatttgattcctaagtttcatgggtaatgatttaatattctcctacacattgttggaattcacatatgccccaaataaaaacgagctacatagaaatataaataacatttatgtgagatggacagtcctgcttagcttgtttttcaaagtgggcatgaaaatgcccatttaaaatttatatttagacaggaaaattaccat

SEQ ID NO: 371466 - DNA, 632 bp, Homo sapiens
  misc_feature (1)...(632): n = A,T,C or G
acaggatggagcaccatagtgaaaatgaagaataaatgagtgtggttaaggttgtatactatcttgaacaagatattggagagttcaagtgggacaaatccaagaggaagcatctgtggaacatgtcattgatttgttagccaacaggtgtgaatgaatgaggtgctttataatgtctcttaatgattgttcttgacaagatgcttttttwaaacagggtcccaagggtctgctcctattggatgcccatatctatcttaatatggttttctaatcctgatgccttttaaagtttattcggatgttaaaacaatggtgataaaagaaggaactcctcattcatttatttattcaataaatatgcattgagtctgtccagggagaacgctgcaggatattaggccacacaggtggttcctgcaactcagagagcttacattctagtagataatcttgaaaaacttctggaaatgttattttcttaatgaattatgtcaggcttcgatcaatggctttgggtccttgggtctgctttctttccatacatttataagcnttgtattcattcatacttgctcagaaactcattgctctaccagatctctttcagttgtttgccatagctgatttgt

SEQ ID NO: 371467 - DNA, 524 bp, Homo sapiens
actactactaataaatggatcttaaaagcatcctaacaactgttggtctttgatacttacttaatgctggctggatccagtgcaagatacactgctaagaaaatcctaatagttatttttaaaataataatacatttatttattcattcttacatgtcatttaaatacgattagcaatccttttttattctcagagaaaactcttagtgagtctgaggatcagatatgtccccaatatgtgttcatactgcttagcgtggaattgcatatgttctttgcaggttttggctgtgtgcaaatcgtgtgagcgctttttacaatagagaaagcattttggacagatrttgaaatgaagcttctccatcatgcagcttttagagtatttgtctcatgtgttttaacccctgttcccaatatcttgtatttcagtgctcacagctgaagcacatgtcctattttatgcccttcctcataactactgctgattattttgcatcttgcacatctaaatgttcagtttttct

SEQ ID NO: 371468 - DNA, 576 bp, Homo sapiens
caaacgtagtcttactatgctgtcacagaaggggacagggtttcaatgactgaggtctcgtcatgaattacacaataaggtagattatttagatggtagattggctctatcccttggtctgcctctttgtggccactttcctgctcattattacctctctcaaacatggagaaggaagacagacaatctatcaactcgacatgtcacttcccccacactggcacatctgtcagggcccaacagactgcagaaagtgcaactttttctccaactttttctgggttatgcctcttttctctattaaatgcaaaatgtgctgatctaagtatacattttatagcacatctggcagtttgaatgatgttatttacaaatgctataaatcgaagtgctagtttttcctatgttatcaaagttttcaaataaaccaatagatgatataactctcctaaactaactcatatattattatctgttgaaattaaacagacagtgaattatccagtcacattttccccaaagtctargccaattagatttgaccagctatgccagggccctgaagatttagagata

SEQ ID NO: 371469 - DNA, 523 bp, Homo sapiens
atgttgtatgaatttcacctcagtacattatttttaaaaagagagacttaaagaaatttccctgaatacagaatacggcacagagagatggagattaaaaaaaaagtctcaaaggaaagtcaagagccatcaagtatgtatagggtatatctaacaggagttctaaaaccaaaaaacagagaacaggatgagagtcttcagatggaaaaacctcactgagtctggaccaagataataaaataatccaccccttgtgacagtgttgaaatgctggaaatctgtgggcacctgcatctcctgaggctcgattctgacccactagacactatagaatgggaggtgtgagccacaactgtgcttcttgctcttgaacaaaggttggaaacaaagcagctgcctgtgtcctggtgctgaggcaggtacagagaaaatcagagagaaaagccagatctagagaagaacatgaatcagaccaacgagacgcttygcatcagcaacagcagttgctgggacacaatgaagt

SEQ ID NO: 371470 - DNA, 591 bp, Homo sapiens
aataatgataacaaatatacactctctgtttaccatatgccaagcacctacacatattacacgtgacttctataagtctcttactttgtgcagaaactctgaggggtcgcactttattcgctttatattacaaataaagaaatgacaagaggtcaggtgattttcctgaggcactctgttagtaagcagtggrttcacagtctgcatagttgttgatatggtttggctgtgtccccatcccaatctcatcttgaattgtagctcccataattcctatgtgttgtgggagggatccagttggaggtaattgaatcatgggggcaggcctttcctgtgctattatcgtgataatgaataagtctcatgagatctgatggtataaaggcgagtttctgtgcacatgctctctctggcctgccaccatgtaagatgtccctttgctcttccttcctcttctgccatgattatgaggcctccccagccatgtggaactctgagtccattaaacctctttttctttacaaattacccagtctcaggtatgtctttattagcagcgtgaagacagactaatacagttgtcaagccaga

SEQ ID NO: 371471 - DNA, 602 bp, Homo sapiens
ctggctagggagtttctgaaggtgtcagaggttgtcacagatcaggcttccctccttctgatcatagagtgatggttccaccattctcccasctcatgacctagaactcaattccagagtttccaactccttctccaaatataattacccgtaaaactttgaaactctcctcattgtccttcatacccacaagacataccacttcctgtgctcccaacctttcttgaaaatactgcttatcacactagactctgagacttgtgagatcaagcccatgtctaattcatctttctaattctggctcctggtacagtgcctgactcatggttgacttagggatgtttggttgaagaagtatgatccggccaacttttctgttacatgtgtttcctcccttgctttatattcctgccaacaccttcatcatctttcagctagacactcaataatataatgattaacgttcagatagagaatgctgtgaaggaaataatgtataataagaagaccgaagcaagaggtggaagggaggtaccattttagatgaaatagtcaaagatgtctctgaggagatgacatgtgagcagagatacaaacaatga

SEQ ID NO: 371472 - DNA, 602 bp, Homo sapiens
ctggctagggagtttctgaaggtgtcagaggttgtcacagatcaggcttccctccttctgatcatagagtgatggttccaccattctcccagctcatgacctagaactcaattccagagtttccaactccttctccaaatataattacccgtaaaactttgaaactctcctcattgtccttcatacccacaagacataccacttcctgtgctcccaacctttcttgaaaatactgcttatcacactagactctgagacttgtgagatcaagcccatgtctaattcatctttctaattctggctcctggtacagtgcctgactcatggttgacttagggatgtttggttgaagaagtatgatccggccaacttttctgttacatgtgtttcctcccttgctttatattcctgccaacaccttcatcatctttcagctagacmctcaataatataatgattaacgttcagatagagaatgctgtgaaggaaataatgtataataagaagaccgaagcaagaggtggaagggaggtaccattttagatgaaatagtcaaagatgtctctgaggagatgacatgtgagcagagatacaaacaatga

SEQ ID NO: 371473 - DNA, 552 bp, Homo sapiens
aaagtctagaactcactggtaaaagtaactacacaakcaaattcagaataccctaatattgtaatgatggtgtgtaaatcacttaactttttagtataaaggttaaaagacaaaaattattaaaaaacaaaaataattacaataatttattgagagatatgccatataaaaagatgtaaactgtgtcatcaaaaattcaaatggagagtggggttaaagtgtagaagatttgttttttgcaatcagttgttatcagcttaaaataacctactgtaagacgtttttgtaagctttgttgtaatcacaaagcaaaacctgtaatagatacactaaaagtaaaaagcaaggaatcaaacatactactagagaaaatcatttaaccacaaaggaagacagtaacaacagaagaaatcatttacaaaataactagaaaacaactcaatgacagtagtaagtccttacctatcaataagtaccttgaatataaatggattaaattctcaaatcaaaagacatagagtggcggaatgaatttttttaaaaagacccata

SEQ ID NO: 371474 - DNA, 552 bp, Homo sapiens
aaagtctagaactcactggtaaaagtaactacacaagcaaattcagaataccctaatattgtaatgatggtgtgtaaatcacttaactttttagtataaaggttaaaagacaaaaattattaaaaaacaaaaataattacaataatttattgagagatatgccatataaaaagatgtaaactgtgtcatcaaaaattcaaatggagagtggggttaaagtgtagaagatttgttttttgcaatcagttgttatcagcttaaaataacctactgtaagacgtttttgtaagctttgttrtaatcacaaagcaaaacctgtaatagatacactaaaagtaaaaagcaaggaatcaaacatactactagagaaaatcatttaaccacaaaggaagacagtaacaacagaagaaatcatttacaaaataactagaaaacaactcaatgacagtagtaagtccttacctatcaataagtaccttgaatataaatggattaaattctcaaatcaaaagacatagagtggcggaatgaatttttttaaaaagacccata

SEQ ID NO: 371475 - DNA, 616 bp, Homo sapiens
tgatcagatgaattagttaattaattaragggtgaatgcttctttgcacagtgaaggcctgctgggctctgtcagcaccctctccactgtcttctggaggctgcctgatgcctcttgcagggaaacatggggctggaggaggaagcccatgtggtggtcctttgcttccaactccaattctgattgctgtctggtcactgagacaaagattgctcagagtggggaggagcttaaaggccaaaacaaaatccaggggtgcctggatgagctcagcctgtcacagaaaaggctcagggacagcatgtggagcagtagcaaaggaggaatctcttcatatggatattggctttatgacatcatcagtctctctgggcactgctttgacttggtgttccctggaatccccaaggagcttctgggatgagaaggcttatcaatgacttagaacattttatgggtttggctggctttggacaggaacgtgatcatatctgaggtttcctttttcatttgggatggcttgattcgttctgagatgtgaggtctagaatgaaacaagctgtgcctgaagggacaggagagaagggaggctggttggatattggagcaaagagac

SEQ ID NO: 371476 - DNA, 483 bp, Homo sapiens
atatggaagggggtcgagatggcttaagctgacacagggaaacgaggaggacaggatcttgtctgtgcagccaggcctcccgggaacctaggggaagaagagtcaccaggcgccagtgttgggagtgcagcatggccaagttgctgggaggcgaaagtgaaacgtgtttagggttaaaggaggccagaggactcagcagcagaagctgagcacacggcttcagtctagtgacttcacaactctctccacctccgcctcccccgggggtgcttctcttttctccccctttctctcttccaactggctaattatcactagacttccccattcaaattcctgggaaacatggccagggcctgtcatcagctttccttggtctttttacttgtggcacaatcctgtggctcagaatgcaaccaatcccrtgccaggagaaccctggggctcccaaccccagcagaggctgtagaggtgccacagatt

SEQ ID NO: 371477 - DNA, 518 bp, Homo sapiens
aacaataaccagatcatatacagcactaattgcaaagttgaatataatcttgacttgactttggcactgattttgatcttttattgaccggttaagactttcttcctatccttytattattaccatctaccagatgtagccttatgtgcacacttgaagttgaccggtaccttaaatttctccttgattttgatgaaaacctttggaccacttcacatgcacagcaagtgtagctctgatttgaacttgaacttgatttagaccttggcctttgaacttaaccttcatatcgctcctgactgaaattcaagcttgaaatttcctagaacttaccttaacctttaacttgacctagaccttgaaactgtgcttgaattttacttccattttcacctggacactaattcagatctacttctcatttaacatccctgtcactttaaggcccatattctcatgactttgaacttgaactctggctgcagctcagaagatacaaaagggatgagtaatgtaaa

SEQ ID NO: 371478 - DNA, 569 bp, Homo sapiens
taactgccggtcaccacttggaggtcatcagcaggaagggcacctttaacaatgtgcttgagaaatmtctgcacacagatcagtgttggggtgggcggggtgtgggtgcactgtgacaacaggagcagggtgtggactcaggctttataaaccagacttccagacttgggtggtataaatgggagggacagagacacacagcacctcattccacagaagtgctgcccgggtagagtaacactcagcagcaacatctctggacttcttgtggaattggttagacaacatggaagcaaagctgtaatcatggatttcattctttgggttattgagcttcatttgcaagtgatcaggtccatggttatacacatatattgcaaatttgagttgtaacacatgcctaccagaggacaaataagtatatgtcctgccaatacctggtaagaggtttcttcattgacaacacatatgtagggaaattcttacttgcaatggattaaaaacgtattttgtcttggaaacactttgcagagttttattctctaaaatgctacaggttttaagtaagt

SEQ ID NO: 371479 - DNA, 544 bp, Homo sapiens
tgctaaaaagctgtccctcttcaaaacacctagaggccagacaaatctcagtacaagcctttcacattgccttgctgggcttgcagtgaagtgagagaaatcttccagtggccaatgaggtgaggaaaggggaacccgcagtgctgggcaaatgaagaaactagggctcacctgggcacatgtagatggcaggaacttgaagctttgagataaattgctaggcagggtggatagagaccaaggattaggctcacaaaaggcaaatgtctggactaaaggactccccttctgacctaaacttgagacccgcccagggactacaccctcagcgtgaaaaggtgtggctgaaaatatcygcctacaggctggggtaagcaacaaagaaacctgtctccattgctgcttctagtcaggagagaaacagtcccccaggagttggtagccacagactagttctaagttttccatttataccaacaccagcatggctcggaaatcccaagacaagaaactaaagtggtcttagattggtgggacttcatga

SEQ ID NO: 371480 - DNA, 513 bp, Homo sapiens
gcttcttgccttgcctccatagcctcagctactgtctagcaccccattttccatggaaccagttctcattggctccaataacatcmtttcctcccttgccctttcaggtctaggggtggtaacagcttcccacaattgctagtccctaagttcaccactgtgtttggttcactcaactctgcccattcttcagtaaatatttccttagttaaactctctagtgtgtgccatctgcttcctgctggatcctcaatgatgctcagtcacttgaggattttctcctcttggctctcatacaaaacttacagttgggaccactcctctgtcattcagcatgtacgccttgatattgctgtgatccacttacatccagtattttcatggtttctaaccatgttgcgaactcctgtgggtcagggctatttaatacaacatttccactctcttcacatagtgttgtgctcaatcaatgtttgccaatgaaaattacaataaaatgctgcataagggact

SEQ ID NO: 371481 - DNA, 547 bp, Homo sapiens
attctgcccaccacacctgagcatgagtcaaatactgaaaaacacaaagccacatattctttctcattgtgaatgagttattcagccaaatgacaaaagatatgttgatgctactgtgtgctagatccccatggtaagagctgaagttacagcagcggtcaggagttgggggtttggtgatgttccctccttgcaacaaaaattcccattctggcatattttagctaaaggataaatgagaagtattccgattaagctttcttactacagtgtaaatgactggcctctagaagagatacttaccttcttttcaaaagaagcaccctaacccagggcctcttaaactttaatgggcakataaattgcctgggaatcttgtcaaattgagttttgatccagtaggattggcatgaggcctaagtctgctttttcacgaacttccagatgatgctaatgctacctgtccagggctgcacttctgtttgagttagggagcaagaccctaactcaaccagagctccaattgtaagccatagtcagtctgacc

SEQ ID NO: 371482 - DNA, 614 bp, Homo sapiens
catagtcagtctgaccctgccatcaatcaatctttatgatgggtttacctccttctaagaggtgacggtagtcaactagctttgcaaaacaccatactttgtcactgtgacaaaatacccccagcagagaggatacttcatctactaggaatgccctcsgtttcccacaaggatggttgctgaccaagacccacatccatccccacatatgggtgtgctgtatacaatccatgataggatagtcagtctcctgtttccccggccaggactcctaacctccaagactgatgccccccagacagtgtgactcagtggcccagtgtctgaattcatatctattgtcagaagtgtatttgattggggaaaatcaggactatattgggacagattacctgagctatttgaggagtaccttactagatcaagttataaaggctgacaagattcaatattatctccctactagtgttttgcatactagttccattagggctgagaaataatagatgagcagaagacagagcagaagcaatagaatctccataggtaagttgggttctctttatagcaacctcaaagggactctggccaaagaaactatcttagtaaagctc

SEQ ID NO: 371483 - DNA, 536 bp, Homo sapiens
atctgccttttccagttaacattgtagcttgtaagcatttgaggggaggatattataaaatccagccattttacagttgaggtgccatcaggcagaaatagcagcaatgacaggaactcctgggctggctcccgggaagtcaaatagtcctatcccacccatggtatggtgcacccatttatacaacctcatgaggcagttggcagtagttggctctgggaggaaggatcaagggagttgttgttttttaaaaatctctcaatttcttatatttttcaaaatttcataataaaccagtgtcactttcacagtcagaaaaaaaatattttaaagatgtttccttcctgctgccaagaaagcagcaaggcattagaatctgaatcaaggcagaagagcaagctacccaggctcatctcaccatgcttgaggctccccatctatggaatggggacagtcactctggacctccyagagtagagactgtaacactatctgtcacatatggagaaggtgatgtcactctaggacaaggtgaa

SEQ ID NO: 371484 - DNA, 560 bp, Homo sapiens
tgaacactacagggataactgagggtgaaaagccaatgcgcagggcaagggagccgatggaaattactaagtgaattcagttgggtatcaaggatggagggagcactatgatcagataccaagagtggagaagaagagcctggctggatatcagggtaggggatttccagtaaaccggcttagcagggctcttctctagaacagagccagaaggcaagtggagaagacagctcagaggagcctgacttgggtttggtcaaggaaggagtgtttgtcgccacccacgagggggctctygggggagcaggtctccatcaggtagggatatttttctgccctggaatggaggtcctagagatatcaggggaaatagctgcaggcatggggccagtctgaataggaatgaagagttcaaagagaaaaccagtgggaggcaggagcatctacagagagcaacccagattttcctcaatagaagggtttcacagaggcccttcctcgatgtgcatttaagatttcattgaattttttaaaaaacttctttgaatctgacaattcca

SEQ ID NO: 371485 - DNA, 568 bp, Homo sapiens
tgacagtgccaaaaagtaagggagtgcccaagagcgggtggggcatgtcaggaagcaggagccatctgagctagaaccatttcagcaacagaataaatatgggtgctggcttttaacctcaagaatatagtaactatctatgcatctatacatgtcataaatatctatctacatacatattacaatgaacttgagttcatgcttatttccaactctaatccagcatcacaggattcattctagcattgaggagatcgtttttaaaatgcacaagagtgctggaaaacaagaagaggtatctatgctgtaacagaaatgaaaaggaatccctgaasaatggaaagtgacaaattgggttgacgagagaattcataactgaaaacgacagaggaaaggcctattgcaaaaggcagaggtagtcctggggataatgcgagcagaagggagcctggagcagctgaaagggcatttgctgcagatacctctgcaggagcttcaaggagggttgacctttcccctgcctgcttggtttgtgccaagaatgagatgtggccacctggcctggctc

SEQ ID NO: 371486 - DNA, 574 bp, Homo sapiens
acactccagacactgacacatcggctacctcctgtcagatctcccttcaggaggtggctcttttttactctgtgtttccttgatgagtttcccacctagatccttgcagaatatagattggtgtctttaaactcggatcctccctaaattcccaattgcagctatgactaaaattccttgctaacttcatcccagccctgcctacaaaatacatctggatatatggtaatagtaataagaagaacagtaaaattttttgaagtgtttgctatttttcaggcacagttctaagctgttgacttatagcaattgtttaattttcaaaataataattttatgagataaaacatgttmttttcttaattttacttatgaggcaattgaagcatagaataacttgatcaattagttaattagtcaggaaacagcaagctagattttatctgcagttgttttgcttctagagtccacgctcttattcaaaaagtctcattaaaccatgtttgaagatagactttgaattttgcaacttgaaccactggcttccatcacaggatagggtactattactagt

SEQ ID NO: 371487 - DNA, 574 bp, Homo sapiens
acactccagacactgacacatcggctacctcctgtcagatctcccttcaggaggtggctcttttttactctgtgtttccttgatgagtttcccacctagatccttgcagaatatagattggtgtctttaaactcggatcctccctaaattcccaattgcagctatgactaaaattccttgctaacttcatcccagccctgcctacaaaatacatctggatatatggtaatagtaataagaagaacagtaaaattttttgaagtgtttgctatttttcaggcacagttctaagctgttgacttatagcaattgtttaattttcaaaataataattttatgagataaaacatgttcttttcttaattttacttatgaggcaattgaagcatagaataacttgatcaattagttaattagtcaggaaacagcaagctagattttatctgcagttgttttgcttctagagtccacgctcttattcaaaaagtctcattaaaccatgtttgaagatagactttgaattytgcaacttgaaccactggcttccatcacaggatagggtactattactagt

SEQ ID NO: 371488 - DNA, 461 bp, Homo sapiens
tttctccatgatgtgcttatttcacatgcatgcctgtatcaatacacctcaggtaccccataaatatacactaactatttacccacaaaaattttataaaaattgaaaattaaaaaataatgacaataaaaatactgtataccagatcacataataatgttttcattcaacaatcattggttggaatgatgaatatatcattctgtcctcaatattccaaccaaaaaatacaaaagtagatctaccccataatctgaagaattaggtaagattaagattatttgtctgttcaggaatatacyattggaaacaacaatatgacagaaccacgaagtatacactgccaaagagaaatttcatacatgttatttccctgttttaacaataaaaatatcatactttcatctttttattgacttaattattaaatagaaaagccactctgacagatcacattaaat

SEQ ID NO: 371489 - DNA, 542 bp, Homo sapiens
tgacagccctctttgtggttactctttagaagctactctttatatactcgctcgatgcatctctcagccatgaaaataaaccctaggatgcatgcttaaaaacgagaaagaatctatataggtcaaatggaaaccagacagagagcagaatgaaaaccaggctatgatgaaactctgtctttctgttctcttttggctttactttcatggtctttttatgaagagtatcagtgcatttgctgctgccagatgtttgttgtatggtaaatttgggggatcrtaagagagagtaaaagtgtccaagaaccaggggagaatctgcaataaatgttggacagtgaaatgtaaacattggtggtcaaggtagaaactagccacacaggttgctttacaaaaatgttttccagacttggcacaaagcccaatgtgagagaagaaaaaaagaaaagaagcaataaataaatcaggataaatagaattatttaactcttaaaaatgaaaaacaaagtagggatcagtgggacaatccccaggtcatatta

SEQ ID NO: 371490 - DNA, 551 bp, Homo sapiens
tttggtgtgtagtttgaaaattcaattattcttgggaacacttgatcagagagtacagaactaaagcaaaggtattaataatttggattcttaccttacttgcaagttagcctgccacactttaatacatgctgatagaagttatgaaatccttaggtcagagataaatgggtcagcctaagtggtagccagagtatcagcatttctgttttggccagtttcctaagccctagttcccacagggagatgggaagagggctagatgaaacctgctcaagtcatgaactgcttacaggagggaaggtgtgagcttcgaaaacctgaatattttataatgggcaagaagcatgcttcctgtttgcttcagataaagrccttatctctagtttccatggcagttcacaatgcaaatatccttgaaaagagtctggaattaaaggcagtcagtgcctctctggcaagatgacaagatatgcagaaacatgagattcatagagaaatgtctcccacttaaactgtaataatgatttggttttacaaagagtaagcca

SEQ ID NO: 371491 - DNA, 551 bp, Homo sapiens
tttggtgtgtagtttgaaaattcaattattcttgggaacacttgatcagagagtacagaactaaagcaaaggtattaataatttggattcttaccttacttgcaagttagcctgccacactttaatacatgctgatagaagttatgaaatccttaggtcagagataaatgggtcagcctaagtggtagccagagtatcagcatttctgttttggccagtttcctaagccctagttcccacagggagatgggaagagggctagatgaaacctgctcaagtcatgaactgcttacaggagggaaggtgtgagcttcgaaaacctgaatattttataatgggcaagaagcatgcttcctgtttgcttcagataaaggccttatctctagtttccatggcagttcacaatgcaaatatccttgaaaagartctggaattaaaggcagtcagtgcctctctggcaagatgacaagatatgcagaaacatgagattcatagagaaatgtctcccacttaaactgtaataatgatttggttttacaaagagtaagcca

SEQ ID NO: 371492 - DNA, 505 bp, Homo sapiens
gctgcagtttaatttaattagggagaagtgattcttacttgggtattggtatattaatgaccattcttaaaagctaccagggtcaagtaattctttgacaaaacatacctatttgtatttatcatatttgaacagagataacttggaaacactcaataagcagaatggtaaagaaatttcaaatttttaatatgaaatcaaacatttttcatttaagcgtgaacaccactgttgctaaacatactctatgggttgaattttcccagaaacacctggtaactctctttcctttcccttttgcctctttaagtaggtgttaatcatttgccagatctgtgttccagcctatctatggttcagagtcaatattcataatacatggcrgtggtggtggtgtgtgtgtgtatgtgcgcacgtgcatgtgtttgtgagtctttgttgattctactgagttgatgtttttttaacaatgtctttgtccagaatatgtacgtattagagttcc

SEQ ID NO: 371493 - DNA, 611 bp, Homo sapiens
ctccctttcaggatatcatcttcaagctggtgcctcagttgtgccatcaaattatattctctagctttatcaggccaayacttttgggtggtactgtatgtgataggacaacttggacattatggtcacaattccacaaatctttgctgtaacgtgtgcgtcttttattgatataatgttattaggatctcatgttgttggatcaaatatgctgaaagtctcaaataatggttcggtgagcagaaaaggcaaataaatccatatgcagaatatatattgaatctagtcaaaataaatctcttgacccctccagaactgaatttcaaaataccatcaataggctggttggtaccttgaggtatagtgtctatcaaggattcagcattggtctctgttgctggcagtttgggcattagacaatagcagtatctcctgacttggtgagtacatgcccatgacattggcctcatttgtagcttccatacctgccaccatgcatccattgtgctagcactagtcgtttctgcctctttaatgaagaatgctctctggtgagcattgaaatgagattgaaagattgtcacatttagtgctgattttaaattttttat

SEQ ID NO: 371494 - DNA, 491 bp, Homo sapiens
tttacgtcccaatgttttgctcccacttataagtaagaacatgcaatatttggttttctcttcctgtattatctcacttaggataatggcctctagctgcatctatgttcctgcagaggatatgatttctttcttttttatagctgcatagtattccacagtgtttatgtaccacattttatttatccaatttaccactgatggtcacctagattgattatgtgaacccctaaaatttgagagsggtcacagttaatttacaaaatgtattttgccaaggttgaggacatgtgcccatgataacctgaagaggtcctgatgacaggtgcctaaggtggtcagagcacagcttgggttttattcattttagggagacaggagacatcaatcaacttatgtaaaatgaacattggttcggtccagaaaggtgggacaatttgaagcaaaagcgggacaactcgaagtgggagggggcttccaggtcacagata

SEQ ID NO: 371495 - DNA, 557 bp, Homo sapiens
aaaaattcacagttagtttgaaagcaggaagaaaaagtagaaaattggacaaaaaaaagtaagagaaacagaaagtaaataggaaatggtagattttaattcaaatgtgtgtattgttacattgaatgtaataaacccaaataaaagttagagattgtcaaattgcattaaaaacaaaaccaactaaatcctgcctaygagaaatccactgtaagtataaaaacatacataagttaaaagtaaggtgatttctaaaataaaatattgaaaaactacgccatgcaatctattttaaaaagggaaatgaatacatcaatgtccaaaacaagttaattaaacttgtaaaagaacaaggataagtaacttgtttgagaagaaagataaggaggaatgttgcttaatgataaagggaccaattcatgaagaagacataaaaattctatacatgaatgaatgaatgagtcaaaaaagatcttaaaaatgcataaagtaagacaaatagaattgagagaatagagaaatacacaactaaagacactaatagttctcttccacta

SEQ ID NO: 371496 - DNA, 557 bp, Homo sapiens
aaaaattcacagttagtttgaaagcaggaagaaaaagtagaaaattggacaaaaaaaagtaagagaaacagaaagtaaataggaaatggtagattttaattcaaatgtgtgtattgttacattgaatgtaataaacccaaataaaagttagagattgtcaaattgcattaaaaacaaaaccaactaaatcctgcctatgagaaatccactgtaagtataaaaacatacataagttaaaagtaaggtgatttctaaaataaaatattgaaaaactacgccrtgcaatctattttaaaaagggaaatgaatacatcaatgtccaaaacaagttaattaaacttgtaaaagaacaaggataagtaacttgtttgagaagaaagataaggaggaatgttgcttaatgataaagggaccaattcatgaagaagacataaaaattctatacatgaatgaatgaatgagtcaaaaaagatcttaaaaatgcataaagtaagacaaatagaattgagagaatagagaaatacacaactaaagacactaatagttctcttccacta

SEQ ID NO: 371497 - DNA, 557 bp, Homo sapiens
aaaaattcacagttagtttgaaagcaggaagaaaaagtagaaaattggacaaaaaaaagtaagagaaacagaaagtaaataggaaatggtagattttaattcaaatgtgtgtattgttacattgaatgtaataaacccaaataaaagttagagattgtcaaattgcattaaaaacaaaaccaactaaatcctgcctatgagaaatccactgtaagtataaaaacatacataagttaaaagtaaggtgatttctaaaataaaatattgaaaaactacgccatgcaatctattttaaaaagkgaaatgaatacatcaatgtccaaaacaagttaattaaacttgtaaaagaacaaggataagtaacttgtttgagaagaaagataaggaggaatgttgcttaatgataaagggaccaattcatgaagaagacataaaaattctatacatgaatgaatgaatgagtcaaaaaagatcttaaaaatgcataaagtaagacaaatagaattgagagaatagagaaatacacaactaaagacactaatagttctcttccacta

SEQ ID NO: 371498 - DNA, 412 bp, Homo sapiens
gtaatcaaggccagaggctgatgcagaagaccacttgaggccaggagtttgagatcaacctagacaatatagcaagacttcgtctttaaacaaaatttaaaaattaatttaaattacattcctgtagtcatagctacacaggaggttgagggtggagaattgcttgagcccaagagcttgagactctggtgactataatcatgccactgcactccagtctggaaaaaaargtgaaaccctgtctcctaaaaaaaaaaaaaaaaaaaggaaagtaaagtaaccagtaagtgtagtattgacagatagataaatacaaaggtcaatgaaacaaaatagagattcaggaaataaagtcacacgtgtgggacaatttattttaataaaggtgtaaaggtagttcaataaaaaataa

SEQ ID NO: 371499 - DNA, 412 bp, Homo sapiens
gtaatcaaggccagaggctgatgcagaagaccacttgaggccaggagtttgagatcaacctagacaatatagcaagacttcgtctttaaacaaaatttaaaaattaatttaaattacattcctgtagtcatagctacacaggaggttgagggtggagaattgcttgagcccaagagcttgagactctggtgactataatcatgccactgcactccagtctggaaaaaaaagtgaaaccctgtctcctaaaaaaaaaaaaaaaaaaagkaaagtaaagtaaccagtaagtgtagtattgacagatagataaatacaaaggtcaatgaaacaaaatagagattcaggaaataaagtcacacgtgtgggacaatttattttaataaaggtgtaaaggtagttcaataaaaaataa

SEQ ID NO: 371500 - DNA, 633 bp, Homo sapiens
tgggaatttttcagggtgttaaacagcaccatgcaggggaggtcacataaaacttgaaaggcaattaatgccagtactggaatttctgagatgatagaaaccaggtggaaccgtagtgaactagaagttgatatattaaaagaaagatcttgccaatttagaagagaaaatggatataattcaaataaaaactggttttcttccaccttaaatgaaaatctgtatcttctcttacrgtttgtttctttgtatcttaccatctttcctctttagccatcactgagtgttagaatgaacggtttctgaaatttctttatcttctgactgcatggaatttttcacagtgcattgagctagaatggaaagtcataactaatgtattacactaacatttattaacctcctgttaattgttgttcccttaaggagctcagagtctagcacagaatataaacaaataattacaataaagagtggtaactgcaacagcagaagtctgtacaaggtacagatgtggtgtcaatgcatacctaatttttctgggctacagcaggcttgttgaacacttccagatggatgattattggacattaatttaagtttgtcaggaggataagtggtgaggagggcatt

SEQ ID NO: 371501 - DNA, 610 bp, Homo sapiens
cttggtatttgacatgttatcaagtatgaataggggagtagcaagggatatgaaaggggtcagaccaaaaagggattcattttatacctaggagtttagatttataaatgtaagaaattgggaaaaaatgaatttccttaagtgtaagataatcacgatcatataaatattgtttaaagatcactttagcagtagaatgggggttggctagaatataggaaatttaaaaacaatactgtttagctagcaatttaataacctcatcataaggtgatgaaatctagaaaagtgataataaaagtggcaacaggtggagagcaagaggcagttttgagactacttaggaagcgtattgtttgatgactatttagagatagatattgagcactggacttctggaatgactcctaggttttaacataacatattasatggtttgtgagtcatcatccaacacaagttatatagaaggaacacatctgggtggaagataagttcaaatttagaattctgaatttagagtgaccataggaaatagaggtagaagtgagaaaaggcagagagtggttgggattccctgtagtatatgggagccctacataattaataa

SEQ ID NO: 371502 - DNA, 610 bp, Homo sapiens
cttggtatttgacatgttatcaagtatgaataggggagtagcaagggatatgaaaggggtcagaccaaaaagggattcattttatacctaggagtttagatttataaatgtaagaaattgggaaaaaatgaatttccttaagtgtaagataatcacgatcatataaatattgtttaaagatcactttagcagtagaatgggggttggctagaatataggaaatttaaaaacaatactgtttagctagcaatttaataacctcatcataaggtgatgaaatctagaaaagtgataataaaagtggcaacaggtggagagcaagaggcagttttgagactacttaggaagcgtattgtttgatgactatttagagatagatattgagcactggacttctggaatgactcctaggttttaacataacatattagatggtttgtgagtcatcatccaacacaagttatatagaaggaacacawctgggtggaagataagttcaaatttagaattctgaatttagagtgaccataggaaatagaggtagaagtgagaaaaggcagagagtggttgggattccctgtagtatatgggagccctacataattaataa

SEQ ID NO: 371503 - DNA, 468 bp, Homo sapiens
gattaaaagcctcagctgtcccatgccataaatttaaaatagaattaatgttacttatattgtggaatacatttgcttccattatacaaatttatcaggcttygggggaataattttcttggcccaggtctctttttaaaagctgtccaaaggagcctgaaatcataccatctttttataaatttccctgtagcaagcagaagcattcaaaatcatttcatttgttcaaatggtgaggactctctaaagggacttagacctttactgcaatcaccagcacctgcaaaatttattctggcgctcagcacacacctgtgagccttcatccatccacatcagaaaaactatttaacactaggaaagaaggattataagcctcatcatgggatttgctgtcatatttccaaggcacacatgagtgaggtatccgcccacacattcaaggattctgatcgtctagttccaata

SEQ ID NO: 371504 - DNA, 468 bp, Homo sapiens
gattaaaagcctcagctgtcccatgccataaatttaaaatagaattaatgttacttatattgtggaatacatttgcttccattatacaaatttatcaggcttcgggggaataattttcttggcccaggtctctttttaaaagctgtccaaaggagcctgaaatcataccatctttttataaatttccctgtagcaagcagaagcattcaaaatcatttcatttgttcaaayggtgaggactctctaaagggacttagacctttactgcaatcaccagcacctgcaaaatttattctggcgctcagcacacacctgtgagccttcatccatccacatcagaaaaactatttaacactaggaaagaaggattataagcctcatcatgggatttgctgtcatatttccaaggcacacatgagtgaggtatccgcccacacattcaaggattctgatcgtctagttccaata

SEQ ID NO: 371505 - DNA, 468 bp, Homo sapiens
gattaaaagcctcagctgtcccatgccataaatttaaaatagaattaatgttacttatattgtggaatacatttgcttccattatacaaatttatcaggcttcgggggaataattttcttggcccaggtctctttttaaaagctgtccaaaggagcctgaaatcataccatctttttataaatttccctgtagcaagcagaagcattcaaaatcatttcatttgttcaaatggtgaggactctctaaagggacttagacctttactgcaatcaccagcacctgcaaaatttattctggcgctcagcacacacctgtgagccttcatccatccacatcagaaaaactatttaacactaggaaagaaggattataagcctcatcatgggatttgctgtcatatttccaaggcacacatgagtgaggtatccrcccacacattcaaggattctgatcgtctagttccaata

SEQ ID NO: 371506 - DNA, 583 bp, Homo sapiens
tactgcagtacatttctaaaagtattttatttgatattcttaggttttatagatatacaatcacacaatttaaaatgaacatatttgggtcttctccatttaaatattataaaattcaggtcttttctggtcattatattggctggtactctcagaacatcattaactcatggtggtcaagccagacgttcctaatttgttactgagtttaaggggaaggtatttcatgtttaatatatatagytctaaatatcatacaagaaaacaaaataatataatcatgagataaactctaagccctactattagttttgaaggtcatatattttagcatatttcaagtaattttttttttgctacatttaagtgggagaagtaattttggattactttttttatttacttgttcagagataggaagaaaatggtgaaattgctacttaaagcatgcttctgcttagctttagaaataatgacattctgctgaatggagcaataaaaacagaacctgcgcatgatcttgtatgctacaccagctgactaatccatctcctcagatggtttttcagagtccaaaaatgct

SEQ ID NO: 371507 - DNA, 583 bp, Homo sapiens
tactgcagtacatttctaaaagtattttatttgatattcttaggttttatagatatacaatcacacaatttaaaatgaacatatttgggtcttctccatttaaatattataaaattcaggtcttttctggtcattatattggctggtactctcagaacatcattaactcatggtggtcaagccagacgttcctaatttgttactgagtttaaggggaaggtatttcatgtttaatatatatagttctaaatatcatacaagaaaacaaaataatataatcatgagataaactctaagccctactattagttttgaaggtcatatattttagcatatttcaagtaattttttttttgctacatttaagtgggagaagtaattttggattactttttttatttacttgttcagagataggaagaaaatggtgaaattgctwcttaaagcatgcttctgcttagctttagaaataatgacattctgctgaatggagcaataaaaacagaacctgcgcatgatcttgtatgctacaccagctgactaatccatctcctcagatggtttttcagagtccaaaaatgct

SEQ ID NO: 371508 - DNA, 552 bp, Homo sapiens
ttttaaaccatctatcacactggctagctttcataaaaagcaattccattgctcaacagatatcagaaaagttattcaaaatcagtaataatcaaagaagtgcaaattaaaacaatataggcatccctcgggggtrttgtaggtttggttccagaacactacaataaagtgaatgctgcaggaaagttcctcagtgtatataaaggttacatttacagtatactgtagtctgagtttacaatggcattatgtctaaaacacaatgcacatgccgtgactaaaaataccttattgctaaaaagcgctaaggattatctgagacttcagtgagttgtaatctttttgctgctggagggtcttgccttgatgttggttgctgactgatcaaaaggctgaaggtcggggtggctgggacaatttcttacaataaggcaacaatgaagtttgccacattgcctgactctgctttcacaaaagatttctctgtagtaggcaatgctgtttgaaagcatcttacccacaacagaacttctttcaaaattagtcaatcct

SEQ ID NO: 371509 - DNA, 531 bp, Homo sapiens
caatctgctctttccctgatctctcaagaatacccatcagaaccaggctgaaggcatactaatatttatttttcttattattctagagacagggtcccactgtgttgcgtaggctggtgagctgtggtgtgctcacagctcactgcagcttcgacctcatgggctcaagtgatcttcccacttcaggcatacgccacaaccacaggcacatgccaccatgcccaactaatttttatgtttgtagagatggggtctcactatgttgcccaggcttgtatcaaacggctggcctcaggtgatcctcttgcctcagccctccaaagcrttgggattacaggtgtgagccacagtgcccagccttatcagttttatactcagtttattgtggatactggatgaggggcatattgtaattcttggttatatttggtatataatttctctgtagtataaaatcatacttttttgtaatagaatatatttagatccagagtagtatctacacaagacaatgttgcttacattaagtca

SEQ ID NO: 371510 - DNA, 488 bp, Homo sapiens
taagtatattctagaatctgatattggatttacaatataacaataaaattagtatgaactcatggagtttaacactccctgtatggggatttatttttctcaatgcctctacagctttagacaattttgagaaaggttgtcacttacattcaggacatttatcataattatttagaaccaaaaacagacacgcatgccaggctacacgagactatagagaagacatattgtctctcatcattgtaatgggttcatggattttgtaaggcaggggagaaagaaaatgtctacggttcattttaggtcactggggtatgggcactgtatgtcagcccatgctgactttttagaggrtatgctgagcagtgataggcttggggactatataagtgattggatatgggacaggaataggtactcttcaccctaagatgctatacaatacagttatcccctgatttctgacaaacactgaactgtcagaaatt

SEQ ID NO: 371511 - DNA, 577 bp, Homo sapiens
tgggtaaatgaacctatggaccttgaaacccagcaagatttgtgttcaaattattcctctgcttgggactgccttgtgtgactttgacaagtcatttaacctttctgaaccttgatgcttttatctgtataatgaagacaccttctgttttgaaaaactaatataacattaaatgagataatgttcaaacgtgtgcagtgcattgttaatcaagtagtaagcacacgataaatgtaatttcctttttccttgttatgtctatgttgaggagtaacccacatgctaatgcacaggctctttctgcctgaacaaatagccattagtatagtggaaacgttttttgtcatttcagcgcatttctgcattttatcataagtccttgaaaaaatgctattgtccactacatctttygttctatccaaagattctgccaagtacttcttaaatgtttaactgctatttaaggatagttttaaataggactgctcatgattatagtaatgtcagtaatatcccacaaatcttcaatgggatttatacaaagacgaccagggaactcgtgtttcagaacttgcat

SEQ ID NO: 371512 - DNA, 577 bp, Homo sapiens
tgggtaaatgaacctatggaccttgaaacccagcaagatttgtgttcaaattattcctctgcttgggactgccttgtgtgactttgacaagtcatttaacctttctgaaccttgatgcttttatctgtataatgaagacaccttctgttttgaaaaactaatataacattaaatgagataatgttcaaacgtgtgcagtgcattgttaatcaagtagtaagcacacgataaatgtaatttcctttttccttgttatgtctatgttgaggagtaacccacatgctaatgcacaggctctttctgcctgaacaaatagccattagtatagtggaaacgttttttgtcatttcagcgcatttctgcattttatcataagtccttgaaaaaatgctattgtccactacatcttttgttctatccaaagattctgccaagtacttcttaaatgtttaactgctatttaaggatagttttaaataggactgctcatgatkatagtaatgtcagtaatatcccacaaatcttcaatgggatttatacaaagacgaccagggaactcgtgtttcagaacttgcat

SEQ ID NO: 371513 - DNA, 543 bp, Homo sapiens
tttttaaaagttacaattacagtagaatagagcacgtgggtgtctgtgatgaattccacaagtcatgtgacatgtgctgatctatgcagagcatacggaaagcagatggaaaaatctcaggagttctgggaggctcaatgcatcagaagagatttcaaatgagaagatgagactaggagagaaacttggtccaaaatggttcagggaggcgctaagcggctgctgaagtaagaaagggactggagaggctatttgcagagaggaaagaatgtcttgcaaaaggacaagaaaaataaaaacaaagggggagatttatataacccaatcagaactgagattctttgtaaggaagaaaaattgttttgcagcaagtttatcattaatgcatatgccaagatcaagccagaatactaatrtgttcttaccccacagtaggattggtgaaaactcaatatgtatttttttctctcttttatgccaaggttagtggaaaggacaaagagtttcatgaagttattactgcttttcgagtccacttacttg

SEQ ID NO: 371514 - DNA, 543 bp, Homo sapiens
tttttaaaagttacaattacagtagaatagagcacgtgggtgtctgtgatgaattccacaagtcatgtgacatgtgctgatctatgcagagcatacggaaagcagatggaaaaatctcaggagttctgggaggctcaatgcatcagaagagatttcaaatgagaagatgagactaggagagaaacttggtccaaaatggttcagggaggcgctaagcggctgctgaagtaagaaagggactggagaggctatttgcagagaggaaagaatgtcttgcaaaaggacaagaaaaataaaaacaaagggggagatttatataacccaatcagaactgagattctttgtaaggaagaaaaattgttttgcagcaagtttatcattaatgcatatgccaagatcaagccagaatactaatatgttcttaccccacagtaggattggtgaaaactcaatrtgtatttttttctctcttttatgccaaggttagtggaaaggacaaagagtttcatgaagttattactgcttttcgagtccacttacttg

SEQ ID NO: 371515 - DNA, 606 bp, Homo sapiens
tttagaacagggcctggcacatagtaagtactctctctcatatatatgtatatatatacatatatgtgtatatatatatatatatgtagtattgtaatttttcagttcttaacttctcggagattgatgcatatttaagataaatacataattattaaaggaktagagagaggggctagacaactgaagatttgaagttttggaaggactttagaggtcacccagaatagccatttccatacccactgcatattagtgtatttcagtattattaatataaatgggaatacttcctgaaattttagatcctaggctccacatagaatccttttgggtaggaatccggattctgaatcttcattaattttcccaggaattttttggaagctagcagatcactttcctcagatgggctccaatttttatagatgagaaaacaggcacagagaggttgtattatttcaggatcagagaacttgggagtgatcaagtgggactagaagtcagctcttctcatgtctgggccacaggttgtggagggaattattggattgtatgaaaaggttagataagatgacttccaaagtaaatatacagtcagccagt

SEQ ID NO: 371516 - DNA, 584 bp, Homo sapiens
gttacagtcctctgaataaggaacccagaaatagactacacaaatacagtaacttattttttaataattttcagagaaatctaaataaaagaaatggaaaaaaaatctcttaccaatccataaaatctctcccttcacaaaggtagaagagaggccgggtgcagtggctcacacttgtaatctcagcacattgggaggccaaggtgggcagatcacttgaggcaggagtttgagaccagcctggccaacatggagaaatccgatctctactaaaaatacaaaaattaactaggtttggtggcgcatgccygtaaccccagctacttgggaagctgaggcatgagaataacttgaacccaggaggtggaggttgcagtgagctaagatcgtgccactgcactcatgcctgggcaacagagtgagtgagactccatctcaaatgaaacaaaacaaaaaacaaaggtagaagaaaaaaaaacaattttattattccataagcattaaactataatgtaaggagcatcacatgcaactggctaaggggattgtaaaaatggaaagaaatcacaccattttgtatagca

SEQ ID NO: 371517 - DNA, 634 bp, Homo sapiens
tgaagtacaaaatgggcatgatgggaggaaggtggggaaagcagcctagcatgatgtgggaggcgctgaggaaattacattgagctgggacctgaaggatcagaaagagttatatatatgggcaaaatgagtacaagagtaggagacagggagagcagaataagagcatccctggaggacacagaggttcaagaacctacagcaagaacataggatgtaggtggtaagtcaaaaccagacgagatcccaacaggccaaatgcatgcctacagaaaagctgtggggactgtgctagcaatgcaccgagcaccacttggtaagaaatgctgcaccccagcgtattgtcagcccctgaggagcatcagccatggtttgtaaacctggccaatgcactgatttacagccagcatcaacaccgtgatggatgctgtttttatttcagatgttcctggtgctctatttgacatggccttggggagcttagcaaagaaaagcatggctaagacgttttgamtgagaggacactgtcaaacaaaaaagagaagaaaggaaaaatagctgcaggagcagccatagctaaaccaaatgaatggcagtagaaaaaggcaattactgtgtggtcaggagaggacga

SEQ ID NO: 371518 - DNA, 634 bp, Homo sapiens
tgaagtacaaaatgggcatgatgggaggaaggtggggaaagcagcctagcatgatgtgggaggcgctgaggaaattacattgagctgggacctgaaggatcagaaagagttatatatatgggcaaaatgagtacaagagtaggagacagggagagcagaataagagcatccctggaggacacagaggttcaagaacctacagcaagaacataggatgtaggtggtaagtcaaaaccagacgagatcccaacaggccaaatgcatgcctacagaaaagctgtggggactgtgctagcaatgcaccgagcaccacttggtaagaaatgctgcaccccagcgtattgtcagcccctgaggagcatcagccatggtttgtaaacctggccaatgcactgatttacagccagcatcaacaccgtgatggatgctgtttttatttcagatgttcctggtgctctatttgacatggccttggggagcttagcaaagaaaagcatggctaagacgttttgactgagaggacactgtcraacaaaaaagagaagaaaggaaaaatagctgcaggagcagccatagctaaaccaaatgaatggcagtagaaaaaggcaattactgtgtggtcaggagaggacga

SEQ ID NO: 371519 - DNA, 612 bp, Homo sapiens
caaatctgccctgtataaaagtccagaagccagtaagtcaagctatattgaatccacaaaaattaattcaatagatcaaagtgcagagcagtatatagagtataattctatttagttaaaattttttcaaagtatatgtrtgtttttcttttaaaaacttgtgaaaattttcaaatatcacaaaatagacagaataatatactgaaccccctcatactttgagtgatgctgagattgactaatcagtgagttcaggtgttgtcagactgatccatcccacataaagttctacactcaatggtgttagcacccattgatgaacatggcctaggatccatttatttgtgactttctaagcccttcttcataactgaaattgttctataaggaaatttccttcattaacatttcattaacttcaaatacagtgcacacagggaaggcagaataaatgatggattattttacatttatcactttactgttttgagaataataaattggcaccctagcaactttcagtagtgaccaatgagggtttttaaaattttattgagtgtaattgcccatggagttttaaaatattttatgtattaattacagtcttacagt

SEQ ID NO: 371520 - DNA, 463 bp, Homo sapiens
ttcctgaacttccaggcattgcccacatcctgcctcccgatgatcttgcccacctcagtgaactrccaccccgcccctccagttgctcaggccaggaatctgcctcatccttcactttctttcagacaccctgcattcagcaaatcctcctagctctacctgtaaaatgtattgagaatctgccctcctcttcactaccttcacctctgtgacctaggtcccagccacttctaggatattgcaacagcttcctaaagggtcttcctgcctcaccactgtccctggagagtgcagtttccatccatcatccaaatgatccttttaaaattatgtctcttacatcttagatcaaaagttggcaatgattggtcatctcagagtaaaagctgaccaccttgctgtagccacccaggccccttattacctccccaacctcatctcctaccatgctcttcccgctcag

SEQ ID NO: 371521 - DNA, 463 bp, Homo sapiens
ttcctgaacttccaggcattgcccacatcctgcctcccgatgatcttgcccacctcagtgaactgccaccccgcccctccagttgctcaggccaggaatctgcctcatccttcactttctttcagacaccctgcattcagcaaatcctcctagctctacctgtaaaatgtattgagaatctgccctcctcttcactaccytcacctctgtgacctaggtcccagccacttctaggatattgcaacagcttcctaaagggtcttcctgcctcaccactgtccctggagagtgcagtttccatccatcatccaaatgatccttttaaaattatgtctcttacatcttagatcaaaagttggcaatgattggtcatctcagagtaaaagctgaccaccttgctgtagccacccaggccccttattacctccccaacctcatctcctaccatgctcttcccgctcag

SEQ ID NO: 371522 - DNA, 623 bp, Homo sapiens
gtctatgtctcatgccttgaggaaggtgaaagatcctcgagccattgtattgctgtctcaccacacacctggctggagctagacttctggggcttggctgaagttttgaaggaaccacctgaggtgactcaggtaagtagcaacaaggcagggaggagagaagcagaggcagcagaagggaagagaaggacaaaggcactcgtaataggctggagcaggcaatggttttcttcctcaagaaaacaatatacaccatgtctagattccttgccagactagcctataaaaattgcattaaacacataagccttatgagctataatactcstgaactgttagagttaccgaagtttctgtgaactagactgagtacctcctcacttagcattttcatagtcttattattaattactttattataaaaatatcaaagtatactgaagagtataaaataagtcttttcccttactctgtccccaaactgatccaacttctagagttttctgttgatagtttcttatatatcttgcagatattttctctatatacgtaactgtagtaggtataaagtccacaaacatcactcagaaagtgacatttgaagtgtcactggaggaggacag

SEQ ID NO: 371523 - DNA, 467 bp, Homo sapiens
gttatttctgggtatgcctttgaaggtgtttctgacagagattagcctgtgagtcagtggaccgagtaaggaagagccaccctcacccagtgtgagcgggcaccatccaatcaggttgagggcctggatagaaaraaaaggcagaggaaaagcatattcactgtttctgctggagctgggacactcttctcctgcccttggacatcagaactccaggttcactggcatttggactctgggacctgcaccatctgccctctgggttctcaggccttcagcctcagacagttacaccattggatcccctgattctgaggccttttgactcagaatgtgccacaccgccggcatccctgcttcccccgctggcagatggcatatcgtcggacttctcggccccataactgctcaagccaactcccatagcaaatcccctctcctgtatctgtataggaagtatagatggc

SEQ ID NO: 371524 - DNA, 545 bp, Homo sapiens
ggtgtcatgtggctcacggagttaatgagcagtgcatacttgatggagatgaacattcagggttgctctgtctttagggtctttcagaaacatagttcccctcagaagggggctgtgagtaacaggtgcatggcatgtatggaagagcagcagaaagagaagatamactcaagagggcaaattttctttttcactttatgtttttaaataatgtctaaattatgaacttgctttctgaaacacatacttagaaatttctcatgactctaaaacaaatgtgaatagcaaatataatatttgaagctggcctccaacacagagagtttcatttattaatagtatgccagtcagagctttggctctgagatattttgttcatgcataaaccatatatttgaattgacagtactattaatgatggaatgcagttatgtatattatggtaaaagagcaaagtgtgtatttttgaatccgattatatacaagacagattaaaaacagtacttttagaaaatgaatataacccttgatttcctgttcagtaa

SEQ ID NO: 371525 - DNA, 545 bp, Homo sapiens
ggtgtcatgtggctcacggagttaatgagcagtgcatacttgatggagatgaacattcagggttgctctgtctttagggtctttcagaaacatagttcccctcagaagggggctgtgagtaacaggtgcatggcatgtatggaagagcagcagaaagagaagatacactcaagagggcaaatttkctttttcactttatgtttttaaataatgtctaaattatgaacttgctttctgaaacacatacttagaaatttctcatgactctaaaacaaatgtgaatagcaaatataatatttgaagctggcctccaacacagagagtttcatttattaatagtatgccagtcagagctttggctctgagatattttgttcatgcataaaccatatatttgaattgacagtactattaatgatggaatgcagttatgtatattatggtaaaagagcaaagtgtgtatttttgaatccgattatatacaagacagattaaaaacagtacttttagaaaatgaatataacccttgatttcctgttcagtaa

SEQ ID NO: 371526 - DNA, 620 bp, Homo sapiens
ttgtcttaagctccgtgttcatcactgaagcaactgctgtggccagagtgatggaatacattgattggcaaagtccttagtcaaattcttcaaccctagacctatgggagaattagtctcacccaaatctcgtgtatttagagtgagagaaaggcagttcccctaaagagtatttgggtttctgttaccacaaaaaagggactgaatactgggaagcagaaacaacaaatgcccataacttctcttacatcacactttcctgttatacctcctacctcactctctcagtcctgctcatggtgtcaccctcctcaactggcctctgatgttggaattcctccgggttcaatttcaagccttcttccctcccatgtctatacttgcccccaaggcgatttcatccagtgcattgtgagaggagaagtttattgtagcccaaggcactttgagtcaaccttggctaaggttgtagttgaaattgtaggccatataatttaatgataaataatttaatgggaaatcgtgagaggaagaaagactgttgacacaagtgtmtttgagaatgtgaagcactgagctactccttatcgtttgctcaaaagataaggaacgcagttgag

SEQ ID NO: 371527 - DNA, 508 bp, Homo sapiens
gggtacaagtggttgttggctacatggatgaattgtatagtggtgaagtctgagattttagtgaccccatcacctgagtagtgtacaatgtacccaatatgtagttttttatccctccccctcccaccttccttctgagtttccaaagtcccttgtcactctgtatgcctttgtgtacccatagcttagctctcacttataagtgagagcgtacagtacttagttttccattcctgagttatttaacttaaaataatgcctccagctccatccaagttgctgcaaaagatattatttcrttcctttttatggcttagtagtattccatggtgtatatatatcacattttctttatccactcattggtcgatgggcacttaggttggttccatatctttgctgttatgaattgtgctgcaataaatacacatgtgcaggtatccttttgatatatttgctgcttttcctttgggtagatacccagtagtgggattgctggatcgaaagg

SEQ ID NO: 371528 - DNA, 642 bp, Homo sapiens
gtagttttttatccctccccctcccaccttccttctgagtttccaaagtcccttgtcactctgtatgcctttgtgtacccatagcttagctctcacttataagtgagagcgtacagtacttagttttccattcctgagttatttaacttaaaataatgcctccagctccatccaagttgctgcaaaagatattatttcattcctttttatggcttagtagtattccatggtgtatatatatcacattttctttatccactcattggtcgatgggcacttaggttggttccatatctttgctgttatgaattgtgctgcaataaatacacatgtgcaggtatccttttgatatatttgctgcttttcctttgggtagatacccagtagtgggattgctggatcgaaaggtaaacttacttttagttctttaggaaatctccatactgtttttcatagaggttgtactaatttacactcccactagcagcgtataagtgttcctttttaccacgtccatgcccacatctactattttttkactttttaataattttttgactttttactcttccaggagtaaagtggttttaatttacatttctctgatgaatagtgatgttgaacattttttcatgcatttgt

SEQ ID NO: 371529 - DNA, 599 bp, Homo sapiens
attgtttgcatatgttgtaaaagggattgagttcttgatttgattctcagcttggtcattgttggtgtatagcagtgatactgatttgtgtacatggattttctaacctgagactttactgaatttgtttatcaaatctaggagtcttttggaggagactttagggttttytaggtatacaatcatattatcagtgaacagcgatagtttgacttcctcttttccaatttggatgccctttatttccttctcttgcctaattgctctggttaggtcttccagtactatgttgaatacaaactgtgaaagtgggcatccttgtcttgttccagttcttaaggggaattctttcaacttttccccattccatatggtgttggctgtggatttgtcttatatgacttttattattttgaggtaagtcccttctatgcctagtttgttgagggtttttatcataaaggaatgctggaatttaatgaatgctttctctgcatctgttgagatgatcacatggttttggtttttaattctgtttatgtgatgtatcacatcacataatgtatacacattgacttgtgtatgttaaactatgcctg

SEQ ID NO: 371530 - DNA, 599 bp, Homo sapiens
attgtttgcatatgttgtaaaagggattgagttcttgatttgattctcagcttggtcattgttggtgtatagcagtgatactgatttgtgtacatggattttctaacctgagactttactgaatttgtttatcaaatctaggagtcttttggaggagactttagggttttctaggtatacaatcatattatcagtgaacagcgatagtttgacttcctcttttccaatttggatgccctttatttccttctcttgcctaattgctctggttaggtcttccagtactatgttgaatacaaackgtgaaagtgggcatccttgtcttgttccagttcttaaggggaattctttcaacttttccccattccatatggtgttggctgtggatttgtcttatatgacttttattattttgaggtaagtcccttctatgcctagtttgttgagggtttttatcataaaggaatgctggaatttaatgaatgctttctctgcatctgttgagatgatcacatggttttggtttttaattctgtttatgtgatgtatcacatcacataatgtatacacattgacttgtgtatgttaaactatgcctg

SEQ ID NO: 371531 - DNA, 564 bp, Homo sapiens
ctactaatgtgtttattttggcacagaatggtttaatttctagacctataggccaatgcttatttacttggtagagataacatatatactcttacatttcatagataatttaaaaagattttatttgaataaaaattatctaactctatagttggagtgaagtgatggattcaaaggatatcttaaacagaatcatgtagtttaacttatgtactagtcagggttctttagagggacagaactaataggatagatgtatatataaaggggattttattaaggagtattgactcacacaatactgaagtcccacaacaggctatctgcaagctgagaagcaaggacgccagtccaattcccaaagctgaagaccttggagkctgatgttgagggtgggaagcatccagcatgggagaaagacgtaggctgggaggctaagccagtctagtcttttcacattctgcctgtttttattctggctgtgctggcagctgattagattgtgcccactcagattgagggtgggtctgcctttcccagtccactgactcaaatgttaatctc

SEQ ID NO: 371532 - DNA, 564 bp, Homo sapiens
ctactaatgtgtttattttggcacagaatggtttaatttctagacctataggccaatgcttatttacttggtagagataacatatatactcttacatttcatagataatttaaaaagattttatttgaataaaaattatctaactctatagttggagtgaagtgatggattcaaaggatatcttaaacagaatcatgtagtttaacttatgtactagtcagggttctttagagggacagaactaataggatagatgtatatataaaggggattttattaaggagtattgactcacacaatactgaagtcccacaacaggctatctgcaagctgagaagcaaggacgccagtccaattcccaaagctgaagaccttggaggctgatgttgagggtgggaagcatccagcatgggagaaagacgtaggctgggaggctaagccagtctagtcttttcacrttctgcctgtttttattctggctgtgctggcagctgattagattgtgcccactcagattgagggtgggtctgcctttcccagtccactgactcaaatgttaatctc

SEQ ID NO: 371533 - DNA, 558 bp, Homo sapiens
aattgcttatatgcttaaatacctaggctttttctctttttttggtggaggggtaaataattttggattcttttcacaatttttatagctactttatttttattatgctaactataaccttttaaaagttagaatttgcytcatttaaaacttcaccccagtgtggagttttttgttgtttcttttttttttttttaaataaagaatgaggttagaaatatttagactacaaatcccaaaccacaactcctactttcaacctgcagataaaattgtcaaagaacttacctgaagggacctaatgattcaggtcatctacatctaatacatatgaatatttaaatttattgaactccaacaatgtgctagacactgttctaaggtccttacatgtgttcacttatttaatcttcacaaaacactatgagagggattttcttattatctcattttatagatggggccccaagatcacccagctcattcagtggtggtgctgggctttgaccacagctgaccttctaaaccattagacttataccactcagcatataaagg

SEQ ID NO: 371534 - DNA, 558 bp, Homo sapiens
aattgcttatatgcttaaatacctaggctttttctctttttttggtggaggggtaaataattttggattcttttcacaatttttatagctactttatttttattatgctaactataaccttttaaaagttagaatttgcctcatttaaaacttcaccccagtgtggagttttttgttgtttcttttttttttttttaaataaagaatgaggttagaaatatttagactacaaatcccaaaccacaactcctactttcaacctgcagataaaattgtcaaagaacttacctgaagggacctaatgattcaggtcatctacatctaatacatatgaatatttaaatttattgaactccaacaatgtgctagacactgttctaaggtccttacatgtgttcacttatttaatyttcacaaaacactatgagagggattttcttattatctcattttatagatggggccccaagatcacccagctcattcagtggtggtgctgggctttgaccacagctgaccttctaaaccattagacttataccactcagcatataaagg

SEQ ID NO: 371535 - DNA, 591 bp, Homo sapiens
ggctccacttggggtaccttagggggcaagttcattcctccccagtgggtgagagaccattctggggcctactccagagccaacccaactcatggggtagaagatgagccctgtgagagaagggattcctcttactttgcatcttaattctatcagcacattgggcatatgatgtgtaataaacatggggtgaaattccgaattctgtttaataaatttattttcctcagaggccccatgggctattaatccaaggaaagccaatgctatgcttgatcttagcaaaagtgatgaaaagcagctatattataagaaataattaggcttgagttgagggattataaaataaatggacatgtggaatcttaatttccttcctgagccttcagaaaagttgagatgcagattctgcaactggaatttaaaaagaattcaaggtcatttaactcttcctcttgctagaacttcatgtaaccatctcaggcagacagcaacatctcctrttaaagaaactctcaggagagtctgtagatagggttccttgtcacctcatcagagataactgcaaaaacatccattaaccataggcca

SEQ ID NO: 371536 - DNA, 492 bp, Homo sapiens
gatatttaccatgtttaaaaattaaaatattcatttaagaataatatcagtaaactcactacttattaacacaaataacacagtcttaatgaaaatattacgtttttcaaaacaaaaaaattggaagagtggcgttgttttactttttttttgcaaatctctttaatgtctggcttgataracagctggattctcagattagtttctgcattcagtttgttgtgatctcagatatcacactgactctggaaagctccactgtatacttgtaaaaaaaaaagtgactacaaaaagcaaatcacgtctcagtattagtatgaaaatacttgtgaccttacagcttcctgtgatgaagacttgaatcatattacttcacctaatttctaacgaagaaagaaagagtgctgtgatctgatagtttggggaaactggcaggcagagtcacagattggaagccatagtctagaattagagccttggttctgccaatta

SEQ ID NO: 371537 - DNA, 605 bp, Homo sapiens
taaaaagataaataaaaacactctcggtcctactgctctaccgaataatcactctatgcatgcttatctacttaatgatagacttttcttcattttttaagagaaaaatcttgaatgctgcctatatgatttcctgagggacaaaacagtatggacttattcatagcaacttgaatttgtgagcctgtggaaccaactcatgctttcttattccattacctattttcacctcttctgatttactggcttccacttctgtctgcgtgcagagcatctgagttgaaatgtccagtggatggttggaactatggttcagctatcaggggaggggccagtgtgatgataataatgtgggaggtgtcatcttttaaaggccattsttttcgcaaatagttatttttattttattttattattatttttgagacgtagtctcactctgtcatcctggctagagtgcagtggcgtgatctcagctcactgcaacctttgcctcccaggttcaagtgattctcctgtctccaccttccgagtagctgggattacaggtgcgcatcaccatgcccggctaatttttgcatttttagtagagatgggatttcgcc

SEQ ID NO: 371538 - DNA, 575 bp, Homo sapiens
catttgttggccttcaaatgccactttggggttgtttgctgtgtccatgtctgggtcttatttacaaactcaaatgttarcaggaaaaatccactgcacatattcttaaatcaaataaaagaaagccaccagaaaaatcctaatggcactgtggctctgagaaaatagaagttatatgagttgaggaaacctgaagaacaaagctttcttctcttagatctaaacccccagaaagtctgacaatagcatattccacctagaaataaaaacatttatctttttatggttgagaacaaaaaagagacgcagactgctgaaaagagcttttctcccccaccaaatggtcatgccacataggttaatctgcccgttgtttatgagtactagctttgtgcaagggcttccctggacaatgtgagatatgaaggtgattcatggcaatccaggttggccctgaagcagttttgttcctccagaacctggtcatagtgagaagaaggtgttggcagtagaccttatctctgcacaagaaaagcaggacaatgtaatttggtggctttggaattaatggaatg

SEQ ID NO: 371539 - DNA, 502 bp, Homo sapiens
aataacatttcagtaattgaacatcattaatgtgtttaccattttaaaatacatagaaacaaccttaaaaagcaaaccagacctaatatttaatcagataaaatgtctaataagtattaatacctatctttaaattagagaatgaggaaaacrtatgactttaaaattatctgaaactaaaaacaagattatttttacgagacgccttgggcaaatgaaccttggcaacaaagatatcaaatcagctcttttaaataaattattttctctagtggccagcaacctgaactatgacggcttctagcacaaaattcaaaggttgcttttcctcccagaaagtaacgctgtcccctctgtacttgccaaatcaagcttctggactgtgtttatttgactattaaactgccaattattcatcaggttttctagtttgcggtttctccaaagcactttgcttcttgcccacttcgaacaacctgctcattagcagtaactgtgtaca

SEQ ID NO: 371540 - DNA, 626 bp, Homo sapiens
ttccaaattacagtggacccagctggtccatggacctgctttgcagttattccccaggttctgaatgtataattgaaatagacacacttagcaactggaagaattcctatgggatgagggccactggaacttcccttttctaccaaggtagtaaatctggggaatttcagagactaataccaccgtaacagtcttgaaagaagcaaagatggtacctatcacacactcatttaactcaccaatttaacctatgcagacattcatggattatagagaatgactgtggattatcgcagtcttaggtagtggcaactgcagctactgacctacatgtagtatctttgctagagcaagcaaacatggctatgggcacatgacatgtaactaatgccttttgcgtcatactaatttgcaaagacccccagaagtagtttgtttgtaccttacaggggaaatagtcttccttcagggctatatcaattctgctgctctctgccatgtataatctgcagagaccttgattgtctttaygctacattgacaacattatgctgatgggctctaatgagcaggatggagcaagtacttaacatcttagtaagacatataaaagacaaacccaacta

SEQ ID NO: 371541 - DNA, 626 bp, Homo sapiens
ttccaaattacagtggacccagctggtccatggacctgctttgcagttattccccaggttctgaatgtataattgaaatagacacacttagcaactggaagaattcctatgggatgagggccactggaacttcccttttctaccaaggtagtaaatctggggaatttcagagactaataccaccgtaacagtcttgaaagaagcaaagatggtacctatcacacactcatttaactcaccaatttaacctatgcagacattcatggattatagagaatgactgtggattatcgcagtcttaggtagtggcaactgcagctactgacctacatgtagtatctttgctagagcaagcaaacatggctatgggcacatgacatgtaactaatgccttttgcgtcatactaatttgcaaagacccccagaagtagtttgtttgtaccttacaggggaaatagtcttccttcagggctatatcaattctgctgctctctgccatgtataatctgcagagaccttgattgtctttatgctacattgacaacattaygctgatgggctctaatgagcaggatggagcaagtacttaacatcttagtaagacatataaaagacaaacccaacta

SEQ ID NO: 371542 - DNA, 532 bp, Homo sapiens
aagaaaggaataagcaggtacatagcatgcatatgtctatgtgataagacccttgacaagctggactaagctgtgaggtacatatgaggccaggtggtctgcattatctgacattcaagctccttgggcttttgaagagtggttaacttgccartgaggtcacagagattctcattaagattgcggactccatgtatttttaaaataattctgctgtttacctaaacagctatttattggaggatattgtttagaagttggtgtaaaatatacttaatgaatatgcttatatctctgtgggtaagcatgttatttgttgatataatttggctgtgtcccaacccaaatctcaccttgaattgtaataatctccacgtgtcaagggaagggccaggtggagataattgaatcatgggggcagtttcccccatactgttctcatggtagtgaataagtctcacgagatctgatggctttataaatgggagatcccctgcacaagctttcttgcctgcctgccgccaggtaagac

SEQ ID NO: 371543 - DNA, 532 bp, Homo sapiens
aagaaaggaataagcaggtacatagcatgcatatgtctatgtgataagacccttgacaagctggactaagctgtgaggtacatatgaggccaggtggtctgcattatctgacattcaagctccttgggcttttgaagagtggttaacttgccagtgaggtcacagagattctcattaagattgcggactccatgtatttttaaaataattctgctgtttacctaaacagctatttattggaggatattgtttagaagttggygtaaaatatacttaatgaatatgcttatatctctgtgggtaagcatgttatttgttgatataatttggctgtgtcccaacccaaatctcaccttgaattgtaataatctccacgtgtcaagggaagggccaggtggagataattgaatcatgggggcagtttcccccatactgttctcatggtagtgaataagtctcacgagatctgatggctttataaatgggagatcccctgcacaagctttcttgcctgcctgccgccaggtaagac

SEQ ID NO: 371544 - DNA, 612 bp, Homo sapiens
tgcattaggtactgctcatcaccttcttccttccaattatcacaatatcctcctttcctctagtctatctccctctcaaaggtgagctcctcttcccactrcttaagcatcaagcagtccccaggattctggcttcaggccttgttttgattgcttcacatgatatccacacatgatatgatgtggatgacatcatgcacctgttgggtaccaactgtcgtatctatcattatatcccagtagactttaccctgaaccctagatttgaaaatccagccaactgatggtggtcccaaaggccttcaaacacagatgaggactgggctcagcatctatattctatattgccccctcttcttcttcctctattctgcatctaattcaacagcatcacttttcactcagttgcctagaaaggacaccaaacgggttcttactgcctgttctttcttttacccttacattcaatgaagtaccagcttctggaaattttgcctcccatgtctttaatttcttctctcctctgcgttattcaggacttcagccattcttatctggactacttttaattggacactttgattctggttagacccatttttcaaacagtta

SEQ ID NO: 371545 - DNA, 612 bp, Homo sapiens
tgcattaggtactgctcatcaccttcttccttccaattatcacaatatcctcctttcctctagtctatctccctctcaaaggtgagctcctcttcccactgcttaagcatcaagcagtccccaggrttctggcttcaggccttgttttgattgcttcacatgatatccacacatgatatgatgtggatgacatcatgcacctgttgggtaccaactgtcgtatctatcattatatcccagtagactttaccctgaaccctagatttgaaaatccagccaactgatggtggtcccaaaggccttcaaacacagatgaggactgggctcagcatctatattctatattgccccctcttcttcttcctctattctgcatctaattcaacagcatcacttttcactcagttgcctagaaaggacaccaaacgggttcttactgcctgttctttcttttacccttacattcaatgaagtaccagcttctggaaattttgcctcccatgtctttaatttcttctctcctctgcgttattcaggacttcagccattcttatctggactacttttaattggacactttgattctggttagacccatttttcaaacagtta

SEQ ID NO: 371546 - DNA, 612 bp, Homo sapiens
tgcattaggtactgctcatcaccttcttccttccaattatcacaatatcctcctttcctctagtctatctccctctcaaaggtgagctcctcttcccactgcttaagcatcaagcagtccccaggattctggcttcaggccttgttttgattgcttcacatgatatccacacatgatatgatgtggatgacatcatgcacctgttgggtaccaactgtcgtatctatcattatatcccagtagactttacyctgaaccctagatttgaaaatccagccaactgatggtggtcccaaaggccttcaaacacagatgaggactgggctcagcatctatattctatattgccccctcttcttcttcctctattctgcatctaattcaacagcatcacttttcactcagttgcctagaaaggacaccaaacgggttcttactgcctgttctttcttttacccttacattcaatgaagtaccagcttctggaaattttgcctcccatgtctttaatttcttctctcctctgcgttattcaggacttcagccattcttatctggactacttttaattggacactttgattctggttagacccatttttcaaacagtta

SEQ ID NO: 371547 - DNA, 612 bp, Homo sapiens
tgcattaggtactgctcatcaccttcttccttccaattatcacaatatcctcctttcctctagtctatctccctctcaaaggtgagctcctcttcccactgcttaagcatcaagcagtccccaggattctggcttcaggccttgttttgattgcttcacatgatatccacacatgatatgatgtggatgacatcatgcacctgttgggtaccaactgtcgtatctatcattatatcccagtagactttaccctgaaccctagatttgaaaatccagccaactgatggtggtcccaaaggccttcaaacacagatgaggactgggctcagcatctatattctatattgccccctcttcttcttcctcyattctgcatctaattcaacagcatcacttttcactcagttgcctagaaaggacaccaaacgggttcttactgcctgttctttcttttacccttacattcaatgaagtaccagcttctggaaattttgcctcccatgtctttaatttcttctctcctctgcgttattcaggacttcagccattcttatctggactacttttaattggacactttgattctggttagacccatttttcaaacagtta

SEQ ID NO: 371548 - DNA, 671 bp, Homo sapiens
ttagttctttattcaaaacactgttttaagcacttttatgtgccaagtacggggaggtaaataaattagtatgaaaagtatcatattatcatcataatagcattttagtttagtgcttactatgtatcagatgcggctttattatttcattcatttattatgatgatgagatactaatgggataacttaggaagttactatttttcttccagattttatagacgagcaaactgatgctcgaaaagaccaataattggtcaaaatttttatgaggcaaaatggcagacttcaggcttttcatctgtatgttattttagcctcccaataatttaccataccatagccaactctttaataatcagagaaatgtaaactaaaacatcagtgaatctcattttatacatattacatggcaaaaattaaaaagctgggtaatccaagccttagtagaatgcggggctgtcaaaggcttgtgaactgtgatgggagcatgagctggtgcagctttgctatacagyagtctgctattacttactcacatcaagtatacacatgtactgtgacccagcaagcctactcttgggaatctatccaaagaaatcctcatgcatggccttaaggcagagtttctcaacctcagcactactgacatttagaccaaataattcttt

SEQ ID NO: 371549 - DNA, 626 bp, Homo sapiens
ctttattatttcattcatttattatgatgatgagatactaatgggataacttaggaagttactatttttcttccagattttatagacgagcaaactgatgctcgaaaagaccaataattggtcaaaatttttatgaggcaaaatggcagacttcaggcttttcatctgtatgttattttagcctcccaataatttaccataccatagccaactctttaataatcagagaaatgtaaactaaaacatcagtgaatctcattttatacatattacatggcaaaaattaaaaagctgggtaatccaagccttagtagaatgcggggctgtcaaaggcttgtgaactgtgatgggagcatgagctggtgcagctttgctatacagcagtctgctattacttactcacatcaagtatacacatgtactgtgacccagcaagcctactcttgggaatctatccraagaaatcctcatgcatggccttaaggcagagtttctcaacctcagcactactgacatttagaccaaataattctttgttgtagaaaggctgtcctgtgcatggcaggatggtccacagcacccctggactctaccaactagatgccaggagtgtcctcctccagttg

SEQ ID NO: 371550 - DNA, 549 bp, Homo sapiens
attctgccattctgtatcttttaagtggattatttaagccatttacattcaatgttaatattaagatgtgaggtactattctattcatcatactagttgttacctagatactttgttttttttcattgtgttattgttttatagactttatgagttgtatgctttcagaaggttctattttggtgtatatctagcttttgtgtcaagatttagaactttttttgcatttcttgtagttctggtttggtaattacaaatttcctcaacatttgtttctctgaaaaagacttttatttcttcttcattagtgaagctttcctggatacaacagtcttagccgagaattattctgtttaaggaggctacagataggacccaatcccatctagcttgtaaggtttctgctgaagtctgatgttagtctgataggtttatctttataggtyacctgatgcttttatctcacagttctttgaattctttccttcatgttgactttaggtaacctgatgattatgtgccttggtagttatctttttgtaatgaatt

SEQ ID NO: 371551 - DNA, 570 bp, Homo sapiens
cagtcacatcaaaggaataggggccaagaataggtcatcaactctgccaaggtatccagagtctaacatagccaacatggcaaagtaggccactaacatcaaggtgaccagcagcatagccacaggcaataaggagacatgcccaacaatataggggttaagaggagtgcagcagcaccctgtgaatatcagcagaaaggcagttctgtgaagtctaaccaagtcgtaacatagaacagggaaagacagtagctgaaacagacagactacagaacagtaggytcttttcacactgctatattccatacactaagcacttttgcttgattttctttaagttttaaaattcaaacatttgtgttgcagattgggttccctaggaggaataagacttctaaaacaacaatttctacccaggaagtttactgtgggcaggggctcttgggatcatccctatgggaacagatggaagcaacattgagcagagagagaaactggtctgtgataagtcacatcaaaatcctcagccattccatggggagctctagagctgcgatgcccctacagagt

SEQ ID NO: 371552 - DNA, 579 bp, Homo sapiens
aaaactgcttttgctacacttggactaacaaaggatcaaagaccctaagtgtcttatccacacatcaataagcttcagctgactgaaggagaggagtccagtccatctcccgtgggtcccacctaacctctatttgtaaccagacagggaacctcctggcttgggcccatagcacagacccttcatacttggctgattacactgagcaattgctgacctgcatctctctggagtgaaacccccaggagacaagcaaaagacccttggccacaaccacygctaaggtcccttccactgctgcctccgacttggggaaggaacataaaccctgagatcgccccagagctgcactgggcaacccaagagtgccaagccataatctacatccagtattcaagtggaagaagaactcacacttttgcagcattgagagggagcacggttgcaacttggaagaaatatagaagaaccatgattaaggaagagccctaccgactgaccactacacctaagcaccacctactggcttacatcccaaagcttcaacaccaaaactacctcactaacatacccccatga

SEQ ID NO: 371553 - DNA, 603 bp, Homo sapiens
gtttttgaatgacaaaatccagaaacaaaaaatacacaccaatattactagactctatttccacaagtgttcaaacccctctcccccatctcgtttggagaagtgctggcaatagacctaagggaactccagttacaagagggctctcctttaatatgtagatggcataatgatagtaagtaaaacctgaaaaagctcaaataaaaatactataaccactttaaatttcctggctgagagaggctatgaggtatgccaaaaaagagtgaatttctcagccctccgtaaagtctataggatttaaattaacaggagacagaaggaggcartagcaagggttagccatccaaccaccaaaagacaattattagggttgttaggaatggctggattttgctgtatatggattcctcatttcaggttgatggcaaaactcctatatagtgccctaaaagaaaccaaccatgagcctgtagtatggactaacaaatgccaaaaagccttttgaatgatttttttttaatttttgacagctctggctttagtactgccatatttttaaaagccattagatctgtttgtacatgaaagacaaaaaatagg

SEQ ID NO: 371554 - DNA, 532 bp, Homo sapiens
tccattataatgaactttatattactgtgtctttgttttcatttgtttgttttttgacacagggtcttgctctattacccaggctgtagtgcagtggcaccatcatagctcmctgcagcctctaactcctgggctcaagtgatcctcccacctaagcctcctgagtacagtcatatgccaccatgcctggctaatattttttcaattttttgtagagatgggggggtctcgctttgttgcccaggctggtctcaaactcttggcttcaagcaatcctcccacctcagcttcccaaaatgctgggattataggtgtgagccactgcacccaggccttattgtgtatgtttgtaattttctactgcataagcattattacttttaatacaagaaaaatgtaacttttaacattaaaaagagaagaggaaataattcaagctcaaggtagagcaacatagagcgagaagcatctcaaagacaggaacgagatgtctgaggggtcttaaatatctgccttcaaatggtatttaagc

SEQ ID NO: 371555 - DNA, 533 bp, Homo sapiens
taagttttcttctagtagaatgcctctttttaaraaaactttaaatattagtttattcattattctatttcctaaccatctgatattatttaattatacttctcttgaaccactctccacactgaggaggtggcttgagtgggatcctggaatttggtgtgtgaaatccatgtgtgctctcccgttgctgcatagcttaggtgggggcatgatccagatagacctggttctcctcttgagtgcttcagaaggcagccttaaggtggcctctcctaggaagatagcattgataggcagaccagaagtgaaattgtcctgataaaggcacccgtatttcactgggagctggcagttggcagggtgtgttgttgtggggcaggaaggagttattccagatagaggggtcatttgcaagttgtagagagaaatgaggggccttagcttaggggccatatgtggagtcagtgggggccaccatatgtctttgctcctgcaaagaaaaggtgatatggccattatggccaaacaggccc

SEQ ID NO: 371556 - DNA, 533 bp, Homo sapiens
taagttttcttctagtagaatgcctctttttaagaaaactttaaatattagtttattcattattctatttcctaaccatctgatattatttaattatacttctcttgaaccactctccacactgaggaggtggcttgagtgggatcctggaatttggtgtgtgaaatccatgtgtgctctcccgttgctgcatagcttaggtgggggcatgatccagatagacctggttctcctcttgagtgcttcagaaggcagccttaaggtggcctctcctaggaagatagcattgataggcagaccagaagtgaaattgtcctgataaaggcacccgtatttcactgggagctggcagttggcagggtgtgttgttgtggggcaggaaggagttattccagatagaggggtyatttgcaagttgtagagagaaatgaggggccttagcttaggggccatatgtggagtcagtgggggccaccatatgtctttgctcctgcaaagaaaaggtgatatggccattatggccaaacaggccc

SEQ ID NO: 371557 - DNA, 606 bp, Homo sapiens
tcggttcagtaacatgtagaatgtctttccttcttctttgctcgatatctcctagttgtctctcaattttattccaatatacattaacaaaaaattatagaagtacaaccagttgaaggagtgaaagggagatgaagaaagggacacagaaattggcccatgaaggaaagaaacacataggtttgcaattagacgaagtcagaggagctcaaagaggaattgttgtttttataacacaggacaaatgagcatttttaaagtttagtgggaagaggtcaggagaataggtgaggctgcaaatagaggagagtagggggagctgatgggatggggtctgtgaggaggctggatgggatgagacagraagcacagggacgagcctcacatgggtagggaaacatctcttccatagggactgtagggaccagtgattaatggaggcaggcacaggtggttttgctctgtggggtgggaggacgttgagggagctcctatctgatggcctctgtttcacaatgagatagaaggaaaggctgcctgatggaattgtgaaggaagctggtgaggaaagagttcaagagagaatggaattctgaaatgaccaca

SEQ ID NO: 371558 - DNA, 586 bp, Homo sapiens
tataattttgagtccttcaacttttcatagtcgttttggcaattctagttcttttgcttaccatacaaatttwggaataatcttgtcaatatctgtcaaaaaaccttgctggaatatctactgggatagtgctgtatctatatatcaaattaggaagaattgatatcttaacaattcagtctttgagttcataatgtagtatatttttctacttatttaaatcttttttcgtttcttttattggtgatttgtagcatttggcatatagtacctgttcatattttattagattaattccaaagtatttcaattttttgtgatatggtaatttatatttttattaatttgaagattcaaatgttcattgctaatatatagaaatatgattgacttttacatgtattcacttttgtatggcttggctgtgtccccacccaaatctcatcttgaattcccatgtgctgggggagagactgcatgggaggtaattcaatcacgtgggcaagtctttcctgtgctgttcttgtgatagtgagtgagactcacgagatctgatggttttacaaagagcagttcccgggcataa

SEQ ID NO: 371559 - DNA, 586 bp, Homo sapiens
tataattttgagtccttcaacttttcatagtcgttttggcaattctagttcttttgcttaccatacaaattttggaataatcttgtcaatatctgtcaaaaaaccttgctggaatatctactgggatagtgctgtatctatatatcaaattaggaagaattgatatcttaacaattcagtctttgagttcataatgtagtatatttttctacttatttaaatcttttttcgtttcttttattggtgatttgtagcatttggcatatagtacctgttcatattttattagattaattccaaagtatttcaattttttgtgatatggtaatttatatttttattaatttgaagattcaaatgttcattgctaatatatagaaatatgattgacttttacatgtattcacttttgtatggcttggctgtgtccccacccaaatctcatcttgaattcccatgtgctgggggagagactgcatgggaggtaattcaatcacrtgggcaagtctttcctgtgctgttcttgtgatagtgagtgagactcacgagatctgatggttttacaaagagcagttcccgggcataa

SEQ ID NO: 371560 - DNA, 586 bp, Homo sapiens
tataattttgagtccttcaacttttcatagtcgttttggcaattctagttcttttgcttaccatacaaattttggaataatcttgtcaatatctgtcaaaaaaccttgctggaatatctactgggatagtgctgtatctatatatcaaattaggaagaattgatatcttaacaattcagtctttgagttcataatgtagtatatttttctacttatttaaatcttttttcgtttcttttattggtgatttgtagcatttggcatatagtacctgttcatattttattagattaattccaaagtatttcaattttttgtgatatggtaatttatatttttattaatttgaagattcaaatgttcattgctaatatatagaaatatgattgacttttacatgtattcacttttgtatggcttggctgtgtccccacccaaatctcatcttgaattcccatgtgctgggggagagactgcatgggaggtaattcaatcacgygggcaagtctttcctgtgctgttcttgtgatagtgagtgagactcacgagatctgatggttttacaaagagcagttcccgggcataa

SEQ ID NO: 371561 - DNA, 323 bp, Homo sapiens
taattctgattttcttctgttttttatttctcagtcaacatttttatctagacatactgaggcaactaataatgactggatatactctacctccaaataccttgtctgatttctgctgtgttgagcattggagattgtagtgtttgtatagatataagaagagggaaaataataaagtagaagaatgaaagaatatgacagtttgtgattctggctttgactaatatagtcggaagacagtcatatattttgctgattattttattcactgkgtctcagagttggtgacacatagtaaagaacagtcaaagccttttcctccc

SEQ ID NO: 371562 - DNA, 555 bp, Homo sapiens
ggcttgcaccctgtgaagcagcaacctgagtatctgggcccctttgagccaagacaggagctagagcagatggaatgcagggagtgttttcctaaggttgtacagggcagtgggagctgttcttctctctaggcctcaaagactgtgatgggggctgcctcaaagtttctaaatgcattagaggccttttccccattgtttttgctattaacatttggttcctcttatgcaaatttctccaacctgcttgaattcctccccagaaaatgggttttycttttctaactcatggataggctgcaaattttccaaacgtttattctctgtttttctttgaaatttaagttccggttttgctcaagaatatgagcataggctgctagaagcagccaggccacatcttgaactctttgctactcagaaatttcttcttccagataccctaaataatcactctcaagttcagagtttcacagatccctagggcaggggcacaatgctgccagtctgtttgctaaagcatagcaagagtgacctttacttcagttcctaaca

SEQ ID NO: 371563 - DNA, 478 bp, Homo sapiens
tatctttaggagttttgaggaagtagaatactaatagaaataagagataatcacttgaaatgttagttgaagttaagttccatttctcttggctatataaagcatatttgacaacaagagastacctcaagttaaaaatagtgtggtagagaaagaaatcacaaaccctgtgttcaagccctggatcagttaaggctgactttgagccgagggttgtgaactggataatctccaccgtctcttgcagtgttcaaactctgtcgtggtcccagtaagcataaaaaatgccaaccacagcctactctttgagttcagtagtttcattagtaaataggcttactcatcagtgaatgctcaatctcatttgaaaggtgtataatatatatattttttaaaacaatgatatcccaagcctccacaaccagaccacagcagacattggcaccaatatgtttatctggaagaaaaagtaacagaa

SEQ ID NO: 371564 - DNA, 520 bp, Homo sapiens
ggccacatttgccagacatggaattcctgaaaggattatctctgacaatgagccacagttgtcctcaaaggaatttccacattttgccaaaacatggaattttgaatactgcacagttagtccacattaccacagagctaggcagtttgcattgggacagtggtgaaaaactaaagaaataaaactccaaaacacaytggaccaagctgagactaatgataaaggtccctgcctcagactatttggagcaaggaatgcattgtgggcaacttccaattaccttccccagttattgagtcagcatctcccatggaatgtgagggcctatggtagtgagtctactcctcacacaaatattgtaaaagtgaataaaaccaaatacaataaacaactcacaccaccaggccctggcctaacccctcagcctgtgagaaatcctctcccttggaaattagggttaatgccaaatactgaaataggaggtattcttgctggtgtttgtttatgtttaagatgacac

SEQ ID NO: 371565 - DNA, 597 bp, Homo sapiens
acagatctaatctgcattttaagttcaggttctcagttgtcttctaacctgagaccactgatattagattcctatttttaatctttctttgccttatttttgcatcaaaatactttttagtttattatttgcctaatataagtttgaacacccgattatgtagaagaagagaaatgtttctgcttattggtgaatgacacttcagatttatgccctaaaagaatgtcagctctaagatatatgagaatatacatgtctttaatggtataaacatattgttgaaaggctatagcaatcttcactctgtaaccacttgtaattattgttattggatgagatgtgtggaatgtgatgtttcagggaaatcatatttaaaattgaattagtaagaagtaggattttggtcttatgaagaaaaaactgttgtcrtggctcaacaactcagagtgagtgtaataaatcctactttaaaagaagacaagttgcaaattatccttccatccagggacctggatttttttttaatgataggttatcatgaatgaacagtacttgggggcatgctattccattgtgttgagtcatttttttggatga

SEQ ID NO: 371566 - DNA, 557 bp, Homo sapiens
taaataagtgtgaggtaacatatatgttaattagctgtatttagaaattatataataaatatatatttctaaatattctgttctrtgcaagaaatacataatttttgtcaatttaaaaatttattaattaaagagaatcttggcatataaacttttgaacaagcaatacatctgtaaccaaacatacatctgcttcttcttagtttgtctgctttttttttttttttttgagacagagtcttgctctgtcgcccaggctggagggcagtggcacaatctcgactcactgccacttccgcctccaggattcaggattcaagcaattctctgcctcagcctcctgaatagctgggattacaggaacccaccaccatgcctggctgatttttgtatttgtagtagagagggggtttcaccaggctggccagtctggtcttgaactcctgacctcatgatccaccctcctcagcctcccaaagtgctgggattacaggcctgagccactgcgcccagcagtttgtctgcttttaatgcatgagtctgtatacaccccatcc

SEQ ID NO: 371567 - DNA, 557 bp, Homo sapiens
taaataagtgtgaggtaacatatatgttaattagctgtatttagaaattatataataaatatatatttctaaatattctgttctatgcaagaaatacataatttttgtcaatttaaaaatttattaattaaagagaatcttggcatataaacttttgaacaagcaatrcatctgtaaccaaacatacatctgcttcttcttagtttgtctgctttttttttttttttttgagacagagtcttgctctgtcgcccaggctggagggcagtggcacaatctcgactcactgccacttccgcctccaggattcaggattcaagcaattctctgcctcagcctcctgaatagctgggattacaggaacccaccaccatgcctggctgatttttgtatttgtagtagagagggggtttcaccaggctggccagtctggtcttgaactcctgacctcatgatccaccctcctcagcctcccaaagtgctgggattacaggcctgagccactgcgcccagcagtttgtctgcttttaatgcatgagtctgtatacaccccatcc

SEQ ID NO: 371568 - DNA, 557 bp, Homo sapiens
taaataagtgtgaggtaacatatatgttaattagctgtatttagaaattatataataaatatatatttctaaatattctgttctatgcaagaaatacataatttttgtcaatttaaaaatttattaattaaagagaatcttggcatataaacttttgaacaagcaatacatctgtaaccaaacatacatctgcttcttcttagtttgtctgctttttttttttttttttgagacagagtcttgctctgtcgcccaggctggagggcagtggcacaatctcgactcactgccacttccgyctccaggattcaggattcaagcaattctctgcctcagcctcctgaatagctgggattacaggaacccaccaccatgcctggctgatttttgtatttgtagtagagagggggtttcaccaggctggccagtctggtcttgaactcctgacctcatgatccaccctcctcagcctcccaaagtgctgggattacaggcctgagccactgcgcccagcagtttgtctgcttttaatgcatgagtctgtatacaccccatcc

SEQ ID NO: 371569 - DNA, 371 bp, Homo sapiens
acacctgccactgtcctttccctcaatttctccgcaacataaggctttgtataggtaatgccctttactgaaaagtagggraaaatataatacaggaataaaaaaacttaaatatggatgctacatatgactgtccctagattccaaagaaaatgtgaagtgaaaaaatgatatcttgtataggagtccctttgttgacactcctcagccctaagctttgcttctctatcccaatgtccaacctctattcttcatcatctggagaatacactccacttccttctcaaataacatatggcttgactttcaggagtacatttctcaagtcctaaattattccttctggacaaacattatggaaaagaaatcaa

SEQ ID NO: 371570 - DNA, 519 bp, Homo sapiens
caataagtttttactgcttatatttcattaccagtttacaatgcatattatgcactgacctgcatacccaaaatcaatgtataaggtacaaaagctgaatgaaatttgagcaggatgtaggcaaaagtccttccatttttcaaatgtgttttctaacttcagggcaataaccttttctatgtatagtttttttaagtgtagtttttgaagacagtttcaatatgtcattttgttttctttcttaaactgtactgttattcaaaaattaaagtgggcacagaaagttaaagttttagattgaaaagattttttaaggcaaatgcactgtttaagaaaaaaatgtttaatatataatactatttatcactgataatatctatawgcataaaacaataaatatttatggaatagataaatggatagatggaaagatgaatggatgatggaaagacgcataaaaacagtggccagaaaggtaaaaaatagagttatcaattaacattaattttcttgaaaaaa

SEQ ID NO: 371571 - DNA, 603 bp, Homo sapiens
ggtaagacactgaagttttcatcgcttttcacttactgaatatgaggctgtctcatggcattaagacatgacagggcgtgttttagcactccattaatacacaactcaggcacactcaaatatcttcaaccactaaatgagatattaattaaccaataaaacataacctagggcagttggagggctattacattttttgtgtgtgtcttaaactccagaatcagataaaaaaaaaaaaaaaaggaaatgaagataaatacaaagcactattaaatttgtaaaaattaatggtatactaaagagttagattccataggctatatttgtcttcatctatttacaaatgttaacttcaaacacacgtgagggtactttccctgttttttaaaaattgaggtgaaattttaataaaatggaattaagcattttaaaggayacaattcagtggtattcagtacattcacaatgttgagaagtcaccacctgtatctagttccaaaatattttcatcaccccaaaagaaaaccctgtacccattaagcagttgctcctaattgtctacttcctccagcccttggaatctctaatatctcttctgtcttt

SEQ ID NO: 371572 - DNA, 583 bp, Homo sapiens
gctgcccctttccccaggtgctctgtcccagggagatgggagttttatctataagcccctaactggggctgctgggaaggcagtttttttttttttaagagatggagtcttactctattttccaggctgaagtgtgtggtacaatcatagctcattgtagccttgaactcctggrctcaagtgatcctcccacctcagcctcctgagtagttgggactgcaggtgcgcagcactacattcggctgatttttaaatttttatttttgtagagacaaagctcttgctttcttgcccaggctggcctcaaactcctggactcaagccatcttcctacctctgcctcccaaagtgctgggattacaggcatgggccaccatacctaggctaaaggcattttttaaaaatgtgaatacctgggccccactccaagccaattaaatcctaagtgggtggagaactgcagctataagcaaagcaaattgtgtgggtgccacagagtagatttagcctctgagatgggtggaagggaatgggctttctcagaccatgatgaggtcttgtgagtgatgagatgcccaaagct

SEQ ID NO: 371573 - DNA, 517 bp, Homo sapiens
agcggaaatttttttttctttgagaccgagtctcgctctgtcgtcagactggagtgcagtggcgcgatctcggctcactgcaacctccgcctcccgggttcaagcgattctcctcctcagactcccragtagctgggattacaggcgcccgccaccatgcccaactaatttttttaataattttagtagagaccagggtttcaccatattggctaggctgacctcgaactcctgacctcaggtgatccactcaccttggcctcccaaagtgctgggattacaggcgtcagccaccacgcctggcccaaaaattgtttcttatgcttgatctagtctgttgttagagtcttgattgtatttttcatttaattcattggattcttcagttctaagttttctgtgtggttcttttttatatctctgttaaattcctcattcaaattatgaattttcttgatttcattgaattgtgtaactgtatgctcttgaattccactgtttccttaagattattatt

SEQ ID NO: 371574 - DNA, 570 bp, Homo sapiens
agaactggcagctgtgctcttcatgggcagggcgtgtgtcatattctgtacttattttgtgacctccacaaataagtatctagtgttcagcatctaatggctgcagaataaataatgaatgaatgaagcgatcctgagtggmgaggagagtggcacgtgcaaatattttccaagttacctgccaggccaggccagactgggacaaatggacgtatccagagggcacttgggtggttgggaaagagttaaaatgaggaaagatgtttcaggagaaagaagaaatgccagttcctgagggggtattgtgcccttgtcctcctctcttggggaggagaaggctcccgagaagacagagctgacagtcaattaggaactgagggttcacagcccagcttcttcaccaccagcccaagtctaaagaaactcacaaatctgctagtgagtcaccacctccctctcctctgagcaactgtaagatacctagtagtagccctgccctatcctggaattagccagaacgtcctcatgtagcctaccaagaccgcttctggccctgtaatcaccagtgtg

SEQ ID NO: 371575 - DNA, 540 bp, Homo sapiens
ggaaggcattattgtgttttgtaaagtgagaaggacatgagatttgagaaaggccaggggaggaataatatgttttgtccccaaacaaatatcatgttgaactgcaatctccattgttggaggaggcacttggtgggaagtgatcgaatcatgggggcacacttcccccttgctgttcttgtaatagagttctcacaagatcttgttatttgaaagtgtgtagcacttmtcccttttcacactctctctcctgctgtccatgtgaagatgtgcctgcttccctttcaccttccaccattattgcaagtttactgaggcctccccagacatgcaggactgtgagtgaagtaaactcattttcttcataaattacccagtcccaggtagttctttatagtcacatgagaacagactaatagatttgtctattatcttcatatgagagatatgagtggcttacacagcacaattacggtttttgagtattctgaatttatctgtgaatttactattaccagtaaattttataccttcagatta

SEQ ID NO: 371576 - DNA, 530 bp, Homo sapiens
tatccgggacccatggcttagccaaattgacacaaaaattaaccatcacaagtctgctgttgaaacatttctgttgtggtccctgtgacctttaatctgcctgattgcatcaggagaagtttataatctctgccagccactctgaggtagktggtggcagaacaaggttaacatcaagaaggtagtggctattgtcctggatgggacttcaactatttgtcttctgactatgcagttaggatgagatgcattcatgatgtgccatcaacagcttgcccagcagatgctgagtcacgtgtgatgaagacagacaggtctgggataaagaaatattacttgaatctactgagataaaatttcaaataattgagtaatgggactgattttcaaataagtgcatttctccctgaaattttactcaaggaagtaaatagagtttgtgtggcttggttagtttggcatttatggcattgcttctgctttaatagttacttagagatagtcatttagaagttatactaagtttacat

SEQ ID NO: 371577 - DNA, 616 bp, Homo sapiens
tatgcaggctgtgagaataaaaacatgatgtttcgcaatgtgctggtggttaaagaggattagatttagttgaggaatttagctttcatctttatgtagtttggatatttgtccccacccccaaatctcatgttgaaatgtaatccccagtgytggaggtggggcctggtgggaggtgattggatcatgggggtggatttctcaggaatggtttggcaccatccaactggggctgtccttgtaatagtgagtgagttctcatgacaactggatgtttaaagtatgtggcacttccctttgcgctctctctcttgctcctgctttcaccgtgtgagatgcctgttccctcttcatcttttgccataagtaaaagcttcctcaggcctcctcagaagccgagcagatgatggcaccatgcatcctgtacagcctgcagaaccaggagccaagtaaatttattttctttataaatcactgagtatcaggtattcctttatagcaactcaagaacagactaacacacattctgtggtagataatagaaccacactataaagttcttactttgcatattggtcacaactcatagctaattctggtctgacatagagatagg

SEQ ID NO: 371578 - DNA, 616 bp, Homo sapiens
tatgcaggctgtgagaataaaaacatgatgtttcgcaatgtgctggtggttaaagaggattagatttagttgaggaatttagctttcatctttatgtagtttggatatttgtccccacccccaaatctcatgttgaaatgtaatccccagtgttggaggtggggcctggtgggaggtgattggatcatgggggtggatttctcaggaatggtttggcaccatccaactggggctgtccttgtaatagtgagtgagttctcatgacaactggatgtttaaagtatgtggcacttccctttgcgctctctctcttgctcctgctttcaccgtgtgagatgcctgttccctcttcatcttttgccataagtaaaagcttcctcaggcctcctcagaagccgagcagatgayggcaccatgcatcctgtacagcctgcagaaccaggagccaagtaaatttattttctttataaatcactgagtatcaggtattcctttatagcaactcaagaacagactaacacacattctgtggtagataatagaaccacactataaagttcttactttgcatattggtcacaactcatagctaattctggtctgacatagagatagg

SEQ ID NO: 371579 - DNA, 535 bp, Homo sapiens
aacctaaagaactgagatttaaaatgcaggagacaaatatcaagtccagtaattttatcagtaccttccctcctgagactagatatttttggcaagttttggcagagccatccctttaaatttgtttactgctttgcttatgctttacaattaaaggttcacctttgaaatcagaaaaaataaatatatgtagatctagaatttgtttctagttttgcaaaatttaaagtttacggtaatgtatgagagttccaaaaaaggcagtattgttgaagtcaagagctcaccactctgagtcaagtgatctgggttccaattccakgtatagttactaaaacactttgtgatagtccttcaaaaaaatgtatcgcaataggcaattatatctctatttttatattatttaatttatctttccataactaaggagtaggcttcatgaaagcaggtataggtctttcttgattaacctgtatcctaagcaaagagcaagcacttgttgaccaaatggatgttacctgtgtgacactaacaa

SEQ ID NO: 371580 - DNA, 398 bp, Homo sapiens
gcataggaaaacattgcttggcttgaaatcagaaacttggttttaatacaaggtttttctacttacctgctatttgatttgaggacagttacttcatctttctgaatctcagtttacctaattatagaatagtaataataatttctttcttatcatatagggttgcaataatgatttaaagagaaacattataaaatctgcttagtagaagatacatcatatataaatttgagttacaatttgcatttaagatttttaactttaattgaaggctcactttgcataaatctgtaagaaagagaattctatgatatccttaggcattttaatgagcaatcttactgagcccactrctgccactgggctagctgaggttgtgattccattgggtactggcc

SEQ ID NO: 371581 - DNA, 563 bp, Homo sapiens
atggtggcacatggctgtagtccctgctactcaggaggctgaagtaagaggactgattgagaccaggaggttgaggctacagtgagctgtgattgcaccactgcactcctgcctgggtgacagagtaagacctcatctcaaaaagaaaataaaagaagtataattttttaaaggaattgagagaaggcaytttacttttgtctgctcattgcagcaaatccatcagctgtgactatttggaatatggaacagcattttagccacatgttaaagaaagacagttctactttggcatttacttatataaagtcgttccttgctgaaaagtacatgtgatacatgtggcacagagtaggtcttatacaaatgttagctcccttgccttttcttacattcatctcatctgcccagtaaaggtcattagtgagagctaagatgctaaacctctaaggatgctgaagatgatgatgtggaacaagattttaaaagaggcacaggagttatattaactaactcaaagtcacatagcaagtcactgcttttgaagaaaacaccaaccctct

SEQ ID NO: 371582 - DNA, 563 bp, Homo sapiens
atggtggcacatggctgtagtccctgctactcaggaggctgaagtaagaggactgattgagaccaggaggttgaggctacagtgagctgtgattgcaccactgcactcctgcctgggtgacagagtaagacctcatctcaaaaagaaaataaaagaagtataattttttaaaggaattgagagaaggcactttacttttgtctgctcrttgcagcaaatccatcagctgtgactatttggaatatggaacagcattttagccacatgttaaagaaagacagttctactttggcatttacttatataaagtcgttccttgctgaaaagtacatgtgatacatgtggcacagagtaggtcttatacaaatgttagctcccttgccttttcttacattcatctcatctgcccagtaaaggtcattagtgagagctaagatgctaaacctctaaggatgctgaagatgatgatgtggaacaagattttaaaagaggcacaggagttatattaactaactcaaagtcacatagcaagtcactgcttttgaagaaaacaccaaccctct

SEQ ID NO: 371583 - DNA, 613 bp, Homo sapiens
aagtgacagaaattagttgtttgaaccctgacctatgtgtccccaaacccaagcttctgcaacaaccaactttgcttcatatttgaattgctatggaataactgaaatactcttatcagttttatagagaaggagagactataactagtccaattccattgattttcacctcaagaaagctcatgcatgtggcacttaattaacataaatgctttcaaaactacaaagcacggtgtgaatttattaggtcttcttagtcttctagacaacttttggtgattctggctgtctattcttttactctccatccctgacagcagcatccaggagtacatgaagaatctaggaactgtgcaaggacagagtccatttctctgcaagagagaagagcatcttatatcctctaactctgaagaaaaggtgctggacatacggaagattctttctaaagacaccagttttacctagtgcacatatttttttttgtccctaactctattwtgcaaattgtttgttgcctcctagttaataactgtgctgcatacagaaaaaagtggcccaactttcaaatcctggttctgcaaactaaaataggtcaggcatttagagcctc

SEQ ID NO: 371584 - DNA, 584 bp, Homo sapiens
tatctgtgcagcaacaggatcaatccctgctccacttctgtgaggataatgcacatatttctggagtatctacagtcccatttcctgggcttcacaaaagttattgaattggtgctattggggacagaggaagaatttgaccttggttaaaaaccttctrgtttcagagtatcaatatctacatttgatttttttttaaagcaaagtattcgggtataaattgtgactgatattaagatatacttctaaaattccaatatgctacagtttctagaataaatagttggataatagataatgaatgaaaaatatcttaccagctttgttatgctatctcccacagtgcacaggtggaataaattcacaggaaacatggaaggagaaggaagcagaagggcttaaaatttaaagattgtttactcacaagtatttcttttagcagaattcatgccaagtgaagagtgagtttaagtcgaccaaaagtcatataactgatgtgatataattgcatagcatacatagtgagaatgaaggtattcagggaaattattcaggagtgccacaaataaaataaataaataaat

SEQ ID NO: 371585 - DNA, 572 bp, Homo sapiens
tgtctccaaattggctgcttcacccccttgagtttaaatacaacctctgaggaaaggcataaaatgaaaaaaaaaaaaaaaaagaaaaagaaaaagaaaaaaaagaactcttgccctgaagcacagaatgagttttccagcaaaataaaacaacaaaaaaacatttccttccttcagggtagaaaaactggcaatacttttgtggcttttatctcgtcacctctgttcctctttgacactttatgttttgaccccttgaggttaggagttaaaaaacctacccgctcctcctccagccacaccacccctcaccctggcatttatgaaaagcttgctgttcaagactttagtctctgctcctgatttgaagatcatattttaaaattcagaagccaaaaatttgagtgtttattttctaaattgagctcagtctgttcctgaaacaatgcgtttcagcctagaagtctacttgtctactattgctatgaaaactggtataaaaaaaaaaaaaaggaactactgactatgaaarccatcgatttcaatttccaaactttattatgctacataaa

SEQ ID NO: 371586 - DNA, 574 bp, Homo sapiens
atcttttttctctttctcctatttttttaaatctcttctatctcaatatgcatcttttctgtcttttgtatgtttctcccttatgcatgcttttccttctttttctgtttcctgcctcttttcattctccttgccttattccttttccatcttttaacttctctcttcacttcttttctttccatttttcyctttcacttttttccattgtttcttcttaaattgacttagagtggaagctataaacagatttatacattcagaatttattggataaagttttataatgtgtattcacaattttgaatatgagttgaaagctaagttagttgaatgctttatgcttctccttataaactaaccaaataggttttattttcaatgttgtcttcaactaatcttccatctcctgtcatctaatagaataaataataacatttggtgatttgggaaaaacttttctacagaaatgaatatggatacatagctctttggtagtgaaaaaggtcttcaaaggcatttttttcaagaaaatattcattttgtataaacataacgcaaaatattaactatt

SEQ ID NO: 371587 - DNA, 420 bp, Homo sapiens
gcataatacctttaatagattctccctctccacgtctattttctgatcttttgtttgcttttaataatgaacactckagtagatatatccttctttctttgtgatttcacttgacttagcatgagtgcatatcttaataaaattagacttcctatgggcctcatttaactccaaatattcttgatatttttaacaataggataagtgcatctcaaaacgttcataagtattgcacctttaagagacattcagaattattctcaaaggctgtagaaacacgccagtatattaagtaccacatagagaatattaatttagtcaatggattgcatgccaaaaatgaggaagagaactgaaaaaatattaaaaagtgagatgtgaaaattaggaacagaaggaaaaaataaatacataaaacaa

SEQ ID NO: 371588 - DNA, 533 bp, Homo sapiens
tttaacaaaagtgatgcaagttaaggcatttcaatgattcaaacaccctcagtacaaattagaacaacaatcctctttcaggaaaattaagagtgatttccttctctgagtttgagttttattttatttttaaagagcatcaagaagggtaaagtgccaggaaaattagaggtatagacagccagaaagagatatcctatccttcaattccctattaaatatgacgctaagcaatgtgaatctgctagtrgtagtatttcttccagttttggcttgatttgggatttgttccttgtcttgccaattctgagcagaggctcatggttctctcccattaactgggtataaaacgcagagaaatgcttggactttgcagatgttgggatcccttaaagacactgagagattataagggcgaaactgtagacttacataattctatcccttttttataagctggttatttcttgaaaggggtattaagagatttatttgcttaaaaccaaaattcacagtttgtaattcctttgcat

SEQ ID NO: 371589 - DNA, 577 bp, Homo sapiens
tgggttgggggatgtagggggaagtttttccaagcttggacatgatgcatgtgttaaggagaaagggaccatgagtcaattaacagagccttggaagaygagactaccccaaagacatgcaacccttccctctctgtcttagtttaaggacaagtagaggtttttgtggccaggcacaagccgtgaaattggtcatttgggtcagagaaacatggcaatgtactgaagagctagagacacccaggaagaaatgtaaaatgtaaaattctgtgaccagaaaattaacttctgatgtagttctttctatagcatcctacctctcactagtttgcccagtaaaatgagcacacaagaaaaaaaaaaaaaatctgggcacataagcaacaaaactccatgaaaaaaaagacatgtgaatgtcaataaataacacctaatgaaacagcatgaatagaacacacaactttagaatagacagaattatcctcaaagtgatgaagaagaaatttaatacacttcccaaaacacaaaaacagctaagaataaatttggcaagtactaaaatttgttaaaataaata

SEQ ID NO: 371590 - DNA, 540 bp, Homo sapiens
gttgtaaaaacatggcgccaacatcagttcmgcttctagtgaggccctcaggaagcttacaatcatggtggaaagccaaggtgggagctgatgtattacatggagagagatggagcaagagaaagcaagggaggaggtgccacactcttttaaacaaccagatctcgtgtgcacttggagcgagaactcagtcattactccgaggagagcaccaagccatttatgagggatctgcccccatagcctaaacacctcctaccagactccacctccaacattggggattacattttaacataagatggaggagacaaatatacaaaccatatcatatgctcatgattatgtaagtatcatttttattacacttatatcttaaaacattgttttgctcatggtttctatgaggaatgaacattctaccaatgtttcagaacaattaaataggtactgtattttctaaataatctagataaatgactcacatttactattttttcttaaaattaaagattctcacaaaaaatcttttcatatgct

SEQ ID NO: 371591 - DNA, 553 bp, Homo sapiens
atgtgaaaccacaattatctcaaaataaaaagtttaatgaaaaaaatcttactgatgagcaatgtcatgagacttagatagaaaaaaaaaaaacctatagcacacaagataagagttcatctgtagggtcaaattgccaggttaaaactctgcttcatcaattactatgaagctcttggacaagttacacacgtccacaagcctcagtttgggcagatgtagagaggagaataacaacagtctttatcttcttgggttattttaaggaataaataaggtaaygcatttcaaccttattattattattattattattattattattatgactattttacatgttcacaatctgctatagtataattactataaatatgtaataaatttgataagagattttaagatttgaaaagagatgttttttcataccattagcaatatcatacaatttgtaactatttaatcatctgcagtataaaacaaccaaacctagtatcagtttgttcctagtttctgacctgagagaattcattgaataggcttctgatgtaat

SEQ ID NO: 371592 - DNA, 486 bp, Homo sapiens
aacatctctttcatataaaatcattacccatggtccacaacagttgaaaatcatatatcttttctttcttcagctgtcaagattgtttgtcttctcatttgattaccagaaatttaagataacaattaaaacatgaaagaagtttctattaaattaaaaattgactataatattcaagctgtcaagtgcaatttgatatctcatgttgacatccaaactcattaaaarattctaagctggcttcataataatacttataacaacatggcccaatagcacagattacagtcatctgcacggcatgatattcagcaggtcacagaaagtataaatacatgacgcactcagtcacagggtgttgggtgcaaacatctccacagatggattaccagtagaatcacccatcttatcaaactcataaaaacaataaacatacttccaattcattttctaaatctcaaatgggaatcccatttgctcaatacc

SEQ ID NO: 371593 - DNA, 529 bp, Homo sapiens
gtattattttgcaatggggaaagattttttaaaagaagtacctcaacagttatttttgagtttacaataaccacttcttttctcattcacagactgttggctgtaattggtgattcaaaaccctgcatatcaaagtttgataattcttatagagcaacacatgaacaagtacagaatatccaaactaaagccatatgggtacagacccataaaggaaaaaaattaaaataactagatgtacttaattagggcttagtaagtagctcactgacacacagtgtcatgcctaacactcgggggctagtacaacagtcactgaaaggagctcccacagtaatcccyaacacatgctatcccttctcatgcattatttaaatgcatcatactctaccctctccactagactgtgagctctatgatggcagagattatgtctgtttagtacaattctaaatgctcagtaagtacataattgttaaataagctaatgatatactgccttaataactgaaggtaacagagtgagagt

SEQ ID NO: 371594 - DNA, 613 bp, Homo sapiens
ctgttgcctttttgtacagaaatctccttaatttcaggacatgtagatagcttatagaaacatccttttaaatagtttgtgagctcttcctcttcagtggaattgaggaatacagaatgctttatttcatcatcccctgacaggtgacttaggctttgcacagcagatttatttttctctgcgttttttaaaaattgtttttcttgtatcttttttcttcaaaaatatctatatttgagaatatgtacataacaactttccaaagtctctgtggccaaaacctctccagggawaagactgagcaagaatataatacttcaaaaaatgtacagctactgtttaagttttaaacagacaccatcacagtttgtggatgaaatagttttaagccatatactttctgtctttttttccccatattaatattggggggaggataatatcactttgatgtacattgatattaaagtttggtaatgcagcttttactgtctacatggtactgtacattagtttttaagcagaaacacaagaaaaatgggtataatttcaaagtagttcttggcagatggctagagaatactgcaagtgaccctgtatcccgaatacacag

SEQ ID NO: 371595 - DNA, 613 bp, Homo sapiens
ctgttgcctttttgtacagaaatctccttaatttcaggacatgtagatagcttatagaaacatccttttaaatagtttgtgagctcttcctcttcagtggaattgaggaatacagaatgctttatttcatcatcccctgacaggtgacttaggctttgcacagcagatttatttttctctgcgttttttaaaaattgtttttcttgtatcttttttcttcaaaaatatctatatttgagaatatgtacataacaactttccaaagtctctgtggccaaaacctctccagggaaaagactgagcaagaatataatacttcaaaaaatgtacagctactgtttaagttttaaacagacaccatcacagtttgtggatgaaatagttttaagccatatactttctgtctttttttccccatattaatattggggggmggataatatcactttgatgtacattgatattaaagtttggtaatgcagcttttactgtctacatggtactgtacattagtttttaagcagaaacacaagaaaaatgggtataatttcaaagtagttcttggcagatggctagagaatactgcaagtgaccctgtatcccgaatacacag

SEQ ID NO: 371596 - DNA, 581 bp, Homo sapiens
gctcactgccacctcagcctcctgggttcaagcgattctcctgcctcagcctcccaagtagctaggtttacaggcacctgccacctaatttgtgtatttttagtggagatgaggtttcaccatgttggccaggctgttctcaacctcctgacctcaagtaatctgccccaacttgagctcccaaagtgctggcattacaggcatgagccaatgtcctggcctaatttttactttaaaagatggagaatctttaaaaaggaaaaaaaaatgatggttgacttctttataacttcatagcatttggtttgagtaaaatattctatatgtgcatttgtattaatgacattaagtaacctacagtctgagagttagtgaattaaaactcagaatttattagaaaaaaatatcctttttatcacagcttatgaggtagttgaaatagtgtgtattgcagattaaaagttgtgtccttttaaaggcaaatgtgctttttaactarttaattataatgaatggtagaacaaattaatcataaatgccaatgtttaagaaaatcctacttcagttagaatagtaaggga

SEQ ID NO: 371597 - DNA, 242 bp, Homo sapiens
gagatgcttaaaagcttaggagctttatgagaaggttaatatttaatatgagttatggaagatttttaaagtgggcattggataagagggagattaattcatgcaggattattttatgacatagaacagtgtttgaactctttakcaaagactgaaataaatttagtggttcatctttagtaggcttaatttaaattaaaaatagaatagaaaagaaaatattagagtgtgttacaaatagc

SEQ ID NO: 371598 - DNA, 547 bp, Homo sapiens
agagttagaactagaatgacttttaatggggcatggagtaagtgaagtttcttactctctttcatcatctgagaggaaggcagaacttagaatattggaagcataatagagatgttttgtaccacaagagatggtccaaaacagaacccaacatttggaaatacaaacaaagggtaaaatgagttccccaaatattgacaaatggagcatataaactgctggtttatctcagagcaattgacatagatagttatggctggccacaaggacctttcaatccactgtttcttcttccttctgggattctctgataagaaagcacctgatgccccaccacctttaaggcttggctgagaagtagcattaaacttagacttggcaggctgctgggtgcttcctactgcactcctatccctctctgccacaatctgtccctctacccaaccatgtttactctcatatacaccagtagtattcytgcatcctgatgaagaatggcctattcaatgacttagtttctgactagtttgcttaataattattgcac

SEQ ID NO: 371599 - DNA, 607 bp, Homo sapiens
taaatttttaatttagaaattagaaattaactaatcagaataaaccagatatcagaaaatgttcatctatgctaaatgcatacaatatttatatgacagatttcagagtgtttgaaggagctcttttstttggtagtagaatgatactttaggaataactctcaaaaatgaaagaaccctatctattaaaagttagaatctcaacagtgaaaatacaatagctcatggaagaaattgcttagtttctaataaagaaatagaggaaagaaaaaacataagggaataaggagtttgagagtgaacgaaatcactaaatacaacttctatcagtagaatagctatcctttacgcagcacccactctgacagtaattgctagacttttttttttttttttccatgaaatcccaagaaggcaaaaatctccttttggtcaacaaattaaacagcaacagctgccctgttattttgaaagtatcaagcccacttttttttcatcctctaaattatggccaaaaaaaaccttaaataagtaatggtaattttttattccttaaggggactttgattcataacagagttctacatcatatctgtctcatgtcatt

SEQ ID NO: 371600 - DNA, 607 bp, Homo sapiens
taaatttttaatttagaaattagaaattaactaatcagaataaaccagatatcagaaaatgttcatctatgctaaatgcatacaatatttatatgacagatttcagagtgtttgaaggagctcttttgtttggtagtagaatgatactttaggaataactctcaaaaatgaaagaaccctatctattaaaagttagaatctcaacagtgaaaatacaatagctcatggaagaaattgcttagtttctaataaaraaatagaggaaagaaaaaacataagggaataaggagtttgagagtgaacgaaatcactaaatacaacttctatcagtagaatagctatcctttacgcagcacccactctgacagtaattgctagacttttttttttttttttccatgaaatcccaagaaggcaaaaatctccttttggtcaacaaattaaacagcaacagctgccctgttattttgaaagtatcaagcccacttttttttcatcctctaaattatggccaaaaaaaaccttaaataagtaatggtaattttttattccttaaggggactttgattcataacagagttctacatcatatctgtctcatgtcatt

SEQ ID NO: 371601 - DNA, 607 bp, Homo sapiens
taaatttttaatttagaaattagaaattaactaatcagaataaaccagatatcagaaaatgttcatctatgctaaatgcatacaatatttatatgacagatttcagagtgtttgaaggagctcttttgtttggtagtagaatgatactttaggaataactctcaaaaatgaaagaaccctatctattaaaagttagaatctcaacagtgaaaatacaatagctcatggaagaaattgcttagtttctaataaagaaatagaggaaagaaaaaacataagggaataaggagtttgagagtgaacgaaatcactaaatacaacttctatcagtagaatagctatcctttacgcagcacccactctgacagtaattgctagacttttttttttttttttccatgaaatcccaagaaggcaaaaatctccwtttggtcaacaaattaaacagcaacagctgccctgttattttgaaagtatcaagcccacttttttttcatcctctaaattatggccaaaaaaaaccttaaataagtaatggtaattttttattccttaaggggactttgattcataacagagttctacatcatatctgtctcatgtcatt

SEQ ID NO: 371602 - DNA, 598 bp, Homo sapiens
aaaaaaataaatatattagttatatacaaccaaaaagtatacatgacatcataatctttcaattttctgataattctagtttaaacatatgtaataattcaggtatgtttcttattcattcgggtattttctctgcccccaagtaattgttttacttgattatgttgtaattataacaccaaatttccttaaacattaaggttgctgattagaaaatacatagttcaggcaatatttctattttatgcttatctaatccctatatgcttgccaaaagcattactgatggtgaacttgcatgtgagttatttcattctttttcttctagatatcttcatgttgtttaaatttcttttttactgaatcatcttaccagttcagacaaaaagaaagaaaatgactaagaaattccagaatataactctacccaataagagattaaacacttggactggactttgacagctaatttaatagtcaggtttctacgttgttttgcttttttccagacatctgcagttktcagatggaaactgttattaggatttctgtcaaaagttctaaaaaaaaattttagggccttatttcctatattcta

SEQ ID NO: 371603 - DNA, 580 bp, Homo sapiens
tctcaaaacaaaacaaaacaaacctatgccatgttactggttactagtttcagaacccatttttccctaattcagtagaagtccctctcaacaaaaacaatcattacatacaacatacatactacataaaatataaaaactatgaatgtcaacttcacatattcagttccagaatatatgatgcttgatatgtaaatgtgtattaaaactgtggtgcaataactgagtttgaatagatattgcttgtaaaagtaatattgcttaaaagatactgcttaaaaagtttaaaaagtrgtaaaaatcagaagcacaaattggcacatctacctgaggatatgaaaaagacactacatatcttatgaaaataaatgtacaagtcccacggaggtataatagaattttatgcaaggctaaaataataaagactgaggagaccttgaaatgctattgaatctgtcccaagacctttccaagactatggcttttctaggtaaaccaaatttgttctcttcatactcaatagtaatcatttcttcaatatctctttgtaatgtttttctcactgatacagttttggatg

SEQ ID NO: 371604 - DNA, 570 bp, Homo sapiens
  misc_feature (1)...(570): n = A,T,C or G
tttggatgttgtttccccacatcctttctgagttacagaatctacacaatacagtacttttaacaccactggtaatgcatgagttaagacctaggctttgcagtcagagacttaggtgtcagtcttggattcagctgctgaccttggtcaaattacttaacctcttgaaatctcagtctctatgtgaacaatgggaacataataccttacccacaatgttttcaaagatcaaatgaaagactctttgaggcatgtgtagcatcatacataagacactgtaaaagctaagtggtagaggtgagattcaaagccaggcagtctggatcccgagttcatgctctcaaccactgccntaagctgtctcacagtgctcttttcaaaaaccacaatatcagatttgtccctgcttctaagttttctgaccaaagaagccattttgtatttgaattctaaattctaagggcctgttaccctttccaatatgtcatcaactamacaaaaaaacttaagtagcaggctttgtattctattccagtaaaaatcaaaatttgttaaacaccagatggttga

SEQ ID NO: 371605 - DNA, 339 bp, Homo sapiens
  misc_feature (1)...(339): n = A,T,C or G
catcatacataagacactgtaaaagctaagtggtagaggtgagattcaaagccaggcagtctggatcccgagttcatgctctcaaccactgccntaagctgtctcacagtgctcttttcaaaaaccacaatatcagatttgtccctgcttctaagttttctgaccaaagaagccattttgtatttgaattctaaattctaagggcctgttaccctttccaatatgtcatcaactacacaaaaaaactyaagtagcaggctttgtattctattccagtaaaaatcaaaatttgttaaacaccagatggttgaggccaaacccctgtggagttctacttct

SEQ ID NO: 371606 - DNA, 601 bp, Homo sapiens
cattttaaaaatcttttatactatttttttattgtactttttctgtgtttagataaacaaccaccattgtgttacaataaaagcctacagtttttagtgtagtaacaggctgtatatgtttgtagcctaggagaaatagctatacaatacagcccaggtgtgtagtagtctgtactatctaggtttgtgtaagtacactctatgatgttgtcacaatgatgaaatcacctagcaatggatttctcggaatatttcctgtatcctttttcaagctactcaagactgtataattaaattattagagaatttagggatcatctagggtagctggaaaaaactttgcatagtatgaaaatttaagttgatgttgaagattatgtttgataagatgaaaaagagaggtgaacagcataggcaaaaatttggtgacaaacttgggtcyaatatattatagaaattctgagaaatcaatttagtgaaacttaagaatgtcattaagtaggacaacaaggaatgatcaatacagattgaggctaaaaggccaagaaactgttatatgaatctggaacacttgattttgtaaaaatctcaagtaaagata

SEQ ID NO: 371607 - DNA, 458 bp, Homo sapiens
ttctttcaaaattcacaaagcactgcttttctgactctcagccatctcagattcctgtgttgtgctttattaacaaagctctatattgctgtctttctaatggcagataactggcttaagaacctcagcatgaccacttcttgcaggatcttactggaagctgctgaaagtgaacagtatttgccaacattctcatctatttcttttaggttctccaaagttccacctgaagaaggcatatcagaaacataacaagcatttccaatctccagtgcagagatacagggatcattgctgcctrcaaagaaatcgggactcagataatttctcatttcaagatttgtatctgcagttttacttttcaatataccaatttatacattgaactctttggtttacagggacaaaacccaactcatatcagattccatttatatatatatatatatatatatata

SEQ ID NO: 371608 - DNA, 607 bp, Homo sapiens
aattggctccaccttttggagggaggattgttgaagtgttgtaaatgtattttaaaattatcacatgtaacatttaaatttggtgttyaaaatataaatatatatacaatatatacaatatatatatttatgtatataatattaataggaggagatggagaagagtatttttggaagaaaaaagggaaaggaaagattcagaggcagccataataagaataagaccatgtcctttgcaggaacagggatggaggaggccattatcctcagcaaactaacacagaaacagaaaactaaataccacatgttctcacttataagtgggagctaaatgatgagaacacatggacatatagagaggaacaacagacactggggcctattggagagtagagggtgggaggagggagaggatcaggaaaaataactgagtactaggcttaatacctgggtgatgaaatgatctgtacaacaagcccccgtgacatgattttatttatataacaaacctgcacatgtatccctgaacttaaaatgaaagttaaaaaaaaaaaagattcagaggcagaaaaaaaggagcatgttaaatctagaaaggcaggttgtt

SEQ ID NO: 371609 - DNA, 488 bp, Homo sapiens
caggttgttggatgaagtgagggcttctttggcacttgcagaatgcaaagacacagagatttakatttagaaaagaatgacattatcagtgatcattcaggcaagtggctacaggaatacgggagaaagcagaaatgttcattagcaagataagttaaggggactgttgcaagtaattaccaaatgtagagggcagaacatggatggtagcaatggagagcattagaaggaggtagacatggcaatttccaagacccagtgcctgtggccaggtgtgctggctcatacctataatcctggtactttgggaggctgaggtagtaggatcacttgagttcaggagttctagaccagcctggacaacataacgagaacccatctctattttaagaaaaagaaaaaaaagaaacaaaacccagtgcctgatgacaaaagtgaaggtatacaatgagagaggaatgaatcattatgtgattccaagatactgt

SEQ ID NO: 371610 - DNA, 648 bp, Homo sapiens
taaatggttaaaatgtaaaacttataagtatcaaaaacttcactactaaattatgtatgtttgtaggatatttataatcccattttagaaatacacacccataactaattttttaaggctttaaagccatgagtacttaaactctattatgtttccaatagagtcaaccatttgtaagtgtgtatcaacaacttggagttcattctctaagtttatgaagaaaatgaaaagtctacacatatatcctcatatgtatatagtcagcactctgtccatgattctgtttccagaaaatatttgatttaaaaaacagcaattaaaaaaatacaaattttggatacacagtatagcaatatttacacagcacttgctttgtactaggtagtataaacaatctagagatgatttaaagtattcaggaagatgtatgtaggttatatgcaaataccatgtcattttatataaaggcctattcatggattttggtatcccacattggtacaggaaggggtgtgggcgycctggaaccaatactctgcggtagcgttattttaaacacagggatttatcgtatgtagcttaaatagacaacacttcattgggataatggttaaaatcatgtttctttatgtgcactgcataaataaa

SEQ ID NO: 371611 - DNA, 619 bp, Homo sapiens
tagaaactattaattatgatgaccttaaataacaatgattctacaagtcaagtgaactctcaattttaattaaaagttcaattaaaaactctccaaaaccaagtgggtctggacaaatatattcacatataatgagtctttaaaaggactcackaatttcaagcactagctgtattttctgctgttaatatgttttcatttggaactccaaacagcatgtttttttaaaaaggtcccgagcttaaagagagagttagcagaaagtaacaaatcaagtcctaaaatagtagttaacattaggggtttgggatgcatgaactcatttaatcctcacaacaatgatatgaggccagttctatgatttattttatagcggagcaaactaaagtgcaaccaaataaagtaatttgctcaaggccaccatttcaatgtgatacctccttctcatggactttctgttactaagacaggagacaaaggtttcgccttacacagtcgtgttcacatccatagctcttctggattcttccctcagtctttaataatgactctaccctgcctcagtgacctagcagttcatgggtatttggtggtgcttttatctgcctgtttatgtagc

SEQ ID NO: 371612 - DNA, 674 bp, Homo sapiens
aagtgaactggttgacccaatacataaagccatccttgagagtttaactctctctagagtaaacctcctaagagtaactttgcttactcttagtaacctcccaagtaamaacttaggagattgatttcaataactgaaattagaggagcgtgaaactatttaaaatatttgcagaatcttgagaaaccgattgtggccagaatataagtgcatgtgataggaataagggtagaggtgggagcaaaggtgggactgaagataagtctggaatagtctcaaattttcatttatttttcttatcatttactgctaatttaaaataacttattttttgtattataaaagcaatgcatattctttgtagcagtctccagcatctggcagctggattcacagcataccttgtttttgttgcctatgaacatgattacccccaatccattctgcatagcattttatgattgacttttctaatagtgattctgtgtgatactctctttcttcatggcacagacagggtggatgctgtaggaccatatagacttaccttagctaatgtctcgattcacacccctgctgcttaataaagccatcaatatcaatagactttacaccaggggttctgctgaattgatctgaggtgggaccctggtgtcagtgtagctttacaaaaa

SEQ ID NO: 371613 - DNA, 674 bp, Homo sapiens
aagtgaactggttgacccaatacataaagccatccttgagagtttaactctctctagagtaaacctcctaagagtaactttgcttactcttagtaacctcccaagtaacaacttaggagattgatttcaataactgaaattagaggagcgtgaaactatttaaaatatttgcagaatcttgagaaaccgattgtggccagaatataagtgcatgtgataggaataagggtagaggtgggagcaaaggtgggactgaagataagtctggaatagtctcaaattttcatttatttttcttatcatttactgctaatttaaaataacttattttttgtattataaaagcaatgcatattctttgtagcagtctccagcatctggcagctggattcacagcataccttgtttttgttgcctatgaacatgattacccccaatccattctgcatagcattttatgattgacttttctaatagtgattctgtgtgrtactctctttcttcatggcacagacagggtggatgctgtaggaccatatagacttaccttagctaatgtctcgattcacacccctgctgcttaataaagccatcaatatcaatagactttacaccaggggttctgctgaattgatctgaggtgggaccctggtgtcagtgtagctttacaaaaa

SEQ ID NO: 371614 - DNA, 596 bp, Homo sapiens
tgtatgaattagcagagtgccttgcacatagctgggactcaataagcataggtagacttaaactatatgtagattgttaaaactttttttgtacagaaataaattttattagcttaaaatcagatgattaagacatcttaaaaatagctttaaaacaaaaaaggactttccttaagatwcagaattaagtagttacatttacattctattctagtaggaaattgaagatatattttccccttgaaaagacattttgtttgctattggacgtcagcttcagcctattgtcagcttgttgctgaccattatcccaacgcctgttacaacctgtcttacattcttctgtatgtgttaactaaccaaaacacaatattattatgtccaaaatcagatttcacaacatcactgtcactaaaaaacatctcatgacttcccactattctcttccacaaggtttgatcaaaggaccttcacaatttggccgtaatcaacctctctcaacaactctgctttcctttttttccaccctactctacttctctcacgctcccccgctgtctgaaaatgcccagctctccaccatacatctcctactt

SEQ ID NO: 371615 - DNA, 602 bp, Homo sapiens
gtgtctagtcctactggtttggcttcatatctctgtagagttttacagtgtttattaccaaaagattctccctgagatatttagaagcaaaaaaaaaaaaaaactttatccattaaaatatacattatccaaatactttatgaaaaaaaaagatcatccctttacaatgccatgacaattcactgagttaccaataaagataaattaccctctgaaaaaaattcaaaaacagaaagcttatcctgatgactattaggctcccattgattctgaaagataataagagcatgacatctgttgagtaaatgatagtcatgaaaaccacatttaatctttaaaaagcaatgtgttctggtaagcttttatttcatatttgttcttttaaaaattcttcacaggaccatgtccagttataagctaaataatcttaattttttaaaaatggggtcaataacttttttycccagattacttaattcttcaaaaatctttaagtagatatggcgacatataaagaatcttccaaaataattgagaaatacatattccatgcaaagataaccaatttgacttcaatatttattgcatctgggtagaaacta

SEQ ID NO: 371616 - DNA, 358 bp, Homo sapiens
tgttaaaggaattaatacagctgaaaagacaggttatttaaactcaaaaggtttagggaaaaaaattacctcatttttacaaagcttgcatttgacattagcttcagaacactgtgtctctctacattattgttagccttttagttgcctgtcttgcaaactgccatgtcactgaggaattcaagggtcttatattgacgtacttcataaaagcatrctcttgcaagcatttctgtgtcttattggcatagaagaaagcaatgtcatgcgtgtgtgcttcctaaggttccttttagatctaaatttttgtatcacatagtcataactaaaaaatgcacactttataattaaaaattgt

SEQ ID NO: 371617 - DNA, 589 bp, Homo sapiens
acttcccttttccctttgctaactttttagtattgtgtaggaaagaaaaagaaataaacctgcatgataatccagatttaatgtaaaccttttaagttttccaccaacataaacatctttgccttttagtcttgattttgaaactaatagttcatttatattatcatttgtttatttacaactaatgtttttaagtgtttacaatatgccaagcaccrttcttagcccctggaagtgcagtcctaaataaggtacacaagattgctgagctaaattttattttagtgggcactggagacagacaaagggagaacatacaagaaaccatctgatagtggtaatggggtattgtataaatgaaatcaggggaatatgataaagcatgatcagatggatactttgaatagagtgatcataaatgtcttctaagagcatgtcagcaggggaagagatatattgaagagggaacaatagataaaagatcctggggcagatatctgggggatagcagaaaggccagtgtggtaggaccacattaagcaagggaagagctatccatagtaaaactggaaagcaggcagggtaggaa

SEQ ID NO: 371618 - DNA, 530 bp, Homo sapiens
gacattaatttcctaaaaattgtattttatattaaaagatcctgattggcattttgactggcatggtttctgaggcctgcatttactaatactatgtacagtgagtacagtgaattctgccctttaatgattgaggcagctggccacaaatcctgtttacagctcttggcatcctaaattacacttattgagtaaaccacagagataacagtctgaaaayttaccgactcttaaaatacatgcattaacacagctgtatcttacattatatcatgttacagctatgagacattgtagctattatgctgtccgtatccttacattggacacgaggaaagtgaagcccaagctcacgtgtctacaattcagcagaaaccaggcctcttgactttttctccaacactggctttactgcattctgccaagatggtatatatgaaatataatatcagtttttatgccacgaagttttgacacagatgtaaaatacacagcaaatttttctttattttttttaacattctatttta

SEQ ID NO: 371619 - DNA, 530 bp, Homo sapiens
gacattaatttcctaaaaattgtattttatattaaaagatcctgattggcattttgactggcatggtttctgaggcctgcatttactaatactatgtacagtgagtacagtgaattctgccctttaatgattgaggcagctggccacaaatcctgtttacagctcttggcatcctaaattacacttattgagtaaaccacagagataacagtctgaaaacttaccgactcttaaaatacatgcattaacacagctgtatcttacattatatcatgttacagctatgagacattgtagctattatgctgtccgtatccttacattggacacgaggaaagtgaagcccaagctcaygtgtctacaattcagcagaaaccaggcctcttgactttttctccaacactggctttactgcattctgccaagatggtatatatgaaatataatatcagtttttatgccacgaagttttgacacagatgtaaaatacacagcaaatttttctttattttttttaacattctatttta

SEQ ID NO: 371620 - DNA, 530 bp, Homo sapiens
gacattaatttcctaaaaattgtattttatattaaaagatcctgattggcattttgactggcatggtttctgaggcctgcatttactaatactatgtacagtgagtacagtgaattctgccctttaatgattgaggcagctggccacaaatcctgtttacagctcttggcatcctaaattacacttattgagtaaaccacagagataacagtctgaaaacttaccgactcttaaaatacatgcattaacacagctgtatcttacattatatcatgttacagctatgagacattgtagctattatgctgtccgtatccttacattggacacgaggaaagtgaagcccaagctcacgtgtctacaattcagcagaaaccaggcctcttgactttttctccaacactggctttactgcattctgccaagatggtatatatraaatataatatcagtttttatgccacgaagttttgacacagatgtaaaatacacagcaaatttttctttattttttttaacattctatttta

SEQ ID NO: 371621 - DNA, 532 bp, Homo sapiens
agctcccattgcagtcagaggcaccaaaaatgcacaccttgcaggttcctgaaaaccactcagtagccttaaaccaaactacaaatggccatactgaatcaaataactatatatatamaaccttgggtgtaaataagcagacagaaaatctaaagaatcaacagactgagaatctacttaaaaggcgaagtttcccgttatttgacaactcaaaagccaacttagatcctggaaatagtaagcattatgtatatagtacacttaccaggaatcgagttagacaaccagaaaagcccaaagaagatttgctgaaaagttctaaaagcatgcacaatgtgactcataacttggaggaggatgaggaggaagttaccaagagaaactctccaagtggcactactaccaaatcagtttccattgctgctttacttgatgtgaataaagaggaatctaacaaagaacttgcttcaaagaaggaagttaagggttccccaagttttttgaaaaaggggtctcagaagttaaggtcatt

SEQ ID NO: 371622 - DNA, 596 bp, Homo sapiens
  misc_feature (1)...(596): n = A,T,C or G
nnnnnnnnnnnnnnnnnnnnnnnnnnnnnnnnnnnnnngtcttggtcttgttttgaaggttacgtattacatattttctgttttaactgaatcatcaagctttattcacattaagagctgatcacagacacaggaatgggctagagagtaagaagggtgactcttaggtgtctacaaagtaccatccactatgcaaccatgcacactacatacttcatcctatttcatccctttaatccatgtatgctaaatgtggaaaaatgccttaatcttcatcaaactgatacttccatttttacagttaatcgattcagttcagtgaggcggattcaagcaaygaaaaagaattcaattaagctgtttcccctccggtcttgaagactgctcatctgtcatgcacagaaacacagcctgatgagagtcttcatgcctgataggatatcttctggaggtgactgagggctactagtgggtgtctgaacatgacaaagctgcttaatccacctacttgtgtttcatgtccttatagtgctgaaatacagcactatatgcccaattaaacatctatttcctggatagttttaatttaaagggta

SEQ ID NO: 371623 - DNA, 519 bp, Homo sapiens
tagcaatttaataacctcatcataaggtgatgaaatctagaaaagtgataataaaagtggcaacaggtggagagcaagaggcagttttgagactacttaggaagcgtattgtttgatgactatttagagatagatattgagcactggacttctggaatgactcctaggttttaacataacatattasatggtttgtgagtcatcatccaacacaagttatatagaaggaacacaactgggtggaagataagttcaaatttagaattctgaatttagagtgaccataggaaatagaggtagaagtgagaaaaggcagagagtggttgggattccctgtagtatatgggagccctacataattaataacatcctctggtaatattctctagtagggcatgatctttatgagcatctgcttaaaatatcactggctaacagcataggctctgaatcaaaactttcagaattcctattcttgctcagctatgaagcaattacttaacatttctatgcctgcct

SEQ ID NO: 371624 - DNA, 519 bp, Homo sapiens
tagcaatttaataacctcatcataaggtgatgaaatctagaaaagtgataataaaagtggcaacaggtggagagcaagaggcagttttgagactacttaggaagcgtattgtttgatgactatttagagatagatattgagcactggacttctggaatgactcctaggttttaacataacatattacatggtttgtgagtcatcatccaacacaagttatatagaaggaacacawctgggtggaagataagttcaaatttagaattctgaatttagagtgaccataggaaatagaggtagaagtgagaaaaggcagagagtggttgggattccctgtagtatatgggagccctacataattaataacatcctctggtaatattctctagtagggcatgatctttatgagcatctgcttaaaatatcactggctaacagcataggctctgaatcaaaactttcagaattcctattcttgctcagctatgaagcaattacttaacatttctatgcctgcct

SEQ ID NO: 371625 - DNA, 519 bp, Homo sapiens
tagcaatttaataacctcatcataaggtgatgaaatctagaaaagtgataataaaagtggcaacaggtggagagcaagaggcagttttgagactacttaggaagcgtattgtttgatgactatttagagatagatattgagcactggacttctggaatgactcctaggttttaacataacatattacatggtttgtgagtcatcatccaacacaagttatatagaaggaacacaactgggtggaagataagttcaaatttagaattctgaatttagagtgaccataggaaatagaggtagaagtgagaaaaggcagagagtggttgggattccctgtagtatatgggagccctacataattaataacatcctctggtaatattctctagtagggcatgatctttatgagcatctgcttaaaatatcactggctaacagcataggctctgaatcaaaactttcagaattcctattcttgctsagctatgaagcaattacttaacatttctatgcctgcct

SEQ ID NO: 371626 - DNA, 614 bp, Homo sapiens
ttaactcagtggaaatgtataatgaatttttctagaaaaatgaagatttcacagtcttactctgtcrtataaccttaaagaatggtccatgaaccttcctgccaagatgccttttcatcatcttgttaaagttcagtgactcctttcagaatcccactgaactctcacccttttcacttcttggcacctcattaattgttaacttctgctgcttgtccaccagtctgtggtttttccatttcactttctaacttgtatctgaatcagaagttaaaccactaactctcctggagctatgacatgagcttggaaaactgtgaaaacaaaattactttggaaataacttcatgctgaaattataaagagatgtttgaaaatatggcctaatttcaaaactaaaactgagcctatctgaattagtggaaatttttggaaaaataatcatgtaattagtaactttttacctcaattcatatctacaatatcacttgactttagctagaagtgattaagtccaaagaaacatcctcttggtactttaagtaaagagaagcagagatcagcaaataaagacaaaaattagtcttcagaacacaatatcaattgtttggtgg

SEQ ID NO: 371627 - DNA, 613 bp, Homo sapiens
ttatattgtggaatacatttgcttccattatacaaatttatcaggcttygggggaataattttcttggcccaggtctctttttaaaagctgtccaaaggagcctgaaatcataccatctttttataaatttccctgtagcaagcagaagcattcaaaatcatttcatttgttcaaacggtgaggactctctaaagggacttagacctttactgcaatcaccagcacctgcaaaatttattctggcgctcagcacacacctgtgagccttcatccatccacatcagaaaaactatttaacactaggaaagaaggattataagcctcatcatgggatttgctgtcatatttccaaggcacacatgagtgaggtatccacccacacattcaaggattctgatcgtctagttccaatatattctctgcctcttccttgatagcttaaatcctgaattctgttcttaaatactgttgcagcttaagctgtcctgcctgacttagacttcctgacactaacctaggcttttactcatgacatgatgaattctatccttgatgtttagtttgaaaatttggcaagtatgtttattttaaagagaaaaattatttgcctta

SEQ ID NO: 371628 - DNA, 613 bp, Homo sapiens
ttatattgtggaatacatttgcttccattatacaaatttatcaggctttgggggaataattttcttggcccaggtctctttttaaaagctgtccaaaggagcctgaaatcataccatctttttataaatttccctgtagcaagcagaagcattcaaaatcatttcatttgttcaaayggtgaggactctctaaagggacttagacctttactgcaatcaccagcacctgcaaaatttattctggcgctcagcacacacctgtgagccttcatccatccacatcagaaaaactatttaacactaggaaagaaggattataagcctcatcatgggatttgctgtcatatttccaaggcacacatgagtgaggtatccacccacacattcaaggattctgatcgtctagttccaatatattctctgcctcttccttgatagcttaaatcctgaattctgttcttaaatactgttgcagcttaagctgtcctgcctgacttagacttcctgacactaacctaggcttttactcatgacatgatgaattctatccttgatgtttagtttgaaaatttggcaagtatgtttattttaaagagaaaaattatttgcctta

SEQ ID NO: 371629 - DNA, 613 bp, Homo sapiens
ttatattgtggaatacatttgcttccattatacaaatttatcaggctttgggggaataattttcttggcccaggtctctttttaaaagctgtccaaaggagcctgaaatcataccatctttttataaatttccctgtagcaagcagaagcattcaaaatcatttcatttgttcaaacggtgaggactctctaaagggacttagacctttactgcaatcaccagcacctgcaaaatttattctggcgctcagcacacacctgtgagccttcatccatccacatcagaaaaactatttaacactaggaaagaaggattataagcctcatcatgggatttgctgtcatatttccaaggcacacatgagtgaggtatccrcccacacattcaaggattctgatcgtctagttccaatatattctctgcctcttccttgatagcttaaatcctgaattctgttcttaaatactgttgcagcttaagctgtcctgcctgacttagacttcctgacactaacctaggcttttactcatgacatgatgaattctatccttgatgtttagtttgaaaatttggcaagtatgtttattttaaagagaaaaattatttgcctta

SEQ ID NO: 371630 - DNA, 613 bp, Homo sapiens
ttatattgtggaatacatttgcttccattatacaaatttatcaggctttgggggaataattttcttggcccaggtctctttttaaaagctgtccaaaggagcctgaaatcataccatctttttataaatttccctgtagcaagcagaagcattcaaaatcatttcatttgttcaaacggtgaggactctctaaagggacttagacctttactgcaatcaccagcacctgcaaaatttattctggcgctcagcacacacctgtgagccttcatccatccacatcagaaaaactatttaacactaggaaagaaggattataagcctcatcatgggatttgctgtcatatttccaaggcacacatgagtgaggtatccacccacacattcaaggattctgatcgtctagttccaatatattctctgcctcttccttgatagcttaartcctgaattctgttcttaaatactgttgcagcttaagctgtcctgcctgacttagacttcctgacactaacctaggcttttactcatgacatgatgaattctatccttgatgtttagtttgaaaatttggcaagtatgtttattttaaagagaaaaattatttgcctta

SEQ ID NO: 371631 - DNA, 558 bp, Homo sapiens
aaaactaggtgatgaaataattggtactacaaatccccatgacacacgtttacctgtgtaacaaaccatcctacacatgtgtccctgaacttaaagtaaaagtttaaaataaataaataaaaacaaattttaaaagcatgctaagtaatgaaaagctgggcaactctgtcaaagtcttatggccctgaagaaatgtgtacttaacttgaagtttctttctcttagtatgtgtttcatacytaccacatatcaattacttccctactaaataaaacctgtgtgggcagaaggcaaaatgtgatgactctgtgtgaaagttaatgattcaggactcacataaagcttagcttcaaaaaggtctttgaggttcacatctgatcacatccactatgaacaagagcagatggcatgtcagtagttgacagggcatcagcgctgtgggattagcttggcatctctgtaagtgttcaggaagggggattaaaaacttccaggttggcagctactttccccactcctgcactttaaatgtcatataacttcatccaggctaaacat

SEQ ID NO: 371632 - DNA, 484 bp, Homo sapiens
tatttgtttctttgcatattgaactgtttaagttccctgtagattctggatactagacctttgttgtatgcatagattgaaaatattttctcccattctctagcttgtctgtttattctgttcatatttattttgaggtgcagaaactcttcggttcaattagatcccatttgacaayattttttaggttgcaattgcttttgaggacttagtcataaatgatttttcaaggccagtgtcgagaatggtattttctaggttttcttctaggattcttatagtttgaggtcttacatttaactctttaattcatcttgagttaatttttatatatgatgaatggtggggatcaagtttcattcttcatatagctagccagctatctcaacttcatttattgaatagggagttctttccgcagtgttgatttttgtcaactttgtcaaagaacagataggtgtgggtgagtggctttatttccggg

SEQ ID NO: 371633 - DNA, 568 bp, Homo sapiens
ggtatctgtagctatatatggatgctaattatattttctgaggcaatactcagagattttatgtaactggtacaagttcacttgtaatcagacttacagttagacagaatgcttgagagcatgtctgttctgggaagctgaggagtgaagtttcaacacatgcatagagctagtattatcctgaaagttggaaataagaaacagcagttcaaacaaatactaaattacttcttattatgtattcatttggaaattatctatttcacttacaagggccaattgaaatacagaagtgttaaaataaaagctgcccaagtcacagaaggcaaccaaaaagaggaggttaaacatcagaattaaagcgtatatttatatatatttattttkatatatatatatatatatatatacaattactctagaaagaatcttaaagaagtttttttttactactaccatgagactctttgtttgacagtcatctgatttacataaaatcaaatctggaaactgagaagaaagagataattacatgcaattactttgccatggaaggtggttcctatta

SEQ ID NO: 371634 - DNA, 229 bp, Homo sapiens
ggttaaacatcagaattaaagcgtatatttatatatatttatttttatatatatatatatatatatatacaattactctagaaagaatcttaaagaagtttttttttactactaccatgagactctttgtttgacagtcatctgatttacataaaatcaaatctggaaactgaraagaaagagataattacatgcaattactttgccatggaaggtggttcctattact

SEQ ID NO: 371635 - DNA, 410 bp, Homo sapiens
aatcaaggccagaggctgatgcagaagaccacttgaggccaggagtttgagatcaagctagacaatatagcaagacttcgtctttaaacaaaatttaaaaattaatttaaattacattcctgtagtcatagctacacaggaggttgagggtggagaattgcttgagcccaagagcttgagactctggtgactataatcatgccactgcactccagtctggaaaaaaaggtgaaaccctgtctcctaaaaaaaaaaaaaaaaaaagtaaagtaaagtaaccagtaagtgtagtattgacaaatagataaatacaaaggtcaatgaaacaaaatagagattcaggaaataaagtcacacktgtgggacaatttattttaataaaggtgtaaaggtagttcaataaaaaataa

SEQ ID NO: 371636 - DNA, 486 bp, Homo sapiens
acatgtacccagtacagttccattaagcattaaaatcattttgtggatgtgtacttctggactttaattaggaaaaacgggatgaggaaraagactatgaaagatcaagtaaaatgtaatagaaaagaaacaaaaaaagtatccaaaagaaaattaggtataggtaaggaaagcaaatgggatcttatttatgtgttttagacaaaagaatatatgaaatagtaaagtatattaaaagacaataggaaagcttttttgaaataaaagaaaacctgaataggaaaggtcagaaatcacgccatatccaggaaatactgataatgaatagtgatggaccccagatttgcattgtgaatttactagaactcaaggatgaataaaggtttatcattgggttttttttttccagttttaaaaattcaagtcaccagacaactggtaaataaataaataaataaatcagcatgcctcagtaaaattgaatac

SEQ ID NO: 371637 - DNA, 628 bp, Homo sapiens
gtgaaaaaccaaatattccgtgataaaaattagaaacagactatctgtgaaaatgctttgtgatgtgtaaatttatctcacaaaatagaacctgtgtttggattcactaggttagaaaccctctttttgtagaatctacaaaggaacatgtctgagcccaattagacctttactgaaagccagaatgtcccacaattaaaactacaaacaagctatctgtaaaatgctttgtgatgtgtggattcacctcacagaatggaacctgtgatttgattccctargttggaaacattctttttgtagaatctatgaggagaatttttgagcccagtgatgtctttactgaaaacccgtatatccaatgatgagaactagaaataagctatctgtgaaaatgctttgtgatgtgtggatttatctcacagaatggaacttgtgttttgattcaccgggtaggaaacactctgtttgtagaatctatgaaggggcatttctgagctttttgaggcctatagtgaaaaactgaatatccccgattaaaactagaaacaagctatctgtaaaatgctttgagatgtgtggattcatctcacagaatggaacttgtgttttaattcaccaggttgga

SEQ ID NO: 371638 - DNA, 536 bp, Homo sapiens
tctgtgaaaatgctttgtgatgtgtggattcatatcagagaatggaacctgtgttttcattcaccaggttggaaacgatcttttttgtggaatctaggaagggacatttctgagcccaatgaggcctaaagccaaaatccaaatatcccatgagaaaaagtagaaacaagttatctttgaaaatgctttgtgatgtgtggattcatcttacagaatgaaacttgtgttttgattcccccggttggaaacattttttttttttttttggtagaatctacaaaggaacatttctgagcctactgaggcctctagtgaaaaaytgaatatcccatgataaaaactagaaacaaactatctgtgaaaatgctttgtgatgtgttgatataactcactaaatggaacctgtgttttgattcaccagattgaaaacactctttctgtagaatctaagaaatgacattcctgagtccattgaagcctacagtgcaaaactgaatattctgccataaaaactagaaacaatctatcactgaaat

SEQ ID NO: 371639 - DNA, 536 bp, Homo sapiens
tctgtgaaaatgctttgtgatgtgtggattcatatcagagaatggaacctgtgttttcattcaccaggttggaaacgatcttttttgtggaatctaggaagggacatttctgagcccaatgaggcctaaagccaaaatccaaatatcccatgagaaaaagtagaaacaagttatctttgaaaatgctttgtgatgtgtggattcatcttacagaatgaaacttgtgttttgattcccccggttggaaacattttttttttttttttggtagaatctacaaaggaacatttctgagcctactgaggcctctagtgaaaaattgaatatcccatrataaaaactagaaacaaactatctgtgaaaatgctttgtgatgtgttgatataactcactaaatggaacctgtgttttgattcaccagattgaaaacactctttctgtagaatctaagaaatgacattcctgagtccattgaagcctacagtgcaaaactgaatattctgccataaaaactagaaacaatctatcactgaaat

SEQ ID NO: 371640 - DNA, 498 bp, Homo sapiens
aaatatgaaacttatacaaaatcagggttcccataaaacagtacactataactaaaataataatttgagttataggaataaatataacaaaatctctaaaacctaatgttgaatgtaaaaaaaaaaagttgaaacataagtctgctgcaaaaaattatgtaaaatttagagattcacaataaactctagatatttcatatggatacaattatgtaatttaagtactgggtatatacccaaaggattataaattattctataaagccacatgcacaygtatgtttattgcagtactatttacaatagcaaagacttggaaccaaaccaaatgcccattaatgatagactggataaagaaaatgtggcacatatacaccatggaatactatgcagtcataaaaaaggatgagttcatgttctttgcagggatatggatgcgttcatgtcctttgcagggacatggatgaagctggataccatcattctcagcaaactaac

SEQ ID NO: 371641 - DNA, 571 bp, Homo sapiens
cttagcaatcattccttaccttgaccttgtgtaatcacacctgctttctatcattatagatttatttttcttttatttatttaggttttttttttttgagacagagtttcgctcttgtmacctgggctagagtacagtagcatgatcttgactcactgcaacctccacctcccgggttcaagcaattctcttgcctcaacctcctgagtagctgagaatacaggcgtgtgccaccacaccaggctaatttttgtagttttagtagagatggggtttcaccatgttggccaggctggtctcaaactcctgacctcaggtgatcctcccacctcagcctcccaaagtgccgggattacatgcatgagccactgcacccagtctcattatagatttaaaagctttgctttgttgctttgtctagaatgtcatatagaaaattaattatacaattgtacaatatgtatttttttgtttctgtcttatttcattcaacctaatgctatgtatttatgtagaacattcttttattgccaagtagcttttcatcctgtggaatttacctatcaatcac

SEQ ID NO: 371642 - DNA, 571 bp, Homo sapiens
cttagcaatcattccttaccttgaccttgtgtaatcacacctgctttctatcattatagatttatttttcttttatttatttaggttttttttttttgagacagagtttcgctcttgtaacctgggctagagtacagtagcatgatcttgactcactgcaacctccacctcccgggttcaagcaattctcttgcctcaacctcctgagtagctgagaatacaggcgtgtgccaccacaccaggctaatttttgtagttttagtagagatggggtttcaccatgttggccaggctggtctcaaactcctgacctcaggtgatcctcccacctcagcctcccaaagtgcygggattacatgcatgagccactgcacccagtctcattatagatttaaaagctttgctttgttgctttgtctagaatgtcatatagaaaattaattatacaattgtacaatatgtatttttttgtttctgtcttatttcattcaacctaatgctatgtatttatgtagaacattcttttattgccaagtagcttttcatcctgtggaatttacctatcaatcac

SEQ ID NO: 371643 - DNA, 591 bp, Homo sapiens
tatttctggttttagatccttgagtaatcgccccactgtcttccacaatggttgaaccatttttaagtgtacagttcagtggtaataaattcattttttttcctcgatcatcctcttctttctcttccccagcttttcaaattaacaatgtaatcaactcagtgataaaatcgcaatgatattttcagaattgatagacaataaataggtagatagatacatgggtagatgggtgataaaacaaataataaataggaacttggattactaagaattccactgttatcactggctgacccaatacgcataactaacttcctctattttacttatcttgaatgtaaagtctgagaatgtgcttgtagctaaaggctgttacatgaaatgattctggctaaamaagaaaatctcgtaatttgagaagggaaagtaggtacaattgctaaatgtagaataaaataaggcaaatggtcaaaatttattttgaaaacatagagagccaaaaggatgataaaataacaatagagaaagatgatattttaaaaaaatctgtaaacacaaaaatgaaatacaaagaacaaaagcataatc

SEQ ID NO: 371644 - DNA, 484 bp, Homo sapiens
ctgtagtcttaattgcaaatgttgacctggtttaccacaatgcttctgaccttatacccaccttaagtttcaggcattggtcataaatatagaatctaaactcccccgttacaccacattggttcatagtctgcagtcttttgactaattgtcctctctacctaactagttctgcgaagcgtttatgattttataagaacatctcctttttactaggctctgcacttccagaactggcaaccactgctatatttattttttagctgtgtaaatagtattttttttagtctaaaacaattttgaattaaaaattgcratattgtcagtagacaattgtcatatatgttatttctttttaacctatttttcttttataaccagtaagtgatttaaaatttgcttttttgttaaaagttttctaccactttttacacaggctggttgatgtgtttatcaatcttcacttttaatcaagtctatattg

SEQ ID NO: 371645 - DNA, 543 bp, Homo sapiens
gactttcttgctaagaaagttgcaggggaawagaacggggtcagtctgccctaaaactcactaaaaggagagttgagggaaatgtttgctggactgagaggcccaaagcatttaagatgtacgaaatggaaagttgaggtcagagaattgaattccctgaacttttctagcacccactctctagggaatttctgagaaaagcaaaagtcaatttcccaactgcttcattcagaggttagggaacctatctctcattaatccaattataaaacagggacttctacttcctcactcatgattaaccccctcacattctggcatccgtgggtttccctctccattctcaagtaagtgacagaggagaatctaacatcccatcaccccctgtccccaccacagacatactcaaggggcccttggtgacttcttctgccctcgtgcctcattggaccaatgatgttggtgaattccaggaagactctaactaagtggacctggaccacttcacagatgaactttggacatgtcacctgaatcacagca

SEQ ID NO: 371646 - DNA, 543 bp, Homo sapiens
gactttcttgctaagaaagttgcaggggaaaagaacggggtcagtctgccctaaaactcactaaaaggagagttgagggaaatgtttgctggactgagaggcccaaagcatttaagatgtacgaaatggaaagttgaggtcagagaattgaattccctgaacttttctagcacccactctctagggaatttctgagaaaagcaaaagtcaatttcccaactgcttcattcagaggttagggaacctatctctcattaatccaattataaaacagggacttctacttcctcactcatgattaaccccctcacattctggcatccgtgkgtttccctctccattctcaagtaagtgacagaggagaatctaacatcccatcaccccctgtccccaccacagacatactcaaggggcccttggtgacttcttctgccctcgtgcctcattggaccaatgatgttggtgaattccaggaagactctaactaagtggacctggaccacttcacagatgaactttggacatgtcacctgaatcacagca

SEQ ID NO: 371647 - DNA, 619 bp, Homo sapiens
atatctttcaacttttccaatacctcacatacagtcaaagtaacactctattagagtaactagtattcctgtttgatggattaggtaactgaggctcagaagaattaagagaatggttcaaacctatgaaactaataaattgtccagtcgggtcaaatgacaaggtgttccagtacctccccactcagaatctktgaccggcagctgatgtctttttaggaagcaaacaagccagtggaaagttgaatgaagtttccccactcccacctgcttctgttctgtgcagccatgctacttcttcaaagttctgtgtccttggctaaataaatcataaaacaagggtataagtgtggcctactccttttctccatgtccctcctgaaacactataaaaactcaagctcttttttttcccatttttctcatctttttttttattattatactttaagttctgggatacaggtgcagaatgtgtaggtttgttacataggtatacacgtgccatggtggtttgctgcacccatcaacccatcatctacattaggtatttctcctaatgctattcctcccctagccccccacctccatcaagcttcatttttaaatccctgggtat

SEQ ID NO: 371648 - DNA, 618 bp, Homo sapiens
aataggaaaagaaaaagccaaactatctctgtttgctgatgatatgattctatgcctagaaaaccctaaagactccaccaaaaggctgctagaactgataaactacttctgtagtttcaggatacaaaatcagtgtacaaaaatcaataacgtttctacataccaacaacatacaagttgagagccaaatcaagaacacaattcygttcacaattgccaccaaaaaataaaatatctaggaggacctctaaccaagggagtgaaagatctcttcaaggagaattatgaaacactgctgaagaaaatcagagatcacacaaataaaaagggaaacagtccatgctcatgaattggaaggactggtatccttaatatggctatatgcccaaagtagtctacagcctcaacactactcctatcaaactaccaatgtcatttttcacagatttaggaaaaaaattctaaaatttataatgtaacccaaagaaatcctgaatagccaaaggaatcctaagcaaaaagaacaaagcaggaggcatcatattgcctgatttaaaactatactataaggctacagtaacctaaacagcatggtactaatacaaaacagacacatag

SEQ ID NO: 371649 - DNA, 602 bp, Homo sapiens
caacatacaagttgagagccaaatcaagaacacaattccgttcacaattgccaccaaaaaataaaatatctaggaggacctctaaccaagggagtgaaagatctcttcaaggagaattatgaaacactgctgaagaaaatcagagatcacacaaataaaaagggaaacagtccatgctcatgaattggaaggactggtatccttaatatggctatatgcccaaagtagtctacagcctcaacactactcctatcaaactaccaatgtcatttttcacagatttaggaaaaaaattctaaaatktataatgtaacccaaagaaatcctgaatagccaaaggaatcctaagcaaaaagaacaaagcaggaggcatcatattgcctgatttaaaactatactataaggctacagtaacctaaacagcatggtactaatacaaaacagacacatagaccaatggaatagaatggagagcccagaaataaaacctcacacttacagccatctgatctttgacaaagttgacaaaaataagcaatggggaaagtatcccctatttaataaatggtgctgggaaagctggccagctatatacagaaaaa

SEQ ID NO: 371650 - DNA, 392 bp, Homo sapiens
aaaagacttacccatccaaactcaaagacctctggtgaagctataatatcatacaaaatatatttaaaagcagaaarctactataactggaacatttcataatgatatgattccattcaccattagagttataatactattctggataaatttttaaggagtcattatcttttaaagatatattctgaaacatttacaaaataaattacataatgcctaagtttttttcaaaatgttatgggggatgaggtaagaggtagatgcggatataaataaaacaagctcagccatgagttatctgtggaaattatgttatgggtaaaagagattctttatactatactgtctattttgatatatgtttacatgttcgataataagaaggttacaaa

SEQ ID NO: 371651 - DNA, 552 bp, Homo sapiens
gaagggcaatgtggtcatctctatccaattacaaagaaatacrtactttctggatgattcatgatgttaagcaccttttcatataactgttggtcatttgtatatcttctctagagaaatgtctatttaagttcttagcccatttttaaatcaggctattagttattttgctattgagttttatgagtttcttatatatcttagagattagccctttgcagatatatggcttgcaaatattttcctccattccttaggttgcctttccactctgttgattgtttcttttgctgtgcaccttttttgtttgatatagtcttgcatttttatttttgcttttgttacctatgcttttgttgtcaaacccataaaatcattacaaaactcaacatcataaagcttttcccctatgtttcctatgttttcttttaggagttttacagtatcaggttctacatttaaatctttaaaccattttgagttgatttttgtgtacggggtgatataagggtctaacttcattcttctgcatgtggatattcagttctccta

SEQ ID NO: 371652 - DNA, 552 bp, Homo sapiens
gaagggcaatgtggtcatctctatccaattacaaagaaatacgtactttctggatgattcatgatgttragcaccttttcatataactgttggtcatttgtatatcttctctagagaaatgtctatttaagttcttagcccatttttaaatcaggctattagttattttgctattgagttttatgagtttcttatatatcttagagattagccctttgcagatatatggcttgcaaatattttcctccattccttaggttgcctttccactctgttgattgtttcttttgctgtgcaccttttttgtttgatatagtcttgcatttttatttttgcttttgttacctatgcttttgttgtcaaacccataaaatcattacaaaactcaacatcataaagcttttcccctatgtttcctatgttttcttttaggagttttacagtatcaggttctacatttaaatctttaaaccattttgagttgatttttgtgtacggggtgatataagggtctaacttcattcttctgcatgtggatattcagttctccta

SEQ ID NO: 371653 - DNA, 514 bp, Homo sapiens
taaggctgttgtgaggatttaagagaatgcacctaaatatagtgcttagcacatagtaggtgaataatggatggttgtggaagtaggtgactaatgaatggttgtggaagtggttacttaggatcactgattccctcccctctacacttagagatgtgatggccactgatggaacacagagaagatgctgtagataaaataacttacagggcagaacattattatagcgattctttcctctattctcagccagttctgctgcatatttaggttgactaattccaacaagcttcagatcctgaaaacaaaacaaatgaggtgttcatttatttagtcttcaaatattattcatatttagcatagcatatgacagtgaaaccagcccaacagtcccatagacaagttgtttttgaataaacatagaaatttacccttctgctattaaagcctgaaacttgtatttgttttatctgagttcctttctcaggaaaggrccttcagggagtaacaaaga

SEQ ID NO: 371654 - DNA, 592 bp, Homo sapiens
tcttctctatttactcttgtatttattctcagtagtcaaatctgggcaaaaagtcctcttcatgtcttacttacaactttcttctcctactaccttgttattggttgcagaaactttatggaaatctcattaaactaattgaaaccgatttcrtacttttcctcaagttatttgacaaagttttactctagagaagagaaattccatggggaagtcagtctcttgatgatagtatgtggcttactttgttttaaatagttcaaggatcttgacatctaatcatagcccttggactttgagtggggggataggttttctacatcaaaacaggattggagaatctctgggttagctgcttcctatggtgtttgcttatttcttagatgttctaaattcaaatattaaccatgatgcagatcccctgaattttccttatttgtgtgacttatcttaaacagcatctactttgttttctaaaagctcccaggaccgttggtgatttttccttggggacaagttctgatcattgaattgcagtagcaaccaccatccagtaccattagaagacagcctaatgttgaaagagcacagg

SEQ ID NO: 371655 - DNA, 592 bp, Homo sapiens
tcttctctatttactcttgtatttattctcagtagtcaaatctgggcaaaaagtcctcttcatgtcttacttacaactttcttctcctactaccttgttattggttgcagaaactttatggaaatctcattaaactaattgaaaccgatttcatacttttcctcaagttatttgacaaagttttactctagagaagagaaattccatggggaagtcagtctcttgatgatagtatgtggcttactttgttttaaatagttcaaggatcttgacatctaatcatagcccttggactttgagtggggggataggttttctacatcaaaacaggattggagaatctctgggttagctgcttcctatggtgtttgcttatttcttagatgttctaaattcaaatattaaccatgatgcwgatcccctgaattttccttatttgtgtgacttatcttaaacagcatctactttgttttctaaaagctcccaggaccgttggtgatttttccttggggacaagttctgatcattgaattgcagtagcaaccaccatccagtaccattagaagacagcctaatgttgaaagagcacagg

SEQ ID NO: 371656 - DNA, 592 bp, Homo sapiens
tcttctctatttactcttgtatttattctcagtagtcaaatctgggcaaaaagtcctcttcatgtcttacttacaactttcttctcctactaccttgttattggttgcagaaactttatggaaatctcattaaactaattgaaaccgatttcatacttttcctcaagttatttgacaaagttttactctagagaagagaaattccatggggaagtcagtctcttgatgatagtatgtggcttactttgttttaaatagttcaaggatcttgacatctaatcatagcccttggactttgagtggggggataggttttctacatcaaaacaggattggagaatctctgggttagctgcttcctatggtgtttgcttatttcttagatgttctaaattcaaatattaaccatgatgcagatcccctgaattttccttatttgtgtgacttatcttaracagcatctactttgttttctaaaagctcccaggaccgttggtgatttttccttggggacaagttctgatcattgaattgcagtagcaaccaccatccagtaccattagaagacagcctaatgttgaaagagcacagg

SEQ ID NO: 371657 - DNA, 591 bp, Homo sapiens
tcacgcttgcaaaaaattaaaaaygcaaattaaacaatggtaagatgtctttctaatttacaaaactttatttttattgttatagatttgggggtacaaatgttgttttgttagatggatatattatatactggtgaagtctgcatttttagtgtagccatcacccaaatagtgtacacagtaaccattaaataatttctcatccctcacccctcccctattattaactttttgttataaaatgatttgacctacaaaaacttccaaaaaagaattcttgttttcccttaatccagatttcccaaatattggtattttgccacattttctttatccttcatgctctcaataaatagatatgtagacaaacagatgggtagaaattttctgatacaggggaagtgtggagaagtaggtcaaaggatgcaaacttgtagttacatagaataaacaagtctagagatctaacgtgcaacataaggactatagtaaataatatggtattgtatcctggaaatttgctgagagtagattttaggtactcttaccattaaaaaaaagcaaactctgcaaagtgataagtatgttaat

SEQ ID NO: 371658 - DNA, 591 bp, Homo sapiens
tcacgcttgcaaaaaattaaaaatrcaaattaaacaatggtaagatgtctttctaatttacaaaactttatttttattgttatagatttgggggtacaaatgttgttttgttagatggatatattatatactggtgaagtctgcatttttagtgtagccatcacccaaatagtgtacacagtaaccattaaataatttctcatccctcacccctcccctattattaactttttgttataaaatgatttgacctacaaaaacttccaaaaaagaattcttgttttcccttaatccagatttcccaaatattggtattttgccacattttctttatccttcatgctctcaataaatagatatgtagacaaacagatgggtagaaattttctgatacaggggaagtgtggagaagtaggtcaaaggatgcaaacttgtagttacatagaataaacaagtctagagatctaacgtgcaacataaggactatagtaaataatatggtattgtatcctggaaatttgctgagagtagattttaggtactcttaccattaaaaaaaagcaaactctgcaaagtgataagtatgttaat

SEQ ID NO: 371659 - DNA, 591 bp, Homo sapiens
tcacgcttgcaaaaaattaaaaatgcaaattaaacaayggtaagatgtctttctaatttacaaaactttatttttattgttatagatttgggggtacaaatgttgttttgttagatggatatattatatactggtgaagtctgcatttttagtgtagccatcacccaaatagtgtacacagtaaccattaaataatttctcatccctcacccctcccctattattaactttttgttataaaatgatttgacctacaaaaacttccaaaaaagaattcttgttttcccttaatccagatttcccaaatattggtattttgccacattttctttatccttcatgctctcaataaatagatatgtagacaaacagatgggtagaaattttctgatacaggggaagtgtggagaagtaggtcaaaggatgcaaacttgtagttacatagaataaacaagtctagagatctaacgtgcaacataaggactatagtaaataatatggtattgtatcctggaaatttgctgagagtagattttaggtactcttaccattaaaaaaaagcaaactctgcaaagtgataagtatgttaat

SEQ ID NO: 371660 - DNA, 603 bp, Homo sapiens
atcacatgttgctttacttgtcacctatctttaatccagagtaattcttctttcttcatctttacacatttgaagagttaaggacagtaattttgcagaatattctttctttgggctctccttgtgtttttttatgattagactcaggttgtgtatttttggtaagaatagcacaataatgatattgtgtgcctctccagtgcaccatatcaagaggcacatggcatcaatggatcttatttctggtgatactcactttgggcaatggtttagaggggaagggctataaagttacatttttctctctgtaattaataccccttggtgtcytaaggaaagatactttgaaacaatgtaaaatcatttcttatccaaaaaaaagtgtttaatgacaggattctattctgtcaagagcactttcacaagataggtgactcagtgtaacactgtgcaccaaaagtctttatactctaacactaaattcactctaggaaataagcctaaaagaaagtcagaagcatggttaaaaatgtctattcaagaatattaactacagtgttatttatggtggtaaaaaattagtacctccacaaaaagaaatac

SEQ ID NO: 371661 - DNA, 603 bp, Homo sapiens
atcacatgttgctttacttgtcacctatctttaatccagagtaattcttctttcttcatctttacacatttgaagagttaaggacagtaattttgcagaatattctttctttgggctctccttgtgtttttttatgattagactcaggttgtgtatttttggtaagaatagcacaataatgatattgtgtgcctctccagtgcaccatatcaagaggcacatggcatcaatggatcttatttctggtgatactcactttgggcaatggtttagaggggaagggctataaagttacatttttctctctgtaattaataccccttggtgtcctaaggaaagatactttgaaacaatgtaaaatcatttcttatccaaaaaaaagtgtttaatgacaggattctattctgtcaagagcactttcacaagataggtgactcagtgtaacactgtgcaccaaaagtctttatactctaacactaaattcactctaggaaataagcytaaaagaaagtcagaagcatggttaaaaatgtctattcaagaatattaactacagtgttatttatggtggtaaaaaattagtacctccacaaaaagaaatac

SEQ ID NO: 371662 - DNA, 502 bp, Homo sapiens
aactttccttcaacctattctgctccttcagtttggactcaacagtcattctaaacccaagyatcaatacaaagactcagcctctatttctcatttagtctcaatgtcctaatccacagcctcttcatggccttcctcatttcagcatttctcagagagtagatgacagggttcaggatcgcggttatcactgtgtagaacacagccaccatcttgtctatgggcagagtggtagaaggcctcagagagttgaagacgcagggcccaaagaacaagataaccacagcgaaatgggacccacaggtggagagggctttgcaccacccttcagagctccaggttctcagatggagcaagatgaccatataggatgctaagaggaccccaaaactgatcacagacagggtgcctccattggcaacaatcagcagaccaatgaggaaggtgtcagagcaggcaagtttgagaaggggaactaggtcacagaaatagtgattgatca

SEQ ID NO: 371663 - DNA, 269 bp, Homo sapiens
tgccccctcatgctctgacacatccttctccacagsccaggctttcaacacctcagagcatcaccaagactgctcaggactgattggcaggctgtcccagtccatgctgaactctgtccaaggtggctaaggttttgtatatccacatagcctctcctacagtaacactccaggccacctgagcctgggagccagatcacttccactcacaccacaaggcttccttgcttccatgattgggacaatctcaggtgattaaagaccaccac

SEQ ID NO: 371664 - DNA, 637 bp, Homo sapiens
aatctcacttctggctcaagcccttcccaaatgataaaaactaataatgccgacatcattttgatatattttattcmttccacagctcttgagcatccaccacctgtcactcatcacacgaagtgcaaaagcagcaattcacctaaaatcaattcaccaactatagtttgccagatggtcaaattaccaacagtcaattcacaagattaaccaattcagcaattttgctatcaggcaaatggccagtccactgaattatcaattcacgaaagatgtgcttctacttccaatctcagctaatccttttcctcttaattaagaagctctaaggaatctggattgtaaaacattcacaaagtcagcattcaacacgtctggatcaacaaatccattgaacttaaagaaaagcaattgagttatgccaacttggcagaaatttgcaaacacaatttccagacagttaaatcaagggcaaagccctcaaggtagcagaaaggacatgttcaatgcccatgctcagcaaaatcattgtaaagaactatgaggtaagtgtaccaggtctaataaatattaaccacttttagtccagtacgttgacttttctattctcctttgatatgcatatttgtcaggtcaa

SEQ ID NO: 371665 - DNA, 637 bp, Homo sapiens
aatctcacttctggctcaagcccttcccaaatgataaaaactaataatgccgacatcattttgatatattttattccttccacagctcttgagcatccaccacctgtcactcatcacacgaagtgcaaaagcagcaattcacctaaaatcaattcaccaactatagtttgccagatggtcaaattaccaacagtcaattcacaagattaaccaattcagcaattttgctatcaggcaaatggccagtccactgaattatcaattcacgaaagatgtgcttctacttccaatctcagctaatccttttcctcttaattaagaagctctaaggaatctggattgtaaaacattcacaaagtcagcattcaacacgtctggatcaacaaatccattgaacttaaagaaaagcaattgagttatgccaacttggcagaaatttgcaaacacaatttccagacagttaaatcaagggcaaagccctcaaggtagcagaaaggacatgttcaatgcccatgctcagcaaaatcattgtaaagaactatgaggtaagtgtaccaggtctaataaatattaaccacttttagtccagtacrttgacttttctattctcctttgatatgcatatttgtcaggtcaa

SEQ ID NO: 371666 - DNA, 515 bp, Homo sapiens
aaggccttttattatcatataatgttcctctttgtctttttaaattgttattgctttaaagttcattttgtctggtataagaatagctacttgtgattgctttcagtgtccagttgcatggaatatctttttccacccctttaccttaagtttatgtgagtctgtattagtctgttctcaagctgctaataaagacatatccaagactgggtaatttataaagaaaagaggtttaattgacacagttccacatggctgggaaggcctcacaatcatggcagaaggcaaaggaggaatgaagtcatgtctcacctgacaataggcaaaaaccttgtgcaggggaactcccatttataaaaccatcagacctcatgagacttattcactaccatgagaacagtgtgggggaaaccacccccatgattcaattatctccactgggtccctcccacaacamgtgggaattatgggagctacaattcaagatgagattttggtagaggcacagccaaacc

SEQ ID NO: 371667 - DNA, 588 bp, Homo sapiens
tgttggagctggggtttggtaagaggcgtctgggtcatggggcagatttctaatgaatggcttggtgccattcccatgagagtgagtgagttctgtcttagtttctgtgagaactggttgttgaaaagagcttggcacctcctcccctgtatctcttgcttccattctcttgccatgtgacctccatacatgctggctcccctttccctttrgccatggtggaagcagccaggagccctcaacagaagcagatgctggtgccatgcttcctgtacaccctacagaaccataacccaaataaacctgttttcatgtatatatatatataaattactgtcaacaaaaagaatcaaactctgtaaaatatttgaagatatttattctgagtcaaatatgagtgaccatggcccatgacacagccctcaggaggtcctgagaacacgtgtcctagctggtcagggttcagtttggttttatacattttagggaggcataaaacatcaatcaaatacatttaagaaatacattggtttggttcagaaaggtatgcaactcaaagtgggggtggggggacagggggattccagg

SEQ ID NO: 371668 - DNA, 601 bp, Homo sapiens
agaaactgagcagatctgctctgtccaaaatctcctccaggaagctccctctgacatcaaaactagctgttatgcaagaaatcactcagaatcagaatcacaggagacagaacattgtgctaggaaactctggctgccaccattttacaaagttcaacctacttgtcctgaactctatggcctggggctgtccttctgtgccattcgctgcttgggaataaacggtggcattgtatcgggtgccaggctctaacccgacaagcaggacttccgtgtctygggactgctggccggaggatgggtccacaggtcccacgagggactcatcatgcacaggggcggtggggctccctgcccggcttctctctgtattgctggcatctgtttcaagcacaggagacaaaaagacatcaaccacaagagggacacatcccccattttccttcggagccccaaccccatcagatggccatcagacagtggccacagttggtgctccatcaatatctgctcccttcctcctccagagagagaggcagccccataaaaaggcctgatagctccatctccatttgtactgttattccagtagcaccacaga

SEQ ID NO: 371669 - DNA, 562 bp, Homo sapiens
ccctggcacagtgaaggctctgtggctttaatttcaggctttcactagccagctcttctaactcatcctcacatggtcatcggctcactactcttcaccccattgaggtgccaaggtggctggagagaaggggcacagcgccagcctgtgccattcccagtccaccttgccccgttgtctctccacctgcacttcaggaatgaacttcaggcctgtgtgacttcgtgcctcatgattagtaacttcttacaaggaccttttgcagcatttgacacagctractagtctctcctggaaactatacatctttgtttccatgatcccattccctcttggttcctttcccagcacactggctactcttctcagtttcctttgctgatgccttcttatttttccaatttctaagcatctgcctgacccagggcttcattttcaaacccctgccctacctactcgaggagttcccactgagtctcccagctttaaataacattcatgagtttatgactctcaaatttatagcttcagcctgaacgtcctccctgaactgtgatgtata

SEQ ID NO: 371670 - DNA, 520 bp, Homo sapiens
tcgcctccatggtttgtagtttcacagccatgaaatgacagaattggtctcaattatctttcacatcccttcttgttctaacattctacacttcaagatcacttagactctgwtctcctaagcgccccataagtgatgaagatattgatgatggccccaataataataatagctgctatttattgggtacctactatgtgccaggcactatcccaaacattttgcagtcattgtctttaatgttgacagcaactctgcaatttgcttcttgagcatttttattcttctgtcgatactattttcttctattgctgtcaaaactacccagattttctttggtgaaagcacaccaccccagccccagccatgtattttgcataatgttggtcacctagaaatggactttaattggcttaagcagatctacaaaaaccacccctttggttcagggatggaaagtaacctagtcagggagacagcaaggcatttgaggtatttacaggaaaaaaaaaaaaaaaca

SEQ ID NO: 371671 - DNA, 628 bp, Homo sapiens
tatgtttgttggctgcttgcatgtcttcttttgagaagtgtctgttcatgtcctttgcctactttttaatcaggttatttgttttttgtttgttgaattgtttaattttcttatagattctggatattacaacttcrtcagatgcatagtttgcaaatatttcctcctatcccataggttttccatttactctgttgatagtttcttggttgtgcagaatactctttaatttaattaggtctcatttgtcaatttttgttttgttaccattgcttttggcatcttcaatgtgaaatctttgccagggcctatgtccagaatggtattttctaggcttttttctattatagttatagttttaggtcttgtatttaagtctttaactcatcttgagttaatttttatatattgtgaaacataggaatcctgtttcattcttctgcgtatggttagccagttatcccagcaccatttattgaatagggagtcctttccccattgcttatttttgttgactttgtcaaacagcaaatggttataggtgtgcagctttatttctgtgttctctattgtgttccattggtctgtacatctgttttcataccagcataatgctgttttggttact

SEQ ID NO: 371672 - DNA, 628 bp, Homo sapiens
tatgtttgttggctgcttgcatgtcttcttttgagaagtgtctgttcatgtcctttgcctactttttaatcaggttatttgttttttgtttgttgaattgtttaattttcttatagattctggatattacaacttcatcagaygcatagtttgcaaatatttcctcctatcccataggttttccatttactctgttgatagtttcttggttgtgcagaatactctttaatttaattaggtctcatttgtcaatttttgttttgttaccattgcttttggcatcttcaatgtgaaatctttgccagggcctatgtccagaatggtattttctaggcttttttctattatagttatagttttaggtcttgtatttaagtctttaactcatcttgagttaatttttatatattgtgaaacataggaatcctgtttcattcttctgcgtatggttagccagttatcccagcaccatttattgaatagggagtcctttccccattgcttatttttgttgactttgtcaaacagcaaatggttataggtgtgcagctttatttctgtgttctctattgtgttccattggtctgtacatctgttttcataccagcataatgctgttttggttact

SEQ ID NO: 371673 - DNA, 548 bp, Homo sapiens
ttgcagaagttctttcctgcyacagccgtggttggccacattgctcccccatgaatatgtggaaactgacacttcaggagaattggtggctcacccatggcattcagctagtgggttatggggcagagactcaaactcagccctgactcccacagcattgttctttttctgtaaattgctgacttactcagttgatcacagttcattgccgtttacagaatttgtctgcacccattgtgccttttaagtgtcgattttctttcctgaaagcacacaaagcaaagcacggctctgcagtgtgacccaccgtgtgctgtgtggacagatgatgctggtcagcaggcaggaaaacgatctgccaggcgctgggggtggggcagaggattgttcttcctgaccttggtatgaaaaccgtatggagttcttagtgaggaaaatcactcttagcccaaattcctgcgaaggccgatgggattgtttttaagatttgttggattgctggatttgttgaagggagaactggaagaagctatcagaagtttacaggg

SEQ ID NO: 371674 - DNA, 548 bp, Homo sapiens
ttgcagaagttctttcctgccacagccgtggttggccacattgctcccccatgaatatgtggaaactgacacttcaggagaattggtggctcacccatggcattcagctagtgggttatggggcagagactcaaactcagccctgactcccacagcattgttctttttctgtaaattgctgacttactcagttgatcacagttcattgccgtttacagaatttgtctgcacccattgtgccttttaagtgtcgattttctttcctgaaagcacacaaagcaaagcacggctctgcagtgtgacccaccgtgtgctgtgtggacagatgatgctggtcagcaggcaggaaaacgatctgcyaggcgctgggggtggggcagaggattgttcttcctgaccttggtatgaaaaccgtatggagttcttagtgaggaaaatcactcttagcccaaattcctgcgaaggccgatgggattgtttttaagatttgttggattgctggatttgttgaagggagaactggaagaagctatcagaagtttacaggg

SEQ ID NO: 371675 - DNA, 548 bp, Homo sapiens
ttgcagaagttctttcctgccacagccgtggttggccacattgctcccccatgaatatgtggaaactgacacttcaggagaattggtggctcacccatggcattcagctagtgggttatggggcagagactcaaactcagccctgactcccacagcattgttctttttctgtaaattgctgacttactcagttgatcacagttcattgccgtttacagaatttgtctgcacccattgtgccttttaagtgtcgattttctttcctgaaagcacacaaagcaaagcacggctctgcagtgtgacccaccgtgtgctgtgtggacagatgatgctggtcagcaggcaggaaaacgatctgccaggcgctgggggtggggcagaggattgttcttcctgaccttggtatgaaaaccgtrtggagttcttagtgaggaaaatcactcttagcccaaattcctgcgaaggccgatgggattgtttttaagatttgttggattgctggatttgttgaagggagaactggaagaagctatcagaagtttacaggg

SEQ ID NO: 371676 - DNA, 623 bp, Homo sapiens
gagctttgtcacttgctgaaatccaagctgccctgtgaatttatccccaaacactgctccttttgagaaacttgtacaagctgccttaattyagtcaattcaaatgggttgatgggggctgttcccaaggcccaggacaggcaggggtttgtgacctgcagccctggaactgcctttgggtttcatggtctcagttgagacctgcccagggttgaaccagcttagtgctccctgggggtggttaagttcaaggacttcagggtccgattgaccttgggctgaatcttgacctggggctgtaagatgctcggtcaggaccttaacttttccaaggctcggtgtctacatctggaaaatggggataaacacagttcctccctgctgggattattgtaaggcttgaatgagatgataaatacaacatctgacttgcgactggacggtagcaaagggtttagttaatattataataagtagaatggaacagcattagattctcacacagggtcactatgttgttttctcccattctacccctgcatattaccctgaagcacccccaagcctctccctccccatccctcaagcccctccctccccatcccccaagctcaccaggtcct

SEQ ID NO: 371677 - DNA, 588 bp, Homo sapiens
aaaataaaataaaataaaataaataataaataataataatataatttccactcaagttttcttgacattacatatagataaataaagcgcagaacttttagttctttgcaaatcacaaatttttcaaaaatatatatatgaaaactctaaatgctatgagtctcatggcaaagagattcagtctgcaaacataatggaaaaatgcaatttgggtgyggcatcaccccaagaagtgaggccatttcagagctggctgggtcagcgtatcatgttcaagggcattcacctgcattggatatgctgcattttctgaggcatgccttaactgtcattgaggaggttcttgcctgactctctggcactggaactttggaagaaggcttgattctgcttccctttttggaaatagaggtcatttcctaacgtctgcccctctataaccaacccacagaagacttggctatgaccaatcaaaattaaaagtataagcatgctatgttatagtgatttttaagcttttttaaggttttgagtattttttatcaaagtaaatcttatataaaacagatttttttaaggtaatcagct

SEQ ID NO: 371678 - DNA, 600 bp, Homo sapiens
gccacagaacgggagctggaaaatcaggaaggtttgcccaacagaatgcagcaggcccccgccccatgctatccycacgaggagaccacacattcgctggttcatgatggccatgtagtgcaagggcttgcagatggccacatagcggtcataggccatcaccatcaggagaaaggcctcagtgccaccaaagaaatggagggaaaacatctgtgtgaggcagcccttgagagaaatgactttcctcttgataaaggagtcaaagataagcttgggggccatgacagaacagtagcagatctccacaaaggataagtagctgagaaagaaatacatgggggaggtgagcactttgctggccaggatggtcaccacaatgaggccattgcccagcacaacagctgtgtacatgaggagaaacatcacagaaatgaccctctgctcactccaattctgggaaaatcccacgaaaattatttcagtcacattgtttgtagcaaccatattttaaagcacaggagctgacagcctggaatcacagaaatcaaagaactctcctcaatcattagaaacatccttcccaggcctgaggactatcat

SEQ ID NO: 371679 - DNA, 572 bp, Homo sapiens
agttatttgacccaacatgtagtgaaaggaagtattgtataatgttttaaaaacatgggatctggggtcagattttctggatttgtatcctgattgtgccacttaagtatctcaggcatgtgacctctcaattttttcatctgcaatgtgggcacaatkatactctttgacctatgggatagttgtgaaagttaactgagtttgtcaatgtaagaggttcctagaacctgttacataataagtcatccacaattttgcatttatatttatcactgttattagttacttgagtctaatggctctttgtcctggagtaattttgagacaataaccagcatactgaagaaatttcaattgattcattttctttcttaaacaatcattattttttattgctctattctactattaagaaaatagtattgctgtataatctctgattagaatcacactcctcttaaaatatgggctatcagttaagaagcaaaaggttggtacagatccatgttccacattactcttttagccagttacccagcaaccagatgcaaacaatttataaattaaacccc

SEQ ID NO: 371680 - DNA, 608 bp, Homo sapiens
agctagattattcagcttattcttgttgttagggtggatgtggcacactttccaactttcacatcctcatcaaaagcaaaaagtccatgttaattccttttaactgactcttcatgaagaatataccatatgctagatcctcctgtacacatttataaatcctaagaattttctgtgtacctactcagatccagagatagagaacaatttctaacatcagatcttccaagtacaaacttccttgttacagaaggtagatgcttaaaaaaacttcatttacaccagaatgatttccgtctgtcactcattgaytttacctctttttttctacctctaattactataaaaatatttgggatggtggtgctatccactgacaataccctcatggaaaacaatctgggagtatgtaaataaacacttaaaaatgtttatcctctttacaccaataattcaacttttggaaatatatgataaacatcccagacatagacaaacatgtagatatacattgcagaagaaaagtagcatattgtggtgaaaaaagggcgtgctttgaaccaggcagacctgattcagtgcttacttagccattaactagctataac

SEQ ID NO: 371681 - DNA, 539 bp, Homo sapiens
atgagtttgccttggcccttcatgaggtcttgactacacccctaatatcagtcacctactcctacgttaccatttgcaggtggtgaggacagaaaaaggaatgggaaaggattcaaggcaaccatttcaagcaaaggaaaaattcacctgaaatagagtaaacttctacagttgggcatacagcctaattgccatgtacgctgatgcctagttgaaactcagttaaatgctggtggaagaaagggaccaccccaagtttcttattgttttaacacctaaaaacagaccatggccatatgtgagcatccatccttgaaagagatcacaggagtcatctgtcttcttggtggtcagtagattaagtgaggtatatgmaggtcacagtcaggagcaaattcctgaattgtttgcactctgaaagtatacaattaaatatggaaatttcgtttcaaaacaatgcatcacccttaaatttggttttataaatcaccgcctgacacattgcttttatttgcaaacctcaccagacagttgagatt

SEQ ID NO: 371682 - DNA, 588 bp, Homo sapiens
atgcactctctgaaatcttccggaatgattggttaactccggcacctgtcattcagccacctgaagaggatggtgattatgttgaactctatgatgccagtgctgatactgatggtgatgatgatgatgagtctaatgatacttttgaagatacctatgatcatgccaatggcaatgatgacttggataaccaggttgatcaggctaatgatgtttgtaaagaccatgatgatgacaacaataagtttgttgatgatgtaaataataattattatgaggcgcctagttgtccaaggttggtttttttgaattacttatactctccatgttttatgactgcagagctatttgcatttttggtttattttcaaaatttattaccaagagagtgacctaatttcacttgcattttagtaaatagtttgattgtcaataatgtattttaarttgttctaatgcagaacatctaattttgtgtcatttgtgtattttaaaataagcattcaagtatttattagtttctttataactggaattgtctagatgcttatgttaaaattactgccactgaatcatcctactctataa

SEQ ID NO: 371683 - DNA, 607 bp, Homo sapiens
ctctccttttgctgtttttagtattctctctttgtcactgacttctgacagtttcactgtaattttctttgggaggacctttttgagttgaatatatttgataacctttgagcttcctgaaactagatgttcatatctctctcccaagacttgggaatttttcagcttttattttattaaataagttttctacatcttttcatccttctggaacccccataattcaaaaatacatcctcttaatgttgtcccataagttctataggctctctttattcttttttttttctcttttttcttttctgcctgaatcattttaaaagacatgtcttcaagttcagaaattctttattctgcttggtctagtcagctattgaagctctgtattgtattttttaatattattcattgaattctttatcttcaatatttctgtttggttcttttttaatgatacctattcctttkttgaatttctcattcagatcatgattttttaaaatttcattgatttgtctatctgtattctcttgtatcttgctgaatctccttaagatcattattattaattccttttctggcacttcactttttcttttctgttggg

SEQ ID NO: 371684 - DNA, 592 bp, Homo sapiens
tgtcataccatgtttttgtggttgaaaaggtcataaaaaccagtcttttgcagaatagcacagctctctcagtgccaagaatcactgtttagacacaaagatgagcttatcaacagaataacttaccaacaatagttgacatattttcccacaggacagggcataccacataaattgtcacatttcgtggcttttatccttgagtatcttctttgtaagttaatggaagccagctacattttcagtgatgcatgtttacgctcttggatttgtgttggttgatttgccttcattttctttatcatttgaaaattatttatgcaggtttttcatgctttcagttttgtgaagataccttaaagcagtagaacagacacccccacactgtgctttatattttttcaagaggctgtttggcatagcatagctggatgtatgctttggaatcagacagactttggcttcaaaytctgcttcccctacttactagtactatgactgaatacattatttactgtctctaaattttaaatttgtataagtaaattggagataattatacttacttgttgggctatggtaaggattcaca

SEQ ID NO: 371685 - DNA, 565 bp, Homo sapiens
ttgctctatttcttacccaaccatttgtttagtccaaaatattttctagtcagctttgtaggctgagaatttaggggaatgtggaaattcattttacagcatttgtaatctgtgttggcttaacactttggctctagcccattcaccactaaaatttacccatgacctggctaacccatgatgtggtatgcaatgttaagctgtagtgagactgcctcagacactaactggagattcataataaagtaacaataaaactgctaacatttattgagcccttattctttgccaaggattgtactaagtgctttacatggagtaaattactaattcctctcagaaaccctttgaggaaggtgttaatatcacccttataatatagatgaggaaagtgagccttggaaatattaagtaacagattccaagtaataaaacttatccttagtaaactaaatgtaaactcagcccagagtttgaactctcaaccatttayactattatcacaagtgaatccaaccaaaatgacaggaaggacattctaacattgtatgagtagtactgttca

SEQ ID NO: 371686 - DNA, 583 bp, Homo sapiens
cagaggaagaatgctggagtagttggttgcaattttaaataggatgggcagagtgaatcaccctgaggtgatatttgagaacagatttgaaagagatgaggaagtagagcatcctatggagaggaaatagcaagtacaaagaccatgagatgggaccatgtccagtatattcaaggatcaaggagctcagaggggctataacttattgaactgataagtagtacaagaggaagtcagaaaggcaaggtcytgtagaccgtttgaaggactttggcttttattctaagtgacatggatgtcattagaggactttgtgcagaagaaacatacgagagacttaggtattaaaaagattactctggatttttgagaaaagactgtaaaagagtaagagtaaaatcagttaaagataattacaatgaacaagttgagggatgatgatggcttggaccagggtagtagcattggaaggagtgagaagtttgaaatattttttgaagggagggtcaacgggatttccagattaattatatttaaagagcaaaagaaagagataagtcaaggattatttcaaggtttgtgt

SEQ ID NO: 371687 - DNA, 491 bp, Homo sapiens
atttgaattagtaggaggaacaaaaaagactaagaaagaggaccatgttataggtgaagaaccaataatgagcaatgtcctggaaatcaagtaaaaaaatatttccaggagtagggagtgaggaattatatcaaatgctaatacataatgtaagatgaagaatgggaattgaccattggctacagcaatatggaagtaattagcaacattaacaaaagcattttcagtgggatcttggggacaaaaatctgattggagttggttcaagagaaatgggaggagaagaattagaaacagcaaatgtcsaacactttttaatacaatgaggacactgaataagagtatagctttggcagcgtttgtatattgagagatgggaagacgcagaatggaaggatgctcttgttcccaaatctgatgtatatgtagccctataatttgtggaagtcaattccagaagatgggctgaacaggcatacaactttctagga

SEQ ID NO: 371688 - DNA, 578 bp, Homo sapiens
caactcttaacttttaacctagctgagactttatatttaaagtgggtttcttatagacaatacttggtcaggtcttattttttattcactgtgaccatctatgtattttaattggtgtatttgcacatttataagtgattattgatatagtcacattaatatctactatgcttgttactgttttctattcactgtgcctgttctttattttatcctgctcttttgcaacattcattaattttaattgagctactttttcttttcttttattcagagataggatcttactctatcacccaggctggagtacagtggtgccatcatagctcactgtatccttgaattactgggcttaagcaatcctcccacctcatcctctcaaagtgctgaaagtacatgccaccatgcctagccttaattcarcttctcattttatctcctctgatagcatataaattttatttattttaaaaacatttagtggtatccctaggatttgcaatatgcattctaaactaatctatagctaccttcgaataacactatgctacttgtagcacaagtatagaatatttcca

SEQ ID NO: 371689 - DNA, 423 bp, Homo sapiens
gtcttctattcatctgtgggatacattataagaaaatatttggtatggtatcctcagaaacagaaaaaaggctgaagtaggctggggttatttattccagaaaaaataaaacagggatgaaaaatgaagtagattttctaatttagaatggtttccaggaatccagaggatggcgaacaaaactgactaaaaagaagcttcaggaatttaggggaagagaagaaaaaggaaaaagaaaaacctaagagtttaaggcagttttagaggatctaacaagaaygacaacaacaaaaaaatgtccacaatatttgtgaagatcaccattgggtgttgtgccatgtttttatctagatttttaaaaagaaacaggttaaataattgcccagcattctcactatccctgtgaactggcattaggggcca

SEQ ID NO: 371690 - DNA, 534 bp, Homo sapiens
ttgagcattgtatacttcgttttctttgaacaaggagcatatgaggttttttacaattactcacttttttgaagctatagatcctttcttctgaaggcatttttaaaggaagttcattaaaatagtctctatatctaggtattttatttcacttaagttccatggtcaatcgttataataattttcttgcatatacccttgaaactcttacccttctctcattttgtcacatttgcttggaaaagctgcaaccttgatcaaatgcaactgtcttccaagcctatacctgagattgtaactggggaaaaaagtgcacaatgataaattaatgaccacacacttaaaagacggttgtaacacttcaagaatatcttattatttattcctaatccattaaatcttccatttcacaccttctctgtcctcaaacctccaatatcrcctccttcatcttctctttcaggtgatgactttgcttcctgctttgcagagaacatttttaaaaattaaaggagactttccacagacttgtta

SEQ ID NO: 371691 - DNA, 596 bp, Homo sapiens
gtacttggactcagcaaaaagcctgtgctttaagtttagaatttttgatctatgttgttgttgacaaaaatatcatttttaataaagtagtcacataggtgaagaaattcaactctagatagactagatctgttacttgttcccaaccctctggagactgattttccttatttcccttatatctggagttattttaattctagtctgaaatttgacttataaagtcttcttccaggataaccatttttcttagtcaacttattccttttataatagaaaaaatkaaaaatcaaagtaattaattgaattctgattttaatcatgttaatatgagaatgaagatgccttattttgttgtttcctagactattttaatttgagtttaaaatcttgatattattttaaatgtcaggattttatttacttatggaatttttccccatgaagtacataaagaatattaaattgaaagttaaaaatgtaataatagtgctgttccttgtgtcaaaaaataccttgcagcaccagctgactgactgtttacacaattaggtttaaggcaattattgtcataatctatatttgtcacaaagtat

SEQ ID NO: 371692 - DNA, 592 bp, Homo sapiens
aatatacacccttattaggagcccttattaggaatgctgtatgtcacttagactataaaatgaagagtggctgtgagtagatcacaatgtctacaaatgggatagaattagttcttagytttttctatggtcttagaggatatgaatacaagaattaaataactgagacctggtaattaaatgttgattacaatggtgcctttagatagccagtttgaacaccactcttgagcagcaaaatggccaaacaactgactacaggagggaaaaacaggatgtgctaacctgaactgtaacaatgagcctcttaataaacaaacattgactgtagttataattttctatgatggccagaaagattttgtgtttttctgattttttttcatttgtattgtagcttttgaatgtacacagcgaaccacaggatggggccaaaaggccattgaagtgcgctctttgcaatccagggttctggaaagtgagctgaagcgcaggtcaattaagaagctgagattcctgtgcacccggggtgacaaggtatagcttacaccctccagttacagcaaaaataacgcaaccattgaaaatgaac

SEQ ID NO: 371693 - DNA, 586 bp, Homo sapiens
tacaaacacaacagcccttaatataaagataaggtgaagaggatgttgatgcattttttaaaaagtctttataaactgaattgtctctgcaaaccatagcagtaactagtagtactcaaargcactttagaagcactgaagttgactgggatggctactaagaataagggaaatgccaaggaggagggaaaatagaaaaggaaagaatagaagagaaaatgagagaagcagcagggagtagaaaaagactggagaaagatgatgatgaggaaaaaagcatagtttacatttaagatagtacaaggcccttagggtctagtcaatgcttttaaacatagacatgagagaacaaaaggacatcttctatcaatatcaatttacctctaacttccaggccctgccaccctcaaaaggtatgagtcctcattgtagcccctaagttgactgaaaactacttttacatgtagactgttgccttgaattgacctttatgggtaaactccatgcctcacacattcccttcctcaacattccaccctgctgtcccattccttcagcatctggctttggcctttgcaaagccaaa

SEQ ID NO: 371694 - DNA, 279 bp, Homo sapiens
caagtgaaatctagcgaggcaatatggaagactaaggcaatcgtctagataaaactacatatttataacaattatctggttgtttcaataaatgtgtgtatatgtgtatgcatgcatgtaggaggagtacgtggagggagcagtgtgtatgtgtagcaatgacaattcccagatttggaggaaaggaaggaaagcgatctaaaggatcatggaagcacgtagaaaccaactttrccttgctcacaactttgacttttttctttcctccttcaaatagtt

SEQ ID NO: 371695 - DNA, 609 bp, Homo sapiens
atatgatgtgatgaaaagggcatttcacttctgtgatatccttcccaaaaattcacataacctcaatctaatcataagaaaacatcagccaaacccaagttgagggatattctacaaaatacttgaccagtactctttaaaagtgtcacagttatgaaaaacaggaaagactgaggacttgtcacacactggagaagtttaagaagacatgatagctaaatagaatgtaggatccaggtttggttctagaaaaaggacattagtgagaaaactgggaagtcagaataagttttaaaatttagttaagagtattataccaatattaatttcttcattttgacaattgtagcatggccatctaagatgttaacattggaagaaactggggaaaggatatacaggaaccccctgtgctatctttgaaactgctctataagtctaaaattatttcaaaataaaatttttgaggagtcaaggtacagggggaactcttctgaaatgctctcttaacagtagcacatttctatgatctrttgtctgtatatgccagacttctatggagtcttgtagaatgatttggcatattaactcagtacatggttccgagac

SEQ ID NO: 371696 - DNA, 587 bp, Homo sapiens
ctgagtctttcagatctgcactctgataagctaatgggattcctggaggaaaactctcgaaagtgtagacatgtcagagttgaaaccagaagtcaaagttgayattttttctctttaatttggtagattttaaaaagataacttcttttttttattttttatggtggtaaaaaaccacaacattaaatttactattttaatcatttttttaaatttcttttttgagacagagtctcactctgtcacccaggctggagtgcagtggtgcgatctcggttcactgcaacctctgcctcctgggttcaaacagttctcatgcctcagcctctggagtagctgggattacaggtgtatgccaccatgcctggctaattgtttgtatttttagtagagaaggggtttcattatgttggccaggctggtctcaaactcctgtcgccaagcaatccacctgcattcacctcccaaagtgctgtgattacaggccatttgtaaatgtacagtacagttgtattaactatatgtacattgcttacaactgatctctacaaccttttcgtcttgcaacttttaaactataccaactg

SEQ ID NO: 371697 - DNA, 608 bp, Homo sapiens
agtctgaaatttacatggaaatggaagtaactaaaacagccaaagcagttgcagtattcatactgcctccctttaaagacttactaaaagactgcmgtaaccaagctaatacagaactgacaaaatgatatgtaaatcaacagaacagaattgaaaatcgaaaaacagacacgcaaatacatggtcaactgagtttcaataaaggtgccaaagcaactcaatggaggaaaatgaaagtcttttcataaattgtgctgcaacagctgaatatgcaaatgcactttaaaaagtgaacttacgggaaattgtaggtcaatattttaaaagtcaacaacaacaaaaagcatgcttttgtgttctattccctattgcaatatgcattatttacatattcccattatttgaatacgcaaataatgaatattgactcccacctcctaccatatataaaaattagctcagaatggattacagacctaaataaacagctaaaactataatgttctagagaaacacacaggagaaaatttttgtgatcttgtggtaggcaaaaattcttacaggatacagaatatacacagacctgtaaatgaaaaaattgaaaaact

SEQ ID NO: 371698 - DNA, 555 bp, Homo sapiens
ggggaaagacatactgtaaaatcaactggaactctcacatcctgctggtaatggtttgacagtttcttctgaagttaaacataatcttaccatacaactcatcaatctactcccaggtattacttgcgagaaatgaaaatatttgtccacaaaaaaacttttacttaaaccttcataaaagctttaatcataatagccctaaacttkaaacaacccagaaatctattaacaggtaaaaaactaaattgtagtttacttagcaataaaaagaaacaaacatgataaatgtaacgtgaatttcaaaagcattatgcaaactgaaacaagtcaaaacaaaagactgcatgtagtatgattccatttatttacaattctagaccacgcagcagctacagaaagtgacaaaaagcagagcaatagttgttgcctgagaccagtgatgaggaaaaggcactgattgctaacaggcacaggggaactttctgagatgatggaaatgtcctacattaagatggtgccattttcacaactgtatgtttatgaaactaatcaaaa

SEQ ID NO: 371699 - DNA, 562 bp, Homo sapiens
acaccctattccttcccagcccctgacaactgctaatctaggttctttttgcctattctggacgtttcctataaatggaatactaaaatatatggccttttgtatctggctgctttcacttagcattagtcctcaagattyatctgtgagctttgtgtcagtacttcattcctttttgttgtggctgaaaaatactccattaaatggatttaccacattttgttaactgctcattagtcagtggacatttaggttgttttcatttttgactatcatgaatttgaacaatgctattatgaacactggtatataagtttttgtttgcacaagtattttcggttttcttatgtatatacataagagtataattggtatattgtatggtaactttatatttagtttttttaataactacccaactgttttccagtgtggctgctccattttatgttaccaccagcgacttaggcgttttcgatgtctccacatcctcatcaatgcttattgttgtcttttttattacagccatccttttgtttttgaagcagtatgttgttttgct

SEQ ID NO: 371700 - DNA, 491 bp, Homo sapiens
tataactgaagtttacagatctttttagatgacttagattctttaggataaggtgaaaattaattatggtattttgtctttagctataaaattaattttgaaaaacctttctggctcatctttttagatgtatggtatatatcctgcacatctgaattacataggattatattttgagttttagtaaacaacatgggcattagcttctttaggaagttgatgatattgagtggtcttgataaaattaaaatatggtttatatgagttcccttgtacttytaatgtggcaagaagacaagtatatgttacatttttcagataataaaactaatgagggaagaaacaaagctttgatcataaaatgtctttaagctcgaagggacccatgtggacctagtccaggatgttttaaaattgctattgagccctttgttgaaacaaaatattgagcaagtgtaactgtaaaagagatattgatgtatttaacaatg

SEQ ID NO: 371701 - DNA, 513 bp, Homo sapiens
ttgtggcttctgtagccctagtcctctctccagtatgccatgatcctaatgtccctacacttgcttctccccctgctagcagctctacactctgtggcaaagagcatcaggacaggrtctctttaccggatattccccttcaggcagcaacagactgggagagcagttaacatcactgacttagaaataattttttttttttaattacgggtttctcagaaatcatgtagaagttgaatgagttcagagccagaactagggcatgggtctgctgattccaagactccaatatctaccacatctgcattctggtttatcagctcaagattccagtctagtttctcaacactgtggaatgaaaaactgctcagccatcaacttgtaaccaaagatgactaatattttagccaataaggattaaaaggaggaaaacgagcttagtttccaggtactaatatccttttaatagcctaaatttgcagtaaagaaagtacaataagctggaaatagcca

SEQ ID NO: 371702 - DNA, 541 bp, Homo sapiens
ctgctggctttggagacagagaaaggggccccgagccagggaatgcagatgacctctagaggatgcaaaagtcaaggaaaaggattctcccctagagcctccagaggaaacacagcccagctggcaccgtgactttagcgcagagaaacctgtgttgaccttctaacctccagaactgtaagataataactgtgtgttgtttgaagccactaaatttgtggtgatttgttacagcagccttaggaaactaaatcagtgacccattcctggggtgcatgaattccgtggataatgaatagaaatccycattcttaattaaaagattttttatgatgaaagtaatttttagttccaagagcttggttttaagtgtcaaaaggaaatcattaaggaatcataaaattagggtcataaacaataggctgaagagagaatagataccctatacctggggaggccggataatggttttctaggctagaggaagagagctagacaacaaaggagtaatatgctgcttatctcttaatggggcccttgc

SEQ ID NO: 371703 - DNA, 541 bp, Homo sapiens
ctgctggctttggagacagagaaaggggccccgagccagggaatgcagatgacctctagaggatgcaaaagtcaaggaaaaggattctcccctagagcctccagaggaaacacagcccagctggcaccgtgactttagcgcagagaaacctgtgttgaccttctaacctccagaactgtaagataataactgtgtgttgtttgaagccactaaatttgtggtgatttgttacagcagccttaggaaactaaatcagtgacccattcctggggtgcatgaattccgtggataatgaatagaaatcctcattcttaattaaaagattttttatgatgaaagtaatttttagttccaagagcttggttttaagtgtcaaaaggaaatcattaaggaatcataaaattagggtcataaacaataggctgaagagagaatagataccctatacctggggaggccggataatggttttctaggctagaggaagagagctagrcaacaaaggagtaatatgctgcttatctcttaatggggcccttgc

SEQ ID NO: 371704 - DNA, 544 bp, Homo sapiens
tacaatatcatattgtcttaaaggactggcaatgatcacatctaattagctgtagggcaaagactgagaaagttgtagaaagttagcaagtttgggctgggccatgatggctcatgcttttaatcccagcactttggcaggccaaaatgggwggatcgcttgagcccaggattttgaggctgcagtgagctatgatcacaccacagcactccggcctggatgacagagcgaaaccttgtcttgaaagaaaaaaaaaaaagaatgcaggtctcccttaaaacctgctgagtagaattgactgttttgttttacacatactgttacaacctggaattcagagatttatcatccaacaatgggtttattaagctattttttaattaaaaaatgtaaagtttgtactgtggtaggagaatacatgtaaattaatctcagttcctagcatatttcctgatcaaagtaggtgataataattattatcatatttatgactaatattctttgttttattttattcaggcacatgctctaaatattatttatt

SEQ ID NO: 371705 - DNA, 570 bp, Homo sapiens
ttgaatttaatctcagagaggttttccctgatcgccttatcaaaagcaactgctattccctgttattctctgcttcagctcataaaccttgtcctttatagtacaccaaaaaaagcacaatcatttgatttttctggtctgtcttccccactagaatgtgagctccatgagagggaggcccttgctggtcttgttcacggctgtctccctaaagcctagcatagtgcttggctcatagtaggtatatgtgagtatttttaaaatattggtgtgtccattatgtattcttgcttaacaagccatcctacaatgtagtggcttgaaacaaaacagtaatttctcatgattttgtggtctggctgtgtggttctggtcttgtctgggctcactgaagaagctgcattcagctggtggattggctggagctagaaggtcccagagggcctcacttggtggggacagctggaagacggrggcccctctctttatgtagggtagcccaaatgtctttacatggcatctgagttccaagagtgtaagcctcaatgtgcacatttttttttttttttt

SEQ ID NO: 371706 - DNA, 561 bp, Homo sapiens
ggacagggtcatggctcttggactgggaaggaccccctgatatggtttggctctgtgtccccacctaaatctcatcttgaattgtaatccccgcgtgtcgatagagggacctggtggtaggtgattggagcatgggagcagtttcccccgtgctattctcatgatagtgagttctcacaagatttgatggtttataagtggcagtttcccctgcactctctctgctgccaccttgtgaagaaggtacttgcttctccttctccttccaccatgactgtaagtttcctgaggttttcccagccagatggaactgtgagtcaattaaagctcttttgtttataaattaccaagtctcaggtggtatgtttatagcagtgtgagaacggamtaatgcaacccccaaagcatctactctgcagggtaaaatccagcttccttagtttgatgtataaggcctggtacaacctgactccaccccgttttctctctcacctgccttccctacacacatacccactccacacaatgaacataccttgtctcccacaggactacaggtct

SEQ ID NO: 371707 - DNA, 629 bp, Homo sapiens
tttctcatgactgtctgagaaagaggtccactcctaatgcagattctgagtgttgccctgaaaatctatttatcctcacatggtgctttgttggattggaggggaaaactgggacagcttctcacctcctagagaaccaggctcctcaaaatagctgtttgaactaaacttttacatatataatatttttttcaaaacatggaaaaaggactccagaaccaattaaaaaagatttctgacatctacaatttcgaattcttctttccatgagtctaaaaacatctaaattttatttctctaggagttttatgtatgaaaattgagctttaaggagtaaaaatgttttggcttataaatcccttgaccaaaatttttggtattggatgcatatctttgaaaaagaaaayccacagggcttttaaaatatggttcaatatacttttcaaaaatctagtaaggcccacatgaaaagatgtttatcattattaagcattatgctgtgtgcggtggcccacgcctgtaatcccagcactttggaaggctgaggcaggtggatcgcttgaggtcaggagttcgagaccagcctggccaacatgatgaaacctcgtctgtactaaaaatacaaaaat

SEQ ID NO: 371708 - DNA, 539 bp, Homo sapiens
tattaataagaaaaacttaaagtataaaagaaaacataattggtaaaaacttaaaatatttttaactttagtaagcacaatttacactgcaaaaattgcaggaaggggggagaattttgctatattaaaaataaaacttataaggcaaactggaattggagatgatagtttcagtcacataaaaactatgatttacacatttttaaaattgttattttttttaccctgaaaatcttagtgttgagtctggtgcttaatcttcacagtatttcaaaatctggtctaaagaccacatgaacgataattatgtagtaagtttgttaaaaatataaattaccatgtacagctaattatttaaaaactatttagggcacagctgtaatagaaaataaggcattaaaaaggatgtgggaattagaagctcaaattccttcaaatattaattaargcctttcctaagaaagtagtgagatatactcagttctaaactccagtaataatgaagaatgtgaagaaattcagaaaggtcacagaaatga

SEQ ID NO: 371709 - DNA, 593 bp, Homo sapiens
actgtacaaattttaggctttatggaattaataatcatgacctgtgtttcacaattcttgtttccttgtcaatccaaaaaggaatgctcatggcctgtgttttacaactcacgaattatccatacagttttcccatgtggaacagaatatgtattttatctggtattgtttaactgtgaaaatatgtgccaaagattatctatatatcctttgagttacagatagataactcattctattctcatttcataatgaatacctaagttcaaacacattctaggataacaactgagatgtgagtgacttctacgggaatgagatgatcaaactgtatatatttttgccttttcaaaaataaaatarctacagaaattcactagtattttttaaataatggaattaattctactttagttttgtacaattatcctacccccatcttgtctttgtaactcaaaattcaattttatttgatgcatctagtgatttgtactgataatactaaataaatgatgtctttgctaagaacttaatctctagaagtacactgaaacagaaaagcaaaaaaaaaaaaaaaatgcagatggaaaaaa

SEQ ID NO: 371710 - DNA, 596 bp, Homo sapiens
tcaaataattgctttgccaaactcgaactccagagctcttcaaatggtagatcgttgtattcctagatgtaggtatttgtgtgtgtgtgtggttttaaaatcatttatttaacaaaggagtagaagttcagaattacaaaaaaaatgcaaatatgacagatatggaaatgacttttctgcaaggtaaggtagtatggtagaaattgagagttttaaaaaaccacatatgtacctggccctaataaattgattcaaccttctcctttctctttccccagcatcacactaaatgaaaagctatcatgtgacaatgagaagcaaaaacagatttagataatggtactattggaggcttcayctacttcaaaagaatttcatgttttaaaaggcacatatcaaggataaatgtaaaatgataaaacttctcatgaagagtattcgctgcttcagctctctatacaaacatacattattctctatccctccctagctcctgcataacgaattgcagcagagaacacaaattatctttccctctagtggcagaaaagtctgcaaaatgacatatctcacaaatggtgaaaacaaacaaaact

SEQ ID NO: 371711 - DNA, 531 bp, Homo sapiens
agacctaagattttgtgatcatagttccttgattccacaactaaaagaacagtgtttggtgtaaacatccttttccttcttagcatgaaatttataggctaaccttgcctttatctcttctgatttgttggtgctgtcacactagtggttaaatattttgaataccactcccggatagcttggctaaaccgttaaacaatatttgtcatttaaaatcatctactaagcctagatgaatctcttagtgcaatgtacagtaagtaagacataattttttatataataattcttctaggtaaagaaatatcttaaaagtatctgattgaagaaacaagggggtgtggttaataggcatttaatgagtatttgwgaactttctgagaaacctcattatcttctctctgtattcgtggcaaaaaaacaaaaacaaaaacaaacaaacaaaaaaaacaccaccaccaccaccaccaccaacaaaaaacccttttcctctactgcaattctgcctactcgtattccttaggaacccat

SEQ ID NO: 371712 - DNA, 570 bp, Homo sapiens
tttttggagaacctaaatcagaacaggggcattagatgacccacattttcaatgacttccagcctaagaagtcctaatgtggcctttcaatgacatatattgaaaggcatttctgtcttagaatgtgtttaactgggagatgagttaggaggctaatgcattaatcctgcattagatgctaattaaaattacattttattcaccctaaaagtgagactatgcattcttctttttcwgttgctatgtgaagcaaatggaattctacttttctatttgcctaaatattccttaacctttactttgaacaacagcttgccacatcattatagaagatcaagaattaaactgaaatacagtctttgacagtttgtattttgacaggtaaagctttggcattcttttttctccatttataggagcatgttcctaaggctttcttcacccgtgcatagctttctgttggtaattaggggaaataggacacaactgccatgttgtgcaatgctgtacaatgtgcccagcatctgcctaggaaagaaattctgaagttacagaaaaaaaaatccattt

SEQ ID NO: 371713 - DNA, 570 bp, Homo sapiens
tttttggagaacctaaatcagaacaggggcattagatgacccacattttcaatgacttccagcctaagaagtcctaatgtggcctttcaatgacatatattgaaaggcatttctgtcttagaatgtgtttaactgggagatgagttaggaggctaatgcattaatcctgcattagatgctaattaaaattacattttattcaccctaaaagtgagactatgcattcttctttttcagttgytatgtgaagcaaatggaattctacttttctatttgcctaaatattccttaacctttactttgaacaacagcttgccacatcattatagaagatcaagaattaaactgaaatacagtctttgacagtttgtattttgacaggtaaagctttggcattcttttttctccatttataggagcatgttcctaaggctttcttcacccgtgcatagctttctgttggtaattaggggaaataggacacaactgccatgttgtgcaatgctgtacaatgtgcccagcatctgcctaggaaagaaattctgaagttacagaaaaaaaaatccattt

SEQ ID NO: 371714 - DNA, 615 bp, Homo sapiens
tatataaagttatttaaaattgtgctataactagtaatatattgagaggatgtgcaggtgtaggtgaaggacatgaagtaaatcatcacttattatataagaaaaggtaggtaagagatgacaaactaataaatcaaccagtaatatttactagagtaagtaaaaattaaaacaaaaaagttaaagagctaagagtcatttaatctactgatatggttggctttgtccccacccaaatctcatcttaaactgtagctcctgtagttcccatgtgttgtaggagggacctgggggaggtaattgaatcatgggagcagtttccctcatactgttctcttggtagtgaataagtcttataagatctgttggttttataaggggtttcccctttggattggctctcattctctcttgcctgccaccatgtaagacatacctttcaccttccaccatgattctgaggcctccccagtcctgtggaactgtgagtccattaaacctcttttkctttataaattacccagtctcaggtatggccttatcagcagcatgagaatggactaatacatttaccaagggaatattatataaccattagatattattaggaacaca

SEQ ID NO: 371715 - DNA, 594 bp, Homo sapiens
agttcctaaaatcagatcacagatataacaatactgagagacactattctaggagacccggtttaagcaactaacagatgttcctagataacggctctatagtgctagttgtatacataggaaaaagaaaaaacagatccatttgtgcagagatgagaactgaatgtctcaaattttatatcttgtaagaaccaggaatgtttccaacatgaagaaatgattaatgtttgaggtaatgaatatcccagttacccagatttaatcattacasattgtatccttataacaaaataccatatgtaccccataaatatatgcaactagtatgcatctataaaaattaaaaataaaaataaaaaaatttaaataaaatttttaatttttaatttttaaaaatttcaacctggataatgaaaacaacaatattacaaataaataaatataatttactagttattttaacctcctcttaatttaaaaaataaagagattagactggattttaaaaatgttgttttaattgggcaggcgtggtggctcaagcttgtaatcccagcactttgggaagccaaggtaggcagatcatgaggtcaa

SEQ ID NO: 371716 - DNA, 594 bp, Homo sapiens
agttcctaaaatcagatcacagatataacaatactgagagacactattctaggagacccggtttaagcaactaacagatgttcctagataacggctctatagtgctagttgtatacataggaaaaagaaaaaacagatccatttgtgcagagatgagaactgaatgtctcaaattttatatcttgtaagaaccaggaatgtttccaacatgaagaaatgattaatgtttgaggtaatgaatatcccagttacccagatttaatcattacagattgtatccttataacaaaataccatatgtaccccataaatatatgcaactagtatgcatctataaaaattaaaaataaaawtaaaaaaatttaaataaaatttttaatttttaatttttaaaaatttcaacctggataatgaaaacaacaatattacaaataaataaatataatttactagttattttaacctcctcttaatttaaaaaataaagagattagactggattttaaaaatgttgttttaattgggcaggcgtggtggctcaagcttgtaatcccagcactttgggaagccaaggtaggcagatcatgaggtcaa

SEQ ID NO: 371717 - DNA, 594 bp, Homo sapiens
agttcctaaaatcagatcacagatataacaatactgagagacactattctaggagacccggtttaagcaactaacagatgttcctagataacggctctatagtgctagttgtatacataggaaaaagaaaaaacagatccatttgtgcagagatgagaactgaatgtctcaaattttatatcttgtaagaaccaggaatgtttccaacatgaagaaatgattaatgtttgaggtaatgaatatcccagttacccagatttaatcattacagattgtatccttataacaaaataccatatgtaccccataaatatatgcaactagtatgcatctataaaaattaaaaataaaaataaaaaaatttaaataaaatttttaatttttaatttttaaaaatttcaacctggataatgaaaacaacaatattacaaataaataaatataatttacyagttattttaacctcctcttaatttaaaaaataaagagattagactggattttaaaaatgttgttttaattgggcaggcgtggtggctcaagcttgtaatcccagcactttgggaagccaaggtaggcagatcatgaggtcaa

SEQ ID NO: 371718 - DNA, 636 bp, Homo sapiens
attcatttattttccaaccagcttattctagttcagggttttgggtggctggagcctatccctgcagctcagggagcaaggtgggaactgacyctaataggacactattccatcacagggcacacacactcctacacactcactcagacggggatcattcagacatgtcaattcatgtaatgtgcacatctttgggatgtggaaggaaacgaatattcagagaaaacccatgagagaagtacatgtacactccaaacagacagtggctctggccagaaattattttttttctcatcaacattataataaaacaacattgaacaaaacaattttattcgaggacctactgtatactaaactatatttcatagaaggctaattaaaatgtagtctgtaacactgtttgctaaaggagagaaaaacagcactataatccctagacctactctataagccacctgtgttgttttatatattcagaacataactactattatttttacacacacacacatccacctgttcaccactcccctcccacacacacatacacacacagcccaaaaggttgagtgtatgacccaagctagaccagccaatcatggcatcccacacgaaccccatcaattggcccag

SEQ ID NO: 371719 - DNA, 616 bp, Homo sapiens
gtagaaaacaacatcaataaaatgattaccactctctttgacaccatgagaatagaagaactgaatcgctatcgagacactcttaggcgagcgatccttgttatgaatcctgctacagccaaatccttcattactgaggtaagtgaaaattgtcttggsgtgagagttgtacaaaacaattaaaagctttggaatagaccctacagaggagatgaaaattaagagcagtgcgagggaattaactacacaattcttgttaacactaatggaggtagcatagtgaatgcctcacttatctcatttaccccttactgtccagttagttgctgagagtatttgtgtttatatatatttaggcacatagacagaacaattttaagaagtcttatagaagtttaaaagtgctgttgacctgaatgaatctggcaagatcaagaataaattcacaagtgcacagctctctaactaatccttagtaatttttgtaagttaaaattttacttctgaaaaaataattacttgaatcaggacattattgcctaaacatgattactgttacaaaacatatacagatttatatcttctctgtgaactttgtaccaacacaaataattaa

SEQ ID NO: 371720 - DNA, 616 bp, Homo sapiens
gtagaaaacaacatcaataaaatgattaccactctctttgacaccatgagaatagaagaactgaatcgctatcgagacactcttaggcgagcgatccttgttatgaatcctgctacagccaaatccttcattactgaggtaagtgaaaattgtcttggggtgagagttgtacaaaacaattaaaagctttggaatagaccctacagaggagatgaaaattaagagcagtgcgagggaattaactacacaattcttgttaacactaatggaggtagcatagtgaatgcctcacttatctcatttaccccttactgtccagttagttgctgagagyatttgtgtttatatatatttaggcacatagacagaacaattttaagaagtcttatagaagtttaaaagtgctgttgacctgaatgaatctggcaagatcaagaataaattcacaagtgcacagctctctaactaatccttagtaatttttgtaagttaaaattttacttctgaaaaaataattacttgaatcaggacattattgcctaaacatgattactgttacaaaacatatacagatttatatcttctctgtgaactttgtaccaacacaaataattaa

SEQ ID NO: 371721 - DNA, 616 bp, Homo sapiens
gtagaaaacaacatcaataaaatgattaccactctctttgacaccatgagaatagaagaactgaatcgctatcgagacactcttaggcgagcgatccttgttatgaatcctgctacagccaaatccttcattactgaggtaagtgaaaattgtcttggggtgagagttgtacaaaacaattaaaagctttggaatagaccctacagaggagatgaaaattaagagcagtgcgagggaattaactacacaattcttgttaacactaatggaggtagcatagtgaatgcctcacttatctcatttaccccttactgtccagttagttgctgagagtatttgtgtttatatatatttaggcacatagacagaacaattttaagaagtcttatagaagtttaaaagtgctgttgacctgaatgaatctggcaagatcaagaataaattcacaagtgcacagctctctaactaatccttagtaatttttgtaagttaaaattttacttctgaaraaataattacttgaatcaggacattattgcctaaacatgattactgttacaaaacatatacagatttatatcttctctgtgaactttgtaccaacacaaataattaa

SEQ ID NO: 371722 - DNA, 590 bp, Homo sapiens
taagtgaaaattgtcttggggtgagagttgtacaaaacaattaaaagctttggaatagaccctacagaggagatgaaaattaagagcagtgcgagggaattaactacacaattcttgttaacactaatggaggtagcatagtgaatgcctcacttatctcatttaccccttactgtccagttagttgctgagagtatttgtgtttatatatatttaggcacatagacagaacaattttaagaagtcttatagaagtttaaaagtgctgttgacctgaatgaatctggcaagatcaagaataaattcacaagtgcacagctctctaactaatccttagtaatttttgtaagttaaaattttacttctgaaaaaataattacttgaatcaggacattattgcctaaacatgattactgttacaaaacatatacagatttatatcttctctgtgaactttgtaccaacacaaatarttaagtgtctgaaactctgtaaagtgatgactagtgtacattttatgatgctgcatcctcaaatttttaattgtatctgttcatttagttagaagctctgaaacttagtaaaaatac

SEQ ID NO: 371723 - DNA, 539 bp, Homo sapiens
tgcatttcaagatgagttttggtggggatttcaaaccatagtaatgctgtgtcttctttgccaaggataattttaatgagaattttggctgttatcaacaaaagtacttgagaattaaatgtattgaatatattggcagagaaagacttttcaactgaaaaatgaataagtctaatctagcctcaaggtgttgccaaaatcttccagccttatctatgtagagagctggcaggtataaatccaagggaggttgttgaacatgattctaatcctgccaatttattaattcatggtttggctaggatgcaggatcctgaatatatttcttcttctgaagctttcataccaagacaaaataatagtttaggaggttgcttagaaaacactttagtgagaggatcaggaggaaggaaagagagacaccataatatgtcagtatttttcatgtagaaattcaatatgtaagatattgctgttagaaaatttataaccraaacaattatttaatacaataattatgaaattttattttgtgggac

SEQ ID NO: 371724 - DNA, 590 bp, Homo sapiens
acaggacaaactctgtcttgcttgttgaaacaactccagtacctagcaatgtgtctggtrcattcttcaggtgctcaacaaggcagaatggctttgtttattaattaaataatatagactcaaatccattcagtccctgaccaggactcttcataaaacagtggatctcaaaatcattccctgaacctacaatattgcatcaactgagaactcgttagaaattaaaattttcagaccccatgccagaccttctaaatcagaaactattggggtaggcccagcaatctgtgtttaaaaagccctccaggtgattataacgtatgctaaacttgagcaccattgatgtaaacaatactcaaatacattgtgcacagctttttagaattatgagagtggcttaagggtatattacaagaagacaattcctatggacagattgtgaataattttaatttctcaagaattttgttctaatttttttatgtataggatagttggaacgtatgttctacttcttacaagtatctttattttaactataggactactcccctcatgtaacaaattgtgtaatttgtataggaaggctg

SEQ ID NO: 371725 - DNA, 521 bp, Homo sapiens
gctcacacctgtgagtggctcacgtccaaagtggcgcttttgggggcyaaggcaggcagattacagggtcagggaatcgagaccatcctggtcaacatggtgaaacccccatctctaccaaaacacaaaaaaaattagccaggcatggtgatgcgtgcctgtagtcccagctactcaggaggctgaggcaggggaatcacttggacctgggaggcagagattgcagtgagccaagatcatgccactgcactccagcctggcaatacagtgagactccatctaaaaaaaaaaaaaaaaaaaaaaaaaggaacaaagagtcaacgtatcagaatctctgggacacagctaaagtactgctttagtggtgtaagaggggaacttataccactaaatacccataacagaaagctaaaaagatctcaagtcaacaccctaatatcacaattagaagagctagaaaggcgagagcaaactaatccaaaagctagcagaagacaagaaataactaagatcagagcaga

SEQ ID NO: 371726 - DNA, 521 bp, Homo sapiens
gctcacacctgtgagtggctcacgtccaaagtggcgcttttgggggctaaggcaggcagattacagggtcagggaatcgagaccatcctggtcaacatggtgaaacccccatctctaccaaaayacaaaaaaaattagccaggcatggtgatgcgtgcctgtagtcccagctactcaggaggctgaggcaggggaatcacttggacctgggaggcagagattgcagtgagccaagatcatgccactgcactccagcctggcaatacagtgagactccatctaaaaaaaaaaaaaaaaaaaaaaaaaggaacaaagagtcaacgtatcagaatctctgggacacagctaaagtactgctttagtggtgtaagaggggaacttataccactaaatacccataacagaaagctaaaaagatctcaagtcaacaccctaatatcacaattagaagagctagaaaggcgagagcaaactaatccaaaagctagcagaagacaagaaataactaagatcagagcaga

SEQ ID NO: 371727 - DNA, 521 bp, Homo sapiens
gctcacacctgtgagtggctcacgtccaaagtggcgcttttgggggctaaggcaggcagattacagggtcagggaatcgagaccatcctggtcaacatggtgaaacccccatctctaccaaaacacaaaaaaaattagccaggcatggtgatgcgtgcctgtagtcccagctactcaggaggctgaggcaggggaatcacttggacctgggaggcagagattgcagtgagccaagatcatgccactgcactccagcctggcaatacagtgagactccatctaaaaaaaaaaaaaaaaaaaaaaaaaggaacaaagagtcaacgtatcagaatctctgggacacagctaaagtactgctttagtggtgtaagaggggaacttataccactaaatacccataacagaaagctaaaaagatctcaagtcaacaccctaatatcacaattaraagagctagaaaggcgagagcaaactaatccaaaagctagcagaagacaagaaataactaagatcagagcaga

SEQ ID NO: 371728 - DNA, 581 bp, Homo sapiens
tattttactcttttaaaatcagtgtctaggcccatctcctagttcttctttcattcctactgcctctgatcatgggcttttttttttttttttttttttwaaaagtcctttattggagggcttctcatttgtccttatttccatgtgaatctttaggtctgtttccatctgctttttctaggaaattcccaaagttctgatatcctaggggcaattctcttggtttttcatttctgttaaaattcatttttgtttgggcattttctctaccatttcaatggaacttagggaatgagaccaggtgaacacttttcttcaatcagctatcttaaaccttcatttgaccttcttatctcaaataaatccaagattattttccagaaaagccatctttaaaatattctgctttatactaagcagtcagttagctagagttacagaagaaaaacaagttattatttccctcaaattaaaattattatccagaaaatacagaaacagataaaaagaaaattaaaaaaaatctaaaagtctcaccatcatatgcatgataacaatttgatgtgaatagtttgaatttt

SEQ ID NO: 371729 - DNA, 581 bp, Homo sapiens
tattttactcttttaaaatcagtgtctaggcccatctcctagttcttctttcattcctactgcctctgatcatgggcttttttttttttttttttttttaaaaagtcctttattggagggcttctcatttgtccttatttccatgtgaatctttaggtctgtttccatctgctttttctaggaaattcccaaagttctgatatcctagkggcaattctcttggtttttcatttctgttaaaattcatttttgtttgggcattttctctaccatttcaatggaacttagggaatgagaccaggtgaacacttttcttcaatcagctatcttaaaccttcatttgaccttcttatctcaaataaatccaagattattttccagaaaagccatctttaaaatattctgctttatactaagcagtcagttagctagagttacagaagaaaaacaagttattatttccctcaaattaaaattattatccagaaaatacagaaacagataaaaagaaaattaaaaaaaatctaaaagtctcaccatcatatgcatgataacaatttgatgtgaatagtttgaatttt

SEQ ID NO: 371730 - DNA, 581 bp, Homo sapiens
tattttactcttttaaaatcagtgtctaggcccatctcctagttcttctttcattcctactgcctctgatcatgggcttttttttttttttttttttttaaaaagtcctttattggagggcttctcatttgtccttatttccatgtgaatctttaggtctgtttccatctgctttttctaggaaattcccaaagttctgatatcctaggggcaattctcttggtttttcatttctgttaaaattcatttttgtttgkgcattttctctaccatttcaatggaacttagggaatgagaccaggtgaacacttttcttcaatcagctatcttaaaccttcatttgaccttcttatctcaaataaatccaagattattttccagaaaagccatctttaaaatattctgctttatactaagcagtcagttagctagagttacagaagaaaaacaagttattatttccctcaaattaaaattattatccagaaaatacagaaacagataaaaagaaaattaaaaaaaatctaaaagtctcaccatcatatgcatgataacaatttgatgtgaatagtttgaatttt

SEQ ID NO: 371731 - DNA, 575 bp, Homo sapiens
gatttatccctctgtgtttcctgagttgaaatccggctcttttgtgcagccatgatgtgtcatttgatttagaaggccattagtgaaagtagctgctatttactttgctggggatagtagaatattaatgtgactgcttgccaagtatcttaaggtgtaagaggaagagaagaagaaatatcattttactgaatacttaaaattcagaccagagcagaataacccgtatctatttccattggcagtatagcagaggggaatgtcttcaaattttttttcactcaaatttaaggactacacaatgggaagtgattactaagggaagtcatggaaatgcttcctttggagatatttatttaaaaaaaaaaacacgaggctttctagatagaagaaagtcattayagctttggagtggagcagaggtagtcataaggaggccaatgcaaacttgatgaccttttgaaatttccactagagccttaagagctgctatataccttgatcagtgaccacagacccatagtagaaggccttaacaaaattggcttggaattggatgtgtattggatggtcat

SEQ ID NO: 371732 - DNA, 369 bp, Homo sapiens
taaagagcctatcactgatagaaggtggagcatagataactcctgacacaaatcacaacatagcagtgctatcgttaaaattttcactgacagtgaattagaattgcatcccrgtgatcaatcaggcacagagaaattccaggaaaaattaactccaaagaggtggaactgggtggctactgctaaacttaatgttctagaaaaagatggcaagaagtgagtgtttaattatcaactaaaacttaagtgtaaaatctagaagacattctctgtagcttataaacaagctctcatcttgtgggggtggcagtaaagggaagcagcactagggtgaccaactatcctagttttctcaggactgaggggttc

SEQ ID NO: 371733 - DNA, 567 bp, Homo sapiens
cccttattccactcactggtggtggtgaccagtttagcagaagtttcagccggcctcatggctgcaattatcaggtgtgtggtrtgttcttcactctgcatcttctctattataagttggggttccttcaggattgcttgtcactcaggcagatgcaacccaaagttgcacaagaggttacagtccatgggacaaccctcaaccaacgagaaataggagatgatggagctacgctttctcttttcttccctggtggacaacacaggcgtctcaatatggtgcccaaagatccaacacccagtcttatgtaatggtggtcaactcaataaggcgtccttatgttagctatttgctcttgccaatttctttcctcttgctccctacttctaccttctggatcacattcccaaataaagaaattgcactcaagccttcatttcatattctgcttttggggggaatatgagctatgttctgaaatatgattatctcatagatgcttccagtcagatgctaccaagaactatgttattgggatacaatctcttgtgtgtgtgtgtgtgtgtg

SEQ ID NO: 371734 - DNA, 567 bp, Homo sapiens
cccttattccactcactggtggtggtgaccagtttagcagaagtttcagccggcctcatggctgcaattatcaggtgtgtggtgtgttcttcactctgcatcttctctattataagttggggttccttcaggattgcttgtcactcaggcagatgcaacccaaagttgcacaagaggttacagtccatgggacaaccctcaaccaacgagaaataggagatgatggagctacgctttctcttttcttccmtggtggacaacacaggcgtctcaatatggtgcccaaagatccaacacccagtcttatgtaatggtggtcaactcaataaggcgtccttatgttagctatttgctcttgccaatttctttcctcttgctccctacttctaccttctggatcacattcccaaataaagaaattgcactcaagccttcatttcatattctgcttttggggggaatatgagctatgttctgaaatatgattatctcatagatgcttccagtcagatgctaccaagaactatgttattgggatacaatctcttgtgtgtgtgtgtgtgtgtg

SEQ ID NO: 371735 - DNA, 567 bp, Homo sapiens
cccttattccactcactggtggtggtgaccagtttagcagaagtttcagccggcctcatggctgcaattatcaggtgtgtggtgtgttcttcactctgcatcttctctattataagttggggttccttcaggattgcttgtcactcaggcagatgcaacccaaagttgcacaagaggttacagtccatgggacaaccctcaaccaacgagaaataggagatgatggagctacgctttctcttttcttccctggtggacaacacaggcgtctcaatatggtgcccaaagatccaacacccagtcttatgtaatggtggtcaactcaataaggcgtccttatgttagctatttgctcttsccaatttctttcctcttgctccctacttctaccttctggatcacattcccaaataaagaaattgcactcaagccttcatttcatattctgcttttggggggaatatgagctatgttctgaaatatgattatctcatagatgcttccagtcagatgctaccaagaactatgttattgggatacaatctcttgtgtgtgtgtgtgtgtgtg

SEQ ID NO: 371736 - DNA, 617 bp, Homo sapiens
taactctatgccagctagtttccctccctgggagtttgtcactgttagtaggttaggaacctttggagaatgaggataaagacttggggactctaggaacatgaaggaactgtttgggatataaggggataaatggtaaatggggcctcaaatgcacttgatttcaaggactgcaacttccagatgccaatcaaatccttagttctgttaactatcctaatactaggtggccaaatgtccttgaatgtctttgctaggctgcttgcctcccaggcacccttctccccggatacttcctactgaaaagcccttcaaatggttttttccttaagtctgcagacactttctcattcacccacccatgatagcttttaagtctctaaatcttaatgctgatgctactatagtatggtttcctaagaatccatgcagggaagatggggttggcagagggagagtccatatatgggttggatggaaactccttaaacgttttgagccaaacagkctacacctgagtttagaagagcacattgttttctcctccaccaagagattgcaaactttggtctcagggcagttggccttcactgatgttggcttaaaattattattta

SEQ ID NO: 371737 - DNA, 469 bp, Homo sapiens
aaaactcctttaaagggggtgggtttgtgtttttcaatgatctttaagtggtaacccatggctaggttccggtggttgaagcccagcgctggcactgttcttttgccaaaagcattctggacatggtcattakctcaccggggacccagggagagaaagtaaataaggaaattgtcttgcaaatgcttattgtgttttgtaatttggaagccctccctgctgatattcaaaccacacacacagccacgtgctgttacctgagtaacagttcttgagttggcattttaggatcaaacgaggttcagaggagcaattttattctttcctgggcctttgccatcttgctgggggatgtcttcctctttttgatgctaaaacaggacttacagtctcctgggaagatgaagtctgataaatcagttgttattgccctgggcttttcatctaaagcaaagggagagctgaggta

SEQ ID NO: 371738 - DNA, 454 bp, Homo sapiens
aggagagaataaaagaccctgagaatgcctatggcacaagtgtctccatggaacccagcaggagaaactgacttgggagtgttggtaccatctggggacaccaacccaaatactgatgagaaaaaaaggccccgaagaatttagycttcagggaccatttcccaatggaaggggaagtccctggaattccacgcttctgcagacaggaaaattgcttttcctggggacgctttctgaataagggaggtagatactcctgtgactgggatggttctggggcagattgtttcggacacaagggaatggcctaggtgaccttctaggggtctcgtacctaatctgcgattctgtaagtaatgagttgacagaaaattgcattctgtctttggttggccatctgctgtttccctaatgctggctgataaaggcatggtgatgtggggagaaggtgagc

SEQ ID NO: 371739 - DNA, 633 bp, Homo sapiens
cttgctttgttgcccaggctggtatcaagctcctaaccccaagcagtcctcctgcctcagcctctcaaagttctaggattacaggtgtgggccactgctcccgggcagaatatccttttaataaaaattatgttgttttttcatttaattaaaagagtactacatacttgtagtaaatatgaaacaaaacttccccttccggcatcctgtgtcccatttcccagagcctcctggcatggtttcttgtgtatacatgcataaacattttttcttttttctttatatattcatttttatktatatctatgtacaatatgtacatttaacgtttacacagtggggccctattgtacaaattgttctgtgattagtgtttgagtcacagtatttttgacatctttctatgtctgtgtatctagaaatattttgttttttattgtcagttgtactgtattccatgatataacaccattatttacctaacctatgataggcaatcaggttgtatcagtagtttgctatgtcaatatgttccagagaactttctcatatatatatatatacacacatatctccaatggtgcaagtattgtttattgacaggacaaatcctgagacatagaattgctaggt

SEQ ID NO: 371740 - DNA, 387 bp, Homo sapiens
accctgcctcttattgttttctgtcttatgacctttctgatgttactttgccatagcatcatttctctacctcatcaagttgtctatggcataccctcaggcctttagagttactgtttcttcctgagaaaaaaaaaatctccctacaattttggaatgtgaacatcatccttacctgatgatatgtggttttactgtatgtcctagtgacataagaaatgaacagtctgcatgaaacacttgggaaagcacataagtttrgggagaaaaagagacagttgtgtgtctagagagagtgaaacaaacttgctttgtgactgggaagagccgctttctccttggaggaggaacagggtagatacagtgaattcaggatgggacatgtgg

SEQ ID NO: 371741 - DNA, 566 bp, Homo sapiens
gcatattctggtctccaacataagtttccaaatatgtttcactggtttcctcttcctcggctcagaattccctggcatttatcctataatacattcaaacatttacctaaatgaaggaactatatacccagaaaatataaccaaccatcagaaccctacacaagtagaaattgtattcacagctttctggttaaaaataaaataaaatctagtattactgaaatgaattccccacctataaagccatctcacataattcaacaataagacaaatcaccaaataacttaattgaaaatgggcaaaggatttgagcagacatttctccaaagagacacaaacagccaataggcatgtgaaatgatgaaatgataaaatgatgcttaacaacatcattagccattagggaagtgcaaatcaaaatcataatgaaataytacttcacatgtactagaatggctagaatccaaaagacaggtcggaaccctcatacattgctggtaggaatgtaaaatgatacaactgcttaggggcatatttcctcaaaatattaaagatggagttacca

SEQ ID NO: 371742 - DNA, 546 bp, Homo sapiens
ggagaaaagcctgtaaatcaagggccatcaggcaaaggacatgaaaaagagcctggcagagttaaaataatcagtaactaaggaaaaactaagagttcagaaaaagcaaacaggattgcattaataatcacttcagagggcagtagagggkggacaaaccttgcaaggaaaagagcaggagggagtaaaaataaagtgaacagctgcacattcctctctcaaagcccagtagttacctcagccgcaagctctttaccttgcccagggaaagggcccctaaaggcacaagcaggaggcagaccagccctctgaggagggagccgtgcccagggaactttgaaagtgagctggcccacctgggctagggacatcaccaacttgctgggccatgctgtaaatagacgtaggtggctgcctacaccaagagattttcagggtccaagcctgcatcccgaagaaataaatccccaagctgctgcctaacatctgcaattctgcaattacagatttgtttcatccagttctttgttctcagttaaaaggaag

SEQ ID NO: 371743 - DNA, 519 bp, Homo sapiens
tgtcttaagcctcctcagactcctttagtaccttgcacatactaagagctcaaaccatgtgtattaaattgagtaacacacakaacctgcctcaaggagtttatagtactaacacaataaaacataaagacacaatgtagtaaattaacacactagcgagtagtacaacaggtggatttcagagaaagaaaaagttcagcataggtaggaggaatcgcacgggctttgtgggcaaagggaatgggggctgtaaatttaaattgggctttacataacccatttaatttaaggatcctggaactgggtgggaagagagtctagcagatggcttaggagtgcatatggtttcttccaaagaagttgggggtggggaggggtgtaattcaggtggatttaaggcaggcgtcagcaaactttttcagtaaagaactagatagtaaatattttaagatttgtggacctgctgttgtagtgtgaaagcagctacagagaatatgtaaatgaattgggttggctgtg

SEQ ID NO: 371744 - DNA, 539 bp, Homo sapiens
cacacttcacttctgtttctagcttattggtcacaactagtcacagtgcccctcctaactrtgactgagctgaggaaagggaggaacacagataatgactggtaaatgtctctgccacaaaacataaatgggacccatgctatgttaaaagggtcttgttttgctgagtgccaatatttgtgtggtgccagtgtttttgagaagcttgcagagggctggacagctgggagtggcaatggttaaggctgtctcaaaggcagaagagctggagttagagctagacttgctcccactgatgagtttaagtacatgagattgcgagagacctcaaaagagggctctgggacagggtctggttgaccttagggggccctaacatacaagtgtagcctgatgatctggggggttctgaagcttaccacttcaagtctttaggtttgtgagggccctgaggttgctttaataccatgcagattctaaacattcctgtttgtagtccttccagatgctgaactctccaaaggtaggggaccaaatct

SEQ ID NO: 371745 - DNA, 539 bp, Homo sapiens
cacacttcacttctgtttctagcttattggtcacaactagtcacagtgcccctcctaactgtgactgagctgaggaaagggaggaacacagataatgactggtaaatgtctctgccacaaaacataaatgggacccatgctatgttaaaagggtcttgttttgctgagtgccaatatttgtgtggtgccagtgtttttgagaagcttgcagagggctggacagctgggagtggcaatggttaaggctgtctcaaaggcagaagagctggagttagagctagacttgctcccactgatgagtttaagtacatgagattgcragagacctcaaaagagggctctgggacagggtctggttgaccttagggggccctaacatacaagtgtagcctgatgatctggggggttctgaagcttaccacttcaagtctttaggtttgtgagggccctgaggttgctttaataccatgcagattctaaacattcctgtttgtagtccttccagatgctgaactctccaaaggtaggggaccaaatct

SEQ ID NO: 371746 - DNA, 352 bp, Homo sapiens
aagtgaccatctcctttctagtaatttttgacacttaactatttgagctacctcattaggatccactcacctgtgttgttgttagttacttcaagtctttaagaccacakaatgtgttttcttctttatgtttgcccatgttgagagtcctgacactgtaccaagtaggtacttgatatatatttaatcaattgattgattgattgacagtgtccacttagatctgcttacatttgaaaagccagggtgctttgaaggggagacaggacagctgcaaatgcatacacagaaagctagaaaatatcatctgaggcagctacaaaagtccatccacaagctggtggagaaaatt

SEQ ID NO: 371747 - DNA, 527 bp, Homo sapiens
ttagtttagggtggtaataacttaaactccaacactggatggccattgatcaatgaaatgagctggcagttttcacagacagattcgtgaaatgaaatatctcaaactgaccagcctgagaacatttttcacagcctatccatcccttctgagctattcagagagcaaagaaaaagaaattagaactttgaaattgctgcttgttcrgtggcaaactctctgggacactgaatgagttgcaatttatcctgttttcccacttagagaattggcaacagaagccacaccaaccacacttaatgagtgtagatatgtcaggtgctgtactaagtctcttgatctcatttaattttcactagggaccagcaaggtagcgacggttatccttattgtgtggatgaggaaactaaggctcagagaaggcagtgagttaccagaagtcacacagctaggaggtggcagaagaagaacttgaacctcaggtctctttaatccaaagccatgctcttaaatgtttgataaactgc

SEQ ID NO: 371748 - DNA, 579 bp, Homo sapiens
gaattacagtgctagaattcgaacacagggactttgtatttcaaactcagcaaaccctgttatataaatttgatgttcatataattattgcgggacattaagcaataccaagtcttcagaaaatatatgtttgcttttaacttgaatagttttgctttccaatatgaacaatatgtaaatgacctctaaagcaatgaattaaagtgtcagaccccactcacaattttaaacagtgctcttttatttcagatcctgtggcaaactggaaataaccataaacaagaaggtgaatggtttyttatagctaatacaattaacttcacagcatttgaaaaaaaaaaaaaacttcatttgcttttaaatgctattttacagattgtttccatcatcactacaagctacatttttttaaaattctaacatttataaagtatacagaacttcataaagaccccattttctgaatcacttccatgtgtaaaaggacccagcctagtcttacctttcttctccagatactcacaccattgccaggcaaggtgccttcatctctgtgcctggctttgattaatcaaaaca

SEQ ID NO: 371749 - DNA, 617 bp, Homo sapiens
aagttccatattaactgtttgcttggaaggagcagatgttttggctctggtggtcactgctcacctctgtctgggaggtgcatcaatcactttaattataatggaacgtggggccaggaactgaaggagaaaaatcaacccaatcccaagaacaatctttcttgatgaattctcccctaaatcgaaacaattcactgggtatcccagctggggttcatatgcttttgattactgtgggctatttagctctacaaactgacaggctgcttaatggacttttaatggttataggtttctctctctttttttaatgagcttcaccagtttgttactaatgccctgtagaaatttggcgaggggccagacttgatgttacacatttctggtttccaggcggcatacatgcaaccrtcgtagccagtggggaagaatgttgccaattttagggtaatgccatcaggacagggagaggaggagagctaattgagtgcctgtagttctaataattatgtcatcttaaagaaggtggtttcactttgtacctaaagttaccctggaggcttcttgcttccaaggccttgggataccaggtggcagaagggtttgtgccgttggga

SEQ ID NO: 371750 - DNA, 564 bp, Homo sapiens
cagaaagatcccaacagaatagagaaccagaaataaatctgtgcatttatgttcaactgattttcaacaaaggtaccaagaacacacaatgggaaaaggacagtctcttcaatacatggttttggggaaaactgggaatccatatgcagaggaatgaaattagacccttatctcatatgatatacaaaaatcaactcaaaatggataaaaactaaaacataagacctgaaactgtgaaactccaagaagaaaacgtagggggaaatctccatgacattgatctaggcaatgattcttttaaatgactccaaaagcacaggcaacaaaagtgaaaatagacaaatgggattaaatcaaactaaaaagctttggcgcagcaaagaaaacaattaacagaaygaagagagaacctacagaatgggagacaatatctgcaaaccagacatctaataagaggttaatatccaaaatatgtaaggaaatcaactcaatagcaagaaaaaaaataagctagtttaaaaatgggcaagggatccaaatagatatttttcagaagatgcacaa

SEQ ID NO: 371751 - DNA, 548 bp, Homo sapiens
aaaaggaacccttgcacactgttggtgggaatgtaaattagtacagccattatagaaaacagcatggagtttactcaaaaagctaaaaatagaaatgccacataatccaataatcccactactgggtatagagccaaaggaaataaaattggtatgttgaagagatatctgtactcttggaatgcattgcatcattattcacaatacccaagatatggaatcaacctaagtgtccatcaatgggtaaataaagaaagaaaacatggtacatatacacagtggaaaactattcagcctttaaaaagaaggaaatcctgtcatttgcgacaacgtggatgaacctagaggacaatacattcagtgaaataagccaggcacagaaagacaaatactaggtaatctcacttayatgtggaatttgaaaatgttgaactcataggagcaaagagtagaatagtggttgccaaggcctgggtgtgggaaagggcatggggtgatgttggttaatggagctacagagttttaggtagataagagaaattagttca

SEQ ID NO: 371752 - DNA, 632 bp, Homo sapiens
aggggtcctatgacttaaaagattgaaaaaccctgttctacctgaagtctgaacactttgtcatctttacacaagaattcagatgtacagaaaggtcatgggaggtayattggggtgggagcccttcatctgaagggcatcagcctgctctggctctccataggacaaatcccatagctaactgatggtttggcaaagtaagatcacaaatattcaggactccaccttcacatgcccagacacctctggaatacacttcatctgcaaaaaggatcaagctttgactaccgtggatactgtgagttcatccaaatgaacaaataagtgaaatcaacaaaaatctccccctctcgacgacaaaagtcaggagatgccaaagtatatctgtaggataacctccaactagctccgggaaagcttctgcccagtggtgacagcagcctacatgggggtgaggctaacaggtcagatgctcgaacaaacaaaacatttcagacctagtagcacacggagactccagactgctcagggcatgccagttacagtagactcatcaggcttggtgaaaggctggctcctcagccctgagcttttgttgtatattttaattcaggaactgagtcacacctgca

SEQ ID NO: 371753 - DNA, 570 bp, Homo sapiens
ctgtgagttcatccaaatgaacaaataagtgaaatcaacaaaaatctccccctctcgacgacaaaagtcaggagatgccaaagtatatctgtaggataacctccaactagctccgggaaagcttctgcccagtggtgacagcagcctacatgggggtgaggctaacaggtcagatgctcgaacaaacaaaacatttcagacctagtagcacayggagactccagactgctcagggcatgccagttacagtagactcatcaggcttggtgaaaggctggctcctcagccctgagcttttgttgtatattttaattcaggaactgagtcacacctgcaaatcctgtgacaaatgatgttgtattaacgttgaagagtgccagctcatctcctgggttccaagccaaactgacataatagagtctttttaaaaacccactagaaaaagttggtgtaaggtccaaaatatttcaaggaatgagcacttcttaatttgtgaataagttctgtgtcaatcagctataataagataaaagcctatcattagagaccccaagcaaactcagagtggcc

SEQ ID NO: 371754 - DNA, 589 bp, Homo sapiens
gacaagttccttggtctcttcacacagttggctcttggtctttttgaatctattttctcattggtctttttgaacctattttctcactgataaaatgggataataattgtactgtattagtcagctcaggctgctgtaacaaatacaacagactgggaggcttaggcaacagaaacttatttctcacagttctggagkctggaagtctgaggtcagttcccagcaatgtgggttctggtgagggccctcttactggcttacggatggctgcgttctctgactgtgtcctcacatggcacacagctctcgtctctgccacttcttaaaaaatcatcaatcccatcacagggtgccacccttataaccccatctaaacccattcacttcccaaagaccccacctccaaataccattatactggggcttagagagagcttatgtagcatagtgcctggcctatccttggaacacattgaaggtggctgtttttcttgttctaatttgttttagggagtgggcagaggaagcatgtctacaggtcagtatcactgttcaccccatcggagccatgtttgggcaggtggtttca

SEQ ID NO: 371755 - DNA, 589 bp, Homo sapiens
gacaagttccttggtctcttcacacagttggctcttggtctttttgaatctattttctcattggtctttttgaacctattttctcactgataaaatgggataataattgtactgtattagtcagctcaggctgctgtaacaaatacaacagactgggaggcttaggcaacagaaacttatttctcacagttctggagtctggaagtctgaggtcagttcccagcratgtgggttctggtgagggccctcttactggcttacggatggctgcgttctctgactgtgtcctcacatggcacacagctctcgtctctgccacttcttaaaaaatcatcaatcccatcacagggtgccacccttataaccccatctaaacccattcacttcccaaagaccccacctccaaataccattatactggggcttagagagagcttatgtagcatagtgcctggcctatccttggaacacattgaaggtggctgtttttcttgttctaatttgttttagggagtgggcagaggaagcatgtctacaggtcagtatcactgttcaccccatcggagccatgtttgggcaggtggtttca

SEQ ID NO: 371756 - DNA, 527 bp, Homo sapiens
cttgaaggtagccagtctttgctccctgatcacaagaacgctccctcccagtatctatgtcccaagtgctacaaagaggtctgagttacagaaaggagcagtcttcctttaggaactagtatcagggcatccttggcaaccaggagcctgtgactggagatggaggcattctcactttgtcttttccaccagaacacggaccagttgttctcaaacttgaacataaaccagaatcactgaagggtttgttacaccccaggttgctgggccctatctccagagtttctgattcagtaggtctgggctgggtcccaagaatttgcatttctaacaagtttcaaggggatggtgttgccactggttttggaactacgctttgagaaccactaacataaacactaaagcagaggatgmagtagctcacttcctatgacagtcaaatagcttcataaaacccacggattggaagatcctactcatgaaccaatgccactgggacctagtgtcccaaccccagagctgcacag

SEQ ID NO: 371757 - DNA, 572 bp, Homo sapiens
ccctccaacaggggttgtcagacaacctacacaggagcgatcctactgacatcagtatggtgcccctcaaggtcagaaatcccagaagaaggagcaagcacccattattgctgttctccagcctccttgcatgatatctccaggtgcaggagtgaaccagatgaacagggcctgaagcaaacccccagcaaaccacagcagctgtacagaagagggctttgaaagaaagaaacaaaccatggaaagaaaaacaaacaaacagaaagcaacaacaacagcatcaacaacaacaaaaaaagcccccacaaaaaccccatccaagggtcagcagtctgaaatatcaaaastagacaaactcacaaagatgagaaagaatcaacaaaaaatgctgaaaacccaaaagaccagagtgccttttctcctccaaatgatcatagtgtttctccagtaaggccgcagaactgggcagaggatgagatggatgaattgatgggagtaggcttcagaagatgggtaaaaaaaaaaaaaactacaccgagctaaaggatcatgttctaacccagtgcaaacaa

SEQ ID NO: 371758 - DNA, 626 bp, Homo sapiens
acagcttacttatgcaatgtcattcacataccaaagggaattctacttgcaatgaaatacaagccacagggacactatagaaatttcccacaattatttgttccaaagtaaatacatttcctttgattttgacaaaaccataaaacacagaagtgtattgtgagcctctatttagctgtatgtttaccaataccctggaggctttactctttgaaacacaactaaattacatcatgctatttcatctctcttcacttggcatgcatatatgttatatctaacaaacatcagcagggcaaaacaatgaactaattcatgaatcaagattctgttttatagttcacttgtgagggataatcgtgacttagcttaaatgatattccatgccttgattaaggtttcaaactatgaacgtgttgactgagmctgggtccctgatataacacacagaaaacatagaacattcatattatctttgctgaaggaccctaaaggttttagctcatatacggcatatgaacaaacaactcagtatacagaagactgccatcctaaattttatcactgcttggccataacaacagtaactctgttttcactgaactttgttttctcttccaattaaa

SEQ ID NO: 371759 - DNA, 630 bp, Homo sapiens
aaccattcacatttatttaacaattaatatactcttactatgagaatatattaggcaaaacacagtagcttatgcctgtaatctcagcactttgggaagctgaggcaggaggattgcttgagcccaggagtttgaggccagccagggcaaaaccctgtctttacaaaaaatacaaaattaggcgagcgtggtggcgtgcacctgtagtcccagctactcaggaggctgaggtgagaggattgattcagcctgggaggttgaggctgcagtgagctatgatcatgccactgcactcctgcctgggtgacagagggagaccctgtctcaaaaagaaaaaggtaatatattaaataaggccagtttagtctctttcytgccatcttatcttgtgcttttaatttatattttttatacttgctttttccaccccttcttttttattagcttttgtttattttaactttaacaaacataactgaagttgtatttctctagaaaagtcaagaattattcagaatctataaccaagctccacacaaccatcaaaattgatcttcagcagatttgaattcctctccccattgtaaagtttaatataatctgcattagactttataactacatcattag

SEQ ID NO: 371760 - DNA, 519 bp, Homo sapiens
acgacaggtaaaataaaccagaaaacatccatataatagaatactatgttatagataaaaagattgaagcagctctagagagactgagagtaaaaggcttccagaatatgttaagttaaaaaggcaaataatgaaacaatgaatggtatgctatcatttgtgggagtgggagggcagggggaggtgtatatatatttagaaatggatataaaatctgagttttggtgatggaacttcacaagttttctcttttgtcctaattttttaaataatgaacaktaattccattttaaataagaaaaataaacaaagttaattttttaaggaactcaatcaaatgccctataactacccaaactcgtttctggaaagagaagaaagtgaaaacaaataaaaccacctggttctttaggtctctctccctgatcctaagcagtccccatcctctccctgggaaaacaatgcagtgttaaaccctcaaagcctcccagctcagttgttaaggtaattgtgtttact

SEQ ID NO: 371761 - DNA, 519 bp, Homo sapiens
acgacaggtaaaataaaccagaaaacatccatataatagaatactatgttatagataaaaagattgaagcagctctagagagactgagagtaaaaggcttccagaatatgttaagttaaaaaggcaaataatgaaacaatgaatggtatgctatcatttgtgggagtgggagggcagggggaggtgtatatatatttagaaatggatataaaatctgagttttggtgatggaacttcacaagttttctcttttgtcctaattttttaaataatgaacagtaattccattttaaataagaaaaataaacaaagttaattttttaaggaactcaatcaaatgccctataactacccaaactcgtttctggaaagagaagaaagtgaaaacaaataaaaccacctggttctttasgtctctctccctgatcctaagcagtccccatcctctccctgggaaaacaatgcagtgttaaaccctcaaagcctcccagctcagttgttaaggtaattgtgtttact

SEQ ID NO: 371762 - DNA, 562 bp, Homo sapiens
tagaatgtgaattatatttcaataaagctgttgagaaaaaagattcaatgtgccatatatcttataatggttttattccatgaaagggcattcatagcctttattcattattatggttatgctattgtgattgtgatttttttcacacaatcacaaagcaaatataatcacaaagctatgacagtttctgtttcataatatttgaagcttgatttaacgtacttttgacagttcaaacctatttgccaaagttactgccactgaaataaaaaaagagaaaaaaagaaaaaaaaatttgctaaacaagcttttctaaataaaaaaaaaaaaaaaaagaggcaatttgttttcactcttttagtccaggggatctgacttgatgtgttttctgagctgcaagttcttctgttctaaccwgtattctgctgcacgtgccaggattcatgccaaatattttgtgtagcatttctagaaggtacacattaaaattcagttccgtgaaaaaagacatttactgtttgtttccattctggatcagaaaatggccaatgccattaggaag

SEQ ID NO: 371763 - DNA, 564 bp, Homo sapiens
ggaatctggaaattagggtgaatggggaagcaacttgtctttcatatctcttgctgttggtgtaagtgttatcttatgaacactccttgcacaggtttttatcaccactcccagaaagagcttcattgtgtcctctcataggaaacagcccatatttactatcttggagctgccccatttccctgtgaactcttttccaagctcctaaacatgagtactagagcagcagccsttcctcagaggtctcatttgagctccacggagcccttctgtcaaccctcaaggttctgttaattcaaatcccaacccgtggctgggagacatttgagttctaaccagtcagagtagggagttctccctgaatagctaattcatgtagtagagatcccaaaaggtctataagttagttggagggacaaagtagccttaaaataaagatttctctaaatccaaccctaaggagcttaaaaataaacctccaagataaagatgattcataagtaacttgtctgcctcatagaaaagaagaaaataacattctaatgaaaaacaataaatgctggc

SEQ ID NO: 371764 - DNA, 593 bp, Homo sapiens
gagtttgtggatatttaatagattggtgtctccctcatcccatactgaaagtgctctttgtgaaattcaagccagccatttctctcttctcagtaagttttcagagcttcacagtattgtttgtttaatgccctctcttcatgctctactaaccttctttccatcctgaataagtatgtgagaattcctccaggaaaggaaaaccaaattaaaaagtcaaaaacccaaattgaattcacaaaggttacaactccttccttcctgatctaactttcctggtcacccccttggagaagggatgtttgaaattcattygagaataatttgctgatgcccgattttttgtaaatcttcaattttaatattccatttgaggaagggcttaatcagaaagatcttaagatggctccaagattggttgcctggttgtggttgttgttttatggtattttcttctaattcatagaggactgttctccattgtcctctgtcaacaggcagaaggttataaaaaaaaatcactaaaccctaaacctaacccctttaaccaaaatgacaaagaaatagcctaattggatggagaattggactca

SEQ ID NO: 371765 - DNA, 586 bp, Homo sapiens
catcacttctcttcacatggctggtttcttctcatctctttaagtctcagcttattcaccttctctgagtggccttggatgaaggatttaagaaccctcttctgtaaaatggaagaaaggtcatctactcaattcaaaaaatgccataaaagttaattcaactttgtaagtttgttgccaatatcaatgatactgccttgtatttatgatacacctatctcatcagattgctaaatgatttctagatttctacattgataaattttatagcagtgccaaagacggatagaggacaatattttttactctcatagagtataatgaaacctacctacrtttgcacatttagagacaaaatctttaaatggaactctacaattctttaaccacagttggtccaattgcttccctgctctgtgtttgtgtgtgttggtgtgttaaaatgacatattatatttcacctgttgtgtaccatttgcataattatttaggatttatgaagaataacttgtataattaaactgaaatggtgaagtctgaaataatatcattgccaatactattgttattaccagaagtagaaaaa

SEQ ID NO: 371766 - DNA, 566 bp, Homo sapiens
  misc_feature (1)...(566): n = A,T,C or G
ttcaaatagttatccaatttcatgaaaatagcttttttaaatatagccatgacatayccagaatttctcattttaaatattagaatacctctaatattcaaaatacaaaaatatcaaaatcacacttattttgattttctaagaagnnntttnnnnaatttgcccatcacaatgtgctttttaaacttagtacagataaaattgttgttaggttataaagtcttttggtggcttcctccagcatctnactgcacctccacaatttacacattatattatactttaaatgtcctctatctggctatagcaacttgagtctttctgttattgatgttccttatataatatagctctgttgttttaatatgtcagntttctgaatagttttattaaagtaattttaatctcaatgagaatattggctgtgcttccactttatgcatttgcataaaggttcaactcattttcaaattatcaaggactgcaatctctaattatgaattagatgctgatatttttatttgctcatttatttggcatcctttttcatatcattacctctaaaa

SEQ ID NO: 371767 - DNA, 566 bp, Homo sapiens
  misc_feature (1)...(566): n = A,T,C or G
ttcaaatagttatccaatttcatgaaaatagcttttttaaatatagccatgacatatccagaatttctcattttaaatattagaatacctctaatattcaaaatacaaaaatatcaaaatcacacttattttgattttctaagaagnnntttnnnnaatttgcccatcacaatgtgctttttaaacttagtacagataaaattgttgttaggttataaagtcttttggtggcttcctccagcatctnactgcacctccacaatttacacattatattatactttaaatgtcctctatctggctatagcaacttgagtctttctgttattgatgttccttatataatatagctctgttgttttaatatgtcagntttctgaatagttttattaaagtaattttaatctcaatgagaatattggctgtgcttccactttatgcatttgcataaaggttcaactcattttcaaattatcaaggactgcaatctctaattatgaattagatgctgatwtttttatttgctcatttatttggcatcctttttcatatcattacctctaaaa

SEQ ID NO: 371768 - DNA, 595 bp, Homo sapiens
gatcctaagggcatttgaacatctgagtccaagccacagaaaatctttttcacatcaaaccgtgagcccatcagcctaaatattgcacttagaggagagtcgtctttgccccaaggcatttcatttgatacaagagtgaaggaaggaagttgtgcataaatcatgaaggcagagctggttttcatttctgaaagaacaaatgcaggtgtcatgctcccgaaactggagctattggaaagaagaggagaaagtattagctcaggtgcttgggtgcatgaaattggggaattgggaattgaatgggctcatgaagaaggaatggacagggacactggaaacagtgtgaggaatcagaaggttttctttactgtgtcagacctgcaaagagctacctttctgactcaagcccagattgttcttagaagtaaaacagagcaacctaaggggccatttgaggcaaggaaagagagacaaagcaagggaggtcaggcagaggggctgcattcactctctgctggatgtgctgcatcattgcacgagcatccttgctgctctacrccctatgtttgaaagcaggcatgagctagagcagact

SEQ ID NO: 371769 - DNA, 595 bp, Homo sapiens
gatcctaagggcatttgaacatctgagtccaagccacagaaaatctttttcacatcaaaccgtgagcccatcagcctaaatattgcacttagaggagagtcgtctttgccccaaggcatttcatttgatacaagagtgaaggaaggaagttgtgcataaatcatgaaggcagagctggttttcatttctgaaagaacaaatgcaggtgtcatgctcccgaaactggagctattggaaagaagaggagaaagtattagctcaggtgcttgggtgcatgaaattggggaattgggaattgaatgggctcatgaagaaggaatggacagggacactggaaacagtgtgaggaatcagaaggttttctttactgtgtcagacctgcaaagagctacctttctgactcaagcccagattgttcttagaagtaaaacagagcaacctaaggggccatttgaggcaaggaaagagagacaaagcaagggaggtcaggcagaggggctgcattcactctctgctggatgtgctgcatcattgcacgagcatccttgctgctctacaccctatgtttgaaarcaggcatgagctagagcagact

SEQ ID NO: 371770 - DNA, 541 bp, Homo sapiens
tttaaccaccaaacactattatttcttattgatccaaaacaatgaggatggctagagaatactcaggtattactgaggacagattctgggttgyagattttcactttactttttattctcccctaatatggtttatctgtgtccacacccaatctaatcttgaattgtaattcccacaattcccacatgtcatggcaggcaccgggtggaaggtgattgaattatgggggtgggtctttcctgtgctgttctcatgatagggaatgagtctcacgagatctgatggttttaaaaatgggagtttccctacaccagctctttttttgcctgctgccatggatgtaagacgtgacttgctcctccttgccttccaccatgatagtgaggcctacccagccacgtggaactgtaagtccaattaaacctctttcttttgtaaattgcccagtctcgggtatgtctttatcagcagcatgaaaatggactaatacaccctcaacttcaaaatgatgataagctcacctttgaaagcatcttgctg

SEQ ID NO: 371771 - DNA, 541 bp, Homo sapiens
tttaaccaccaaacactattatttcttattgatccaaaacaatgaggatggctagagaatactcaggtattactgaggacagattctgggttgtagattttcactttactttttattctcccctaatatggtttatctgtgtccacacccaatctaatcttgaattgtaattcccacaattcccacatgtcatggcaggmaccgggtggaaggtgattgaattatgggggtgggtctttcctgtgctgttctcatgatagggaatgagtctcacgagatctgatggttttaaaaatgggagtttccctacaccagctctttttttgcctgctgccatggatgtaagacgtgacttgctcctccttgccttccaccatgatagtgaggcctacccagccacgtggaactgtaagtccaattaaacctctttcttttgtaaattgcccagtctcgggtatgtctttatcagcagcatgaaaatggactaatacaccctcaacttcaaaatgatgataagctcacctttgaaagcatcttgctg

SEQ ID NO: 371772 - DNA, 587 bp, Homo sapiens
taaaattgccccataagttatgtattattatcctcatttcacagatgaggaaaccaaagctcagaaaggttaagtcacttgtccaaggtcacaatgccagatgcagaatgcaaagccatgtctcccagagttctttcccctgcacagggtgcctccagaaatgcacatatcagccacagctctctctcttactggccgcaagtaagaccttgtgccgagcaaggggtggaaataagtcaaggccagcctgtacagggtacagagtaattgactacattcaagggagagaaattcaggtgccctggggcctcagagaagcctgtctcaaacctggaatgatttagttttggctggagacagtcagagaacagggtggtcacctgcagaggaacatctctggagagcatctgactgtaaggcctttttccaaggagccttagatataacastctccttcagctggcctgttttagatgccccaacagcaggagaaggttccaggtgacttccaaaggtctctatccatcatagacaaatctgatcaagcatgaaggcaggcagtgcctcaagtcaaatcagaaatatct

SEQ ID NO: 371773 - DNA, 494 bp, Homo sapiens
caactgtctaacacactaagctccctgggcaggggaaggggggcacacatttctatagctccaggctgtgctwttcccctgctggagccagggagggtggacagcttggtcccaagacttgtccccagagcccacatacctgctgtggcagtgtgtgaccagaatacctcttcaggcctaaccctgacccatccttcctcagtgggcagggcttccccgcaggatctccaataattccagccagaagctcagggacagaattcagatctccctgagcctgagcccgtaggggaaggggtggctgcagtctctgcagaccagcagacttagcctctcctcctggtagttctgaggaatccaggcagcccagaggagtgggtttttccccagtgaaacacactctttccaccaaggaacaaagtgctttgttaaatggatcctgctccctgtgtcatccaactgggtgagacgctccaacaggggttgtcagacac

SEQ ID NO: 371774 - DNA, 535 bp, Homo sapiens
atcagtatttatggatctcttcatttgttaagtgagaatgcagcctgagataaattaccctaagtaattttaatcaagagcttaattttaatgatcacctgcacaaataaaataagagaagtgatgaaaccatcattattaaggtaagccacataagtctctgagggaagttatttttagcaatgttcattaaggatttctgtaaactctgaatagaataacaggatggcagaacaaagccacaaaaaacagcataaatatctattacaaatatgtaattaaatcttaggaaacatcttattttgtactcattgacaattgctttggcattgtactttagttrtttaatatgtaacttgtctagttctatgaccaggttgaatatttctgtaaggcagtgtctacactgtctcaaagattttaatttctccatgagtgaccagaatctaacacaagttcaaaattagctcttctgtaactaaacattcaagggaatagacaggcaaaattagtttgggcaagtgggaagggacag

SEQ ID NO: 371775 - DNA, 600 bp, Homo sapiens
cccacaaactgggaggcataaacaacaggaatttatttatcacaattctagagactgggaagtccaagatcaaggtaccagcaaagaaggtttcattctaaggcctctctgctcagcttgtaggcaactgctatctctctgtgagatgccatgaacttttctttgtgagagtgttgggagagagaaagagaaaaccctctggtgtctcttcttataagggcactaattccatccggagggcccatgtttataatttcatctaatcctgatcatatcccaaaagccctatctccaaataaccatcacagtcagaattagggctccaacatattaatgttgcagggacacagacattcagyccttaacaacattgtttgcccaggaagcctttatggacatttgcaggggcctaaaacctagactctgctctgggaaacaggtagagatggaggggcaggagtgggacttcagttactaaaggaatgacctacatagcattaaaacagtcaccccagactcattacactcttttgtaaaatcctgttagtctgaaatgaagaattctagaaaaaatcagattccagtcagaaaagattaata

SEQ ID NO: 371776 - DNA, 600 bp, Homo sapiens
cccacaaactgggaggcataaacaacaggaatttatttatcacaattctagagactgggaagtccaagatcaaggtaccagcaaagaaggtttcattctaaggcctctctgctcagcttgtaggcaactgctatctctctgtgagatgccatgaacttttctttgtgagagtgttgggagagagaaagagaaaaccctctggtgtctcttcttataagggcactaattccatccggagggcccatgtttataatttcatctaatcctgatcatatcccaaaagccctatctccaaataaccatcacagtcagaattagggctccaacatattaatgttgcagggacacagacattcagtccttaacaacattgtttgcccaggaagcctttatggacatttgcaggggcctaaaacctagactctgctctgggaaacaggtagagatggaggggcaggagtgggacttcagttactaaaggaatgacctayatagcattaaaacagtcaccccagactcattacactcttttgtaaaatcctgttagtctgaaatgaagaattctagaaaaaatcagattccagtcagaaaagattaata

SEQ ID NO: 371777 - DNA, 595 bp, Homo sapiens
ggtctcactctgttgcccagactggagtgcagtggtgcagtcatggctcactgcagcctcaacctcctaggctcaattgattctcccttctcagcctcctgagtagctgggaccacaggtgcatgccatcgtgcccggcttatttttaatttttgtttttgtagagatgggacctccctgtgttgtccaggctggtctcaaactcctgggctcaagaaatcctcctgtctcggsctcccaaagtgctggaacgacaggcatgagccaccatgcccagtttccaattccaacatatttaaaagcaatatagaaaaatttgatactcaacattatacaattaacaatgtctgccattcaagaaaacattaccatgtaggcaaagaaatggcaaaagagaactcattaccaggaaaacaataaaacaatagaaatatatctagaaatgacagaattagctgacaagaaacttaaagcacttataaatattacaaatagtctcaagaacataaaggaaaacatgaacataatgaatagagacatagaaaaaaaaggcaaaatagagcctcaaaggatgaaaacactatatgttaaatac

SEQ ID NO: 371778 - DNA, 558 bp, Homo sapiens
aattttgctgtcttttcaaggttaattacatttgacccttgaacaatgtgggtgttaggratgccaacctcctgcacagtaaaatatccacatataactttgactgtcccaaaacttaaccattaagaacctactgttgactggaagccataccaataacatacacagccaataaggacatattttgtatgttgtatgtgttgcatactgtattctcacaataaagtaagttagagaaaagaaaattttattaggaaaacaataaggaagagaaaatgtatttactatttattaagtggaagtgaatcatcattaaagtctttaacctcattgtcttcaatttgagagggctgaagaggagaagaagaggggttggtcttgttgtctcagaagcagagtctatgcatggacaaatgccagatttttcaggcaacataagctgtgagtgtagtttttaaaaccatttgtaatggtatggagtaattttgtcatggcaattcagcatcatgaagatttgggccctttgttatgaatcatttttggagtcctagctctgtc

SEQ ID NO: 371779 - DNA, 548 bp, Homo sapiens
atatgagagagaaacagaggacacagcaggagagcatgagagaagggctgttacctctcctagagggttcagggatggcttgttagagaataggatttgtgatatagcagttagatgatgaatgttgtgcagatgacttcatatgctttgttagctaaagagtagatgtgtcattcattgactgtgctacctaggagtaaatatatgccaaactgataggagtgatgtgaggatygtgtgagctaaaatctgacatagaataggattgaataaaagttgattgaaagaacacccgcatacagagactctttgctttacaggtggggatgttgaggctcaggaggtgcaaaacttgccagtggccccacatccagtaagtaacaggctgcagctttaattctaaggcccacatgctttattcatgctttgcctcaagctttgggttaaaaaaatttcaattagaattacacagattctgtgaagaaagacacaaatctacctgaaaattcatcagctagatagaatgcagcatgtacctttcttgatct

SEQ ID NO: 371780 - DNA, 548 bp, Homo sapiens
atatgagagagaaacagaggacacagcaggagagcatgagagaagggctgttacctctcctagagggttcagggatggcttgttagagaataggatttgtgatatagcagttagatgatgaatgttgtgcagatgacttcatatgctttgttagctaaagagtagatgtgtcattcattgactgtgctacctaggagtaaatatatgccaaactgataggagtgatgtgaggattgtgtgagctaaaatctgacatagaataggattgaataaaagttgattgaaagaacacccgcatacagagactctttgctttacaggtggggatrttgaggctcaggaggtgcaaaacttgccagtggccccacatccagtaagtaacaggctgcagctttaattctaaggcccacatgctttattcatgctttgcctcaagctttgggttaaaaaaatttcaattagaattacacagattctgtgaagaaagacacaaatctacctgaaaattcatcagctagatagaatgcagcatgtacctttcttgatct

SEQ ID NO: 371781 - DNA, 548 bp, Homo sapiens
atatgagagagaaacagaggacacagcaggagagcatgagagaagggctgttacctctcctagagggttcagggatggcttgttagagaataggatttgtgatatagcagttagatgatgaatgttgtgcagatgacttcatatgctttgttagctaaagagtagatgtgtcattcattgactgtgctacctaggagtaaatatatgccaaactgataggagtgatgtgaggattgtgtgagctaaaatctgacatagaataggattgaataaaagttgattgaaagaacacccgcatacagagactctttgctttacaggtggggatgttgaggctcaggaggtgcaaaacttgccagtggccccacatccagtaagtaacaggctgcagctttaattctaaggcccacatgctttattcatgctttgcctcaagctttgggttaaaaaaatttcaattagaattacacagattcygtgaagaaagacacaaatctacctgaaaattcatcagctagatagaatgcagcatgtacctttcttgatct

SEQ ID NO: 371782 - DNA, 582 bp, Homo sapiens
aaagcaggcagctaacatcaaactcaaaagacattggtaactgataatttattacatacatttcctgatgtctctctttagaatataaaatgtatacatcataatattacatattgaaccatgtttgattttgttctctggacccttgataatcaacagactctagaaatagaggtctataggacaaagctccaaatataaagctatactcttcctgttttccgccaaatgtagttgtagttttaactttgtcatatattaaaatcaacatttatccacagcaggaatcattgacatgctayaattttaatttttgatgatataagttaaaagtatttgccagttcctctgtcacataaatgtttactttccaagacaggcagaaatcatccaaggctcttccttgagaaaaaaagattgttcgagttgggaaataaccacgttcttatttcttgtttttgctttatatttatttttgcactactgcttttaccagtgagagttctaaacttgataaaatgttagacttcaaattttacctttctgaataaaactttccccagatcttcacgagctgtggaa

SEQ ID NO: 371783 - DNA, 646 bp, Homo sapiens
gtattatctaaagaaattaattctgttaattgagtggagattgactccttaagtggcctttcaraaaagaactgaatgacatgagggcaaaccatacttagcactaggaagaatgaaacaattactaatacatgttccattgccctaaagttctcactgtctctgagaaaagacagacatatgtccagtcatacaagatagatacaataagtgccattaaaggtaaaaaaaaaaaaaaaaaggcctcagaaggagacacagggtgaaatgattttcatcttgtaaaaaggagaagttctatggagaacatgacattagtgcagtatactggaaaatatgtggatgaactcagtaagtggattttaccaaaaccctaaaatgccatgtgaatagaaatatgaataaaacaaaataaaatgtaggatttcatcaatagcagcaagtctgtactattgaatattgattttatatttcggaaatggccaatattaaactagagccaattctagtttgatggaacttctttggtcaaaataaaatgtgacaaaaaacaagcgtttcatgtagtttgcatatttacaaaagtatattctctagtcatgcacttttccttgctgctgtttccactacccagaaagagtgacta

SEQ ID NO: 371784 - DNA, 453 bp, Homo sapiens
gggataaaatggaaatggataatatacatacagtttgtacaaaggtacataatgtacaaacatacagttagaatgaataagatcttgtgctcagtagcacaattaggtgactacagttaacaataattcattgtatattttagaacaactaaaaggatggaattggaatgtccctaacacatggaaataataaatgctcaaggtgatgtataccccaattaccctgatttgacattacagaccctawgcctgtatcaaagcatcacatgtatcccataaatatgtaaaactatatgcattcataataattaataaaatacaacttaaaattttaaatgaatgtatgcatctattctctactttctaaagatcatggtgtaaatatgtgacagtcattatagaaatttttagaaaaactttacccagagtttggattataaaattatctgggcc

SEQ ID NO: 371785 - DNA, 545 bp, Homo sapiens
ggcctacagtgttagagttattaggaatttccccagcagttgaactgtatttaatatctgctgtagctctgggtgttggtgacttcaaattcctccagtgtccttgtttttgtcaccactcttgatttcgtcttacctaaatacttcttttacagatatagtctttgtcttttacctctttcagctataatcctttgatattatattggagccctgtttgtgtggtgacaagtactgaggagatgaagtgttcartaatcgtccacttacatcttattgtttcagtgggactgtgtttagaagctgtgaatttacaagtgttttcccactggaatagctttttccttccggtacctcactctcttccctttctgcagttttccaaatctatttatttgaagccctgaccttcgttaaacattttttcacccttaggtgagacagaaaagctagaaggcactggactcagagcaattacttctcccaataggaaaagtctctggcaaatgcatcagcccctgtagagaagccacttataatgggga

SEQ ID NO: 371786 - DNA, 545 bp, Homo sapiens
ggcctacagtgttagagttattaggaatttccccagcagttgaactgtatttaatatctgctgtagctctgggtgttggtgacttcaaattcctccagtgtccttgtttttgtcaccactcttgatttcgtcttacctaaatacttcttttacagatatagtctttgtcttttacctctttcagctataatcctttgatattatattggagccctgtttgtgtggtgacaagtactgaggagatgaagtgttcagtaatcgtccacttacatcttattgtttcagtgggactgtgtttagaagctgtgaatttacaagtgttttcccactggaatagctttttccttccggtacctcactctyttccctttctgcagttttccaaatctatttatttgaagccctgaccttcgttaaacattttttcacccttaggtgagacagaaaagctagaaggcactggactcagagcaattacttctcccaataggaaaagtctctggcaaatgcatcagcccctgtagagaagccacttataatgggga

SEQ ID NO: 371787 - DNA, 578 bp, Homo sapiens
gttttcttcatatcatgaatagacaaactcctaagatatcttttaatgtatttcataaaatagatgtgactgtgcatatagtagacttgtgccatatactaattttaaggatttatttcttttacaattttatcagtcttaaattttttaaaaaatattgtcatagcagttgatgattttaatcatgatatttctagggaatctgcaaacaccttagcacaattttggacatttttctttgaatacaaaggaaaatcattgattgatattaaaagaatggcaaatgcttgatctgtgctatttgaactggactagaatatattaataaattggaaatatcattatgtaattgaacacatgtgaaaaaaattgtgtaagttagacctatatgggttaatctggatgcaaaaacaaacaaacaaggaaacaagtatcacctactggacataccagtgggacacagttttagaactgggacaaagtttcagaattgcmaggtatttcactccagagaagcaaaactagacaaccattatgttgcagcagatatcaggcaggaaagtatgaaagagaaagct

SEQ ID NO: 371788 - DNA, 512 bp, Homo sapiens
ttgctagggaaagctcaacagacctaactcagggtaattgtctgctatttcatcttgtctggagaccacccattgagcttctggtgagaagttatccctccccatgctgagtggatcaaagatggcaggggtaaatgggaacaatttgagcactgccagatcaatacttaggtgctgagcagggtgtctagtattttttactggaacagaaatattaatttggttcccccaagtagcccactgggttgcatcttacaaaactgggaagcttttgcttgtgattccatgaaacrgaaaaggataatctttttttttgtatcatggcttggccccacaattaagacacagtaagcaggttcaccactgtttttcagttcttctcgaagctgaagagaggggaacgcaggaacctgacaagttggaagaagggcaagaatttcttaccagccaggcttctggcctctctctctctgtgcaaactggttaagagatggtaaaaatcattgtgtatc

SEQ ID NO: 371789 - DNA, 551 bp, Homo sapiens
attgctttggagaaatactcttggttttttaaatctgagactttatattggaagtcctttagtttgtctttgtcttgttatgtgtatttggatctgtgaaggggatctctaaaggagttgctagggaaagctcaacagacctaactcagggtaattgtctgctatttcatcttgtctggagaccacccattgagcttctggtgagaagttatccctccccatgctgagtggatcaaagatggcaggggtaaatgggaacaatttgagcactgccagatcaatacttaggtgctgagcagggtgtctagtattttttactggaacagaaatattaatttggttcccccaagtagcccactgggttgcatcttacaaaactgggaagcttttgcttgtgattccatgaaacagaaaaggataatctttttttttgtatcatggcttggccccacaattaagacacagtaagcaggttcaccactgtttttcagttcttctcgaagctgaagagaggggaacgcargaacctgacaagttggaagaagggcaag

SEQ ID NO: 371790 - DNA, 590 bp, Homo sapiens
tgcttctatgtgttatgtctatgtgtttatgcgtatcatatatatgtaatattttactaccaaaacatttgaaagagatctaactgcctttaaaaatatttaagtccaatattttatcaaaaaaataaaaaccttaactcaaatgccttttaaaatttatctttggtaaataaagttttaacgttgctggtaaaataaaataaaaatgccttcaggatttaatttagatattaggtctgaactgatcaagcaggtcagatactgtctgctagatgttttatcacaagctgcttctatgattttttaataataatttgatttgtctgtgascttacatcatggagccattagattctaggctctaaacaaatggccatggtaaggcctggggacatttggctttctctctggcccagctgtgtctattggctatgctgggaaggctctggcattatttctactgttctgtcctttgttctaggttccacatctgatacataattaaaattgcttatctcctatgctttttgccaagagttactaagagctaacattgtaatatatgtaattaaaactactggatataagag

SEQ ID NO: 371791 - DNA, 590 bp, Homo sapiens
tgcttctatgtgttatgtctatgtgtttatgcgtatcatatatatgtaatattttactaccaaaacatttgaaagagatctaactgcctttaaaaatatttaagtccaatattttatcaaaaaaataaaaaccttaactcaaatgccttttaaaatttatctttggtaaataaagttttaacgttgctggtaaaataaaataaaaatgccttcaggatttaatttagatattaggtctgaactgatcaagcaggtcagatactgtctgctagatgttttatcacaagctgcttctatgattttttaataataatttgatttgtctgtgaccttacatcatggagccattagattctaggctctaaacaaatggccatggtaaggcctggggacatttggctttctctctggcccagctgtgtctattggctatgctgggaaggctcyggcattatttctactgttctgtcctttgttctaggttccacatctgatacataattaaaattgcttatctcctatgctttttgccaagagttactaagagctaacattgtaatatatgtaattaaaactactggatataagag

SEQ ID NO: 371792 - DNA, 557 bp, Homo sapiens
tgtaacgataaaattagagccattgtttgtttgtttatttgattttttttttttgccaagcttctggctggaatggcatattatcagatatgatcagactgctttgaggaatggaggttgactttatagagtccayagaagccccttggaatgaccagcctggcatgttgtctatgtgattcctttccaaagattctgatctgtgctaagtaaagagtgtcactttctgacagccccaggaactaattaatacaggtatccgcaggcaatgataaatccttggcttggctaacatggtgaggattttaattagtctaactcgagattcctcatgaaaaagtttcagcaaagctaacttaaaagagcctatatagccaaccactattcttgctgtactttatgcaaataatcaggccaaatagagtaagactaaaatattttgcaaataaattggtcctattatgatttgtcattggcagaaatgggggactgaagagaaaaaattatatttcaaaataaactatagtacacctgttattagattatagccttgtcca

SEQ ID NO: 371793 - DNA, 557 bp, Homo sapiens
tgtaacgataaaattagagccattgtttgtttgtttatttgattttttttttttgccaagcttctggctggaatggcatattatcagatatgatcagactgctttgaggaatggaggttgactttatagagtccatagaagccccttggaatgaccagcctggcatgttgtctatgtgattcctttccaaagattctgatctgtgctaagtaaagagtgtcactttctgacagccccaggaactaattaatacaggtatccgcaggcaatgataaatccttggcttggctaacatggtgaggattttaattagtctaactcgagattcctyatgaaaaagtttcagcaaagctaacttaaaagagcctatatagccaaccactattcttgctgtactttatgcaaataatcaggccaaatagagtaagactaaaatattttgcaaataaattggtcctattatgatttgtcattggcagaaatgggggactgaagagaaaaaattatatttcaaaataaactatagtacacctgttattagattatagccttgtcca

SEQ ID NO: 371794 - DNA, 578 bp, Homo sapiens
aagtcacttaaacacctggttcaaactacagtccagaaaaatctgtcagattgccaccacaatctgaaggtgccacaaatgttttagaaaaaaatagtttatagacggactgttccagaactaacctcttttttctgtttctatagaaatacctctcattaaagatctgtttttctgcatcttatagagaggcctggctcatctgcagtgttatcttctggaatgggacatacatgtttaactgaacttacgtgcctgcagaacttagaaactagctaaagaagacacagaatgatatatttaaatttgctccttttagtttatctcaatttgtcttttcactattttttcaccctagctracaacctctaaccaaaatatctccctacaatgccaacaatatctacagctgaaatatcacataagtggattctgggaagtctgtaaaaagaaagatctatggctcactttattttgtctgtgcttcccatgaatgagtccatcaataaatgcatgcatacaggcatcacctctgcactctctggatatatgtttatgatacaggataagtccttatt

SEQ ID NO: 371795 - DNA, 342 bp, Homo sapiens
gactcactggcatccctgaaagagaacatgcaycttgggaaatatatttaaggatattctccacaaaaaaatctccaacctctctagagatgttgacattcaaatttaggaaattcagagaactcctgcaaggaactatacaaggtgaccatccccaacataatgtcatcagattaaccagaggcaataaaaaagaaaaaaatattaaaatcagctagtgaaggagcaggtcacttaaaaagggaaccccataagctaatagtgacctttcagcagaacacctacaagtcagagagattgggggcctatttacagtatcattaaaagaagaaattctaacag

SEQ ID NO: 371796 - DNA, 581 bp, Homo sapiens
gtaacaacccccatttacctagcagggttaacatacaaggttcatcaagagttcattctgcttctctaaccttatccctatggttacttgcattctaccatcaaaaaataccaaattttgcaggtgtttttaacctttgagtacttctgaaagtttcatggcaaactattacctttttcataayactaatgacatatatcttttatggtaaataccacagtcttacagttatttgccttccattgcccttttcttctaaaactgtaactcattgaggaatcccacagacctagcttttttcctgacacatggtaagaggcacatacaagtttcctgaataaataaatactaaatccatagttctgtcattaaatatccaatctataggttttatttctgcatttcttttaatgtgacaagtatagactatggctacttataatgatagtataactctcaccacaattctacagtaattttccactcatatttttatagttaaaaaaattacaaatgcaccctaaatgtcccggaaacttaccagtatgtgactataaattaaacagcaaaataaacattta

SEQ ID NO: 371797 - DNA, 581 bp, Homo sapiens
gtaacaacccccatttacctagcagggttaacatacaaggttcatcaagagttcattctgcttctctaaccttatccctatggttacttgcattctaccatcaaaaaataccaaattttgcaggtgtttttaacctttgagtacttctgaaagtttcatggcaaactattacctttttcataacactaatgacatatatcttttatggtaaataccacagtcttayagttatttgccttccattgcccttttcttctaaaactgtaactcattgaggaatcccacagacctagcttttttcctgacacatggtaagaggcacatacaagtttcctgaataaataaatactaaatccatagttctgtcattaaatatccaatctataggttttatttctgcatttcttttaatgtgacaagtatagactatggctacttataatgatagtataactctcaccacaattctacagtaattttccactcatatttttatagttaaaaaaattacaaatgcaccctaaatgtcccggaaacttaccagtatgtgactataaattaaacagcaaaataaacattta

SEQ ID NO: 371798 - DNA, 596 bp, Homo sapiens
gccagtattaccctgatttcaaagccagatactggcaccacattaaaagaaaattataggccaaaagctttgaagaatatagatgcaaaaattctcaacaaaatacaacgaaactaaattcagcagtatattaaaaggatcattcaccatgatcacgtggcagttatccccgagatgcaaagatagttcaacataagtcaatcaataaacatgatrcaacatattaatggaatgaagaaaaaaaatacgataatcttaatatatgcaggaaaagcacttgaaaaaattcaacatcctttcatataaaaagtgaacatattagatatcaaatgaatgtacctaacacaataaaggccatatatgaaaagcccatagataacattatactctatggtgaaaagttgaaagcttttcctctaagatcaggaacaagacaaggatactcactcttgccactcaatacagaactgaaagttctagcggggacaactagagaaagaaaagaagtaaaagtcatcccaataagaaagaaatgagtaaaattttgtttactgatgctctaaacttataatatgaaccctcccccaaatcagttg

SEQ ID NO: 371799 - DNA, 606 bp, Homo sapiens
taatcaagtggaaaaaatgaatgaaccattctatggataccagtcagcctcttttcttagctatccctgtcatcaccaaatgggatcataaacaaagcggccatggtgrcagggatgagggctgtgtatgggctcagcaacatgaacatccactcacaaagaccaacttggtgacagcaactactgagtgcccattctgacagcagtggagaccaaaactgaatccctgatgtgtcatcattttccaaggagataagccagatatctagtgatagactgataatattagaacagtttcatcctgaaaggggcagctcattgttttttctagaatagacacttactccggacatggatttgcctttcatgcattcaatagttctgccaaaactaccatctatggacttacagaatgtggtattcacattcacagtattctacatagcactgcctatgatcaaatgattcacttcacaatggatgaagtgcagcaatggaaccatgttcatgaaattactggtattaccatgttctccaatcattatgaaccatctagcttgataaaataatattactacctgttgaagactcagttatcatgacaat

SEQ ID NO: 371800 - DNA, 564 bp, Homo sapiens
ttatttacttaagactgcagtggtgtgatcatagcttacttcagccttgaccaactgggctcaagacatcctcttgcttcatcccctcaaagaaagtgctgggatgacaggtgtgagccgctatgcctggcctatttatttccatagaaacatgccttcatwgattttcatgaggaatatgaaatattaaattctgttactcagctataacttagtgttgtcccaacagatcaataatcatcaaattaatcatttatcttgattaattttaaaatgagttattataaaatagtatgtgctatggttttactgtctccaccaaaactcatgttgaaatttaattgccattgtagccatattgaaagtgggagcccttatgaggtgattaggtcataagggctgggccctcatgaagggattaatgctgttatcatgggagtgggttagctatagtgggagggagcccctgataaaaggttaagcttggccccatttcctctctgtctctagtgtacttccttgctatgtgatgctctcaccatgtggactcatcatctgccaatg

SEQ ID NO: 371801 - DNA, 591 bp, Homo sapiens
ttcttggtctacctcaaagttactttggtataattgcaaaatgacacacattgctcccatccctgcacamaagtctttttaaaatatgactttgcttctcttcctattaaaagaacagtagagtgtatttcttcatatcttgagtcttgcctagcccatgagacttgctttgacaaagggcaccttagcaagtgtaatgtaagcacaagttggaaatttgttcatcccttgctgctacaaccctcccaccgtgactagcctgctgcaggaacagaagcctggtgtgcaggggctcctgctttcccaaccatcccagctgaggccctcacacctaaggaaggtcatcctggactgctcatccccaggcagtctcacgcagatcagaacagcccaggcaacccacgaagtcatgatgttttttttcagctactaaatttgggggatagtttgttatgcagcagaagctaactgatacactctcattttggctttactatatagaacttaattaatggtttcaaggcaacagcaaagtaagcaagtgagccaacaaaacttttagctacagctttaccttttcttgtttagttc

SEQ ID NO: 371802 - DNA, 591 bp, Homo sapiens
ttcttggtctacctcaaagttactttggtataattgcaaaatgacacacattgctcccatccctgcacacaagtctttttaaaatatgactytgcttctcttcctattaaaagaacagtagagtgtatttcttcatatcttgagtcttgcctagcccatgagacttgctttgacaaagggcaccttagcaagtgtaatgtaagcacaagttggaaatttgttcatcccttgctgctacaaccctcccaccgtgactagcctgctgcaggaacagaagcctggtgtgcaggggctcctgctttcccaaccatcccagctgaggccctcacacctaaggaaggtcatcctggactgctcatccccaggcagtctcacgcagatcagaacagcccaggcaacccacgaagtcatgatgttttttttcagctactaaatttgggggatagtttgttatgcagcagaagctaactgatacactctcattttggctttactatatagaacttaattaatggtttcaaggcaacagcaaagtaagcaagtgagccaacaaaacttttagctacagctttaccttttcttgtttagttc

SEQ ID NO: 371803 - DNA, 591 bp, Homo sapiens
ttcttggtctacctcaaagttactttggtataattgcaaaatgacacacattgctcccatccctgcacacaagtctttttaaaatatgactttgcttctcttcctattaaaagaacagyagagtgtatttcttcatatcttgagtcttgcctagcccatgagacttgctttgacaaagggcaccttagcaagtgtaatgtaagcacaagttggaaatttgttcatcccttgctgctacaaccctcccaccgtgactagcctgctgcaggaacagaagcctggtgtgcaggggctcctgctttcccaaccatcccagctgaggccctcacacctaaggaaggtcatcctggactgctcatccccaggcagtctcacgcagatcagaacagcccaggcaacccacgaagtcatgatgttttttttcagctactaaatttgggggatagtttgttatgcagcagaagctaactgatacactctcattttggctttactatatagaacttaattaatggtttcaaggcaacagcaaagtaagcaagtgagccaacaaaacttttagctacagctttaccttttcttgtttagttc

SEQ ID NO: 371804 - DNA, 584 bp, Homo sapiens
tactggggctatttgttacccatttgtgatttcttgaagttcggtcatcttatttgttcctccctacttacaagtttttttttttttttttttttgcttttgttgcccaggctggagtgcaatggcgtgatcttgcctcactgcaacctccacctcccaggttcaagtgattctcctgcctcagcctcccaggtagctgggattacaggtgcctgccaccatgtccagctaattttttgtatttttagtagagacggggtttcactatgttggccaggctggtctcgaatacctgacttcaggcaatccacccccctcagcctcccaaagtgctgggattacaggcgtgagccactgcgcccggcccctcaagctcttgttttccrgagttccacaacttcatctgtcagtccaagcctccagtctgcaccctggattctctggtgagccccaatgccctctaggacctctaggaacgggatactctgctgcctctttgcccctctgtcacaacctagacctccaaggaagaggggccacctatcggcactgccagggtgctttgcagaatcctgacagccagc

SEQ ID NO: 371805 - DNA, 584 bp, Homo sapiens
tactggggctatttgttacccatttgtgatttcttgaagttcggtcatcttatttgttcctccctacttacaagtttttttttttttttttttttgcttttgttgcccaggctggagtgcaatggcgtgatcttgcctcactgcaacctccacctcccaggttcaagtgattctcctgcctcagcctcccaggtagctgggattacaggtgcctgccaccatgtccagctaattttttgtatttttagtagagacggggtttcactatgttggccaggctggtctcgaatacctgacttcaggcaatccacccccctcagcctcccaaagtgctgggattacaggcgtgagccactgcgcccggcccctcaagctcttgttttccggagttccacaacttcatctgtcagtccaagcctccagtctgcaccctggattctctggtgagccccaatgccctctaggacctctaggaacgggatactctgctgcctctttgcccctcygtcacaacctagacctccaaggaagaggggccacctatcggcactgccagggtgctttgcagaatcctgacagccagc

SEQ ID NO: 371806 - DNA, 580 bp, Homo sapiens
tactatgatgatgttccataaataagagggacctttaaattccatacggtttgctactggattgcaattaatattctgcagaaaacactctgctgtagctgttcaggaaatatttcttaaaaatagtggaaaacatttagatttcagacagctaactttttatctcccaaaatagcagaccaaaactcttattgcctgtgtaagatatttacacaacttcttatatgcttattcgtatgaaagcaatgttgtctagcttgtatgtctgccttttttctcatgtgctatttgactaccatctgtattctgaacttaaggcttaaaaactttaatcacaaactagaatagataaggtgtgttccagggctgccatagctactacatgygggaagtgttaatgaacagattaaaatggcccagaaatcagtacatgcttccattttcgctgaagagagagtgagtaaaagcaacagtttcttgtgcaactgaccacactgtgcctgctcttagattctcattttttttccctgagactttcactcagaaatccctaaactaattgatatattttcatcacctt

SEQ ID NO: 371807 - DNA, 548 bp, Homo sapiens
agattctctttgttaagctctttattaagggtcacagctcttactgctaccaaattggcaacacctgaattttacaggagacaccttcaaacaccagcaccagctagtckagttgtacagtcctatgtatttaaaaaataattaaacagattaaattattttggggtcacttattattactcatcatagttcaatgatatttttaaataatcagtttaattaaggaatgaattaggtaccacaaattttaccacgtctaaatgaacaatttaaggagtcttaatttaatttgacgaatttgactaaaggttatagtcatgtatccaacaccaaaatcatggtatggaggcttctcattcctccacaatttcctccatatccattttcagtccattttttctccctttcccttgctcctggcaaccagtgatctgatttctgtcaccatagctttctctcttccagaatttcatataaatggaatcatagggtacacacatttttgtctctggtttctttcactgagtgtaatgattctgagattcatc

SEQ ID NO: 371808 - DNA, 548 bp, Homo sapiens
agattctctttgttaagctctttattaagggtcacagctcttactgctaccaaattggcaacacctgaattttacaggagacaccttcaaacaccagcaccagctagtcgagttgtacagtcctatgtatttaaaaaataattaaacagattaaattattttggggtcacttattattactcatcatagttcaatgatatttttaaakaatcagtttaattaaggaatgaattaggtaccacaaattttaccacgtctaaatgaacaatttaaggagtcttaatttaatttgacgaatttgactaaaggttatagtcatgtatccaacaccaaaatcatggtatggaggcttctcattcctccacaatttcctccatatccattttcagtccattttttctccctttcccttgctcctggcaaccagtgatctgatttctgtcaccatagctttctctcttccagaatttcatataaatggaatcatagggtacacacatttttgtctctggtttctttcactgagtgtaatgattctgagattcatc

SEQ ID NO: 371809 - DNA, 548 bp, Homo sapiens
agattctctttgttaagctctttattaagggtcacagctcttactgctaccaaattggcaacacctgaattttacaggagacaccttcaaacaccagcaccagctagtcgagttgtacagtcctatgtatttaaaaaataattaaacagattaaattattttggggtcacttattattactcatcatagttcaatgatatttttaaataatcagtttaattaaggaatgaattaggtaccacaaattttaccacgtctaaatgaacaatttaakgagtcttaatttaatttgacgaatttgactaaaggttatagtcatgtatccaacaccaaaatcatggtatggaggcttctcattcctccacaatttcctccatatccattttcagtccattttttctccctttcccttgctcctggcaaccagtgatctgatttctgtcaccatagctttctctcttccagaatttcatataaatggaatcatagggtacacacatttttgtctctggtttctttcactgagtgtaatgattctgagattcatc

SEQ ID NO: 371810 - DNA, 490 bp, Homo sapiens
atttagtcttccataaagtgaaggtaaacgcacataaagcaaagtttaggtcacaaccctactccattgatggccatcaacatgcacgtagacatgaagcatggaagatgagcaaggactttctctaacytcttctttttttttttttttttttttgagatggagtcttgctctgttgcccagggcgaagtacagtggcactgtcttggcccactgcaacctctgcctcccgggttcaagcgattctcctacctcagactcccaagtagctgggattacaggcacatgccaccatgccttgctaatttttttatctttttatttttagtagagatggggtatcaccatgttggccaggctggccttgaactcctgaccttgtgatccgtctgccttggcctcccaaagtcctgggattacaggcatgagccactgcacctggcctttccatcctcttactagacagttgttgctgcctcaagattatttt

SEQ ID NO: 371811 - DNA, 579 bp, Homo sapiens
aattttagtacaaaatcttgtctactacttttcaatctcacatggtttacagattgaaaataaacagaggaaaattccactgttcctcactgaggtatattctagaggcaaaattggctctgataagatttccasaaacatagccctgtgcctttgcttttatgttatgcttcatgcgttagttaccaaaaagcacctttgggagggatacagtaaccaatttaagcaattagaaatatcagtaaaattattccacactctcaagctgacagttttgaagtgaattatctcattttaatatgctatttgtctgcttgtcttctagttacataataattgtacacatttatggggtgcatgtgatattttgatacatgagtagaatgtgtgacaaacatatcaagatacttaagaatcccatcacctcaaatatttattatttctttgtgttgggaacatttccgatcttgcctttgagctattttgaaatgtacactgtattattactcactatagtcaccttactctgctatcaagtattagaacatattccttctaactgtatccttgtatccattg

SEQ ID NO: 371812 - DNA, 579 bp, Homo sapiens
aattttagtacaaaatcttgtctactacttttcaatctcacatggtttacagattgaaaataaacagaggaaaattccactgttcctcactgaggtatattctagaggcaaaattggctctgataagatttccagaaacatagccctgtgcctttgcttttatgttatgcttcatgcgttagttaycaaaaagcacctttgggagggatacagtaaccaatttaagcaattagaaatatcagtaaaattattccacactctcaagctgacagttttgaagtgaattatctcattttaatatgctatttgtctgcttgtcttctagttacataataattgtacacatttatggggtgcatgtgatattttgatacatgagtagaatgtgtgacaaacatatcaagatacttaagaatcccatcacctcaaatatttattatttctttgtgttgggaacatttccgatcttgcctttgagctattttgaaatgtacactgtattattactcactatagtcaccttactctgctatcaagtattagaacatattccttctaactgtatccttgtatccattg

SEQ ID NO: 371813 - DNA, 579 bp, Homo sapiens
aattttagtacaaaatcttgtctactacttttcaatctcacatggtttacagattgaaaataaacagaggaaaattccactgttcctcactgaggtatattctagaggcaaaattggctctgataagatttccagaaacatagccctgtgcctttgcttttatgttatgcttcatgcgttagttaccaaaaagcacctttgggagggatacagtaaccaatttaagcaattagaaatatcagtaaaattattccacactctcaagctgacagttttgaagtgaattatctcattttaatatgctatttgtctgyttgtcttctagttacataataattgtacacatttatggggtgcatgtgatattttgatacatgagtagaatgtgtgacaaacatatcaagatacttaagaatcccatcacctcaaatatttattatttctttgtgttgggaacatttccgatcttgcctttgagctattttgaaatgtacactgtattattactcactatagtcaccttactctgctatcaagtattagaacatattccttctaactgtatccttgtatccattg

SEQ ID NO: 371814 - DNA, 579 bp, Homo sapiens
aattttagtacaaaatcttgtctactacttttcaatctcacatggtttacagattgaaaataaacagaggaaaattccactgttcctcactgaggtatattctagaggcaaaattggctctgataagatttccagaaacatagccctgtgcctttgcttttatgttatgcttcatgcgttagttaccaaaaagcacctttgggagggatacagtaaccaatttaagcaattagaaatatcagtaaaattattccacactctcaagctgacagttttgaagtgaattatctcattttaatatgctatttgtctgcttgtcttctagttacataataattgtacacatttatggggtgcatgtgatattttgatacatgagtagaatgtgtgacaaacatatcaagatacttaagaatcccatcacctcaaatatttattatttctttgtgttgggaacatttccratcttgcctttgagctattttgaaatgtacactgtattattactcactatagtcaccttactctgctatcaagtattagaacatattccttctaactgtatccttgtatccattg

SEQ ID NO: 371815 - DNA, 569 bp, Homo sapiens
ttgaacatgaaccctttggagaatgatgtggagccaggagaggggattgtggatggtgagcacacaggatgatcagaggagggggaagggcagggaggggccggggaggggggtacttagaccacatggagatgcatttagagtattgtgttcaacactcctatttcatagtgatgaaatggaggcccagagagggaaagtgacctgcccaaggtcacacagtcacaagaagtcagtagcagagctagaacttggacccaggacttcaggaatctatgctggatttgagcctcctgtgcagccgagggagacctgaagtgtgggaaggactgggatacgtaccagtgggcaggaagaaagagtgaggcaaagtgcagaggtgggaactttgtacagcaagggaaaggagctggaatcacaggcaggatctggaaggagggagctgcccagacctggaaagccaggctgagcactgcagaccacagagggtttcgagctgacaccarttgggaagatacaggcgtgcgaggggcacacgcccaaatgacccagtgagacagcaggtgaca

SEQ ID NO: 371816 - DNA, 631 bp, Homo sapiens
gaattagattattagagtcttactatcatatctcaaaaaatcctgtcatttaggggaccatgttttccaaaaacaggttctgatcttacacattgtttctgtgttaggraatggacatacattgcaatagttcattagatccattccaatcagagcaagtcttaggaaatattttcaaatggaaatatacaaataactcatattaatttgtaattgagtccctttcttctgaggaaggtagttgtgggtatggtggaaaaaatgaatcctttgaaatcacctgctaatatgggttctggttctgacaataattttgtgatattgagctagttatctgttggagctttattgaaaatgtcccaatatgtaagatggggctctcttgtagactgactgcatttttaatgttaaactgttgataccatttatgctccacctctccctcttcacattctgccccacatctagacaagctgatgagaaagcctgcttgcttcttccttcatttggacaggaaggtcaaaccatgtaggaaccgtcatcccagctgcaatccctgaccatagaaaccccaagccagttttctttccttgtttctcgagtcatctttggacttgcttgagatttgcct

SEQ ID NO: 371817 - DNA, 618 bp, Homo sapiens
atgattatgtctgctcacacagtgctttccaaactgcaggtcacaacctctcaatggatcgtgaaatctatttagtgagtcatgattaacatttaaagatagaatcgtatggaaaagaatagacagaaaatatcagtgtattgcagagtaaaggtaagtactgttttatgatgtttgttacatatgtttatagatattgcttgctatgttatgtatgactgtatgtgtatactagattatgacaaaaggtattgcttactaaaagccataaacaaaaaagcttgaaaaaaaggtgttaatgtgaggccgggcacggtggctcatgcctgtaatcccagcactttgggagtccaaggcgggcagatcacctgaggtcggaagtttgagaccagcctgaccaacatggagaaaccccatctctaccacaaatacaaaattagcygggcgtggtggcacatgcctgtaatcccagctactcaggaggctgaggtagaagaatcgcttgaacccgggaggcagaggttgcggtgagccaagattgtgccattgcactccagcctgggcaacaagagcaaaactccgtcccccaaaaaaaaggtgttaatgtcacaggtcacc

SEQ ID NO: 371818 - DNA, 618 bp, Homo sapiens
atgattatgtctgctcacacagtgctttccaaactgcaggtcacaacctctcaatggatcgtgaaatctatttagtgagtcatgattaacatttaaagatagaatcgtatggaaaagaatagacagaaaatatcagtgtattgcagagtaaaggtaagtactgttttatgatgtttgttacatatgtttatagatattgcttgctatgttatgtatgactgtatgtgtatactagattatgacaaaaggtattgcttactaaaagccataaacaaaaaagcttgaaaaaaaggtgttaatgtgaggccgggcacggtggctcatgcctgtaatcccagcactttgggagtccaaggcgggcagatcacctgaggtcggaagtttgagaccagcctgaccaacatggagaaaccccatctctaccacaaatacaaaattagccgggcgtggtggcacatgcctgtaatcccagctactcaggaggctgaggtagaagaatcgcttgaacccgggaggcagaggttgcggtgagccaagattgtgccattgcactccagcctgggcaacaagagcaaaactccgtccccmaaaaaaaaggtgttaatgtcacaggtcacc

SEQ ID NO: 371819 - DNA, 549 bp, Homo sapiens
gattctcatgactcagcctcccgagtagctgggattacaggcgtgtgccaccacacccagctaatttttttgtatttttggtagagacagggtttcaccatgttggccaggctgatctcaaactcctgacctcaggtgatctgcccaccttggcctcccaaagtcctgggattacaagcatgagccaccttgcctggcctgttttactttttattttcagaatgcttattatgcaatggaagcagaattaatcatattcctctccctgaccaacaatgtggaattctctactgactgtaaatcagtatttttaaaagagctttaatgaaagttctttwatgataccactaagcagatgtcaggatttacttttcaattaggtggtatagtggtgatgagcagatcagactcctttgcaggtgatacattgcttaggggaactgacatttagaccattgatccctctagtgattttacatgtcacgactgagctatttgtcacttgctctatctgaaaagtaggcagaataaacaagaggatttttacag

SEQ ID NO: 371820 - DNA, 632 bp, Homo sapiens
cagacacaatcttaaactactagcattatgcgtcagcttctgaaactaaaatatgtttttaaaaagagcttttaaatacattcagcttacttttctctagcaytgaaagccataacataaaaaagtgagacaggaatgtttttttaacagcaaagagatgctttgtatccagaaaagctgaacaattacagtgtagctaaaatgttctttgaagtactgtatagcacttaactttaaaagctctctgcttgcttctaagcaatgtgtcaaactaagcatatgctatgtaaataaatcagctcagaaaggagtttcaggcttctccagctgtgttaagatttctccactcattaggaaagccaagaaaaagaaaacttaatgatgtgtttactctgcatggttcaaacacaggttctatagaatagttgttgacaataagtttttatgaaacatcttttaccaagtttggcgccatcctgcaaactggaatgtctaaaggagaaaggttcatcaagaagcctgcttatagtaattttaaaaatcataagatacagagtattagctatgcagaagaaattatatgtggaagaaatcagtacccaattttttttttttaatttttttggagacag

SEQ ID NO: 371821 - DNA, 543 bp, Homo sapiens
aattgctgttgtattatcaagagatggcagaaaataagaatttaggtgaataaatatcctcattatgatgatcttatgaagtcataatttacaaaagattatctaatttaattgatgtctgttcacattgcaaatattagatttctaataatgctttcagtgtgataatatataatcatatgtcaaaagccaagtaattcactgtaactacattattataaagtaggtatgtcaactataaagatattatacttcacaaacaaaattgaagttttcttaaatgctaaaactcactatgggggctttgataarcttcgttactggatttattgtcacaaattctatagaaagaaatttggcatagaaatcaagagtcattaaaatgactattctatttgccccagaaatcccattcatgggactttttcatcaagaaatatctcaaaatccagaagaagaatttcaaaataatatgatagtgacagaaatttggagctacctaataattacgacaacaggaaaatcgtaaataagttatggcaa

SEQ ID NO: 371822 - DNA, 543 bp, Homo sapiens
aattgctgttgtattatcaagagatggcagaaaataagaatttaggtgaataaatatcctcattatgatgatcttatgaagtcataatttacaaaagattatctaatttaattgatgtctgttcacattgcaaatattagatttctaataatgctttcagtgtgataatatataatcatatgtcaaaagccaagtaattcactgtaactacattattataaagtaggtatgtcaactataaagatattatacttcacaaacaaaattgaagttttcttaaatgctaaaactcactatgggggctttgataaacttcrttactggatttattgtcacaaattctatagaaagaaatttggcatagaaatcaagagtcattaaaatgactattctatttgccccagaaatcccattcatgggactttttcatcaagaaatatctcaaaatccagaagaagaatttcaaaataatatgatagtgacagaaatttggagctacctaataattacgacaacaggaaaatcgtaaataagttatggcaa

SEQ ID NO: 371823 - DNA, 621 bp, Homo sapiens
ggttatttctgtttacatgcctgccgtctccccaactagattcaggcgtttagacatcaggaactatgtcttctgtatcatatgaatcttagagcacattgtttgacaaaatgggtgctcaagtccggttgagtcaatgatttcaccaagttagtttgaatttgttgctctaaaagaaatcttagatctcatttaattctgatttttagaaacaaagaattgaaagcataagtgacatgcccaaggttatacagttacaatgcatggctttcgactccctttccactctgtacaaaaccayaccctgagaaatcactctgaaaagcttacatttagcgtaaaacagagagacgcttactcatctccataccaagtgacacatacctatttaactaagaggaagggaaaaagaaagaaaggaaaggaaggaaaggaaaaggagataaagaagaaaccaaactggaaatattcctagaacaaagaggtctcaacctcagccctactgtaattttggacaagatatttctttgtcgtggagggctttcctttgcattgtgggttatttagccacatctccagcctctactccctagatgccagtatcaacacactccaccccca

SEQ ID NO: 371824 - DNA, 621 bp, Homo sapiens
ggttatttctgtttacatgcctgccgtctccccaactagattcaggcgtttagacatcaggaactatgtcttctgtatcatatgaatcttagagcacattgtttgacaaaatgggtgctcaagtccggttgagtcaatgatttcaccaagttagtttgaatttgttgctctaaaagaaatcttagatctcatttaattctgatttttagaaacaaagaattgaaagcataagtgacatgcccaaggttatacagttacaatgcatggctttcgactccctttccactctgtacaaaaccacaccctgagaaatcactctgaaaagcttacatttagcgtaaaacagagagacgcttactcatctccataccaagtgacacatacctatttaactaagaggaagggaaaaagaaagaaaggaaaggaaggaaaggaaaaggagataaagaagaaaccaaactggaaatattcctagaacaaagaggtctcaacctcagccctactgtaattttggacaagatatttctttrtcgtggagggctttcctttgcattgtgggttatttagccacatctccagcctctactccctagatgccagtatcaacacactccaccccca

SEQ ID NO: 371825 - DNA, 555 bp, Homo sapiens
ttgtcattctttattaaggcagtaataaaaacaaatgcatattttcgtttctgaagtagggtgcttcagcaacaaatacmtaaaaatgcatgagtggctttggaatcagactatgggaaaagactggaagaattttgaggaacattatagaaaaagcctagattaccttgaacaggacaatagtagaaatttagaatccttctgatgaggacttaaaagggaatgaggaacatgtgattggaaactggagaaagaggaacaattgctatatgatgaagagagactggcaaaattatgtcttgtagttatgttgcaagcagaacttttaagtgatgaacttggatattaagatttccaagcaaaatactgagagtattacctagtgtatttgtcagcaagatgtcacagactgggtggaataaaaacaaatttattcttcacagttctggaggctgggaagtccaagatcaagtaggcaaagtaggttcattctgaggctgctgtcttggcatgtgggtggccatcatcttactgtgtacacatatgaccttttct

SEQ ID NO: 371826 - DNA, 543 bp, Homo sapiens
ccttacaagaggtctctaaaggagttctagacatggaaatgaaagatcactacctgattatcagggtaacctgcccccaatatttcaatgtaggttctttctattttccataagtgttggccagctgagaaataaagagaaagggtaccaagagaggaattttacagctgggccactgggggtgacatcacatatcagtaggaccgtgatgcccacctgarcctcaaaccagcaagctttttattaagggtttctaaaggggagggggtgtaaaacagggagtagatacaaagatcacatgcttcaaagggcaaaaagcagaacaaagatcacatgcttctgagggaacaggacaaatggcaaaagcagaactactgacaaggatccaacaaagatcacaaggcaaagggcaaaagcagaactactgataagggtctctgttcagtggtgcacgtattgtcttgataaacatcttaaacaatagaaaacagggttcgagagcagagaaccgatctgaccacaaatttaccagggtggagtttt

SEQ ID NO: 371827 - DNA, 543 bp, Homo sapiens
ccttacaagaggtctctaaaggagttctagacatggaaatgaaagatcactacctgattatcagggtaacctgcccccaatatttcaatgtaggttctttctattttccataagtgttggccagctgagaaataaagagaaagggtaccaagagaggaattttacagctgggccactgggggtgacatcacatatcagtaggaccgtgatgcccacctgagcctcaaaccagcaagctttttattaagggtttctaaaggggaggggstgtaaaacagggagtagatacaaagatcacatgcttcaaagggcaaaaagcagaacaaagatcacatgcttctgagggaacaggacaaatggcaaaagcagaactactgacaaggatccaacaaagatcacaaggcaaagggcaaaagcagaactactgataagggtctctgttcagtggtgcacgtattgtcttgataaacatcttaaacaatagaaaacagggttcgagagcagagaaccgatctgaccacaaatttaccagggtggagtttt

SEQ ID NO: 371828 - DNA, 543 bp, Homo sapiens
ccttacaagaggtctctaaaggagttctagacatggaaatgaaagatcactacctgattatcagggtaacctgcccccaatatttcaatgtaggttctttctattttccataagtgttggccagctgagaaataaagagaaagggtaccaagagaggaattttacagctgggccactgggggtgacatcacatatcagtaggaccgtgatgcccacctgagcctcaaaccagcaagctttttattaagggtttctaaaggggagggggtgtaaaacagggagtagatacaaagatcacatgcttcaaagggcaaaaagcagaacaaagatcacatgcttctgagggaacaggacaaatggcaaaagcagaactactgacaaggatccaacaaagatcacaaggcaaagggcaaaagcagaactactgataagggtctctgttcagtggtgcacgtattgtyttgataaacatcttaaacaatagaaaacagggttcgagagcagagaaccgatctgaccacaaatttaccagggtggagtttt

SEQ ID NO: 371829 - DNA, 595 bp, Homo sapiens
gaactctaggtgcggttaagccaattttctcatagtggtttcctatcaattacaaactgatgttaggagtgtatatatgtacacaatggtaatagaagcagactgctatttcatgagaggcagaaaatgagatttagtaggccctgtctgtagaattttcatacttgaggttggccataaacgtcagctaggtttttgggtaaatacattgacaggtttatgcaaacatccatatacttattcagaatcttctgcatcctacgcaatgtgtgtactccactgggttacagagattaacaagygacacattccttcagttatcacctgctttgcatgttgtgcttcaggataaatagactctactgatgtctccttgttcactgtatttccctacgctgtcttctctttccagtgagattctttgtggtatgttcagtctttttgtactagccagtatctttgatcaaatgaagtaagccttccttttcatccataatgattataacaaacaattactctaatgcttattggttataattttttttatttctactttttaagtagagtgcagtggaaagagacaaaagagagatca

SEQ ID NO: 371830 - DNA, 624 bp, Homo sapiens
atgtgcatagaataaatctcccccaacatgacacacaaagttatcacaaattccaaatttgagaaacaattatcaaaaatgttaaaagctcttgatacaatagaaaaataaatacaaacatattttatatagaatcagaaacattcttcagaaaaagacatgttttaaggtagtatgtgtctttgttaaattcctaataatagaaaaggaagtatytgcagtccattattttagtgtttgttcatacaaaggcatcccatgcaatgttttatttaaaacattatcatttttttcaaaatctacttttccacttttaccatacactaccatataaaatcaacaaaatcatctaatctacaattaaaaagtgtgcttgcagtaaagtactattaatgagttaaataaaattgttcactcatcctttcctcgcacactggattggaaggagcatctaggtaacctgatttttacctggccatttgaaaacagtatgtcttcacccagtgtagattttttgaaagatggtaggagtactatataagaaagctagactttggataattgactctaggaagaaaaaaataaagaaagaaactgtccaaacatacttcaaatttagaagtt

SEQ ID NO: 371831 - DNA, 580 bp, Homo sapiens
tgaacataaattgtgaagatttcatggacatttgtcacttccccaatcaatgctcttataatttcctaggcctgtctttaatctcttaatcctcttcataagctgaggatgtatgtcacctcaggatcctgtgatgattgtgttatctgcacaaattgtttgtagagcatgtgtgtttgaacawtatgaaatctgggcatccaaaggaacaagatggctgcgattttcagggaacgagggagataaccattgggcctgactgcccgaggggccagacagaacagagtcatatttctcttcttacaaaagcgaataggagaaatatcgctgaattctttttctcagcaaggaacagccctgagaaaaagaatgcattcctagggggaagtatctaaactggctgctctgggaatgtctgtcttacacggttgcagataagggatgaaataagccctggtcttctgtagcgcccccaggcctgttaggactaggaaattcctgcctagtaaattttagtcagaccagttgtcttctctcaagccctgtctcctgataagatcttaacaatgataatgcgtgc

SEQ ID NO: 371832 - DNA, 621 bp, Homo sapiens
gtttttgaaatctaaatgatttgaacataaccarataacatcaatcaacataatttcatatattaaaaataaaaatatataaatgcttaaaattatacatgggtaattaagatagatggatctatttatttttattgcatttatttatttatttacttatttatttatttttgagacacggtcttactctgtcactcagtctggagtgcagtggtgtgatcatggctcactctaacctctaacacctgggcttaagcaatcctcccaccacagccgcctgaatagctaggactactgtcatgcaccaccatgcccagctaattgttgttggtgatttttgtttctgtagagacaaggtctcttattgcttcccaggctcctgtcctcccggctcctgtcctcaagctagcctcgcacctcagccactaaacatgctgggattataggtatgagttgtcacacctagccttgactgtacttttggaaagtatcttgaatactcatacaacaaccctcggaggtaggaattgcaacatgtgagactaaatataagagagatttaataactatccagagttacatctcaaacatcaaggctggaggaacccagatctgcatgat

SEQ ID NO: 371833 - DNA, 621 bp, Homo sapiens
gtttttgaaatctaaatgatttgaacataaccagataacatcaatcaacataatttcatatattaaaaataaaaatatataaatgcttaaaattatacatgggtaattaagatagatggatctatttatttttattgcatttatttatttatttacttatttatttatttttgagacacggtcttactctgtcactcagtctggagtgcagtggtgtgatcatggctcactctaacctctaacacctgggcttaagcaatcctcccaccacagccgcctgaatagctaggactactgtcatgcaccaccatgcccagctaattgttgttggtgatttttgtttctgtagagacaaggtctcttattgcttcccaggctcctgtcctcccggctcctgtcctcaagctagcctcgcacctcagccactaaacatgctgggattataggtatgagttgtcacacctrgccttgactgtacttttggaaagtatcttgaatactcatacaacaaccctcggaggtaggaattgcaacatgtgagactaaatataagagagatttaataactatccagagttacatctcaaacatcaaggctggaggaacccagatctgcatgat

SEQ ID NO: 371834 - DNA, 352 bp, Homo sapiens
ataataactctagcattttattgttgtatcattgctctactgtccagaatgcgttgtctccatgacagtgttacaggtgatatagcaactggagatttggccaagaaacataatctagagggatacgctatctgtggtgacactgcacagcaatattagcacccatactgatatatgttttagaaaagattgtcactatgcataacaaacaccaaagcaccctatttttacatggtgttattattttagatgaattcyttaggctttctcttacatactccctactttaaataaatttttatatctgatagtggtattttgattatatagaataatatccttattcttacaa

SEQ ID NO: 371835 - DNA, 592 bp, Homo sapiens
atacaggaagttttctctcctctggtagttattggatacattatttyttaagaccagtatactgaagtgagtttgtatatgaatatagattccctctgaaagtaatttggaaagcttgttctctatttagcagcagagtcatttgtaaagaagcttctagtactattattttatttgagaattttcagtaagaagaaatacaaaagagaaaaagtttggaaggctggaaatgtttacagtaacaacttcaaaggaatgtcaccaaagcagaaaagaagtgaaataaacctggagcttacttgtgtttaaattgaaattaccacgtacattagttcaaacggtattaagtttgaggtacttgtcaacattactacacattctgatttggtgatactttccttatgaaaaccagagctgattaataccgttaaccaccacagctgcgagctgaaacattctaaactatgtgcataagtttttatcttggtacttggtagattgcttgtctaaaagtaatcctctaaatcctttaaatattttttattaatttaatgataagtagactagtctttgtgagtgaactaaaaagccg

SEQ ID NO: 371836 - DNA, 570 bp, Homo sapiens
aataaacgatggaacaaaaaaatcggaatttgccagaaagcgatagaataatatttcacttaaacccggcataacatattctactggttaygccaattgcatatacatacgtatttttcataatagaatcaattttgtcttgtggtttacagaatattatttttgcatgatgtattgccctctgtacaaagatcctgatttccttagattttgcccacattttattcggcatgagtaattcaaatatgagtataatgtctcatctctcctgcattctttgcattctgcattctggcctggtcataaataataacctgataataaatgttaaatttcattataggccacagagtgtttaaacagtataatctaaagaaataaaattatagaatgtagaaatgttaacaatttcctgcaatatgttgtttttagaagcagaaggcagtgccaactaacaaggctcaggaaagagcctagcaggcactataatatcaaaaattgtctgaggagtgagactaccagtccaaggtagctcactagatcagtccaatcataagcttaatttttaaa

SEQ ID NO: 371837 - DNA, 570 bp, Homo sapiens
aataaacgatggaacaaaaaaatcggaatttgccagaaagcgatagaataatatttcacttaaacccggcataacatattctactggttatrccaattgcatatacatacgtatttttcataatagaatcaattttgtcttgtggtttacagaatattatttttgcatgatgtattgccctctgtacaaagatcctgatttccttagattttgcccacattttattcggcatgagtaattcaaatatgagtataatgtctcatctctcctgcattctttgcattctgcattctggcctggtcataaataataacctgataataaatgttaaatttcattataggccacagagtgtttaaacagtataatctaaagaaataaaattatagaatgtagaaatgttaacaatttcctgcaatatgttgtttttagaagcagaaggcagtgccaactaacaaggctcaggaaagagcctagcaggcactataatatcaaaaattgtctgaggagtgagactaccagtccaaggtagctcactagatcagtccaatcataagcttaatttttaaa

SEQ ID NO: 371838 - DNA, 610 bp, Homo sapiens
ctttgaactgtacacgtcacttgccaacagggagggagacaaacaaacagttgagtaaatcatggcttattcatctggaagagcacaatcaagtacagtcatgctcttgtgtttgtgtagtgcaatacctggacatctatacagctttcttgcctgtgcgatatctcctttgcttagacgggttcgctgaccaattgcaggacgtatgccattatcatcacgggaggggagaatggtatccagaaacatccccctgaaaaaaagcagaagcaaaccacacctaagtcaccaaatgaaaactcatgaattccttacatttataaggtatttatttcaaactcaagtcaatcaaaggggaactacaccttgtgtgctttaagcagtgtatcaggctttcaaaacactttcatcaaagtagaaaaaaaagcatgttaaatgtgtatgcmtagtataaactcaatgatgacattcatttgtttccttgaaacatgtatgttcttaaaaatatggaataccttataatcccccacaaagtacaccatgacatttgttttggtttcccaagcagatctaagaattccttagattatcaggttgtgaaacaatgatt

SEQ ID NO: 371839 - DNA, 574 bp, Homo sapiens
aaaaaaatttccaatatttatatttatatatatacatatataaattaagtggtttaatcagaatatacaaagaacttctactactcaacaacaaaataatcaaataacctgatttagacatgggcataggacttaaataaagatttctccaaagatgatatacaaatgccaccgagcatataaaaggatgttcactaatcatcagagaaatgttaagtcaaaaccacaacragatatgacatcacactcagaatggctactattcaaataacaaaaaataatgtgctggagagatatttgcacacccatgttcatattagcattattcacaagaggcagaagctacacaaatgctcactgatggatgacaagataaacaaaatgtgatatatacttacaatggaatattatttggccttaaaagtgagaaaatactttcacatgctacaacatagatcaaccttgaggaaataatgctgagtgaaataagccaatcacaaaaggacaaatactatatgtctccagttatatacaatatcaaaagtagtcaaatatataaacaggaaatagaatg

SEQ ID NO: 371840 - DNA, 547 bp, Homo sapiens
ttcaaagagtctagcctagattgtttgatggagtataagcagttaactaaactgaacaatgaagttcatgaagaaattaaaccccaaagtttcatttcatattgttatattcatatatttctatgacagatgaggcagctgaggagttaagtaagctgctcagtgtcacagagcatttaaacctagtatctcttggtccaaagaccattctcttaaccgtaagaactgatcatgaccttggcaaatggcattagttcttttccttatgacctggaaaacaacagcagatataattttcmcttctttattagattattgttttgtaaagtccaagacaattattattaagtataaattttcagggttcactttgtgaatcattgaaaagtcttggctgtttttcagattgatatttaaaatactgtggttctggatgagtgattagatctatttcacatttaatttcctgggagtttctgttagtgggaaagatgtttgcccaggaaaagggaaggttaaaaacatgtttgtaataaattgctgttgt

SEQ ID NO: 371841 - DNA, 543 bp, Homo sapiens
aattgctgttgtattatcaagagatggcagaaaataagaatttaggtgaataaatatcctcattatgatgatcttatgaagtcataayttacaaaagattatctaatttaattgatgtctgttcacattgcaaatattagatttctaataatgctttcagtgtgataatatataatcatatgtcaaaagccaagtaattcactgtaactacattattataaagtaggtatgtcaactataaagatattatacttcacaaacaaaattgaagttttcttaaatgctaaaactcactatgggggctttgataaacttcgttactggatttattgtcacaaattctatagaaagaaatttggcatagaaatcaagagtcattaaaatgactattctatttgccccagaaatcccattcatgggactttttcatcaagaaatatctcaaaatccagaagaagaatttcaaaataatatgatagtgacagaaatttggagctacctaataattacgacaacaggaaaatcgtaaataagttatggcaa

SEQ ID NO: 371842 - DNA, 584 bp, Homo sapiens
cttaaaagatatatactatgtcagaaatttagatatattattagtctcccaacattttacaaccccataaatatttttgtagaccttcacataattaacttgacaccacagtggatgggtacctaattaactgaaatgataatgtgaatgcttctagtttcattttctagtctgggttttatgtcctgattaataacatgctttaaaatttgtatataaattaatcagtgtctataaaaataaatcaaattcaaataaataataaaaactttaaggatcggccgaaggcgatggctcacgcctgtaatcctagcactttgggaggctgagacgggcagatcacgaggtcaagagtttgagaccagcctggccaacatggtgaaaccccttctctactaaaaatacaaaaattagctgggcttggtggcaggygcctgtaatcccagctactcaggaggctgaggcaggagaatcatttgaacctgggaggcagaggttgcagtgagccaagatcatgccattgcactccagcctggtgacagaatgagactctgtctcaaaacaaaacaaaacaaagaaaaaaa

SEQ ID NO: 371843 - DNA, 593 bp, Homo sapiens
atttttttcaatgttgaattttcaaatctatgaacatattatgtttctatatttgtttaggttttctttgatttctttcaacagcatttaataagtttccacgtatagactctgtacatgtttcagtaagtatatacctcactaagtatttcattttcactggactgattataaatagtattatgtttttaatttcggactactgaagttcattggtattatacaagtaatatgattgaattttgtgtattgatcttgtattttgcaagtacactgaactcatgtattcattctagaagcatttttatagatgccatgggttttctacaaagacaatcatgacatctgcaagtaggggcaattttatttcttctatttttccatcctttcttgtgcacgctctctcttgcgtgctctctctctctcttttccccctctgttgtgaaaattgtgtaagttctattgattgttttcaagttaactgatcctatcctctgttatctatgacctactaytgaacctatccagcaagttttttagatttttatatcagatctttcagttctattatttacatttggttctttttcata

SEQ ID NO: 371844 - DNA, 600 bp, Homo sapiens
attttgggcattaaccccttatgaaattcatgatttgcaaatattttctcccactgtgtaggttgtctcttcaccttgttgattgtttccttttgtgtgtagaagcttcttaatttgatatgatcccatttgtctgcatttgtttttgttacctgtgccttttgggttatattcaaaagatcattgtccaaaacagtgtcataaatttgttgttttcttccagtgtttttaccgcatcaggtcttaaatttagtctttaatccattttgagttgatttttgtttatggtgtgagatgagagtccagtttcattcttctgcatatggatatctcgtttttcccaatactacttttaaactgactgttctttacccattgtgtcctctcagcacctttgtcaaaaatcatttgaccataaatatgtgggtttatttctgacactctgttccattagtctacgtatctgtttttataccactatgatgctattttgattactatagctttgtagtaattttgaaatcagttagtatagtatccccagcattttttttttccctcagattactttggctgttygaggtcttttgtgtttcatat

SEQ ID NO: 371845 - DNA, 566 bp, Homo sapiens
gctcttctcaaggagtatcttagtggtgttctctgtatttcctgaatttgaatgttggcctgttttcctaagttggagatgttctcctggataataacctgaagtgtgttttccaacttggttccattctccccatcactttcaggtacaccaatctgttgtagttttggtcttttyacatagtcacatatttcttggtggcttttcattcttttcattcttttttctctaatcttgtcttcacgctttattttattaagttgatcttcaatctctgatcctttcttccacttgattgattctgctatttatacttgtatatgcttcacaaagttctcgtgctgtgtttttcagctctgtctggtcatttatgtttttttttttttttttaactggttattctagttagcagttcctgtaaccctttatcaaggttcttagcttccttgcattaggttagaacatgctcctttagcttggaggagtttgttattacccaccttctgaagcctacttctgtcaattcatcaaactcattctccatccagtgttgctccctggctggc

SEQ ID NO: 371846 - DNA, 566 bp, Homo sapiens
gctcttctcaaggagtatcttagtggtgttctctgtatttcctgaatttgaatgttggcctgttttcctaagttggagatgttctcctggataataacctgaagtgtgttttccaacttggttccattctccccatcactttcaggtacaccaatctgttgtagttttggtctttttacatagtcacatatttcttggtggcttttcattcttttcattcttttttctctaatcttgtcttcacrctttattttattaagttgatcttcaatctctgatcctttcttccacttgattgattctgctatttatacttgtatatgcttcacaaagttctcgtgctgtgtttttcagctctgtctggtcatttatgtttttttttttttttttaactggttattctagttagcagttcctgtaaccctttatcaaggttcttagcttccttgcattaggttagaacatgctcctttagcttggaggagtttgttattacccaccttctgaagcctacttctgtcaattcatcaaactcattctccatccagtgttgctccctggctggc

SEQ ID NO: 371847 - DNA, 566 bp, Homo sapiens
gctcttctcaaggagtatcttagtggtgttctctgtatttcctgaatttgaatgttggcctgttttcctaagttggagatgttctcctggataataacctgaagtgtgttttccaacttggttccattctccccatcactttcaggtacaccaatctgttgtagttttggtctttttacatagtcacatatttcttggtggcttttcattcttttcattcttttttctctaatcttgtcttcacgctttattttattaagttgatcttcaatctctgatcctttcttccayttgattgattctgctatttatacttgtatatgcttcacaaagttctcgtgctgtgtttttcagctctgtctggtcatttatgtttttttttttttttttaactggttattctagttagcagttcctgtaaccctttatcaaggttcttagcttccttgcattaggttagaacatgctcctttagcttggaggagtttgttattacccaccttctgaagcctacttctgtcaattcatcaaactcattctccatccagtgttgctccctggctggc

SEQ ID NO: 371848 - DNA, 525 bp, Homo sapiens
aaagaaaattgtgtgctgtgaaggcctaaatcctggcctggctattgcaatagaactgcataaagaatgcgattttccatgttttattttttaaaaaattattaatttcctactttgttccagaaaggattcaggtgacttgtgaaatgtatataacataatagaattaaaaataaggaagacaaagatcaagtcacagaataaaaaagraatccaagaaaacagaatcaggaaaaaataccccaatttatgcctcaagatcctgtatgcttccctgaaatggcccatcaatgtgtctcaaatctccccagcacacagagcaaaaagagaaacatgatcagctacatgattcagagctgatgtggaaaaaaaaaacaattgtttaggaaaagcaagatttttgtcctggtactgaaatcagtgggaaatttcttccactggattcttatgaagatggtgttctgtaatgtggtgaaccatgagtctacataaaataactctaaacacagtaataagtggaacagg

SEQ ID NO: 371849 - DNA, 617 bp, Homo sapiens
acttcagagattgacacaaagtaagttctcaacagatgtaagctagtttttgttacagtaattcattattactgaatggacaatgaaatgaatgcataaatggaagcccaactcatcaaggtaatgattcaagagctctgtcataattcattgcattaaagtgtgccaagaagctgtggaaagaagagataagtagcatgcctggcctctctcttaatcctttggggggtaatttatatttctttggctcttggctagtcaaatgaactcaggtgtcacacgcttacatattaatttgagataacatgaaaccactgcatcagtctgataatttctctttttggggagatgctagtagcattsctagcaatagaaagctcatttcactaaagtatgcaagaaaccgctcagctgttgaccattagtatttcagagttatgcataggaagaaggagaggaaacaatgtttaattggctaatgagtaaatacgtaagctctgataaagggcagaaataaatgatgcaccagtatcagaaagctacttcatgttaaatgtgttcaattcaactagtaaataaaaaaaaaaaaggacttttggaagttttcatggagaaat

SEQ ID NO: 371850 - DNA, 537 bp, Homo sapiens
tagagtttcacagtcccctctgtgaaatgcacattctgctgcagatggtagcgcaggtcgcctcccaggagcaggtccaccaccatgaacatgtcctcctcatcctggaaggagtacctaggagcacagaaggacagagaagattaggggtggaggcaccttcagcaccctcaagaccaatgcctccattttacagaagagcaaactgaggctcagagagaggcactgagttgcctgagtcatggtgctatgggagtggaggggaaggggaaaaggctttcaatcctcaggctgcctccacatttgttggggtttcctcatttcttacatagcaaaggcaagcaggagtacccagcattagttcccaggctctggcagacagatgacagtttaactactactggactccagcatgtttcttcatccgtttttagcaggtgctttaattagatggtgtcactgttcrtaggagctagcctccaaagacacactcccctcccaaacattccctccattccctgcatatgcatgctgctc

SEQ ID NO: 371851 - DNA, 643 bp, Homo sapiens
tgagtttgcatgaactgatgggaatatcatttgtgttcctatattgaaatgcttgtgggtgtatggttgttattttcacatacagattttgagcttgtgcctcctgaatcctggaaaggcaaactatcttaactcctgatattttgacaaaattttctgtgtctgtcttagaaaactaattgcagaatggggctggggtagtggttcccgtttgccaatactaccttgctgagaaatcaggtgtgttcaagctgtggggacaagaattataccaagtagcaagtgtgatcaggcttctggtcctaagacctttttgacaaaggctcatcgctcatttaatagcagtgtacrtgaaggaatgtaagagtccagattttctcaaacagtggctttagtggcttaaattgggccttgggcagtatcccaccctctctgggtccaagtctgggttccttctgatgagcagtggagtttgtaaacaaacaaacccaaacctctgacttagttccccagaacagtgggacataggagcaagactgtgaagccgacaaaacccagattgcataattgatgcagggagggattggggtcaccctgtgtgtagacagggtccaggcctggccactcaccgctgtaaagagca

SEQ ID NO: 371852 - DNA, 633 bp, Homo sapiens
ctgttttatacctgaagaaaccatacagagactacactgctgcacccacccagaaccaaagccaaatttctctacactgccaacacaatatacacatctttaggaaaaagtcttcccctatgaaagcaaattcaaaaaattgaaaaaagtgactattatgccagatgcacaggtaacaatgtaaggacacaggaaacatgaaaaagcaaggaaatatgaaaccccaaaggaacacagtaattatctggcaacacagatcccaatcaaaaacaaatgtattgaatcctaaaaaaagaattcaaaatattgacactaaagttcagtgagatraaagagaatattgaaaagcaatgcaaagaaattagaaaagcaactcaggatatgcctgagaaatctaccaaagaaatagatataaaaaacaaccaagcagaaattctggaactgaagaattcatttaataaaatacaaaatacattcagaggcttcagtaatagactagatcaagaaggggaaagaacttgaagacagatcttttgaaataaactagtcagacaaaaataaagataaaagaataaaaaataatgagcaaagcctatgtgacatatgggacaccataaatcaattggatattca

SEQ ID NO: 371853 - DNA, 590 bp, Homo sapiens
gagttagaatcacgcagaattggcagctgaatatcactgtgacagtcatgggaattccctgaacctaggagtcagraccaagaattctagacttgacctcaggggtactactgggtggttgaggcaagctactcttcctcctcaggcccagtgtccaattctaataaggaggtgtggagaacacgatgagtttcaagggacccttcagccctgcgatgttgacatctcgagatgctgtgagctgtttccacctctgttgcaaacatcagtgagccagacaagccctatggcatcagggtgaaagagccagtccacacatttattaagtgccttctgtatactgggctgagcaccaggtcctgggagggaaggaaggagggtggaagggtgcaccagggcaccaatccccagataactcaattactcctggcggttgcccagtacacgggaaaggaccctggagtcagaaaaccaagaggtgctaatcccagctctgctgtgctaactgggtgaccttggcaagttccttaccccttgtattcatttattgtgtctgcaaaacaaattactacgaactgagtggcctgaaa

SEQ ID NO: 371854 - DNA, 580 bp, Homo sapiens
tcatttatcagggttaggggtcttttggaagaatctttagggttttctaagtgtagaataatgtggtctgtaaagagagataatttgacttcctctttttctatttggatgcattttctttcattctcttgcctgattgctctggctggaacttccagtactatgtggaatagtagtggtgacagtgggcattcttgtctcattccagttcataggaggcatgctttcagcttttgcttgctcagtatgatgttggctgtagatttgtcatagactgctcctattattttgaggtgtgttctttcaatggctagttagttgagggtttttatcatgaagggatgttgaattttattggatgctttttctgcatctattgagatgatcatatggtttgtttttaaattctgtttatgtgatgaatcacatttattgatttgcatatcatccatgcatcccatgaataaagcctacttgatcatggccaattaactttttgatgtgctgccggatatggtttgttagtacttcattgaggatattggcakgtatgtctatcagagatctcggcctgtagctt

SEQ ID NO: 371855 - DNA, 417 bp, Homo sapiens
tagggaatcatatccatgcatgacactgtccaaagacaaagaatatcattttgggtagctcctgaaaattggaaaattataagagaaacaacacttaaaacaaaattaacattatttgcatttttaaaacttctttatagcaaaaggcactataaacaaagtcaaaacacaaacaataggctaggagaaaatatttgcaatacacatagcagagaaaagggcaaatgtatcttgaagacaaggagctcccagtgaaaactgaccaaggktctgagaggctgatcacatgggaaacgggcagcctcctctgcagcgaggtaacatttctcaccatataacttgcaaaacaaaaccactgataacaactagtgctggcaaagtgcagagaaatacacatgctcatattctgtttatagt

SEQ ID NO: 371856 - DNA, 610 bp, Homo sapiens
atttggtttgcaagaacaaaccaaagcccccatatatatggatatacatttgcataagcaaagagaaatcatatatacatttgcataagcaaagagaaatcatggaggagccagatgaattgtgtgattgattacatgggggtgggagagacattgaggggcttaaaggggtaacccaaaaacatgtctgtattctttcacttattttaatgagctggcatcactttcataatgaaaataccaaacttttgaaagagggagaaggcgcaagaaaaccaaacaaaaaccatatttgaaggcttcatagtcctcttccaatgctgacatgtgtcactctgtttggaactgtgtgggtgtggggtacagcagtgactacaacatacactcaccttcacatgcctcaaagtgcaaaacagtaatgagtttgctttcttgttggtattagaaataagggaataggagggtgcaggagatagatttgtcctggctggagaagatgggttttgagccactcctcggcaggataataatgctaaaagcaaacacttaygagaagcttctctactttctgcatgtcaccatcactctaaccgtttcatgtgtataaact

SEQ ID NO: 371857 - DNA, 576 bp, Homo sapiens
agtgcaaattaaaatgaaaatgtgataactctttacacccaacaaaatggctcactgcaagctccacctcccgggttcacgccattctcctgcctcagcctcccgagtagctgggagtacaggcacccaccaccatgcccggctaattttttttttttttttttttttttttttttgctatttttagtagagatggggtttcaccatgttagccaggatggtcttgatctcttgaccttgtgatccgcctgcctcggccccccaaagtgctgggattacaagcgtgatgagccaccacgcccggcctattttattctctttttagagcttttattttaggttcagggatacgtgtgcaggtttgttatataggtaaattgtgtgtcatgaggttttgttgtacagattatttcatcacccagctaataagcatagtacccaataggtagtttttcaatcttcaccctcctcccaaactccaccgtcaagtaaccccccgtgtctgttgttcccttctttgtgttcataggtactawttatttagctcccacttacaagtgagaacatgcagtatat

SEQ ID NO: 371858 - DNA, 588 bp, Homo sapiens
ttaattaggtcacaattgtcaatttatttttgtttttgttctctttgcttttgaggacttagtgataaacttttgcctaggccaatgtccagcagagtatttcctaggttttgctctaggactttttttctttttttttaaattacactttaagttctgggatacatgtgcagaatgtccaggtttgctacatagatatacatgtgccatggtggtttgctgcacccatcaacctgtcagctaggttttagccctgcatgcattcagtatttctcctaatgctatccgttcccattgccccctactccctgacaggccctggtgtgtgatgttcccctccctgtgtccatgtgttctcattgttcagctcccacttataagtgtraacatttggtgtttggttttctgtttctgtgttagtttgctgagaatgatagtttccagcttcatccgtgtccctgcaaaagacattaactcattcttttttatggctgaatagtattccatggtgtataagtaccacattttctttatccagtctatcattgttgggcttttgggttggttccaagtttttgctattgtaaa

SEQ ID NO: 371859 - DNA, 588 bp, Homo sapiens
ttaattaggtcacaattgtcaatttatttttgtttttgttctctttgcttttgaggacttagtgataaacttttgcctaggccaatgtccagcagagtatttcctaggttttgctctaggactttttttctttttttttaaattacactttaagttctgggatacatgtgcagaatgtccaggtttgctacatagatatacatgtgccatggtggtttgctgcacccatcaacctgtcagctaggttttagccctgcatgcattcagtatttctcctaatgctatccgttcccattgccccctactccctgacaggccctggtgtgtgatgttcccctccctgtgtccatgtgttctcattgttcagctcccacttataagtgtgaacatttggtgtttggttttctgtttctgtgttagtttgctgagaatgatrgtttccagcttcatccgtgtccctgcaaaagacattaactcattcttttttatggctgaatagtattccatggtgtataagtaccacattttctttatccagtctatcattgttgggcttttgggttggttccaagtttttgctattgtaaa

SEQ ID NO: 371860 - DNA, 636 bp, Homo sapiens
gtaattattattgcttgatgaatattgtggttcttgaactcccggcctcaagtgatccttctgccttggcctccccttattctaagactagagcagacctactccaaaggtatggtcattccaagctttcaactgaatgcctggggtactcagtgaagtctctttattctggctagatggaagaccagtatctccagcagtgtgcaagcttcagaattataatttagctgatagggaccccatttgctgtttcttgacaggcctgtggtctattgctctgtgcatcttctgcttagcacttgggcaaagactcaagggggcccatatgcagatttcaggagctccttccctgtgtaactccctccrtctggtatcctaaccctcaatttccagccatttcagcagctccagcctctgatctgtttcctccatgcaggtggaccattgctctccgttagtctccacttttctgcctacgtatatagtcagatccatttagctttcattttaagggatctggggagtcactcagctcccagcttggcctcactggctgggcccagagaacttactgttggctccctgctggacagagaatggtccaaaggcaactaggaaaccaccctgccgtgtgag

SEQ ID NO: 371861 - DNA, 515 bp, Homo sapiens
gagcctcctatttagaaagtctggagccaactggactcatcttttgaaacaccaggaggcagtgaggactagacttatcacggagcctcactgagaggcagtcagagcaggggtcacatggcaggctccagcagtggtcagtgcatgcatccgcacatctacccatctgtccatctttccatgtgtctgtccacaaatggaccctgtgtcaggttcttggtcaggggctgatgagataactrtggctccaacaccttctctatcttcaaggaactcatagtgacggtgacatcgcccggagcacagcaaccctcagacaggtgactgcaccctcagcaagagggcttcagctagtcagatattcacatagcctctgagcccagaagccagtgtcaggcattgagaagtcactccatgggagaaagtactagtcatgaagccacaggcagggctgggcaggcagtaactgccaaagtaagagtctaggcctggtctcaggaggcatgggtgggcac

SEQ ID NO: 371862 - DNA, 506 bp, Homo sapiens
tattagaattatttttcttcaatagatatttttttccttacttctcttcgtgtgaggatcatgaactctcttatcataaatggcttctcctgctgagctggggaagatggctgtccattgctccagacttgcatctttccaatactgtaacccatgggcaagataacacatttctggctagtggctgcaggaatgttggcctgactcattccagtgtccaccctttggagttggggatcagaagaagatgcrgtatggcaattgaccacatctgaaacacaaggattgggggtaagttccctggaaaatatgaaggtgctattgccagaggtgagatggaggtgcaggctgaagtagtgaaactccattgtccaccacctactccagggaatgaatgcaatgtgccattggatcacaaatgaggctgtgaccaatattgctttcttatttagcaccttttagttatagtacaataataaaaacaataataaattttatttttgatt

SEQ ID NO: 371863 - DNA, 524 bp, Homo sapiens
cccaaaatgatagcactgacacaattcaaatggtgctgattgctgtgccgccagaggaaaagagagcactggaaggtcttgaatagacaattaaatgcttggcctgaaagtgacaccaaacgtgtcacatggcttcattccgtaacagggggctatgaaggtagtctactgagtgcctgtctctttgtggggaatgtagttatttcaggaatatctcttacctttccaatcaggttataagctctttggagggcaaggatttttttggtactgctttctcttagcttatgtcagcatgcaaatcatgtgatcacccacttgaggggcagcttgtccaactatgatttttaaaagtgaatgacatatgaaagcaggaaagcgtgctacacgttatsctgtttagccagcagttgctaaggttttgttgtgtttgtgtgttttatgtcatagtaaatactagtttttcttatagtaaaatctcatacaagaggtaaaaactataatacaaaaacaaaaatgtattt

SEQ ID NO: 371864 - DNA, 524 bp, Homo sapiens
cccaaaatgatagcactgacacaattcaaatggtgctgattgctgtgccgccagaggaaaagagagcactggaaggtcttgaatagacaattaaatgcttggcctgaaagtgacaccaaacgtgtcacatggcttcattccgtaacagggggctatgaaggtagtctactgagtgcctgtctctttgtggggaatgtagttatttcaggaatatctcttacctttccaatcaggttataagctctttggagggcaaggatttttttggtactgctttctcttagcttatgtcagcatgcaaatcatgtgatcacccacttgaggggcagcttgtccaactatgatttttaaaagtgaatgacatatgaaagcaggaaagcgtgctacacgttatgctgtttagccagcagttgctaaggttttgytgtgtttgtgtgttttatgtcatagtaaatactagtttttcttatagtaaaatctcatacaagaggtaaaaactataatacaaaaacaaaaatgtattt

SEQ ID NO: 371865 - DNA, 534 bp, Homo sapiens
gtatataaacatacatgtaacatatgtgtatgtgtttatatgtatgtgtgtatatcttgagttgtaaaagattgaggcttttgtttggttaatgtccactcttaaagaaaaaattcaacgattcttattaaagcatggtagggaagattttattcaggacataggtacaggaattgctgcagtggggaagacagattgggctcaactccaattacagcatggagtgggaatttatagccaaggagcaggttgggggtcagtggatggaaaattactaaaagaagaaacattggggctaaggaggattctgatgtaactggctaaacygatctaacaagattattgctgaagataggccagtgtaatcagacatcacctgggagatagtggaggatgaggaatctggtcagatatccaaggtgttagatatgattcggggatgttcttgctaaactgacttagcagggctctttgctaaaatgagattttacaatgaagtacacaggtaggcctaggagaagattcagaagcctg

SEQ ID NO: 371866 - DNA, 485 bp, Homo sapiens
aattctacagtctccactatatataacaattcttctgtgtttctgcttctcttatcttgctgtttattttctaagttatcaagtcaaataaggaatattattttattttgctattgctgttaaataatgagatcacttagtactatgaatttatctatgatgacagctttgaccacatctcatgaattttgatatactgtattttcacygcaattttctaaataatatataacgaaacctttgatttcctcttttagtgatagttttttaggagagtgttttttatttccatgaggttgagggattatccttaaacttttattcttgatttctagattcactgcattttaggcagaaagatagtacgatctctacttttggggatttattaaacttgtttttgtggtctagtacaagatcagttttgtaaatgtttctcaactattttgaaagaagatatatttttgtttataataccatatgtt

SEQ ID NO: 371867 - DNA, 485 bp, Homo sapiens
aattctacagtctccactatatataacaattcttctgtgtttctgcttctcttatcttgctgtttattttctaagttatcaagtcaaataaggaatattattttattttgctattgctgttaaataatgagatcacttagtactatgaatttatctatgatgacagctttgaccacatctcatgaattttgatatactgtattttcaccgcaattttctaaataatatataaygaaacctttgatttcctcttttagtgatagttttttaggagagtgttttttatttccatgaggttgagggattatccttaaacttttattcttgatttctagattcactgcattttaggcagaaagatagtacgatctctacttttggggatttattaaacttgtttttgtggtctagtacaagatcagttttgtaaatgtttctcaactattttgaaagaagatatatttttgtttataataccatatgtt

SEQ ID NO: 371868 - DNA, 560 bp, Homo sapiens
gatgctgtgttcctccccgtacctgggctggagtttgagtcatttttctatatttattaaaggaagaaaatgcccttgtagcttggaggactggggatactcaggtagctgacatccgcattaaattaccaaccagaacgagaaggtctgaagcygagagcactagaaggaagttaaacctgcaagaaatttttaaaattaggtatctgtggctattagggggtgggagaggagctgttactggcaccagcctgaaaaggcctgaaacaaaatagagcagaaaggaggttccaagaaatccagccagagaaccgacccaggcctgcaagtttatagactcagatcgaagacaagcaaaggaggacagctctatgtttggttgggttaagaaaatgggacagagaaggtccacccaggataaacatgccagaggtgccaaaggagagagggctggagagagacatggcaagaatgcacaaccaacttctctgcttctgtctttggggctgagccagcatggatttaactttgctcccatcggctgatggaacagacactca

SEQ ID NO: 371869 - DNA, 621 bp, Homo sapiens
cagcaagttaacttgataatttatcatcattctgatgggagtgctcttccacastgacgtagtgtcaatgtggggtaatatccttatggatgattattgttgagaggctattttatcaaaaccttcctctccaatgaaccactacttgtcaagttggcctgaactgccgatgctggacatcactcagctggttcagattaatcaagtgcctagaagtggctttagacaataaaaccatgagggccttaacaggcctaaagagaaacccccttttccagtctccctcacctaagcaagagtcttggccccaagcatggagtctggaattggaagggtgagcaccctcataccactgtcatcttgcatcccagactgtgctaactggttcctacccagatggctggtgggatgagatcctaccttgccaggatcccatgtctggcaagttgcagagctgagattcaccgtgttctagcaacaactcttgcaacctttctaatcacaaggtgatgaatagtccgtaaaaatgcccaaatctcagaaatcaccacttaggaacttagaacactacctgttcctcaaaaatctattgaaatttaaaaaagccagaagatgcccaaa

SEQ ID NO: 371870 - DNA, 621 bp, Homo sapiens
cagcaagttaacttgataatttatcatcattctgatgggagtgctcttccacagtgacgtagtgtcaatgtggggtaatatccttatggatgattattgttgagaggctattttatcaaaaccttcctctccaatgaaccactacttgtcaagttggcctgaactgccgatgctggacatcactcagctggttcagattaatcaagtgcctagaagtggctttagacaataaaaccatgagggccttaacaggcctaaagagaaacccccttttccagtctccctcacctaagcaagagtcttggccccaagcatggagtctggaattggaagggtgagcaccctcataccactgtcatcttgcatcccagactgtgctaactggttcctacccagayggctggtgggatgagatcctaccttgccaggatcccatgtctggcaagttgcagagctgagattcaccgtgttctagcaacaactcttgcaacctttctaatcacaaggtgatgaatagtccgtaaaaatgcccaaatctcagaaatcaccacttaggaacttagaacactacctgttcctcaaaaatctattgaaatttaaaaaagccagaagatgcccaaa

SEQ ID NO: 371871 - DNA, 538 bp, Homo sapiens
catggtgcaatgtcctcagtcactatagaatgagattccattaaaacctgatgattcctttgtgttaggctctaatttctttttagaaaaacttcagaacgcttttattgattgcctttgaatcccacgaacagctgtgaagttgaagggatagttgtccccattttatataggaggaacttgaagccagaaataaaacaacttgtcctaagttacctgaaaagtggcagactctggtctcgagtccagtgttcatgtctagtaatatgctttatattaatagtaataatctgtcattgagtaagtactgccyggagtttaattcatcttttgatcctactatcaaaacaatattctgattacctttatagagaagtgagaatacccacagcaatatctatttctagaagagcttctacaaattctggcatcctggaagcctgcaaaatacttaaaaaaacctgaaaaataataatgattcctctgctagtttcttcctatacaatatcatattctttccagcagtggagagaggtag

SEQ ID NO: 371872 - DNA, 601 bp, Homo sapiens
atcccggaaggctcagggagactgacttgagtaacaataaaactccagtctcccacacagctggctaagcctgaatcactctttctccattgctattcccctgtcttgatcaattggctctgtctaggcagtgggcaaggtgaacccrttggatggttacaaccctctatatgtttttactatgtatatgaaaaaatatcgagtacttaataaaaattgcagtccaaggcacgtggttttgttggcatgtagaactgctctgcacaacgattcagagcctaggatcgtttcaactcgcagcacacccatccgcagggcttcgtcttcatctgcatccagccactgtaggggaaagagtgaagaggaaggtcacacacaatgctcagaagccttggtgtcacttctcacgtctcatggctgtgactcccccaccaggtagcacacgtccaacagcaagagaggctggaaaatgcagcttagcctggtgccgggacactcccatttccatgcaaggtgacgaggaatttcaatggctgcctggtaggttctaacacagaataagatagaaaaaatgattacaggtcaactggaactgccaact

SEQ ID NO: 371873 - DNA, 601 bp, Homo sapiens
atcccggaaggctcagggagactgacttgagtaacaataaaactccagtctcccacacagctggctaagcctgaatcactctttctccattgctattcccctgtcttgatcaattggctctgtctaggcagtgggcaaggtgaacccgttggatggttacaaccctytatatgtttttactatgtatatgaaaaaatatcgagtacttaataaaaattgcagtccaaggcacgtggttttgttggcatgtagaactgctctgcacaacgattcagagcctaggatcgtttcaactcgcagcacacccatccgcagggcttcgtcttcatctgcatccagccactgtaggggaaagagtgaagaggaaggtcacacacaatgctcagaagccttggtgtcacttctcacgtctcatggctgtgactcccccaccaggtagcacacgtccaacagcaagagaggctggaaaatgcagcttagcctggtgccgggacactcccatttccatgcaaggtgacgaggaatttcaatggctgcctggtaggttctaacacagaataagatagaaaaaatgattacaggtcaactggaactgccaact

SEQ ID NO: 371874 - DNA, 594 bp, Homo sapiens
aaggcagagacatcctgtgccgttccatgtgggagcctcagactctcaagagtcctggcgagccccagggtctttggccacgtttggatgggtcgggtggggccaggatccagcatttccccagggctctgaggagagaagggaacgggaaggttctggtcatgtcggaggagtgtggaaagttccttttccagtagaaatatcaagtctcacatttacgtttaggcagytgacaaactttgaaaagctttgaacttttgtttggcattgaatccacatcatctgtcgcccatgtaaacacagcagaattccataaggactgggtggtgaacccccactctctacggagctccagccccatgctgtctcttgcttggtttctgacattaacaacggagtagaacatgttgtcatttatttgttgacatcgcggatgaaggagtagaatccattttgcggggaaagatgtagagatattgattggatgtagccacaggggatcactgggtgccttaaagagagcggttgcaacttcgtgctggggtagaagagacttgagtgaggtgaggactgagttgcaggtgggggtgagga

SEQ ID NO: 371875 - DNA, 594 bp, Homo sapiens
aaggcagagacatcctgtgccgttccatgtgggagcctcagactctcaagagtcctggcgagccccagggtctttggccacgtttggatgggtcgggtggggccaggatccagcatttccccagggctctgaggagagaagggaacgggaaggttctggtcatgtcggaggagtgtggaaagttccttttccagtagaaatatcaagtctcacatttacgtttaggcagctgacaaactttgaaaagctttgaacttttgtttggcattgaatccacatcatctgtcgcccatgtaaacacagcagaattccataaggactgggtggtgaacccccactctctacggrgctccagccccatgctgtctcttgcttggtttctgacattaacaacggagtagaacatgttgtcatttatttgttgacatcgcggatgaaggagtagaatccattttgcggggaaagatgtagagatattgattggatgtagccacaggggatcactgggtgccttaaagagagcggttgcaacttcgtgctggggtagaagagacttgagtgaggtgaggactgagttgcaggtgggggtgagga

SEQ ID NO: 371876 - DNA, 594 bp, Homo sapiens
aaggcagagacatcctgtgccgttccatgtgggagcctcagactctcaagagtcctggcgagccccagggtctttggccacgtttggatgggtcgggtggggccaggatccagcatttccccagggctctgaggagagaagggaacgggaaggttctggtcatgtcggaggagtgtggaaagttccttttccagtagaaatatcaagtctcacatttacgtttaggcagctgacaaactttgaaaagctttgaacttttgtttggcattgaatccacatcatctgtcgcccatgtaaacacagcagaattccataaggactgggtggtgaacccccactctctacggagctccagccccatgctgtctcttgcttggtttctgacattaacaacggagtagaacatgttgtcatttatttgttgacatcgcrgatgaaggagtagaatccattttgcggggaaagatgtagagatattgattggatgtagccacaggggatcactgggtgccttaaagagagcggttgcaacttcgtgctggggtagaagagacttgagtgaggtgaggactgagttgcaggtgggggtgagga

SEQ ID NO: 371877 - DNA, 358 bp, Homo sapiens
catccctgctggggagaaacctctgtccctagagagggtcctttcatgttcatgtggtcggggatgagccaggggtctggcctcatcggctcacaagtgacaccaagagaaaagaagcaaatggaggaaatggtcagataagtrggtgatgtgaaaggcaggacctggtcaccccagcgagcactatggccagttcccgggtcccgtgacccactgcacaggtccatgagtctgactcttggactctgccaggatcagctgcccagagtgccagagttttcgccaagggtgtccttaattccttatttatcagcaaaagaatgaaaatcatgggagtcaaagcttatttttctgagtg

SEQ ID NO: 371878 - DNA, 470 bp, Homo sapiens
ctttgcaactctagtgatctatattctgaaatgatggtttcatatgatgcttttataggtaaatttttatagaatctgcttcattttttcctaaataaaatttgaaatataatctaaaatgtctgtctgtacctacttgaaatacrtaatgtaagtttccatttaaattttcacctgtagcccagcttattcaggatagcaaaaatggttgcatgcactcactgcatcactgtaaaaagtcaaatataagaggaaatcattcttaaggtaatatctggaccagttttatttttctggaatatagttgatttattattttctataggacacatacaaatagaatctgaaattacttttctctgattaattggttttgcataaacttcctcgtggaaacatgaagctctcactgtaccccggaaatcatagttagaaccaggaaatgataacataattccgggcattgcaga

SEQ ID NO: 371879 - DNA, 516 bp, Homo sapiens
gctgcttctccatattcaggtatttattattagcaacatccccactcttggtaccaattttctgtcttagtctgttctgtgttgcttataacagaatacttgaaactaggtaatttataaagaaattgaattgatttcttagarttatggaggcttgcttgtaaggactctgtgtggtgtcctgagtcaatgcagggtgtcacattgtgagggggccgactgtgctaatgtgctagctcaggtttctcttcactaccttgaaaagccaccagttcttattccatgataatccgtgactattaatcatgaattaacatattaattcatgagtggactaattcattcatgaggacagaaccctcatgatctaatcaccccttaaagaccccacctctcagtattgccacattgaggattaagtttcattgtgaaattttttttagggtggggacattcaagctatagccaagactttcccagaggaacaaaagctgaggatgtttatcaccaacaggc

SEQ ID NO: 371880 - DNA, 516 bp, Homo sapiens
gctgcttctccatattcaggtatttattattagcaacatccccactcttggtaccaattttctgtcttagtctgttctgtgttgcttataacagaatacttgaaactaggtaatttataaagaaattgaattgatttcttagagttatggaggcttgcttgtaaggactctgtgtggtgtcctgagkcaatgcagggtgtcacattgtgagggggccgactgtgctaatgtgctagctcaggtttctcttcactaccttgaaaagccaccagttcttattccatgataatccgtgactattaatcatgaattaacatattaattcatgagtggactaattcattcatgaggacagaaccctcatgatctaatcaccccttaaagaccccacctctcagtattgccacattgaggattaagtttcattgtgaaattttttttagggtggggacattcaagctatagccaagactttcccagaggaacaaaagctgaggatgtttatcaccaacaggc

SEQ ID NO: 371881 - DNA, 594 bp, Homo sapiens
atccagaaataaatccatgcatttaaggtcaattgatattcaacaaagatgccaagaacacacartgggtaaaggacagtctcttcaataaatgatgttggaaaaactggatatccacaggcagaagaaggaatttggacatcatatacaaaaatcaactcaaaatggactgtagacttaaacataagatgtgaaactgtaaagttactaggagaaatcataggagaaaagctctaagacactggtctaagcaattaatttttaaataggactctataaaggaaccagtagcagaagcaaaaatgaacaaatgaaattataactaattgaaaagcctctgcacaggagtcaacaatcaacagagtgaacaaacaacctacaaaatgggagaaaatatctgcaaaccatacatctgaaaagcggttaatatccaaaatatataagaaactcaatagttagtaaaaaatctatttaaaaatgggcaaaggccctgaatagacatttatcaaaagaaaccatacaaatggccaacagatgtttgaaaaaatgctcaacattactaatcatcaggcaaatgcaaattaaaaccacaat

SEQ ID NO: 371882 - DNA, 594 bp, Homo sapiens
atccagaaataaatccatgcatttaaggtcaattgatattcaacaaagatgccaagaacacacagtgggtaaaggacagtctcttcaataaatgatgttggaaaaactggatatccacaggcagaagaaggaatttggacatcatatacaaaaatcaactcaaaatggactgtagacttaaacataagatgtgaaactgtaaagttactaggagaaatcataggagaaaagctctawgacactggtctaagcaattaatttttaaataggactctataaaggaaccagtagcagaagcaaaaatgaacaaatgaaattataactaattgaaaagcctctgcacaggagtcaacaatcaacagagtgaacaaacaacctacaaaatgggagaaaatatctgcaaaccatacatctgaaaagcggttaatatccaaaatatataagaaactcaatagttagtaaaaaatctatttaaaaatgggcaaaggccctgaatagacatttatcaaaagaaaccatacaaatggccaacagatgtttgaaaaaatgctcaacattactaatcatcaggcaaatgcaaattaaaaccacaat

SEQ ID NO: 371883 - DNA, 561 bp, Homo sapiens
aataaatccatgcatttaaggtcaattgatattcaacaaagatgccaagaacacacagtgggtaaaggacagtctcttcaataaatgatgttggaaaaactggatatccacaggcagaagaaggaatttggacatcatatacaaaaatcaactcaaaatggactgtagacttaaacataagatgtgaaactgtaaagttactaggagaaatcataggagaaaagctctaagacactggtctaagcaattaatttttaaataggactctataaaggaaccagtagcagaagcaaaaatkaacaaatgaaattataactaattgaaaagcctctgcacaggagtcaacaatcaacagagtgaacaaacaacctacaaaatgggagaaaatatctgcaaaccatacatctgaaaagcggttaatatccaaaatatataagaaactcaatagttagtaaaaaatctatttaaaaatgggcaaaggccctgaatagacatttatcaaaagaaaccatacaaatggccaacagatgtttgaaaaaatgctcaacattactaatcatc

SEQ ID NO: 371884 - DNA, 590 bp, Homo sapiens
aaaactccctgcacccccgcccctgtgaacccccactctactctctgctttgccgagcttggcttttttagattccacatataagcgaggtctgcagtatttgtctttctgtggcctgggtcacttcacctagcatagtgtgtgcaggttcatccatgttgccactaatgacaggatctcccttctttctatggctgaatcgtattccatcgtgtgtatacaccacattttctttatccactcatctgctgatgggcacttatgttgcttccatatcttggctgttgtgactagtgctgcagttagcatggcagtgcaggtrtctctttgagatctggctttaatttgtcttgtatatacaagattgctcatcacgtggtagttctatttttaatttgctgaggagctttgacactgtcttccataatggctgcatgtaacagcttagtttttctttaacataggcacatagaatctcttgctttatctttttaaatgggattgatttacagtcctctctccctctctctctctctcatacacaattattcctggttttggcatcagggtctcaccagtcttatattaga

SEQ ID NO: 371885 - DNA, 610 bp, Homo sapiens
aaggggaaggcagagtcacaaactccccagccgagtgctgaaggcgtggaccaacatacagagcccagctacaaaccctgaagaaaaataagtttttgattccaggggtttaaggaactctctgtcaaattactatctcagcactaagctaatagaacagtgagcacacatggtgaagaaactatttttaaaaactgacagaaacaaacaaaaacaaccacaatccacaacaatcagcaacagcaaactgcgcagagggaggagagcctgatacccagaaatatcccattgtaattgtcactgtgcagttttcaccagaggcatgtgccatgcaaagcagcaagaaatataagctactcatgaggaggaaaagcaattaatggaaaatcttcctgaggaagcccagaattggacttattagacaaagcctttcaatcaactctcttaaacatgtttaaaaaactaaatacaatmacagacaatgaattaagataaaccaggagaatgatacctcaccaaatagagaatatcaataaagagataggaggaaatttaaaaagaaattaaatagaagttctggaattggaaagtacagtcactgaaataaata

SEQ ID NO: 371886 - DNA, 468 bp, Homo sapiens
gaaaatatgatcaacaggtcccaggacccattattccactggttctaggctcctggaaagggagagtttcaaagcaaactcagcttcctcttttccctcctcaggctcaatcccttgtgaaggctctttccatgtgtgtgcctccctgggcaaagtccagcacacaggcttctccctgggagtccactgatgtcagctgtggtcactaggcatcagggcttctaggaggcagctagacgcttacagaagcagaggctacaggggccctgctaagaggaggaaccattccctttaatttttccaaacccagaatccaccattgagcaggcaagagctcaggaaggagactccccggtgaagaggcacgaggacgcctttagcatgagctgtkcttcctccttggagttttcccactgagattcctggggccaacaccaaaccctgcccccaaagtccctatttcatttt

SEQ ID NO: 371887 - DNA, 469 bp, Homo sapiens
ccagggactaatagggcttactttttagtgcaggttttagaaatattgttaaagtacttttatggtaatctggaaataaatgtgcagatttttaaaggtaaaaaacttacagctcattgaccgcaatgtttacctctgcagaaggcctaggactagagatggtcatcaagagagctttgactttatctagaatatttgaacgctttacaaagagaatgaattgaattgctatgttatgtaatttaaaatatttatttctttatatagatctctcttttaaatgaataaactttattccctctagcctctaagcatggaaataactactcatatcctaaggtgatttacrtagttgacaaaagactttcaactaccttattatttgtcaaagaatccctgtaagtcaggcattattatcttttaatctgtaatgcagatatacaccttagacagtatggttaaattctga

SEQ ID NO: 371888 - DNA, 586 bp, Homo sapiens
agtcctaaaaagtttgaggcttactagtgggaaaacagaaatagaattagtaactttaaaaataaactgctcatgaaaaataagaaatgatctttaaaataaaaattttaaatgatacattcaagaatcataatgttaaatggcagaaatgtgcctcaattaattcaatattataaataatatgaataaaatgaacatacttaacagaagacagggattctcaaattaaattaaaacaaaaatcaaaacatcacccagctatataatttggaaaaagatacacttcaaataaaaggacagagaattgagaaaaataaaggatagaagaagatatgccacacaaatatgaatcaaaagagcatttcagatatgcaagattttaaaaatcacagggaatgaagagagacgctgcatttraatttaaaaaataatctacaagcattcacaattttgagagcaaaatgcacaaagcaatggatgacagaaacaagagagagaagtaaaaagttattggagattttaaatcattgctctcagaaactgacatactatatccaatcaacataaactgaaatggagaagatga

SEQ ID NO: 371889 - DNA, 608 bp, Homo sapiens
ctttgggggcatcaggtgaactatagacacgtactttctacctcaagattgcagtttgaaaaatttccaaccccggaatgttttctagggccatcaaagtgtctcaaatatacttaaaagttagtctgactgaacaaaatagactgaagcaaaggcatatttgatttttaaaacaaattcttttatatatatgtatgtgtatacatatacatatatatgcacatacatatatatgtgtgtatgcacatacatatatatgtgtatgtatatttatgagtgagattggcctgtagttttcttttcttgtaagggctttatcatgttttggtgtcagggttatgctgacctcataaaatgagtttaaaaacattttctttctctaaactccgaaagaatttatttaagtttgctattgttccttcttaaatgtttggaagatttcactcatgaaacaatctgggcctgaattttcctttgtggaaaggtttttaaytaaatattccattttttaacagatttcttatttctgttttagttttaataaattatgttttacaagggatttacctatttcatccaagctgttgaatttattggcaaagtttttt

SEQ ID NO: 371890 - DNA, 715 bp, Homo sapiens
tgaaaacagtgtctcattgttctttgagccgactcatgacatttattgctctttaggctttgaaattacttttttattttttaaattaaagtaatgcctgaatagttttgccctgctctacttctccctggttgtagaatttcctaactcactacgtgagtaattatgactggtgtaaccaagagtgtgtgttttgaagtaaaaatatgttacttgttgtaaccagaataattccctagtcacatacaatccagtactagtgtggtttctcattaaacaaacaggacaggaggcaagattaatagttttaaaacatatatctacctttagtcttctctcttagagaacaytgttttaaagatccagtttgtaatccatgctattactttttaaaattcctttgctttatttatgtatttttccatcatcactgcttaaaagcttcttactcactttcccctctcttcatcacacactgcatccaacatctcacaccacttagtccttgccttgtgtgtcacagcccctttcctctcagccctcctgtcttacattcctctatccctactttaaatttggagtcactaaagtctagaatcaggttgccaaagaatgcactctggctggtaaaatgatcagacacccacatgcacactgatacatcttttcatcacactggctttttgaaccctactagctgtcaatatataaatga

SEQ ID NO: 371891 - DNA, 512 bp, Homo sapiens
gtactcaacaaatatttgtagatataatttgtcccactataatactttcttttttttttttttttgagacggagtctcactctgtctccaggctggggtgcagtggcatgatcttggctcactgcaacctctgcctcctgggttcaagygattctctttcctcagcctctcaagaaactgaggctacaggtgtgtgccaccatgctcagctaatttttgtatttttagtagagacagggtttcaccatattggccaggatggtctcgatctcttgacctcgtgatccgcccacctcagcctaccaaagtgctgggattacaggcatgagtcactacacccaactgatgggtactgtccttgatttaaaaaatagttctgtaatcacttaggcaagggatgatgaactagcctaagtaaagtatttgcaccggaaatgttgggtttttacaaatctgctggattatgagtagataaaagccacccaaaactgataactggactttccaggaaa

SEQ ID NO: 371892 - DNA, 497 bp, Homo sapiens
ttgctttttctttggaaatgatccttccctggtctgacttagcaaggaacactgctatctaatgaagmaacatggagtggtcagcaatgaaagataatgtctataagactcctcctttgggtctggcccatggtgggcactttgtgatgtaattactgacagtaatagggcggtagtttacccaggatgtgatcaccacggcatccatctagtgagtatgagtgggcatttctcctgtctgtgagggagacagaagaatgctggggaggcacaaatgaacaaacacaccaaagaattctggctctagaaactgggaaggagctcatggagaatgccttggaggttgagtgagtcaaatagccaggcagagagagaaggatgggtgttagtgcaggagcgggaagccatgagtaccaaggcctggtgatggaaaatgtgctcagctttcggttaggcaggttgtatggctggaccattgaggtgacgtcgaaagacca

SEQ ID NO: 371893 - DNA, 497 bp, Homo sapiens
ttgctttttctttggaaatgatccttccctggtctgacttagcaaggaacactgctatctaatgaagcaacatggagtggtcagcaatgaaagataatgtctataagactcctcctttgggtctggcccatggtgggcactttgtgatgtaattactgwcagtaatagggcggtagtttacccaggatgtgatcaccacggcatccatctagtgagtatgagtgggcatttctcctgtctgtgagggagacagaagaatgctggggaggcacaaatgaacaaacacaccaaagaattctggctctagaaactgggaaggagctcatggagaatgccttggaggttgagtgagtcaaatagccaggcagagagagaaggatgggtgttagtgcaggagcgggaagccatgagtaccaaggcctggtgatggaaaatgtgctcagctttcggttaggcaggttgtatggctggaccattgaggtgacgtcgaaagacca

SEQ ID NO: 371894 - DNA, 584 bp, Homo sapiens
gctaaatgtaacttggaattttaagactttcaccttctgaaagaaatggaagaatctactacatggaaatatgggagagagaagacgcacttctcttagcttgggcaagctgtaaataggcaaacttcaataataatagtatctataatttattaagattattattttaatccatatttctttcaaataaggaaacaagtctcagaaagttaagtaacattctacaaatctcrcagttggtaataataggggtaattaataaacttagagatggctgatggagatcatgtaacatgtttccaactgctccaagtccaatttcaagagcaaacaccggctatgggacccaagatcatttggttacattggaaaattccacaggaagaacatcatccaccacagctactgaaatctttggatcttttgttttatgactcttatctcctgtctcctatccccccggtggactaccatatagtttttaaagccttgagaggaatgagatacgccaagcttttatatgcaaaaaagtgtggttaatggggttgtaattacatcttaattattatcaaaaatttatcttt

SEQ ID NO: 371895 - DNA, 584 bp, Homo sapiens
gctaaatgtaacttggaattttaagactttcaccttctgaaagaaatggaagaatctactacatggaaatatgggagagagaagacgcacttctcttagcttgggcaagctgtaaataggcaaacttcaataataatagtatctataatttattaagattattattttaatccatatttctttcaaataaggaaacaagtctcagaaagttaagtaacattctacaaatctcacagttggtaataataggggtaattaataaacttagagatggctgatggagatcatgtaacatgtttccaactgctccaagtccaatttcaagagcaaacacyggctatgggacccaagatcatttggttacattggaaaattccacaggaagaacatcatccaccacagctactgaaatctttggatcttttgttttatgactcttatctcctgtctcctatccccccggtggactaccatatagtttttaaagccttgagaggaatgagatacgccaagcttttatatgcaaaaaagtgtggttaatggggttgtaattacatcttaattattatcaaaaatttatcttt

SEQ ID NO: 371896 - DNA, 583 bp, Homo sapiens
tgggcaagctgtaaataggcaaacttcaataataatagtatctataatttattaagattattattttaatccatatttctttcaaataaggaaacaagtctcagaaagttaagtaacattctacaaatctcacagttggtaataataggggtaattaataaacttagagatggctgatggagatcatgtaacatgtttccaactgctccaagtccaatttcaagagcaaacaccggctatgggacccaagatcatttggttacattggaaaattccacaggaagaacatcatccaccacagctactgaaatctttggatcttttgttttatgactcttatctcctgtctcctatccccccggtggactaccatatagtttttaaagccttgagaggaatgagatacgccaagcttttatatgcaaaaaagtgtggttaatggggttgtaattacatcttaattattatcaaaaatttatcyttatgccaatcaccctcaaagcttcaaataaatatattaaaacttttatcttaaaaaagatttttatttgtaatcaaatattctattccatatagttcagag

SEQ ID NO: 371897 - DNA, 572 bp, Homo sapiens
gcaatatttgaacagacagcagtattagggcggggccataaagaacttggctcaagtctcctttgtatatgggggaggagctyatgatgggggagggggattgctaatctgcaagcacagtgatacggatatatttagaaggcccaggggttatccaaccacatagaatagagtctaaagggactttgagctgttaattgtcaagttccctttcagaggaaaacctttaggaataatttcccttgggttgctctttaatgtagaaagtctgtctagaacaggatttctcaacctttgcattactgatgtttagggccagataacgctttgctgtgggaggaggggggcattgtcctgtgcattacaggatatttagcagcttccctggccttcacactttaggtgccagtagcatccccactcttcagtagtaataaccaaaaatgtttccagacatccccaaatattccatggggagcaaaattgccaccagttgagaaccactagtcgagaaaatagcaatgcttatgtccagctatgaaatgaaatacagagctcaaacttcacaccaa

SEQ ID NO: 371898 - DNA, 560 bp, Homo sapiens
agggcggggccataaagaacttggctcaagtctcctttgtatatgggggaggagcttatgatgggggagggggattgctaatctgcaagcacagtgatacggatatatttagaaggcccaggggttatccaaccacatagaatagagtctaaagggactttgagctgttaattgtcaagttccctttcagaggaaaacctttaggaataatttcccttgggttgctctttaatgtagaaagtctgtctagaacaggatttctcaacctttgcattactgatgtttagggccagataacgctttgctgtgggaggaggggggcattgtcctgtgcattacaggatatttagcagcttccctggccttcacactttaggtgccagtagcatccccactcttcagtagtrataaccaaaaatgtttccagacatccccaaatattccatggggagcaaaattgccaccagttgagaaccactagtcgagaaaatagcaatgcttatgtccagctatgaaatgaaatacagagctcaaacttcacaccaaatagtttgagctac

SEQ ID NO: 371899 - DNA, 606 bp, Homo sapiens
tagtaataaccaaaaatgtttccagacatccccaaatattccatggggagcaaaattgccaccagttgagaaccactagtcgagaaaatagcaatgcttatgtccagctatgaaatgaaatacagagctcaaacttcacaccaaatagtttgagctaccctaattcccagtctagttgtgcttttataagacttcaaacyggttacatttattcctaagtctaacgccagatcaccaaatcattctaagctatccaaggtcattggatccaacagactcaatgtctccctaggggcaatgttggcatatatgagaatagcttttgcaggctcatctactaaatcaacaaatatttattaaacaatacgtcaagttgtggggttttgaaaagatctccctgaaacttctaaggagataaaccccctttcccatctaaaaggaaagaaaaaccacagcaatattttttttaactgccaagaaattagctcttctgcactgtttccgtacaatttggtcacctattatccttggactcaaatcctcccccttcctgttcaggggttcactctctcatcaacttgatgctttgcagttatcataattaat

SEQ ID NO: 371900 - DNA, 508 bp, Homo sapiens
acaatcagccaaaagtataaggtcatgtgactacgtgtgccttataagtatgagacagtgagaggtagggtcatagatgagtggggagaaaagtgtgggagaaagattgactgcccagatgagggtgtctgtatgactcaamtttctgtgacagcagcacagagcaatgagagagccctggctttgggaacaggtagacatgaattgaacccagtgcttgtctgacttgggctgcgtgtgcagtctccatttattcatgcgtttggagtaggacaataataccttcctgacaattgagtgtgtaggacatacaacaggtgcataaaaatgtttcagtgatagcctggctttgtaaaggtaagtttgcttcctccctcttcccttcccttctttatggtattggatggtgtgcaaatttatcttcatggtcttctaaagagtagcccttgctttacctctggttcctgtcccatgccactggcaggggatggcgtggagaacatggtgg

SEQ ID NO: 371901 - DNA, 432 bp, Homo sapiens
ttcaaattaatgcaagcattaaattgtgaatgatttttcacataaagcagatattaaactgtgcatgcccgctggtgttgatataaagttttgtcaacatttttggcacatggggtctgagcctgcgggtcaaaaagtgtttttaaccaaattttgttgtttcagatgctttttttacacttgtgtgttataactcaaacgtggattcttttcccaaaaatgaaatttggcaggccattaktccataatgtggtctagtgcctttgggtattttttttaaacatgtaaatggccaagatatctaggtctttgaggttgaaaaactgtgcatgcacttttaacaacttctttttcgtctgtatttagtatgcatatttactgcacacatatagtatgcggcatgccgattagactcaagattagttgggaaaa

SEQ ID NO: 371902 - DNA, 432 bp, Homo sapiens
ttcaaattaatgcaagcattaaattgtgaatgatttttcacataaagcagatattaaactgtgcatgcccgctggtgttgatataaagttttgtcaacatttttggcacatggggtctgagcctgcgggtcaaaaagtgtttttaaccaaattttgttgtttcagatgctttttttacacttgtgtgttataactcaaacgtggattcttttcccaaaaatgaaatttggcaggccattattccataatgtggtctagtgcctttgggtattttttttaaacatgtaaatggccaagatatctaggtytttgaggttgaaaaactgtgcatgcacttttaacaacttctttttcgtctgtatttagtatgcatatttactgcacacatatagtatgcggcatgccgattagactcaagattagttgggaaaa

SEQ ID NO: 371903 - DNA, 540 bp, Homo sapiens
tgacacattctactgatcaaggaatagtcaataagctaaaggtaagggttacaaagtcttctgatcaaccaaaatattatggtctttgacaaaacaaaaaactaacagacaaaaaaaccttcttatatagcatctatttattctttaagtttacttttaccagtttttttttaatctggtttcttagattacagcagatcaaaagtaaccaattagaaagagaatggtttgttatactttaacagagtcaagaaagatgcccatatagtaaaggaaatattacaacttggcctgtatggtgatttgaaaaaaaaaaaaactactattagagaaggcctgaaattttctttttttgttgtgtctctgcgsgttttggtatcaggatgatgctcgcctcataaaatgagttagggaggagtccttctttttctatttttggaatagtttcagaaggaatggtaccagctcctctttgtacctctggtagaattcggctgtgaatccgtctggtcctggggtttttttggttgttaggctatt

SEQ ID NO: 371904 - DNA, 488 bp, Homo sapiens
ggattcaactgtaattacagtctaaacctgtccacttagcacttaatatatgttcttactgtaatttttgcctgtatattgatatccayccacacagtagccagttcaatatgtagaagtcactaaatctatgcttaaatcattaatctattaataccaaaagtgctctaatatatactaaagtcgaggcctgaagtacaggtagaaatgaagaagattaatgagtgtttacaaaactgaaattcttttgaaagtgaagcaaagaacatttacatttttccaattatattttggctaagtacctagtatgtgtaagaaacacactgagtcaatggacacacactgattaaatgatcacaccgtcccctattcagtcttcacaaccaccatgctaggtaggtaattaactagctacattttagagcaaagaaaatgacttcaagaaaagctatctgacttgcccaagactgtccactggtagatggtag

SEQ ID NO: 371905 - DNA, 410 bp, Homo sapiens
atcctaggctcgagaaaaacaatcttatcatagcaaaaccacatacctgttgatatctgtgctttgactcatgccattccccacctggaaaggcttactctttatgccacctagtacaccaactcattcaactagcttctgcttaagtcaccttgcatctatttttttcttagattatcattacttcttagagtctgtctctttactgggattcaactgtaattacagtctaaacctgtccacttagcacttaatatatgttcttactgtaatttttgcctgtatattgatatccacccacacagtagccagttcaatatgyagaagtcactaaatctatgcttaaatcattaatctattaataccaaaagtgctctaatatatactaaagtcgaggcctgaagtacagg

SEQ ID NO: 371906 - DNA, 585 bp, Homo sapiens
ctagcctctgttatccttttcgtgtaggaaaggaaaccagccattatctttttcaagcacaaagactttcaccttgtcacctaccactccaggatttacgyctagacaaaagaaagtgtggcttcccagctgccagctgatgaccacttctccagaagaacagtagaagctgcttggagaaatgacatctctactatttccaaatcagtgccccttacaaacatgtaggcaatttttttctttcttattgaggatttcttatcattttaaaagaggaagtccacatatggattaagggtctccaattcctaacattctatatcatctaccctgttttcaggctgtttccaggaagtgaagaagagaatgtcacagagatgctagggaactaggtacatggaagattaggagggggaggttatggagagaaggagtagctttttagtcccaggctgaacagtctggaatttgtttgataggcaaccgggaaatatccaatatattctgcaggatggtaacattatcctaaagagatgccacaattctccaggtagccatgaataaaaataaatagtctatttttgt

SEQ ID NO: 371907 - DNA, 565 bp, Homo sapiens
aatattggtcataacattcctccaggataactctgaaccacataatacaaacatattaaatattcactgtgatcctgagacacttggtttatacctctgttgcactcttatcttcttggatcatcattataaatgtcagtttatttatcccttgctagtttgtaaacagatcagcattaattcatttggatatccttagtattcagcatagaacctaaaacacacaggtgcacaaaggtgcatttaagttcaatgaatatgttaatttgaaaaagtctttaatttctggtagcgacccttgtcaaatttgttcattctccagtaagcccatttatttgatgagttttaattgtccccctctttactattcttgtcttgcatgatactgtactttttttcctccataatttcttttttttttttgaagcatcctagaggttttaacttctaataaggtaaatattgataactgtaacccatatsaataaaaaatcctctttgtggtcctcaaaatattttctttaagagtaaagagttcttgagaccaaagcatgagaaagccaca

SEQ ID NO: 371908 - DNA, 568 bp, Homo sapiens
gtcccacaccactggacccctggaaattttactgaggtagaaggtccctgaattttagttggattcatttcccatcctctggcatgcaaawgtctcaccaataagtccagtgtgtttgctatttcttgctcactggatccaatcaacataatgtcatcaatgtaatggaccagtgtgataccttgtggaagcaaaaagtgatcaaggtctcttcaagtaagattatgacacaaagccagagacttgatatacccctggggtagaacagtaaagatctattgctggctttgccagctgaaggtaaattgcttctggtggaccttatgtataggaatggagaaaaaggcatgtgtcaagcaacagctgcatgccaggtaccaggagatgtgttaatttgctcaagcaatgaaaccacatctggtacaggagctgcaattggagtcaccatttggttaagctcacaataattaactgtcattctcccaagatccatctgttttcctcacaggctatatgggagagttgaatcgggatggggtgggcatcaccacccctgtgtctttcaagc

SEQ ID NO: 371909 - DNA, 568 bp, Homo sapiens
gtcccacaccactggacccctggaaattttactgaggtagaaggtccctgaattttagttggattcatttcccatcctctggcatgcaaatgtctcaccaataagtccagtgtgtttgctatttcttgctcactggatccaatcaacataatgtcatcaatgtaatggaccagtgtgataccttgtggaagcaaaaagtgatcaaggtctcttcaagtaagattatgacacaaagccagagacttgatatacccctggggtagaacagtaaagrtctattgctggctttgccagctgaaggtaaattgcttctggtggaccttatgtataggaatggagaaaaaggcatgtgtcaagcaacagctgcatgccaggtaccaggagatgtgttaatttgctcaagcaatgaaaccacatctggtacaggagctgcaattggagtcaccatttggttaagctcacaataattaactgtcattctcccaagatccatctgttttcctcacaggctatatgggagagttgaatcgggatggggtgggcatcaccacccctgtgtctttcaagc

SEQ ID NO: 371910 - DNA, 540 bp, Homo sapiens
gtagcactaatctctgcaatccctttagagatgtgatattgtttttgaagtactatttttctaggtagaggcagctctaatggcttccatttgtcctttcctaccataatagctctcaccctaccaggtagggggccaatgtggaggttctgtcagctgctaagtatgtctgtgccaattatgcattctggcactggggaaatgaccacgggattagtccagggacccactggacccactgtaagttggacatgagctaaaactccttgaattacctaacttccataagctcctactttaactggaggaccacggtgatgttttgggtcccttggagtcaacatcagcgcagagctagtgtccagtagtccccaraaagtctgatcattttcctttcctcaatgcacagttatcctggtaaaaggatggaggtctccttggggaaagatgggagaaagattcactacataaattgatggtaatgtggtggggtccttcgtcaaggggacccagcctttccttcattcaaggggttctggt

SEQ ID NO: 371911 - DNA, 533 bp, Homo sapiens
gggtctgcttttcccagcccactgactcaaatgttaatctcccttggcaacaccctcacagacacacccaggatgtattattccatccaatcaacttgacactcactattaacggtcacttgcacccacctctttgctcatgttgttccttttgctggagattcctgatgtccttttgaaattttcaaactattcatccttcctggccaaattcaagtaacatttccttattttttctctaagacaccactacttatcctttattttatcttaaaaatgtgcttatgttcctagagcttattttgttcttatattcttgctacctgactttatgcctgtatttctcaatgactgtaaattactcaagtgcagggaacgtttttttctttacttcaatttcttatgtaaagagtgaatgctcagtaattgtaaacttgattaaaagaccctgaaataggtccaggtacwtggagcacatggtagagtctataagcctcttgttttagtgacgtttcagcttatggtgcctcaac

SEQ ID NO: 371912 - DNA, 611 bp, Homo sapiens
ttgaaaagtaacatgaaacaaaaggccagaataacaaaaaatgagcaggggaaaatttagctagaaagcatagcttagctaaggcaatcttttgcacatttactatatgggaacattgaaaacctttgcatacggcatctctgacgtagataaactagaggttgctaaggcactagatgattgattagcatatttcataagcattaataggataagttggatttttcaagatctgtatagaaaayaaatattgagatttctactaaatatctcaagcagagatattctgagctgttgatacaactttccaatctaggacctcttctacctgattacctgctgcagggctgatagcatcaaatttgagtggaaaggagacattaaacaataagttcatgatccttgggagctaagcaatccattggcagccaccttcaggtgtataaaaatttcagtaatatttccatgcaaagactgccaccagtaagaaccaagggtcactaagaggtgtagcttacaagcagctgacagatacaccatccccaagcaaaggtttcttcaactttatcctatcctaactagcttaagtaaaagcaggatgaaagtggggg

SEQ ID NO: 371913 - DNA, 611 bp, Homo sapiens
ttgaaaagtaacatgaaacaaaaggccagaataacaaaaaatgagcaggggaaaatttagctagaaagcatagcttagctaaggcaatcttttgcacatttactatatgggaacattgaaaacctttgcatacggcatctctgacgtagataaactagaggttgctaaggcactagatgattgattagcatatttcataagcattaataggataagttggatttttcaagatctgtatagaaaataaatattgagatttctactaaatatctcaagcagagatattctgagctgttgatacaactttccaatctaggacctcttctacctgattacctgctgcagggctgatagcatcaaatttgagtggaaaggagacattaaacaataarttcatgatccttgggagctaagcaatccattggcagccaccttcaggtgtataaaaatttcagtaatatttccatgcaaagactgccaccagtaagaaccaagggtcactaagaggtgtagcttacaagcagctgacagatacaccatccccaagcaaaggtttcttcaactttatcctatcctaactagcttaagtaaaagcaggatgaaagtggggg

SEQ ID NO: 371914 - DNA, 550 bp, Homo sapiens
gtgaggaggacatctgcctataagggtgacccggcatgaggcagaacctgagcagagtaagggagagacccatgtgaccttggtggggtgtcattgtctgagcaagttgaggaggatgttcacgtggggtaggggctaagatgaagagttagagtctgagtagggtaagggggacatgcaaactggcttttgagtccttggatggrgaataggtgatgacagagatggaaatctggctacatacagaggaattggttaaatagataaataaatatatgaaagacaatgggagttagtttcttactattgtaaaaagggttgtaaatatagcaaaggagaagagtagatgaaccatgaagattgggttcaacactactggtatgaactcatgatttttaatataaatagataaagatagataaaaaatatagttgtgtatttataaacactctgaacgtgtgtttttgtatgtgttatgtacatacacatatatatccacttgctctgtccactgagaagactttggagcagctattctccacaagaatgg

SEQ ID NO: 371915 - DNA, 571 bp, Homo sapiens
ttttaatttattactaaatggtcctaagattcttattcttttcctccctccctttcccacacctttgcctctcctcgtcatcccccttcttttcctctcctactctctttttctcattcaggaataagaaaatgctaattattgctacaaatcttcaatactgtgctagaggactaaccccaaataataattttgatgagaaaaaagaaagaagaatcgttggaaatgaagagtcatctgtcattatctgtagatgacaagatgatgtaaatggaaaaatcatggaatttaatgaacaagtgtataagagcaagagacttaaactattacaaataaaggatttagttttatgagaagggccactgtgaatgatgccactctagttttagtctcttcttatccaggtggtaaaaattaattttatattgaaaagcctggttgttttcataagaagtcaccttgttttctttaraaataaagcttctatggatttatgtcattatttggaagaagtgtcattacagaaaatagaattgggctgggagacaatcaatttgctgttcccccaaac

SEQ ID NO: 371916 - DNA, 589 bp, Homo sapiens
tttgaactcagctggcagacacagtgatctcatatacaaatatgtggcaattctattatgcatgtcacttgtctcagcaaactaagttataaactcacaaaaactacctggctgtgaatggaagtctcaatactgccagcccttaaacctaaagcactgcagattttctgagaatgtgtgccctcaaataaggacaaaagacaaacagggaccttatttaacctaattcaccaaaaagaaaaaagtgactaacaatgcagcaaactctctgtatctgtgggttctgccyctgtggtttaaccaactgtggatcaaaagtttttttaaaaaaaattaaaaataacaatacaaccattagaaataatacaaataaaaataatacagtgtaacaactatttagataacatacataacatttacattttattaagtattataagtaatctaaagataatttaaagtatacaggaggatgtgcataggttatatgcaaatactataccattttatacaagaaacttggtcattaatggattttggtacctgcagggggccctgacaccaattccccttgcagatactgtgggac

SEQ ID NO: 371917 - DNA, 589 bp, Homo sapiens
tttgaactcagctggcagacacagtgatctcatatacaaatatgtggcaattctattatgcatgtcacttgtctcagcaaactaagttataaactcacaaaaactacctggctgtgaatggaagtctcaatactgccagcccttaaacctaaagcactgcagattttctgagaatgtgtgccctcaaataaggacaaaagacaaacagggaccttatttaacctaattcaccaaaaagaaaaaagtgactaacaatgcagcaaactctctgtatctgtgggttctgcctctgtggtttaaccaactgtggatcaaaagtttttttaaaaaaaattaaaaataacaatacaaccattagaaataatacaaataaaaataatacagtgtaacaactatttagataacatacataacatttacattttattaagtattataagtaatctaaagataatttaaagtatacaggaggatgtgcataggttatatgcaaatactataccattttatacaagamacttggtcattaatggattttggtacctgcagggggccctgacaccaattccccttgcagatactgtgggac

SEQ ID NO: 371918 - DNA, 629 bp, Homo sapiens
gctttcactaccaataattgccctgctttcagctaaaaggctgaaagtgcatcaacatttcagttattgggtttaatttgttaatatgctttccagacaaaaaggcttttaaagaattcagaacaatctacaagttttcttcttataataccttgctttaaccaatttcagatatagaaaattgaaataatgtcccccattaaattctcattaatattatcctgacttarggcattctattgttttggacacttggcacaggaaataaatgtgttgaccactgacctattacaatgagggtcagatatacttaaagttgacaatactttagttcctatagatttatgttcacatttagggtgatgaaatattaattagacccccttatctcatgaaatgctagaggaaaaatagtaattttaaatggtattcatagcttcaaccgcgatgtaacttatcaaagacatcaataatatatcaaagaattgaatattaaaatagtattttgtccctacagaaaagaaaacctgtattaaaagctttgtaaatgttttaattctgcaaaaaaaaaattctttgagccctcaaggagaaagaagttacaaaaagacaaagtatttttgataacc

SEQ ID NO: 371919 - DNA, 629 bp, Homo sapiens
gctttcactaccaataattgccctgctttcagctaaaaggctgaaagtgcatcaacatttcagttattgggtttaatttgttaatatgctttccagacaaaaaggcttttaaagaattcagaacaatctacaagttttcttcttataataccttgctttaaccaatttcagatatagaaaattgaaataatgtcccccattaaattctcattaatattatcctgacttagggcattctattgttttggacacttggcacaggaaataaatgtgttgaccactgacctattacaatgagggtcagatatacttaaagttgacaatactttagttcctatagatttatgttcacatttagggtgatgaaatattaattagacccccttatctcatgaaatgctagaggaaaaatagtaattttaaatggtattcatagcttcaaccgcgatgtaacttatcaaagacatcaataatatatcaaagaattgaatattaaaatagtattttgtccctacagaaaagaaaacctgtattaaaagctttgtaaatgttttaattctgcamaaaaaaaattctttgagccctcaaggagaaagaagttacaaaaagacaaagtatttttgataacc

SEQ ID NO: 371920 - DNA, 629 bp, Homo sapiens
gctttcactaccaataattgccctgctttcagctaaaaggctgaaagtgcatcaacatttcagttattgggtttaatttgttaatatgctttccagacaaaaaggcttttaaagaattcagaacaatctacaagttttcttcttataataccttgctttaaccaatttcagatatagaaaattgaaataatgtcccccattaaattctcattaatattatcctgacttagggcattctattgttttggacacttggcacaggaaataaatgtgttgaccactgacctattacaatgagggtcagatatacttaaagttgacaatactttagttcctatagatttatgttcacatttagggtgatgaaatattaattagacccccttatctcatgaaatgctagaggaaaaatagtaattttaaatggtattcatagcttcaaccgcgatgtaacttatcaaagacatcaataatatatcaaagaattgaatattaaaatagtattttgtccctacagaaaagaaaacctgtattaaaagctttgtaaatgttttaattctgcaaaaaaaaarttctttgagccctcaaggagaaagaagttacaaaaagacaaagtatttttgataacc

SEQ ID NO: 371921 - DNA, 615 bp, Homo sapiens
ctatcacatgaatgtttctaatcttccattcttatagcaatgaaaaagaatatatttatcaaatcaatggttgagtattatgtacccaagcatgcactgatcctctctagaaaagattacatatttgtcacagcaccctccagttattctacaactaggttgagtttttggtagggtggggtagtgtcattcaggatctatgtgggccagataatagcccagagagttatgagrgggatgagcacactgaattttttaggtcattaagtgtggcactaatctttctccctagaatgtgatagtcttcttgatttatagtaggaagtttcagagatttccacctcgtatttttcattataagagtttatctcaatatccagaaaccaatatcggggttctgacaattactaagtatgtatattccaatcatactctgttgatcattgaagtcaccactgggtatgttcatgaacactatggacccaaagggaacttacctaggggcagtgtctcatttgctaagtagtccccataagtcttattataacagagattagaaaagtacctagttgagatttaatcctcacaaaaaaattattgaaagaatgaatggac

SEQ ID NO: 371922 - DNA, 551 bp, Homo sapiens
aattctcccttttccagcatayacttctttattgtttgaatatttgtcaagtacacattacttttatagttgaagattgggaggagggaaggaggggaggaaagaaggaaggaagaaaggaagaaagaaaaaaggaaaactaccactctgaaggcccaaagtccacattgctttttcatgaattattctgtttaccatttgcagaatattaagttaccaattctaaagccacttcctccttggatgaccttaaggggaaaaaagaaaaaagataccctcacatcctcagctcctcctataaaataaatgggctttacagaagagactattatgttttgtgaagtattttcaaatatatcgttgaaggaaacttaaacagaatattaagttggaattggattgcattcccctttgaaggattaggttctaaagtcatgcctttcctgtctactatgtccttttttgttttcttctacattagaacctagttggagtcctctaacgtgcttatttttctattaagcagagccatcagagttcacctgttccct

SEQ ID NO: 371923 - DNA, 551 bp, Homo sapiens
aattctcccttttccagcatacacttctttattgtttgaatatttgtcaagtacacattacttttatagttgaagattgggaggagggaaggaggggaggaaagaaggaaggaagaaaggaagaaagaaaaaaggaaaactaccactctgaaggcccaaagtccacattgctttttcatgaattattctgtttaccatttgcagaatattaagttaccaattctaaagccacttcctccttggatgaccttaaggggaaaaaagaaaaaagataccctcacatcctcagctcctcctataaaataaatgggctttacagaagagactattatgttttgtgaagtattttcaaatatatcgttgaaggaaacttaaacagaatattaagttggaattggattgcattcccctttgaaggattaggttctaaagtcatgcctttcctgtctactatgtccttttttgttttcttctacattagaacctagttggagtcctctaacrtgcttatttttctattaagcagagccatcagagttcacctgttccct

SEQ ID NO: 371924 - DNA, 558 bp, Homo sapiens
tgaatggatgaataaacaagacacattgatctgtatttacaagaaacatacttcacctatagaaacacacatagactgaaaacaaagagatggaaaaagataatccatgccaatggaaaccacaaaagggcmggagtagctatacttatgtcagacaaaatagatttcaagacaaaaactgtaagaagagacaaagaagttcactgtataatgataaagagatcaattcagccatatattggctcccagtaaatatatatgcacccaacactggagcacccagatatataaagcaaatataattagagctaaagtgacagatatgtccaagacaataataactggggactttaacaaagaaacttcaggcttaatctgcactattggccaatgggatctaatagatatttacagaacatttcatccagcagctgcagaatacacattctttttctcaacacatggattattctcaaggataaaccatatgttgggtcacaaaacaagtctgaaatcattggaaaaaattgaaataatatcaaccatcttttctgacca

SEQ ID NO: 371925 - DNA, 558 bp, Homo sapiens
tgaatggatgaataaacaagacacattgatctgtatttacaagaaacatacttcacctatagaaacacacatagactgaaaacaaagagatggaaaaagataatccatgccaatggaaaccacaaaagggccggagtagctatacttatgtcagacaaaatagatttcaagacaaaaactgtaagaagagacaaagaagttcactgtataatgataaagagatcaattcagccatatattggctcccagtaaatatatatgcacccaacactggagcacccagatatataaagcaaatataattagagctaaagtgacagatatgtccaagacaataataactggggactttaacaaagaaacttcaggcttaatctgcactattggccaatgggatctaatagatatttacagaacatttcatccagcagctgcagaatacacattctttttctcaacacatggattrttctcaaggataaaccatatgttgggtcacaaaacaagtctgaaatcattggaaaaaattgaaataatatcaaccatcttttctgacca

SEQ ID NO: 371926 - DNA, 546 bp, Homo sapiens
cccaaacagcctaatttatcctaagcaaaaataactaaactggagaaatcacattacttgacttcagattatactacagagctattgtaattgaaccagcatgatattggcataaaaacagacatgttgrtcaatggaacagaatagggaacccagaaacaaatccacatatgtacagttaatttatttttcacaaagttaccaagaacaaaaactgtgggaaagacagtctcttcaatcaatagtgctgggaaaactgaatatccataagcagaagaatgaaacgagacccctatctctcaccatatacaaaaattacgtcaaaggggattaaaaacttacatctaagacctcaaagtatgaaactgttataagaaaacattggggaaaatctccaggacattggtctgggcaaatatttcttgagcaatacccacaagcacaggcaaccaaaaccaaagtggacaaatgggatcacatcatgttaagaagcttctgcatagcaaaggagacaatcaacaaagtgaagagacaattcacagaatg

SEQ ID NO: 371927 - DNA, 377 bp, Homo sapiens
ggaagatgaaaccaatgtgtggacagaagctctgagtaactgcctctatgttcctgtgccctctttagctgcttgctaaaaattgttagcccagacctgtgaatcactggaattgctgcaaaaattgccaaagtaacctctgagaagcagrtggtaatgaaggcttctgtccagatgccagaatcccatatgcttgccaatctgtgtttccagcatgcaccattatacttaaaattatattttccttttcctgcccatgttcactctaccataattaacaaggttctaatacttctttagaaaaaaagaaacatcacagcctatttgccttctcttaataaaaataaaggtaaaaaaggcagtgtcagacaccttca

SEQ ID NO: 371928 - DNA, 646 bp, Homo sapiens
tgccatcacaggcctggaggcctaggaggaaaagatggttttgtgggctgggcccagggtccccctgctgtgtgtagcctaaggacttggtgccctgcatctcagccactccagccatagctaaaaggggccaacaaacagctcaggctgtggcttcagagggtgcaagccccaagccttggcaggctccacatggtgttgagcctacaggtgcacagrggtcaagaattgaggtttgggaacctctctctggatttcagaggatgtatggagatgctgcgatgttcgcgcaggagtttgctgcaggggtggggctctcatggagaacctctgctagggcagtgtggaagagaaattcgaggtcagagcccccatacggagtctctgctggggcaccacctagtggagctgtgaggagacagccattgtccttcagaccccagaatggtagatccaccgacagtttgcaccatgcacctgaaaaagctacagaaactcaatgccagcccatgatagcagctgggaaggaggctgtaccctgcaaaatcacaggggtagagctgcctgaaaccatgggagcccaccccttgcatcattgtgatccgaatgtgagacgtgaaataaaaggagatgattttggaacttt

SEQ ID NO: 371929 - DNA, 502 bp, Homo sapiens
gtgtaatctatcagacaaaaattcaaaatagctgttttaaagaagctcaacaaatttcaagaaaacatacagaaagaattctgaaacttggagaaatttaacasatcaaaataataataataagtcctggacctgaaatatttgatgaatgaaatgaaaaatgtgagagagcattaacagcagagctgatcaaacagaagttagaataagtgagcttgaagacaaactgttagaaaataagagaaaaaataaagaaacaaaaagcctatgggatctacaaaacaacatcaaaagagaaaatatatgggttattggagttcaagagagatttcagccatagtggcatgcatatgtaatgacagctactcatgaggctgaggtaaatgaatcacttgaacccaggaatttaaggccagattaggcaacacagtaagacctgtctccaaaaataaagagaagagagttcagaaaaacaaaggtgtacgaaactaattcaaagaaa

SEQ ID NO: 371930 - DNA, 537 bp, Homo sapiens
catgatcttatatatggaaaacctaatagactataaaaacttatttgaataaatgaatttcgtaaattttcagaatacaaaaatcaacacacaaatcagtagcatttctatatgccaataatagtgaactatctgaactagaaattaagaaagcaatgccatttacaatagctatcaaaaaaataaaatacttaggaatatactttaccagaaggtgaaaatctttacaatacaaaatacaaaacactgataaaataaattgaagaggatacaaacaagttgaaagatatcctatgttcatgkattggaagaattaatatcgttaaaatgttcataattcccaaagtgatctacagattcagtgcaatccctatcaaaataccaatatcaaaagtagaaaaaaatcctaaaatttgtgtggaatcacaaaataccctgaattgctaatgcaatctttaataaaaagaacaaagctagaggcttctcactacctgacttcaaaatatagtacacaaagcaatagtaaccaaaacagca

SEQ ID NO: 371931 - DNA, 537 bp, Homo sapiens
catgatcttatatatggaaaacctaatagactataaaaacttatttgaataaatgaatttcgtaaattttcagaatacaaaaatcaacacacaaatcagtagcatttctatatgccaataatagtgaactatctgaactagaaattaagaaagcaatgccatttacaatagctatcaaaaaaataaaatacttaggaatatactttaccagaaggtgaaaatctttacaatacaaaatacaaaacactgataaaataaattgaagaggatacaaacaagttgaaagatatcctatgttcatgtattggaagaattaatatcgttaaaatgttcataattcccaaagtgatctacagattcagtgcaatccctatcaaaataccaatatcaaaagtagaaaaaaatcctaaaatttgtrtggaatcacaaaataccctgaattgctaatgcaatctttaataaaaagaacaaagctagaggcttctcactacctgacttcaaaatatagtacacaaagcaatagtaaccaaaacagca

SEQ ID NO: 371932 - DNA, 276 bp, Homo sapiens
aacatgacaattttaaatcacaaatgctgacgatatttaagaagtttctcatgtctgctaatttyagtttaataatcttccctctggagagcactagttttcctggggtcataattctgtacaataaaatgaactgagacaaaaatgaggctaaaacccatgcaatggatattatcggattacagcaaaggtgttatctgcatcaacacttactatagcatgagtaaatgtaattagtgcagagtggcttggtgggaaagagtacaaaacacgatt

SEQ ID NO: 371933 - DNA, 599 bp, Homo sapiens
acaacattcctcctcctttcctgaaactactatcacccttttggccatggggcacctaagacaagagctgtgcttttcttcggctttcacaggactccagaaaaaaatgaaatatcagagaggaggagaaactggttaggtgattcgcagcctaacgctacctctccccttcaccccggatgctagttctaaaggctcactttccaatgtcctcacttctccgtcttcagagaacggccatctgcatagtaatggtcacctgcccaggctctcctcccacccaagggataaaagcatctcaggggcccattttaacattcctggggcaggaggacttctattcactttactgtcagtttcctttaggaccaatctccttctactgctcctccttgtattcctataaaatttcttcctatttccattgagttctccaacrgtctctgcccgttcagatctccagtgccactcctctctggattaaattcttgttcttcactctcctcacctttgatcatacttcattagaaggtgtgtatgttgggaagataggttgaaagagttttttcaataccagctggtgaagatgaatcagaatt

SEQ ID NO: 371934 - DNA, 436 bp, Homo sapiens
ccaatctattaaatatattgtaaaaatgacaaggcctactatctaaaatatgcatattactttagccccttaactgtccctttgccattttttttkatatttttctccacttacttgtagttcatgctatttctaaccagctttccctgattcaaaaatcaaatagtttagcaatgggaatttttattacagcaaagcagacttttacatccatcagaatccaattttaaggagccagattatatcagttgtttaatatctttctcagaattcctgttgaaatgttgtatttatgtatctgaaaacgtcatcatagtttttaagaaaactctatagttgcttgaatttgaataagagcctgagcaaaagtaaaacttggggaaataaaatgagaaaaaaaaaacatttaaaagcttcttatgaggaactccttatc

SEQ ID NO: 371935 - DNA, 592 bp, Homo sapiens
ggtgatagctcaaggcatagtcagctgcccactactgagcctcctcccttccttcagcctctgccctctccaagctcactctggcctttcttatcctaggtaggctcctgtcctttgtctctatttttgcctttgatcacaacttctctcctgttgtccctttggaatggcagcatcattctgcagcttctcggtcagcatgggttatgggtttgtgccaacagcgatgcatgctgtccccagagtggctggatgggccttggacaatcactcaygtacccaaatgtgttctccagataacctttcctctgtgtatacgaagagagaacgtttagggagcactgttctccttctcacccattctctctgttttcctctccatcatctgggatgtctttctctgtgtgccattctgcctctaattatcctctttttctttgtttacagagaacagctgttctcacggaaggatccaaagggttcaaaggcgaagggtgccatctgcttccccactgattcagaagataaacaggagaagtgtcctgtttcacccatattgctggtcctgatttttcaatagtgtccctaccct

SEQ ID NO: 371936 - DNA, 519 bp, Homo sapiens
gtcatgtctggggctgtccctgtggcctggggtccagactccctggtgaaccacacagcttgccctctctgtgggctcctcacctctacaaacaccaagctggctccagcttgcatgtaggatccaccgacattttctgcttaattgtctaggtggagtttctttctcctttaaaccagttaagataatccttctctttccttttttggaacaaggaagcatcatcccttttagaagtctaagcttaagcttttacaaaagtcaaaagagctactgattttaagtaggtcrctgcaacaatccctgcagcaagaaaccccaaagaacctgaaagatcaagcacaaattgcttaataaactgtggccatatacatgattattcatctatcttcccactaaaacatccctaagacattttagaataatagctataaagatggtagtgagatcaagtgaacttttctctccacgtatttgcccatattttatacatgttttatattaaacagatattgtttt

SEQ ID NO: 371937 - DNA, 576 bp, Homo sapiens
atagggtcattcctagggttttaartcaaatccacatccttcatctttgagatagtttggatctgcgtccccatccaaatctcatgttgagctataatccccagtattggaggtggggcctgctgggaggtgattggatcatggggatggatttctcttgagtggtttagtgccatccctatggctctgtcctcttgatagtgagtgactttggacaagatctggctgtttaaagtgcatgacacctcccttcctctgtcctgctttctccacgtgatgtgcctgctgcctctttgccttctgccatgattgggagctccctgaggcctccccagatgccgctatgttccctgtacagcccaaggaacagaagccgattaaacctctttttgccagtctcaggtatttctttatagcactgcaagaatgacctaatataatcctctatgagatcacatctaaatttgaatcagctacatttcaagtcttcagtagccacacatgtctagggactactgttttggaaaacactgctcctaaacacagaaattatagtgcttggagctattatcaaaa

SEQ ID NO: 371938 - DNA, 576 bp, Homo sapiens
atagggtcattcctagggttttaaatcaaatccacatccttcatctttgagatagtttggatctgcgtccccatccaaatctcatgttgagctataatccccagtattggaggtggggcctgctgggaggtgattggatcatggggatggatttctcttgagtggtttagtgccatccctatggctctgtcctcttgatagtgagtgactttggacaagatctggctgtttaaagtgcatgacacctcccttcctctgtcctgctttctccacgtgatgtgcctgctgcctctttgccttctgccatgattggragctccctgaggcctccccagatgccgctatgttccctgtacagcccaaggaacagaagccgattaaacctctttttgccagtctcaggtatttctttatagcactgcaagaatgacctaatataatcctctatgagatcacatctaaatttgaatcagctacatttcaagtcttcagtagccacacatgtctagggactactgttttggaaaacactgctcctaaacacagaaattatagtgcttggagctattatcaaaa

SEQ ID NO: 371939 - DNA, 576 bp, Homo sapiens
atagggtcattcctagggttttaaatcaaatccacatccttcatctttgagatagtttggatctgcgtccccatccaaatctcatgttgagctataatccccagtattggaggtggggcctgctgggaggtgattggatcatggggatggatttctcttgagtggtttagtgccatccctatggctctgtcctcttgatagtgagtgactttggacaagatctggctgtttaaagtgcatgacacctcccttcctctgtcctgctttctccacgtgatgtgcctgctgcctctttgccttctgccatgattgggagctccctgaggcctccccagatgccgctatgttccctgtacagcccaaggaacagaagccgattaaacctctttttgccagtctcagrtatttctttatagcactgcaagaatgacctaatataatcctctatgagatcacatctaaatttgaatcagctacatttcaagtcttcagtagccacacatgtctagggactactgttttggaaaacactgctcctaaacacagaaattatagtgcttggagctattatcaaaa

SEQ ID NO: 371940 - DNA, 470 bp, Homo sapiens
tttttgtttataccccttgtagaatgtaactttgtattacttcatcttaccttcagttacctctactctagctgggaagggttgcccagtttctcacacataccatatacatttgttcaacctgtttcccaggcagatgctctctcaattcatcatttcttttgttagaaattaattcttaactttttttattccccaggacatctcataatgtgtgtttctgaaaagcatgttcagcaagactagctttaatagctgatacagtggatacaaatttatcccattgtcaaataaatttggaaaatggaagttaaacagaattaatagtttttcctctcttatacaacttctcagagtccttagtgtgctaatctgaaatgtgttctaccagtacgtatttgyaatacttctcaaattatttcaccatggaaccttctttccctcactgtctctagggtctaatatttcac

SEQ ID NO: 371941 - DNA, 542 bp, Homo sapiens
gaatcaaccttggcaatcaatggggtgagagatgttgcagccagattgccctcacatccaatgagcagtaatattttgaaagaaccttttttttttttctgagcagtaggtctcaacagtgggcttaaaatattcagtaaatcatgcyataaactgatatactgtcatctagcctttattgttccatttataaagcataagtaaagtagatttagcataacttttaagggccccagtatcttctgaatggtaaatacacactgatttcaacttaaagtcaccagcttcattagcccttttcaagagagtcagcctgtcccttaaagttttaaagccggcattgacttatcctctctaactataaaagtcctagatggcgtcttcttccaacagaaggctgttttgtctatattggaaatctgttgtttagtgaagccatcttcatccatgatctcagctagatcttctgaatatcttgctgcagcttctacgtgagcacttgatgcttcaccttgcacttttgtggtatggaggcagcttct

SEQ ID NO: 371942 - DNA, 542 bp, Homo sapiens
gaatcaaccttggcaatcaatggggtgagagatgttgcagccagattgccctcacatccaatgagcagtaatattttgaaagaaccttttttttttttctgagcagtaggtctcaacagtgggcttaaaatattcagtaaatcatgctataaactgatatactgtcatctagcctttattgttccatttataaagcataagtaaagtagatttagcataacttttaagggccccagtatcttctgaatggtaaatacacactgatttcaacttaaagtcaccagcttcattagcccttttcaagagagtcagcctgtcccttaaagttttaaagccggcattgacttatcctctctaactataaaagtcctagatggcgtcttcttccaacagaaggctgttttgtctatattggaaatctgttgtttagtgaagccatcttcatccatgatctcagctagatcttctgaatatcttgctgcagcttctaygtgagcacttgatgcttcaccttgcacttttgtggtatggaggcagcttct

SEQ ID NO: 371943 - DNA, 604 bp, Homo sapiens
tgttgaactcctcagtatttgttcaaacctaccaagttttaacatgarctaagcattaaatggatttggaatctgagaagggtgttcgcctacaatgtagcgatatggggagaaaaggtttgggttgagaccggcgactttcagaattataagtgctggcaagtaagaaccacagcccggcaattttggaggcccccagcatagccactgctgctaaccaaccaattttaaaagaccaaagactaggttttctcccaaagtgacagtagttgcaaatttgccatctaactcacagtggcactagcccaatcgaggcaatttcctgagaacttatgataatatgtccctgttacacaagacctaaaagatttttaatggcctgttcctacaaaactaaaataaaaatggctggcctgtacaataaaatatttcactggaaatgaaacataaacaaatgcactagtactccattttgaaaagaactttgtaaacttattgtttaaaattatgaaatatgttcaaatttacaacaataaaactctaggaaaaacagtgatgcaaatgtttaacatgagattcatacaatttgctttaccctatcttg

SEQ ID NO: 371944 - DNA, 601 bp, Homo sapiens
ttagcgtagccttccttaaacatgctcagaacacttacattagcctacaggtgggcaaaataatttaatacaaagcctattttataatgaagtattgagtatatcatgtaatttattgaagactgtactgaaatttaaagccacaatggttatatgggtatttgaagtatggtttctactgaacacatatcgcttttaaaccgtcttaaagtcaaaaaattctgagtccaaccatcttaagtcggggaccatctgtataagcaagtcagaaaataagaacaaaaggggtataatccccaccacagccagacttactaaacatctgcagaacaaactaacacastagaattttgagacttaatgctacatctcccaatgtggcagcatttgtacctacctatcagtcttcctaatcattgtgacctccagcctaattcacatgttagtatttgccaagctggaagttctttcacagggagatgaacaacctggaacatttagatctcagaaggcatccccatcttatccataaaagttcctaccccttcattatcctcagatttcctttctgatggcccagaccctcatatggcctcaactc

SEQ ID NO: 371945 - DNA, 601 bp, Homo sapiens
ttagcgtagccttccttaaacatgctcagaacacttacattagcctacaggtgggcaaaataatttaatacaaagcctattttataatgaagtattgagtatatcatgtaatttattgaagactgtactgaaatttaaagccacaatggttatatgggtatttgaagtatggtttctactgaacacatatcgcttttaaaccgtcttaaagtcaaaaaattctgagtccaaccatcttaagtcggggaccatctgtataagcaagtcagaaaataagaacaaaaggggtataatccccaccacagccagacttactaaacatctgcagaacaaactaacacactagaattttgagacttaatgctacatctcccaatgtggcagcatttgtacctacctatcagtcttcctaatcattgtgacctccagcctaattcacatgttagtatttgccaagctggaagttctttcacagggagatgaacaacctggaacatttagatctcagaaggyatccccatcttatccataaaagttcctaccccttcattatcctcagatttcctttctgatggcccagaccctcatatggcctcaactc

SEQ ID NO: 371946 - DNA, 412 bp, Homo sapiens
gcaatttgagaaagatggctgtggtgcctatcaatttggctcccagaaatgctaccaaaatattgtattgtatamttttgcaattttgtactttagctaaaacagaagagactgtagactgtgggtatgtctttccctgtcgatttcatttacctgaaaaggggaaaaagatccttggaagggatgaaaacaggaaacagttccctggagtgaaattaagcaagtaaacaactgggactaactctgaaaaacccataggctcagagctccacacttccctgatgaagtgatctgaattatatccaattatatcccagccccacttgctagctgcaataaccctggtaccagaaagtcaaaaaaattcagaaaggaatacagagcctaattctgaaagcaaagccccagcttt

SEQ ID NO: 371947 - DNA, 569 bp, Homo sapiens
gatgaaaacaggaaacagttccctggagtgaaattaagcaagtaaacaactgggactaactctgaaaaacccataggctcagagctccacacttccctgatgaagtgatctgaattatatccaattatatcccagccccacttgctagctgcaataaccctggtaccagaaagtcaaaaaaattcagaaaggaatacagagcctaattctgaaagcaaagccccagctttcagctttacttaagggacgtggcttttccttctccctgaacctatcctcgattagtctatggaaaacttagcacagagaaaataaacatgaatcagagaagattagaagtgagtccaagggtattcacccatgctatatcagagcaagtagaaatccagagagagcctcattctaccaacatgataaaaataaatgacatggaaatatgcacgcattctaytgaaaaaaagagagagaagaaaatggaaacttccacgtaggaggcaaatgtagaacccagtctataaaacagttgacaaaatgcacagtagacaattttctactactgtttgatgcaa

SEQ ID NO: 371948 - DNA, 557 bp, Homo sapiens
cctcaaagtaataaaatttgttagaggcaaaattttcaggcagcagccactgttttcccaaacagccatggtagaaygcacatacaaaaaggcagattttagctgtcaaaacaagctactacaattactttctgatggtttgattctcccttgtattataccccctacacacacctccttggtttctggcatcttaatatcaattggcaacttccatcctctcaaccattattctgtcaactaatccctctggttgttgtcctgtaacttcatatctactgattcttacttatgcctttcttggctaaatgtctcactacacagttctgctcaccagctaagccatgctttttgctccaggcattggttcttcctacatcttcttgttgcaaaaatgaagctgcaaagcctaccaatgctccctacaaagcagtcatatcccttatggagctgggcaagttaacccattggcagcaaatgctgagccaatgtgtgtatcttggtaagaagatacacataaaatgaatattgtcagccctcagatccatgagttcaac

SEQ ID NO: 371949 - DNA, 602 bp, Homo sapiens
tttcttggctaaatgtctcactacacagttctgctcaccagctaagccatgctttttgctccaggcattggttcttcctacatcttcttgttgcaaaaatgaagctgcaaagcctaccaatgctccctacraagcagtcatatcccttatggagctgggcaagttaacccattggcagcaaatgctgagccaatgtgtgtatcttggtaagaagatacacataaaatgaatattgtcagccctcagatccatgagttcaaccatccatagattcaaccagcaagagatagaaaatatttgggaaaaaaattctacaaagtttcaaaaagcaaaactgaatttaagcaaatgaagtgatgtatatgctttgtattccgtattataagtaatctagagatgatttgaggtatacagccactttatattagggacttgagcattctcgaattttggtgtgcttggattttggcatctgtggagatcctggaaccaacccctcagggacattgagagacaactatacacatttctcagatgaaagcttctaacttattagtcacggaaaatgtatgtattctaaacataaacagaatcgttacata

SEQ ID NO: 371950 - DNA, 474 bp, Homo sapiens
aatcttgggaaaatccttttaatgtccctgagcttcagtttgtccgtgtgtaaaatggagactataccatctatctctaagaaacattactagcgctcccaggtacttgatctttctytcatatgtgaaattccaacttcctcacagtgagacagcctcgtgagtggctctgcctaaggggcgtatgttgctgctgcattgaggcagaggaaaactcctttgcaaacttgcacctctctgtgatgaaaagaactgtggcctttgttaatagaacagagccacaagattgaagaagctggcttctcagacgttcaacatggagatttgcctaaactactggacatttaaataggcgagacataaatttcatgccttaaaccttccctgaaggtttgaaactgtcaccacagcagaaacctagcttgacctggttgaaggacagttaggaaattatgtcaaatgctggaaagtgaa

SEQ ID NO: 371951 - DNA, 474 bp, Homo sapiens
gttccaaacaaagttatgctttagaaatagaggggaattcaatgccacaccatttttaacctaatactatctggcctattagctattggctctaaaatagcaataccgactgaagaaaacagttccatcatctgagctacctaacctgtaactggttagagcttctgaaaagctgtaatataacatttgtagatgtggccagtaaaatccgcccacaactctttaytaaattctgagggcataacaacaactttctgacatagggcaatataatttagatggctgagataatttagaatttcactagtcctgaactctcagcttttttctgcaaaggacctgttagtaaatattgtactatctgcaagcattcaactacgtggttgcagcaccaaagcaaccttagaaagtacatgaataagtatgggtataatctaataaaactttattagcaaagcctagtgttggtcaata

SEQ ID NO: 371952 - DNA, 594 bp, Homo sapiens
tgagataatttagaatttcactagtcctgaactctcagcttttttctgcaaaggacctgttagtaaatattgtactatctgcaagcattcaactacgtggttgcagcaccaaagcaaccttagaaagtacatgaataagtatgggtataatctaataaaactttattagcaaagcctagtgttggtcaatatatgcagtgtgtttcattgtttgccgatctctgatctagttcggattcctcactgaatatacgatgaaggtgggtcacaaaactattgtccaagaacrtgagagtcaccgagatgccctaataataattcctcatgagagggacttttctatacttaaaaacatagaatttatttcataaatgttctctaagcctcagtttccttatggacaaatgggaataatgatgatagaatatacccttcctttcacacaatgtctgtctacagtggaagttctcagttaatatatagcaagttattttggtaggaagttctgaggtgacatttgggtagggacaaagcatacacagctctagttttgcaccagaagcctgagtgtatacacatgaatgtgactattat

SEQ ID NO: 371953 - DNA, 553 bp, Homo sapiens
ctgatttttacctgaattcatagccatgtctatgaaagagaatgaactgagaagttactaattgtgggtaatgacaaatcacatttttcacactaccaaaaaatgtcaaaccaatcccacaaatgataaaattcatattttcattccgaatgatttttagtcgataaaatgactcatttaccttaatttaatgcatacttactgtataccttccatttcaaggcccttgaacataatttttaatgacttacatcagggaagctgataaatgtggatgtttctgaagaagagaataacgcggaaatataatactttctatactttaaaccaagttttggatgctgggaatatttaaataaacaaataaactattttatttattwgtacacttgattaatatcattcagaggtaagaaagccctgccagaaaagtagcccctttgaaaatttggatctcaagagagatgagaaagacaatcacattagctgtcttttaaagtcaaaggaagaattgataaggtgtgccaaaagtatcatcttaatgatggcaaag

SEQ ID NO: 371954 - DNA, 559 bp, Homo sapiens
aatcaccaccatgttctttaagttctgccttcattatagggaaagagttagcaagtgatttctattggtccacattcccaccgtggactcctgcaattctagctataggagagctcttcagttcttatgggccttaagactagtataggcagctacttggagcccatgcaacagcattgttccatcaagagagttgatactgggtcccatgtacccactgagactcaagcagctgcacctccctgccattttaggagatcagcctccatcaaactatattctgccttaggtcccaacaaccsctgcatcttcacatctctggagccctgctgacatccctccacatctttctagagggctaaattgtcatgatgctggctggacccagtagtgaagccagatatccagcactgttgtccacatattgtcctacaccctagggaacaggcagttcagcacaccaaggaagctggccccaggacaaagggagccaaagcatgcgctccccatagcctgagagctgcctattgagggatgctgccactgatggcaaccttgc

SEQ ID NO: 371955 - DNA, 526 bp, Homo sapiens
ttatctccctgtttgacattgctcaataaaagtaactaaaactgatgaacaagtctatatatcttaagtgtaattttgacaatactgtacatatctttgctatcgtaaggttgtttcttgagacaatagtctggtcttttttttttttttaacatgtttagcatcataaagctggcagaatggtgaggaggataggagaggtaagggagtaaratactggtaataaagattaatggtcctgtagtaaatgtcctgtgtagtacttaatgagtaaaggataacagcaaaagaaacaaaagatgtaagacagaagaaaagtatattaaaaaattcagacacactaaagagggtaaagcaattaagaaggtgataaaccaagcagtgtaacttaggtgattagtgctaggtcatcagccttatgataaacagggtttccaagtctactgtgcatccatggaaagtttatatctcccatttggttgggtgccacagcaaatgccaatgcaataactttgccctgtactat

SEQ ID NO: 371956 - DNA, 526 bp, Homo sapiens
ttatctccctgtttgacattgctcaataaaagtaactaaaactgatgaacaagtctatatatcttaagtgtaattttgacaatactgtacatatctttgctatcgtaaggttgtttcttgagacaatagtctggtcttttttttttttttaacatgtttagcatcataaagctggcagaatggtgaggaggataggagaggtaagggagtaagatactggtaataaagattaatggtcctgtagtaaatgtcctgtgtagtacttaatgagtaaaggataacagcaaaagaaacaaaagatgtaagacagaagaaaagtatattaaaaaattcagacacactaaagagggtaaagcaattaagaaggtgatraaccaagcagtgtaacttaggtgattagtgctaggtcatcagccttatgataaacagggtttccaagtctactgtgcatccatggaaagtttatatctcccatttggttgggtgccacagcaaatgccaatgcaataactttgccctgtactat

SEQ ID NO: 371957 - DNA, 621 bp, Homo sapiens
ggttgggtgccacagcaaatgccaatgcaataactttgccctgtactataatctgcatacactagctgtgcaatgggcagaatggctcaaaggggcaactttagcytctttaatggtcatatagataataattttgctaacagctccatattagaataaaagaaaaggaaaatacaaggcggtctttttcatgagtagaaaagaaagtcagtagttcctgtgaatgccttaaaataaaaactcttaaaaagatgaaaaagtttcttttttttttttattgcaacactacaaccttcccccacccccacaaaaaaaggggaaaaaaaacctaatggaagaaaaaataaaaccatgagtgaaaactattcctgaaaactttgcagaattgtaacagctttctcttggttaaattgattggtatagcaacattataaaatgactattaggattcattgtgcacaacagaaagtgctgaaatgtcagcagactatacagcaaaaagtaatgggttctgaacccctgttagtcaaaaatgattttgtttcaaattagaaattgattttttttggacacaagaccttttcaggcttctggcttctgtagctaggcccaggagagatt

SEQ ID NO: 371958 - DNA, 622 bp, Homo sapiens
tactccaggtggcctttgaccaggattcaaatcacataatcttctataaatgtctctggtttatatcgatcagaatttttagcagtgtttgctcatatcataatttattaacaaaaaccaagaaagtaaatggctttatgttcasaattatataaagaaaataaaatcattagttatatggctttataaagtaggcacaagaaaatgtataaaagtgatactcttcttttttttttaaatcagaacacagagaccattttcctctcagacccaccagaagatgtataacttagggttatacaaattgcactcacggaacagggaaatacggaaaataaaagtaccttattgtgaatgttatataaatttacgtcaacccagaggccccaaacccaggcaaatccagtgactacatctctgcttgttctgtagaaaaatgaatgtgaccccaaccattggcttccccaaatttgattcattctcagctcagccagactcccaatactgactgccttctgcttctttacagcattttcacagaagcttttctgtacctttattcaaaattccaccttggtaatcctccatcacaactggaaacttggcttctaatttccctaaa

SEQ ID NO: 371959 - DNA, 634 bp, Homo sapiens
catcttgacccatcccctctgtgactatggcctgtcaatcatctctttttcttataactcacaaactcctcctctaaactggattttttcctagggctacaaamaagagcagatcctccattaatacccagtgtcagtgagcgtgtggggacaagagcactttaatacctattgcaggaaccacaaatgggtatcacctttttgtgagtgacttgtcaacacaaaatgaaaatgcatccctctttcaacagttctacttttatcccacacctgaggccagaaatttgagatcggactgggcatcacagcaagaccccatcactaaagaaaaaaaattgttttaagttagccaggcatggtggcatgtgcctatagttccagctacttgggaagctgaggcagcaggatagcttgagcccaggagtttgggcttatagtgagatatgaccatgccactgcactccagcctgggagacagtgagactctgtttccaaaaaaaaagaaagaaagaaagaaagaaaaaaaaaggaatttctcctgcagaattacatgaacaacagcatgagaatatttgtttaaggataatcactggagaattatttgtaatagtgaaaaactgaaagcaaatatcat

SEQ ID NO: 371960 - DNA, 634 bp, Homo sapiens
catcttgacccatcccctctgtgactatggcctgtcaatcatctctttttcttataactcacaaactcctcctctaaactggattttttcctagggctacaaacaagagcagatcctccattaatacccagtgtcagtgagcgtgtggggacaagagcactttaatacctattgcaggaaccacaaatgggtatcacctttttgtgagtgacttgtcaacacaaaatgaaaatgcatccctctttcaacagttctacttttatcccacacctgaggccagaaatttgagatcggactgggcatcacagcaagaccccatcactaaagaaaaaaaattgttttaarttagccaggcatggtggcatgtgcctatagttccagctacttgggaagctgaggcagcaggatagcttgagcccaggagtttgggcttatagtgagatatgaccatgccactgcactccagcctgggagacagtgagactctgtttccaaaaaaaaagaaagaaagaaagaaagaaaaaaaaaggaatttctcctgcagaattacatgaacaacagcatgagaatatttgtttaaggataatcactggagaattatttgtaatagtgaaaaactgaaagcaaatatcat

SEQ ID NO: 371961 - DNA, 619 bp, Homo sapiens
aagacctgaaattatacaagtgctaaaagaaaacatacagaaaacattttaggacattggtcttggtaaagattttatggctaagactttaaaatcacagacaacaaaataaaaacaggcaaatgggtttgtattaaactaaaagtttctgtatagcaaaggaaacaatcaacagaatgaaaagaaaccctgtatagtagaagaaagtatatacaaagtattcatcagacaaggactaatatcctgaatacacaaggaatagttcaatagcaaatacacacacacacacacacacacacacacacactcccatctaaaagacaaagaactgaataggtatttctcaaaagaagacaaacagatggccatcagatacatggaaaaatactcagcatcactaatcatcagggaaatgcaaattaaaaccacagtgaagtatcatctcaccccagttagcagggctattatcaaaagacaagacataacaaatgttggcaagaatgtagagaaaagggaactcccatacgctgttkgtgggaatggaaattaatgcagttattttggaaaacaatatgaagatttctcaaaaaagcaaaaatagaactacattatgatccag

SEQ ID NO: 371962 - DNA, 560 bp, Homo sapiens
ggggtcagggaacaagggataggttactgatacttagatcccagtttggagctaggaactaaattagacatttcacatatataaattcctttagtccctataagaacctcatgaggtggttggcattatactttcatagattgaataaaattgcccaaattactgagctagtaatggtagaatcagactacatttgtcttattttagagccatattcttttagctatgtcatgttcttatttgccaattctaattgactgaagcctcttgcttggagggatgtgtggaaggaatcaaagcccacgcccagttattctagctgatgctagtgggatgggaggattggcatctcacatagaacctaaccctcattgtagaatgagtgaatgtggactaggcctcatttctaagggactaaaggaaggatttccattacacaagggtctatattttgagggacctayagaaagactcaatacaaaggcagctcctaacgactgcattttgataataattttccatcctttcctttttctgctgcaagtaaactagccatgact

SEQ ID NO: 371963 - DNA, 620 bp, Homo sapiens
ggttttttttttaaacatagcaacatgtcatgaagggttttcttcatcattaaatactatactaaaatatttttatgtagtcagggctatcagtcattcctttacgcctctttctttgcttttatgcttggaaatgtcttctttacttggaaatcaaacaaatatttccctgagttactttcttaatattatacaaataatgactctggtcaaattcatcccagcgatgtagaattatttgaggaaaaaaactggagtgctatgcrtaactctgggccagcaagcaccagccatggcttgagatactcaatctgggaggtcaacaatctcaaactagcaaaagcgaacaaagcccaaattgcctcattcagttggaggttattctgaaaaatgaagcaaatgctattccatctgcattggcaacaaagaattaaagtggcctttccacaattaaaaaaacaaaaagatgtaaaaatgagctgccactgaaaattactaggcgatcctaaatatagctattacttgccctaaatttgtaccaggacctcaatggtgtacttctacgatcttccatccctttgcttgtctcttcttatcagcttatgtaatacagacaagaa

SEQ ID NO: 371964 - DNA, 557 bp, Homo sapiens
caagaaaaagagaaagctgtaacacttcttgggggctcagaccttgggactccctgggcgagagctctaacatccctggggcttcactgttgctggcatctcccagtttttgggtgccaytgcattcctctcatccagatgctggcgcccaaggtggaagccagttgcagcatgcctggtccagccacaggctgtggtggatgcagtgggcaggcgtgggatccaggctggggcacaagctgagcacaacctactgggctgagtgggtggagtgggcctggcggcctgagtgagaccttgggcagaggtcacagtggctgcagagatttctggctgacaaagtggtaccgaaggaatcctataatagtagtagttatttttgttaccattatcatggagattacagtgattatagaaaatgcagtgattagggtgtgaattctatagccaggcagcctgggtttgaatcccagctctgccacttgtaggctgttttactgcaggcaatctacttagctctctgcacttcagtttcctcatttattaaatgggactat

SEQ ID NO: 371965 - DNA, 557 bp, Homo sapiens
caagaaaaagagaaagctgtaacacttcttgggggctcagaccttgggactccctgggcgagagctctaacatccctggggcttcactgttgctggcatctcccagtttttgggtgccattgcattcctctcatccagatgctggcgcccaaggtggaagccagttgcagcatgcctggtccagccacaggctgtggtggatgcagtgggcaggcgtgggatccaggctggggcacaagctgagcacaacctactgggctgagtgggtggagtgggcctggcggcctgagtgagaccttgggcagaggtcacagtggctgcagagatttctggctgacraagtggtaccgaaggaatcctataatagtagtagttatttttgttaccattatcatggagattacagtgattatagaaaatgcagtgattagggtgtgaattctatagccaggcagcctgggtttgaatcccagctctgccacttgtaggctgttttactgcaggcaatctacttagctctctgcacttcagtttcctcatttattaaatgggactat

SEQ ID NO: 371966 - DNA, 557 bp, Homo sapiens
caagaaaaagagaaagctgtaacacttcttgggggctcagaccttgggactccctgggcgagagctctaacatccctggggcttcactgttgctggcatctcccagtttttgggtgccattgcattcctctcatccagatgctggcgcccaaggtggaagccagttgcagcatgcctggtccagccacaggctgtggtggatgcagtgggcaggcgtgggatccaggctggggcacaagctgagcacaacctactgggctgagtgggtggagtgggcctggcggcctgagtgagaccttgggcagaggtcacagtggctgcagagatttctggctgacaaagtggtaccgaaggaatcctataatagtagtagttayttttgttaccattatcatggagattacagtgattatagaaaatgcagtgattagggtgtgaattctatagccaggcagcctgggtttgaatcccagctctgccacttgtaggctgttttactgcaggcaatctacttagctctctgcacttcagtttcctcatttattaaatgggactat

SEQ ID NO: 371967 - DNA, 551 bp, Homo sapiens
tctgtatttatagctgcttcccgttgcccacattactaggtgagctctgcctcctgtcagatcagtggcaacattagattctcataggagtgcgaaccttattgtgaactgcgcatgcaggggatctaggttgtgtgctccttatgagaatctaatgcctgatgatctgtcactgtctcccatcacccctagatgggactgtctagtttcaggaaacaagctcagggmtcccactgactctacattatggtgagttttataattctttcattatatatcacaatgtagtaataatataaataaagtgcacaataaatgtaatgtgcttgaatcatcctgaaaccatcccctccccactctccagtctgtggaaaaattgtcttccatgaaactggtccctggtgccacaaaggttggggactgttgccttagactgtttaattaacatttaggctttgattagacaactaaactccagttcatctttatggaaggctgaggacacaccatggatatcaccaccaccaccaccacaaaatattttcagataa

SEQ ID NO: 371968 - DNA, 551 bp, Homo sapiens
tctgtatttatagctgcttcccgttgcccacattactaggtgagctctgcctcctgtcagatcagtggcaacattagattctcataggagtgcgaaccttattgtgaactgcgcatgcaggggatctaggttgtgtgctccttatgagaatctaatgcctgatgatctgtcactgtctcccatcacccctagatgggactgtctagtttcaggaaacaagctcagggatcccactgactctacattatggtgagttttataattctttcattatatatcacaatgtagtaataatataaataaagtgcacaataaatgtaatgtgcttgaatcatcctgaaaccatcccctccccactctccagtctgtggaaaaattgtcttccatgaaactggtccctggtgccacaaaggttggggactgttgccttagactrtttaattaacatttaggctttgattagacaactaaactccagttcatctttatggaaggctgaggacacaccatggatatcaccaccaccaccaccacaaaatattttcagataa

SEQ ID NO: 371969 - DNA, 547 bp, Homo sapiens
ttatatttgtttgaaacgctgaggtatgctgaataatgacaagagacagatgggcagtcaccttgcctttattctgtcttgcagaacagcatttcccaaactccacaaaaccctagtgaactatagaacacagaaggtgccaaaaaacaaaacaaacaaacaaaaaaaaacaacactaatgttaggagtatttttaatatgtaagagaaagggattttttttttacaattaaaaaaataccaaatgcattttatatagttgtcacctcagaggttatcagatgcatccttgaatttagtcattcatgtattcaactagctgattattrgggaaaacagcaatgaagaaaacaaagaaagtcaggttgttacacatgctagacagtgcagcagtgagggttggtgagctattttaggtggcctggggaagcccaccctgatgacgcttgggaggggaggaagtctagggaaagacagtgcacacagaaggaacagtcatgtaaaggcccgcattgggagaatctttggtgggtttcaggaagagccag

SEQ ID NO: 371970 - DNA, 592 bp, Homo sapiens
agtaccttattcattcaaatgtatcttttcctgatgacagataagtgtatatgaatggatcaatgcaaatgtatcactatcactggagaaattattcagagtttgccctctgatatgtagctcagtaaaagaacctttaaatggaaaaagataatgcctttttcttagcattttctttcagtggcaaattgtaatatatgggactttaagaaacactttcaagtagtttggacagttttcctaaagttgatttatttctttacctcttaaatacttgtggaaaatagaaataaattctgattttcaaaaaaactagaacacatcaattttttataaaaatctgttacccgtatattaatgatatatggtagtagaaggtatgctttaatggaagaactatataaagacataagctactatctgtaaaggcagaaaattaaatgtaattttaagtatcccaaagaaaattaaaaatargaagtaggttttttgttcaattttatattccatgtgcactccttgaattcggagaactactgttgtctttttgtttccttttgttctctaaaagctccattattttgagagagtc

SEQ ID NO: 371971 - DNA, 624 bp, Homo sapiens
tggggcatagctaaagcagtgctgagagggaaatgtatagcactaaaggtatatgttagaaaagacgaaaagtctcaaaacaataagctcttccttcaatgacctagaaaaatagaaaataaacccaaagcatgcagaaggaaggaaataatagaaataagagcaaaaataaatgaaattgaaaacaaagttattagagaaaatcaataaaacaataagctgactggagtgcagtagcatgattatggctcactgcagccttgatttcccaggcccatgcaaatctttcacgtcagcctccagagtagttgggaccacaggtgtgtgccaccaattcaggctaatttttttaaattattttttgtagaggcagcrtctccctgtgttgcccaagcttatctcaaactcctaggctcaactaccacctcagcctcccaaagtgctgggattataggcatgagccatgcacctggcctggttattttaaaagatagataaaattgacaaagctctagcatgagagacaaagaaaataagaagatgcaaattaccaatatcagaaatgaaatggaatatcactacaaactctgaagatataaaaaaggttaataagggaatactggg

SEQ ID NO: 371972 - DNA, 579 bp, Homo sapiens
ggcagggctatggttgcaaaccacagcgcaaggaaatggaggaatactctaattacaaaaggaaatactrcatctcccaaagggctcgctagacattatcatcatttatgacacagggcattgttaacctgatatacactcttcctcagtgggacaaagctacaccttctcaaacttcctatcctttagtacacataggagcaaggaagaaatacaaagctttcaaaggtaggaaataagttaacagtcttctgcaagtcctttgatcttcacagaggcacagagcactggttcccgtgatagggaaaacctttgtataatgcaataaactgtgtaaataagggaggtagggagcagaggcacaagggtgaggggctgtagaatcactgctcattctcattcttttctcttccttctagaagtggctggaaaaggggggaaagggttgaattggaggaagctgagatttgctgccttttcaactgttcctgccttttaaacttgggtatttgcatcctatgtgggataccagctgacactagggccttgagcaaaatggaaatgggttgctaggccacc

SEQ ID NO: 371973 - DNA, 649 bp, Homo sapiens
cgggccagtctgcgtggctccatgaaaagctcactgctgccccagccgggcttcttagaggaggtcagttgtcctatgtatcatcatttactctgggaatcctactgtgaaatcatgtctgtatttttctggagcagttcacatagagtagaatgtggaatttcccgtgaacgtctccttcctcccccgtatctgccgcctgtcacttcgccaccgtgctagaatactgttgtgttgtaagatgactaattttaaaagaacctgccctgaaaagttcttagaaacgcartgaaagggaggaacttgtcctttacccagtttttcctttgtaggatgggaaagtataaaaaggcacagaaggttgtcatgggctgttccttgggggtttttatcctgctcaccgtggagataagcctgcggcttgtctaaccagcgcagcgcaaaggtctcgatgccttttggtaacatccgtcattgcagaagaaagtttacacgacgtcaaaaagtgacgttcatgctaagtgtttttccagaaatattggtttcatgtttcttattggctctgcctcctgtgcttatatcatccaaaaactttttaaaaaggtccagaattctattttaacctgatgttgagcacctttaaaatgtt

SEQ ID NO: 371974 - DNA, 605 bp, Homo sapiens
ctgttgtgttgtaagatgactaattttaaaagaacctgccctgaaaagttcttagaaacgcagtgaaagggaggaacttgtcctttacccagtttttcctttgtaggatgggaaagtataaaaaggcacagaaggttgtcatgggctgttccttgggggtttttatcctgctcaccgtggagataagcctgcggcttgtctaaccagcgcagcgcaaaggtctcratgccttttggtaacatccgtcattgcagaagaaagtttacacgacgtcaaaaagtgacgttcatgctaagtgtttttccagaaatattggtttcatgtttcttattggctctgcctcctgtgcttatatcatccaaaaactttttaaaaaggtccagaattctattttaacctgatgttgagcacctttaaaatgttcgtatgtgtgttgcactaattctaaactttggaggcattttgctgtgtgaggccgatcgccactgtaaaggtcctagagttgcctgtttgtctctggagatggaattaaaccaaataaagagcttccactggaggcttgtattgaccttgtaactatatgttaatctcgtgttaaaataaaa

SEQ ID NO: 371975 - DNA, 605 bp, Homo sapiens
ctgttgtgttgtaagatgactaattttaaaagaacctgccctgaaaagttcttagaaacgcagtgaaagggaggaacttgtcctttacccagtttttcctttgtaggatgggaaagtataaaaaggcacagaaggttgtcatgggctgttccttgggggtttttatcctgctcaccgtggagataagcctgcggcttgtctaaccagcgcagcgcaaaggtctcgatgccttttggtaacatccgtcattgcagaagaaagtttacacgacgtcaaaaagtgacgttcatgctaagtgtttttccagaaatattggtttcatgtttcttattggctctgcctcctgtgcttatatcatccaaaaactttttaaaaaggtccagaattctattttaacctgatgttgagcacctttaaaaygttcgtatgtgtgttgcactaattctaaactttggaggcattttgctgtgtgaggccgatcgccactgtaaaggtcctagagttgcctgtttgtctctggagatggaattaaaccaaataaagagcttccactggaggcttgtattgaccttgtaactatatgttaatctcgtgttaaaataaaa

SEQ ID NO: 371976 - DNA, 571 bp, Homo sapiens
aagcatatgagtagcctgtgaccttgcaattagatgcctacgtagatcctaggaaatgtgttcagatacacacaaaaagccttgtacaataatgctcgttggagcgctactcattatagcttaaattagaaacaaccaatcacctagtcagaacggatgagttctggtgcattcacagaccaaaayactcaacagcaatgaaaataagcagatcccaccacatgctaccacatggtcaatctcacaaacgtaatatagaacaaaagaagccagatacacaagaatgcataccaaatgattacactcatgtaaagttcaaaagtgggcactactaatccacgcggttagaagtcaggagagtggttaccgctggggggagagtggggagctggagggggccagggggcctgccaggctggtctttctgtttcttgacctgggtgcccggttacatgagtgtgttcacactgtcaaaattcatggagctgcacacttatgatttgtgtacttctctgtacatatgttattaatatatttcaataaaaagtttactgagaaacaagctgctcca

SEQ ID NO: 371977 - DNA, 567 bp, Homo sapiens
cagcagtgagctctgattgtgccactgcactccagcctgggtgacaaagcaagaccctgtctctaaaaaaacacagacacacacaaatcaaggagttcccagggcaaggccaccaatcctatctcttttcacagtrccttctgctcagctggactggctcagcccagtagggccttccgggcagtagggctggacttccagcccttgggagacacctgggcctctgaccccagcccctctgttcactgttttcctcactttgggtctttaacacaggactccccgccaccctcccaccctctgaaagctgttcctattgctgtggctgatgaaggagagtctgagtcagaggacgatgacctgaaacctcgaggtaatggcccccacagcaggggaagctgatgggctgggctgggggccctcatctggaggctggaaaccgccagagtcttggtctctatttgcacctgctatatgggcaaggaaggatggggtgacggataagctgtttagcatggtggcttcaccccagaagttggctggcctagctaaggttctggagagctg

SEQ ID NO: 371978 - DNA, 541 bp, Homo sapiens
cagcagtgagctctgattgtgccactgcactccagcctgggtgacaaagcaagaccctgtctctaaaaaaacacagacacacacaaatcaaggagttcccagggcaaggccaccaatcctatctcttttcacagtaccttctgctcagctggactggctcagcccagtagggccttccgggcagtagggctggacttccagcccttgggagacacctgggcctctgaccccagcccctctgttcactgttttcctcactttgggtctttaacacaggactccccgccaccctcccaccctctgaaagctgttcctattgctgtggctgatgaaggagagtctgagtcagaggaygatgacctgaaacctcgaggtaatggcccccacagcaggggaagctgatgggctgggctgggggccctcatctggaggctggaaaccgccagagtcttggtctctatttgcacctgctatatgggcaaggaaggatggggtgacggataagctgtttagcatggtggcttcaccccagaagttggct

SEQ ID NO: 371979 - DNA, 456 bp, Homo sapiens
ggagttcctgccccatactttcatattatcaaatgaagggcacaaaggggtggccaaacacatgctggcacttcaggcttgcccccatgttgcttttgctcacatttcattcatcaggtaaatcacatggccacacctaggtacaagagggcacagaactgacatttgtaaataactctaaaactactaaacatcccgatgctgaatttgtctcagttyaaggaaatgtcagcagcaaaaattagtgccatgtgctgggttttgacagtagtaagattataagcattttcttatttagtaggaaggaggaggtttataaaatcaaatggtataatgattcttctaattttttatttagaatttttattttatttatttatttaaaaatgttcatttttattaactaataaactgagatttaggtttaggtataattatgttcttcttaggtaatta

SEQ ID NO: 371980 - DNA, 456 bp, Homo sapiens
ggagttcctgccccatactttcatattatcaaatgaagggcacaaaggggtggccaaacacatgctggcacttcaggcttgcccccatgttgcttttgctcacatttcattcatcaggtaaatcacatggccacacctaggtacaagagggcacagaactgacatttgtaaataactctaaaactactaaacatcccgatgctgaatttgtctcagtttaaggaaatgtcagcagcaaaaattagtgccatgtgctgggttttgacagtagtmagattataagcattttcttatttagtaggaaggaggaggtttataaaatcaaatggtataatgattcttctaattttttatttagaatttttattttatttatttatttaaaaatgttcatttttattaactaataaactgagatttaggtttaggtataattatgttcttcttaggtaatta

SEQ ID NO: 371981 - DNA, 456 bp, Homo sapiens
ggagttcctgccccatactttcatattatcaaatgaagggcacaaaggggtggccaaacacatgctggcacttcaggcttgcccccatgttgcttttgctcacatttcattcatcaggtaaatcacatggccacacctaggtacaagagggcacagaactgacatttgtaaataactctaaaactactaaacatcccgatgctgaatttgtctcagtttaaggaaatgtcagcagcaaaaattagtgccatgtgctgggttttgacagtagtaagattataagcattttcttatttagtaggaaggaggaggtttataaaatcaaatggtataatgattcttctaattttttatttagaatttttattttatttatttatttaaaaatgttcattttkattaactaataaactgagatttaggtttaggtataattatgttcttcttaggtaatta

SEQ ID NO: 371982 - DNA, 641 bp, Homo sapiens
agcccaaatagctaaataaattctaagcaaaaagaataaaactggaggtactgcattacctaacctcacattttaccacaaggctatggcaacccaaacagcattgggaaaggacactcttcttttttcctttttctttgtcttttttttttttttttttttttgagacaktgtctcgttcttgtcaccccggctagagtgcaatggccctattttggctcactgcaacctctgcttcccaggttcaagtgattctcctgccctagcctcctgagtagctgggattacaggcacccgccatgaccggttaatttttttgtatttttagtacagacaggatttcaccatgttggtcaggctggtctcgaactcctgacctcaggtgatccacctgcctcggcctcccaaagtgctgggattacagacatgagccacctcacccagccaggacactgttttcaataaatggtgctgggaaaattggatagccggatgcagaaggataaaactagactcctatctctcagcatatagaaaaatcaactcaagttggattaaagtcttaaatataagacctgatactattaaaatactagaaaaagacctaggaaaaatacttctggacattgatttacgcaagg

SEQ ID NO: 371983 - DNA, 574 bp, Homo sapiens
tgtgggcaaaacctgtaagtatgacgagatggtactcctgggattatgttactttatatgtaaaaggggatttttacagatgtaattagtacccccaatcaactgagttaatgaaaagaggctatcttgcataggtctracctaatcagatgcatttttaaaaagagagtgtagaaattagaaatggaggcagtcagagagactgtctcctaatggcctgtaagaaggtaaacatttatattgttaactttctgtggcgccatgtgacaagggactgtgggtaactacagggagctgattgttccctggatgatagctggcaagaaaactggaacctcagtcatcacagctgcaagaaaattaatttggctaaccttggatgaagactcggagactcagatgagaattgcaacctggttaacaccttgatttcagcctggggagatcatgaatagagaatccagtcaattcctactcacactcctgacccatggtaactgtgagatgataaatttgtgttattttaaaccaataattttgtgataatttgttactcagtaacataaaattgaca

SEQ ID NO: 371984 - DNA, 574 bp, Homo sapiens
tgtgggcaaaacctgtaagtatgacgagatggtactcctgggattatgttactttatatgtaaaaggggatttttacagatgtaattagtacccccaatcaactgagttaatgaaaagaggctatcttgcataggtctaacctaatcagatgcatttttaaaaagagagtgtagaaattagaaatggaggcagtcagagagactgtctcctaatggcctgtaagaaggtaaacatttatattgttaactttctgtggcgccatgtgacaagggactgtgggtaactacagggagctgattgttccctggatgatagctggcaagaaaactggaacctcagtcatcacagctgcaagaaaattaatttggctaaccttggatgaagactcggagactcagatgagaattgcaacctggttaacaccttgatttcagyctggggagatcatgaatagagaatccagtcaattcctactcacactcctgacccatggtaactgtgagatgataaatttgtgttattttaaaccaataattttgtgataatttgttactcagtaacataaaattgaca

SEQ ID NO: 371985 - DNA, 574 bp, Homo sapiens
tgtgggcaaaacctgtaagtatgacgagatggtactcctgggattatgttactttatatgtaaaaggggatttttacagatgtaattagtacccccaatcaactgagttaatgaaaagaggctatcttgcataggtctaacctaatcagatgcatttttaaaaagagagtgtagaaattagaaatggaggcagtcagagagactgtctcctaatggcctgtaagaaggtaaacatttatattgttaactttctgtggcgccatgtgacaagggactgtgggtaactacagggagctgattgttccctggatgatagctggcaagaaaactggaacctcagtcatcacagctgcaagaaaattaatttggctaaccttggatgaagactcggagactcagatgagaattgcaacctggttaacaccttgatttcagcctggggagatcatgaayagagaatccagtcaattcctactcacactcctgacccatggtaactgtgagatgataaatttgtgttattttaaaccaataattttgtgataatttgttactcagtaacataaaattgaca

SEQ ID NO: 371986 - DNA, 472 bp, Homo sapiens
ccccactgcactccagcttgggcgacaaagtgagactccgtctcaaaaaacaaacaaaccgaaaccactatatcatttagattggcacccccaaacatgaaatacttaggtctaaatctaataaaatatgcaccagatctgtatgagaaactctgatgaaagaaatcaaagaactaaataaatggagatttatttcrtgttcataattagcaagactcaatattgtcaagatgttagttctttccaacttgaccagtagattgattgcattgccaatcaaaatcccagcaagttattttgtggatatcaacaaactgattataaagtttatatgggtattcaaaagacagaacagccaacacagtatgaaggagaacaaagttgcaagactgtgacactacctgacttcaagacttactataaaattacagtaattaagacagtgtggtactggcaaaagaatagacaaata

SEQ ID NO: 371987 - DNA, 600 bp, Homo sapiens
agaaagcaaagaaattgaaacaaggactacaactgaagctgaagaccttccaagaaatgggttccagtgatcaccccatggtttggattgagactctgagggctacatacaaggaataagaatgatcctcattcctagaaatagacttgacctacaggkactaaagtgaaactttgaatcatctcaatcacccattggattaaggtgacatggaattaatagtgcttctagcacagttgcctgcaagatgtcagtaaaagatttctttggaagaagataaaatcactcttgagccttaagttagccctctatttcttaggaaaataatgtcttgcacccaaaaagaaaaaaataaaaccaaacaacaacaacaacaataggcatatgaaacgtaagactgtatgaccaaacccaggagaaatgatggacattagaaactcaccaacaagaatgcagaaaatgaagaactcagtcacaacctttaatttgtgaactggaagactaatccaaagaaagcaactggctggcataggaagaagctaaaagatatagaaaagaatataaggtacaaagtaaaaaaaggggagaaattcttcaaaa

SEQ ID NO: 371988 - DNA, 600 bp, Homo sapiens
agaaagcaaagaaattgaaacaaggactacaactgaagctgaagaccttccaagaaatgggttccagtgatcaccccatggtttggattgagactctgagggctacatacaaggaataagaatgatcctcattcctagaaatagacttgacctacaggtactaaagtgaaacttygaatcatctcaatcacccattggattaaggtgacatggaattaatagtgcttctagcacagttgcctgcaagatgtcagtaaaagatttctttggaagaagataaaatcactcttgagccttaagttagccctctatttcttaggaaaataatgtcttgcacccaaaaagaaaaaaataaaaccaaacaacaacaacaacaataggcatatgaaacgtaagactgtatgaccaaacccaggagaaatgatggacattagaaactcaccaacaagaatgcagaaaatgaagaactcagtcacaacctttaatttgtgaactggaagactaatccaaagaaagcaactggctggcataggaagaagctaaaagatatagaaaagaatataaggtacaaagtaaaaaaaggggagaaattcttcaaaa

SEQ ID NO: 371989 - DNA, 622 bp, Homo sapiens
tatttggacattctttaacatctttcaataacaattttataattttccccatgcagatcttgtacatgtttttgttaaatataattctaagtaccttatagttttgctcttgtatatgatatctttttaaataaataagcttgttcctttgttggctttgaggcctccttcaacagaaatcaagagaaagcttatgagctcagtgcgagaacagccctctgtctaactccatgcctccatcagcagcagtggacagggaactctcaaacttggaataagaccgtacctctgcaggacactattggcaggagacaagagaacaacagtgcacaccagcacatcgactaagactgcccatcttcaggacatttgtcagcaggagccaaatgggaaattctgagcaacaggtgttcctggcttgttctcctccaatcctccctttcgtcaacacccataccctttatcygtgttctttacagtcttcataaaaggagtccaggacttccagttaatcatttatcccagaactctaatcctccgtaaggatcctttttttttgacccaatatttccctcttctgactccccaaaccctttctttgtactctattgaattcaaggtc

SEQ ID NO: 371990 - DNA, 563 bp, Homo sapiens
aaaatgggctactgaatggtctgttacttgaccaacagaatatggaaacaatatattggacttcaagatatagttagtgactattgcattccacctttaaaagagttagtgaaacataattgtagagaattgtakgttgctgtcaagaaacaagtttctgacataccttagttgataaaaatttggctgacgaggtgtcctttccaaatgatagtgtcaattagaggccaaacccagtctattggggtatcatttttatctccaccatttttctgtctactcctgatttagctctgtgactcctaacaggccataggttatgtcattgcccattgactcaataaagaaaattattgctgaaagcataaattgccataagtcatgcatatgatgagaggtgtcatccatttctttcttataatggttcggagttcccacaagaatgacccattagtaattgaatttcccctgttttcacttctttttttttctggaggactcctgttccttgtgctctagtgctgtcagaactgtgtagctgtgttgatataaatgtgtgctac

SEQ ID NO: 371991 - DNA, 563 bp, Homo sapiens
aaaatgggctactgaatggtctgttacttgaccaacagaatatggaaacaatatattggacttcaagatatagttagtgactattgcattccacctttaaaagagttagtgaaacataattgtagagaattgtatgttgctgtcaagaaacaagtttctgacataccttagttgataaaaatttggctgacgaggtgtcctttccaaatgatagtgtcaattagaggccaaacccagtctattggggtatcatttttatctccaccatttttctgtctactcctgatttagctctgtgactcctaacaggccataggttatgtcattgcccattgactcaataaagaaaattattgctgaaagcataaattgccataagtcatgcatatgatgagaggtgtcatccatttctttcttataatggttyggagttcccacaagaatgacccattagtaattgaatttcccctgttttcacttctttttttttctggaggactcctgttccttgtgctctagtgctgtcagaactgtgtagctgtgttgatataaatgtgtgctac

SEQ ID NO: 371992 - DNA, 593 bp, Homo sapiens
aacacaacctttagagaatttgaaccmctactctcctgggcccatttcacagtctagggaaagtcatgggaaatgtatgtccctgtgaagcaattttacttcaagaaatgaacacatttttcacaaaaattaaagcttttcctatttaatgtccttccttttcagatttttttttctgatacagaattttattctgtcacacaggctggagtgcagtggcactaacagggctcacagcagcctccacctccctaggctcagatgatcctctcagctctgcctcccaagtagctgggaacacaagcacatgctaccacggctggataatatttttatgtttgtaaagacaaggtctccctatgtttcctaggctgtttttgatattctgcactcaagcaattcacccacgttggcctcccaaactgctgggattacagctgtgagccacccacccatcctggatggctttcttttgaggaacattacctcatagaggcctggagcacaggctctggactcagaatgttgaacttagcatcttaaacttcatttcttgggcaagaaattgaacttccctatgcattagttcctct

SEQ ID NO: 371993 - DNA, 593 bp, Homo sapiens
aacacaacctttagagaatttgaacccctrctctcctgggcccatttcacagtctagggaaagtcatgggaaatgtatgtccctgtgaagcaattttacttcaagaaatgaacacatttttcacaaaaattaaagcttttcctatttaatgtccttccttttcagatttttttttctgatacagaattttattctgtcacacaggctggagtgcagtggcactaacagggctcacagcagcctccacctccctaggctcagatgatcctctcagctctgcctcccaagtagctgggaacacaagcacatgctaccacggctggataatatttttatgtttgtaaagacaaggtctccctatgtttcctaggctgtttttgatattctgcactcaagcaattcacccacgttggcctcccaaactgctgggattacagctgtgagccacccacccatcctggatggctttcttttgaggaacattacctcatagaggcctggagcacaggctctggactcagaatgttgaacttagcatcttaaacttcatttcttgggcaagaaattgaacttccctatgcattagttcctct

SEQ ID NO: 371994 - DNA, 593 bp, Homo sapiens
aacacaacctttagagaatttgaacccctactctcctgggcccatttcacagtctaggkaaagtcatgggaaatgtatgtccctgtgaagcaattttacttcaagaaatgaacacatttttcacaaaaattaaagcttttcctatttaatgtccttccttttcagatttttttttctgatacagaattttattctgtcacacaggctggagtgcagtggcactaacagggctcacagcagcctccacctccctaggctcagatgatcctctcagctctgcctcccaagtagctgggaacacaagcacatgctaccacggctggataatatttttatgtttgtaaagacaaggtctccctatgtttcctaggctgtttttgatattctgcactcaagcaattcacccacgttggcctcccaaactgctgggattacagctgtgagccacccacccatcctggatggctttcttttgaggaacattacctcatagaggcctggagcacaggctctggactcagaatgttgaacttagcatcttaaacttcatttcttgggcaagaaattgaacttccctatgcattagttcctct

SEQ ID NO: 371995 - DNA, 593 bp, Homo sapiens
aacacaacctttagagaatttgaacccctactctcctgggcccatttcacagtctagggaaagtcatgggaaatgtatgtccctgtgaagcaattttacttcaagaaatgaacacatttttcacawaaattaaagcttttcctatttaatgtccttccttttcagatttttttttctgatacagaattttattctgtcacacaggctggagtgcagtggcactaacagggctcacagcagcctccacctccctaggctcagatgatcctctcagctctgcctcccaagtagctgggaacacaagcacatgctaccacggctggataatatttttatgtttgtaaagacaaggtctccctatgtttcctaggctgtttttgatattctgcactcaagcaattcacccacgttggcctcccaaactgctgggattacagctgtgagccacccacccatcctggatggctttcttttgaggaacattacctcatagaggcctggagcacaggctctggactcagaatgttgaacttagcatcttaaacttcatttcttgggcaagaaattgaacttccctatgcattagttcctct

SEQ ID NO: 371996 - DNA, 572 bp, Homo sapiens
ttgagcattaagtgagacaaaatgtacaaaatgcatgcaacattgcctggcaaatggtaagcagataatgagtgatattactataattaatacaaatattttacattagaaaaatcaaggwtaattatttgcagattatccagctaagtttatctttcgttagactcttcaagcagtgcatctagtcattcactcaacaaatatatatggacgatatggttctaggagccaggggttcagtcaaaacatatcatggtcatttcccccttgctctcacatacaagaggggaagacaaacatgaagcctggtatgtagtatgtaactggaatattcagaatgtgcaaatatggcaagtgatgagaagaataagaaattaattggagaaatgggagacaaaatgttttaggactcatgaaaactgtagaatgagaagccagagaaggccagaagaggtctctgtctttgcaagcacatgttcaattgataattccagaaataaactcaatgaggccaatttattttatgaacctctttgatgcaagttggactaataaaaaaaatgcagacagta

SEQ ID NO: 371997 - DNA, 585 bp, Homo sapiens
tacgttatttacaacccatgaaattaaacttaaggaggacaccgtcatcaaagatttaattgtgtcactatgttttacgtatctctatttgaacatctgcttgggtgctctccgttctctctcaaagagtgatggatatcatgaaaccagatttagaatttgagtcatgctaccctcagcaccacgtgatttatcagtgtccactcccaatccaggatgccacactgccccttgttgtcatatctcagtctttggtctgtgacagtttttctgtatctccttgatttttatgaccttgacattttagaagaggawttttgtagaatgtctctcatcaaagtttgtctgatgcttcctcatatttagattgtgaattttgaggaaagagaacacaaaggagaagtgtgctgagaaaggactaattacatatactatttgtgtttttctaaaaggggcattgaacttttctgtcatttatttatttattcaatcgttcctttacaaagccatgcatcacttaatgacagggatatgtttgagaaatgtgtcattaggcaatttcattattgtgcaagtattatggag

SEQ ID NO: 371998 - DNA, 578 bp, Homo sapiens
gtcccttgactctcctttgattcttttccttaatcctcagtggcactcttctgattaaagctcatttcctgttctgagtatgtggtagctcctttactgaagctcttgagaaccatctgaaaagcttcatgctgtgttttccagtgttcctggcaaggcaaaatatttacctgtggatttatttttgctgagtgcaaggggtctgtaggcacttatgkagttgtaaagtcacatgaagctttaaggtttataatcaaatactttttataacttttctccaaaattttaccctcccaaaagaataaaatatatttcaatgatggcgatacactcagagaacacattgaacgtatagaaaagtgaagatttctaatgggctcattcctccagttgcctccttgtattttctttgagtaagatcacctggttgcctgttaccaggctgtgggtcatgctgtgaggcctggaaatcctccacttgcaaccctcttcaggcccaatacagggctcaggaactgagctggccaaatctcatgaccacttggacctaccacgtggtgaggatgagagttctggtg

SEQ ID NO: 371999 - DNA, 578 bp, Homo sapiens
gtcccttgactctcctttgattcttttccttaatcctcagtggcactcttctgattaaagctcatttcctgttctgagtatgtggtagctcctttactgaagctcttgagaaccatctgaaaagcttcatgctgtgttttccagtgttcctggcaaggcaaaatatttacctgtggatttatttttgctgagtgcaaggggtctgtaggcacttatggagttgtaaagtcacatgaagctttaaggtttataatcaaatactttttataacttttctccaaaattttaccctcccaaaagaataaaatatatttcaatgatggcgatacactcagagaacacattgaacgtatagaaaagtgaagatttctaatgggctcattcctccagttgcctccttgtattttctttsagtaagatcacctggttgcctgttaccaggctgtgggtcatgctgtgaggcctggaaatcctccacttgcaaccctcttcaggcccaatacagggctcaggaactgagctggccaaatctcatgaccacttggacctaccacgtggtgaggatgagagttctggtg

SEQ ID NO: 372000 - DNA, 615 bp, Homo sapiens
taattttgtaggatcaaatgtgggtaaatgggctatggagaattctcatagattggtcatataattttctttttgtaatctattctgcttttgtagaaactgtttccacagcttcattatccacatttatattaaaaattctgaatctgtgtctcaaatcctgattacccaaataagtaccaaacttcattatttaagcctactgaaatattcactcccatctcccagagacaccttattctaaactttcccagagctgaaaatgctatacttccacaccctgcttctcttccggttttgtgtaacttggttattggtgccaccgtcaccagttgttcaaaccaggaacttgaaactcatatgggacccttccttctcatgcacctctaacattcaacccatggccaagttttatgcaggcttttctcaaatttggaaccatctctctatttctacttctattattttattaaagaacccctattcccatagtgcactcttaaacttatatctgaaagcaawgtagaggctaggaatgcaaattatttatcaagttcagatattactctactgaatttattaaggttgggtatcatgaatattttcttaaatgtt

SEQ ID NO: 372001 - DNA, 548 bp, Homo sapiens
aacacatactgtcagtattcaagaatgcagcttctgtgaattgaatggctggttggtagatatttaagcttgagattttgatgtttggaaatttttacaatttgtttgatggttagaaaagataaacattgttgaaaagattgtaactgaaatgcatgtgtstatttgcatgtgaattaatgatagagcaaacacattaataaatatcattgaacagaggctaggaggaaaacatcttctcagccattggtagtagtaacaaatcaaactgtgtctttccagacagccctggtgtggtgtggtttaaagattcagtaggagtttctggaaacctatctttaccaactacagaagagtttgaggatgatgctattaagaaagcccacatagagaaggattttatcgctttctgctcttccacaccaggtaacaggtttctacacaggacatctttgttggtgctatcaatagaaaaagtgacaataacccactagaggtggtgattaacaactcaagaccaactcaagctttgttccaagttatacaca

SEQ ID NO: 372002 - DNA, 548 bp, Homo sapiens
aacacatactgtcagtattcaagaatgcagcttctgtgaattgaatggctggttggtagatatttaagcttgagattttgatgtttggaaatttttacaatttgtttgatggttagaaaagataaacattgttgaaaagattgtaactgaaatgcatgtgtgtatttgcatgtgaattaatgatagagcaaacacattaataaatatcattgaacagaggctaggaggaaaacatcttctcagccattggtagtagtaacaaatcaaactgtgtctttccagacagccctggtgtggtgtggtttaaagattcagtaggagtttctggaaacctatctttaccaactacagaagagtttgaggatgatgctattaagaaagcccacatagagaaggattttatcgctttctgctcttccacaccaggtaacaggtttctacacaggacatctttgttggkgctatcaatagaaaaagtgacaataacccactagaggtggtgattaacaactcaagaccaactcaagctttgttccaagttatacaca

SEQ ID NO: 372003 - DNA, 574 bp, Homo sapiens
gtacacagtgggtttcaagcagaaagaagccatgttcattcccctatccattcaggaatatatatattttttgagatggagtttcgctcttgttatccaggctggagcgcaatggtgccatctcggctcactgcaacctccgcctcccaggttcaaggaattctcctggctcagcctctcgagtagctgggattacaggcatgcgccaccatgcctggctaatttttttgtatttttagtagagacagggttttaccatgttggccaggctagtctcgaatgactgacctcaggtgatctgcccaccatgccctcccaaactgctgtgattacaggcatgagccattgcgcctggcccctttcaggaatatttaatgatcattaattcttaacttattctcctagtgttgggggtaccattttggaaacatgttcgtacactttaaagcttgcaatcaagtggatagatatgcaaataagtaaaatgaaacataagaaygtaaataatgagatgcttaagaaaaccataagtaaacaatgtctcaggtggaagatagctctccagagaagagag

SEQ ID NO: 372004 - DNA, 537 bp, Homo sapiens
tgaagatgtttgcagaaaggtagattaatggcagagtttgagaagcatgccaacctgaaatcactcctctcaacagacttttgacctaaagcatattttgaaggcattctctaagtttccccttcaattataatatggcaataatagcacaactgtattgattggttttaaatattaaatcagagagagtgcatgaaatagctatcatacggtaagtatttttcaaagaaaccgttattatagattattttttattattataataatcactgaatgaaagctgcagtgttaataaaaatggaaggaatcaattagaggaaaaaaactcatcaggaccacagttttggttccacrtaaggtgatgtaatgcttaaacacattataggatacaattcctcaggagtttaaggtaacaatagctgtctacacttgtttgtctataattatcagaccatgacttgtttttgactagtggctttcaatttctcctatctattatctaatgatcccttgattctgagcttaagttaaatgtta

SEQ ID NO: 372005 - DNA, 537 bp, Homo sapiens
tgaagatgtttgcagaaaggtagattaatggcagagtttgagaagcatgccaacctgaaatcactcctctcaacagacttttgacctaaagcatattttgaaggcattctctaagtttccccttcaattataatatggcaataatagcacaactgtattgattggttttaaatattaaatcagagagagtgcatgaaatagctatcatacggtaagtatttttcaaagaaaccgttattatagattattttttattattataataatcactgaatgaaagctgcagtgttaataaaaatggaaggaatcaattagaggaaaaaaactcatcaggaccacagttttggttccacgtaaggtgatgtaatgcttaaacacattataggatacaattcctcaggwgtttaaggtaacaatagctgtctacacttgtttgtctataattatcagaccatgacttgtttttgactagtggctttcaatttctcctatctattatctaatgatcccttgattctgagcttaagttaaatgtta

SEQ ID NO: 372006 - DNA, 376 bp, Homo sapiens
actgtgaagaaaaagcaatgcctatacaatattggtggaaacctgaattagttcagcactgtgggaagtaggttggagattttcatacccaaaggaatatacatcattctattacaaagatacatggaagcgtatcttcattgcagcactattcacaatagcaaagacgtataatcaacctaaatacccatcagtgatagataggataaagaaatggttttacatacacagcatggaatactgtgcagctatatcatggaataacatgctggaatactatgcagccataaaaagaaatgagatcwtgtccttcacaggaacatggatggaggtggaagccattatactcagcaaactaattcaggaacaaaaaaac

SEQ ID NO: 372007 - DNA, 547 bp, Homo sapiens
aagaacatacttcaacataataaaagacatatactagaaacccacagttagttatactgagtggagaaaaactgaamgcctctcatctaagatcaggatgtccactttcaacactgttatccaacatagtgttgcaagtcctaggcagagcaattagaaaagataaagaaataaagggcatcgagattggaaaggaagaagtcaaattatccttgtttgcagactatgtgaccttatatctgaaaaatcctaaagactccaccaaaaaactcttagacctgataaactaattcagaaacattgcaagatacaaaaattaatgtgcaaaatttaatagtatttctatatgccaatggtaagcaagctgaaaaagagatcaagaaaattattccatatacaatagctagaattaaaattaaatacctaggaattacattaaccaaagaagtagaagacccttgccatgaaaactataaaacattaatgaaagatattaaagaggatgcaaaaaatttttaaaaattgtttatggattggaagagtcaat

SEQ ID NO: 372008 - DNA, 621 bp, Homo sapiens
cctatcctcttactggggaagactcaccagccatggctcctcacgttggcacttgcaatgtgtgttacacttgcaatgacaggcaaggtagctctatccttttaggcagggcgtgtacacagatcaatgaacaatacttacacctacacatgtgtatttataattattgcccaagaagctgttaactattgtcatttcccaaggtatttttacacaattgaatctcagattgtagcatgaactgtgcccataagaaaattgctttaccattccttggtgggtgagaaacaagaataggagagaattgagaaggcacayacagagctaaacacatgcagtaaacaatctttaattcactgagatttaaatggaaagtaaaatcacagtataggggtagttgtgccacctaaatcaagtactaagagttccttttttaaattgtggtaaaatacacataatataaaatttaccatcttagccattttacagtatccagttcagtggcattaagtacattcacattgctgtgtagccatcaatatcatccaactgtagttgttttcattttgggaaattgaaactctatactccttaaacagtaactctctatcctttccttcc

SEQ ID NO: 372009 - DNA, 173 bp, Homo sapiens
actgtttctgtacccatttaatcacattgggtacacatagacatacaartgggcacaatggacactggagtcaataagagggaggacagaggtagagggtcaagggttgaaaaactattatgtactatgctcacaacttggatgcgaggaacgattgtcaccaaaaccacagc

SEQ ID NO: 372010 - DNA, 594 bp, Homo sapiens
ttgctctttgtaggatcaagtgggatatatgtagaagagggcttgaagttgatcatttggaaagacagccagtactgggatccataaaacttctattcaaaatgttaaatggatttattaaaaaaacagcatccatcatctatgtttacatggtgtgtggcgaatggggttccttgtattgtattgctttaatatttggtatgcctttgactgtaaagtgtaacacttataataaaagtacagttttttaaaatgtgtgtgtgggagggggaaggaatctattctcacagcacacataagatcatgcaaaatatatagagagcacacaccattctctcagctcattgttgcatagggcctatcttgatttcatagaatcattcaaaggtggcctcagcacccccaaatttttgactgttactaaaagacacatacgtggtgttgaagaacagaaagcaatgaagtccttctcctcgtggatcttgcaaacagaatctgcctccaggttctcagatgactgtgaagagatgastgccaaggatgctggagagtctctgacccagagttccccatgtttttctgtagagacatcaa

SEQ ID NO: 372011 - DNA, 507 bp, Homo sapiens
tgttgttttttggctttttaataatagccattcttaccgatatgagatgayatgttattggttttcatttctgtaataattattaatgataagaattttttttatatatttgttggccacgtgtatgttttcttttgaaaagtgtctgttcatgccctttgcccaaattttaatggggttatttgttttttatttgttgaattgtttaagttccttatcaattctggatattagacctttctcagatgcatagcttgtgaatattttctcccactctgtaggtttgtgactctattgatagtttcttttgctgtgcagaagctcattaatttaattagatcccactaaacaatttttgtttttgtagcaattgcttttgaggacttacgaataaattatttgccagggctgatgttcagattggtgtttcctaggttttctagagtttttatagttttgctgaccttttttattttttttaacagctgctgagaaagagagaggggt

SEQ ID NO: 372012 - DNA, 553 bp, Homo sapiens
ttgggagctaaacaatggggacacttggatataaagatggagaaaatagattctggggattctaaaataggaaarggtgggagggttgaaaaattacctgttaggtacaatgtttactattagggtgatacattagaagctcaatctccaccattacccatgtaatactcatgtaacaaacaagcacatacaccccctgaatctaaaataaataaataaaaaggctttatgtcctttccttcattcccatgatttgctcctcttaattttgttcctattattctcagtgtctgaattgtccaggtctctcagctctactttgtacagatacaccgttgtggtctttcaacttaagtaatcaaatcacatttttcacaccccttgacttcattatcttgagtaagaggttcattttctggaagtgtcaatttcctcatctgcaaagctaggatgcaaatgctgtttttctagtgttgtctggctggttaaacagcctactatattacctagaagagggcaagctatcagcaaattagcaacctctttcagtgct

SEQ ID NO: 372013 - DNA, 553 bp, Homo sapiens
ttgggagctaaacaatggggacacttggatataaagatggagaaaatagattctggggattctaaaataggaaagkgtgggagggttgaaaaattacctgttaggtacaatgtttactattagggtgatacattagaagctcaatctccaccattacccatgtaatactcatgtaacaaacaagcacatacaccccctgaatctaaaataaataaataaaaaggctttatgtcctttccttcattcccatgatttgctcctcttaattttgttcctattattctcagtgtctgaattgtccaggtctctcagctctactttgtacagatacaccgttgtggtctttcaacttaagtaatcaaatcacatttttcacaccccttgacttcattatcttgagtaagaggttcattttctggaagtgtcaatttcctcatctgcaaagctaggatgcaaatgctgtttttctagtgttgtctggctggttaaacagcctactatattacctagaagagggcaagctatcagcaaattagcaacctctttcagtgct

SEQ ID NO: 372014 - DNA, 553 bp, Homo sapiens
ttgggagctaaacaatggggacacttggatataaagatggagaaaatagattctggggattctaaaataggaaagggtgggagggttgaaaaattacctgttaggtacaatgtttactattagggtgatacattagaagctcaatctccaccattacscatgtaatactcatgtaacaaacaagcacatacaccccctgaatctaaaataaataaataaaaaggctttatgtcctttccttcattcccatgatttgctcctcttaattttgttcctattattctcagtgtctgaattgtccaggtctctcagctctactttgtacagatacaccgttgtggtctttcaacttaagtaatcaaatcacatttttcacaccccttgacttcattatcttgagtaagaggttcattttctggaagtgtcaatttcctcatctgcaaagctaggatgcaaatgctgtttttctagtgttgtctggctggttaaacagcctactatattacctagaagagggcaagctatcagcaaattagcaacctctttcagtgct

SEQ ID NO: 372015 - DNA, 620 bp, Homo sapiens
gcctgtgtccctcatggctattagatccaaccacagatttaaaaagcccctaggaggtcattcaatgcttagataagcacatggctatacttgttgcagacacaagtactttttgtttttgtcacttattttgctatatttgttgtagtctttttggcatgagtcaacaaacttttcagaaaaaccgttctccagactttcctttctttcgggttcgactttcatttgagcagccagatgataaagcacagatgcccagcactgaaaggatgactttgacaatacgyttctacctcttcccagaacattaaaataaggaagctgtatgaatgtctgtgggcaggtatgtcaggtgtgtgggaagtttgaggaaagtgtactgaaagtccattttagtaaaggactctaggtctacaggcctagaattttataatccaaaaatttaaattttgaaatgctctaaaatccaaaactgtgtgagtgcccacatgatattcaaaggaaatccttattaaagcatttcaaattttaggtttttggattaaggataataaaccagtaagtataatgcagatattccaatatacaaaaatatctgtaattcaaaatacttctggtag

SEQ ID NO: 372016 - DNA, 537 bp, Homo sapiens
tgggcttcttagaataatcacatcccccaagtctgaactctagcagcatattacccacttggggaatcaatgtcctggctaaacttgccaactgtgcaccgcaaggctgagaygatgcagtagcccacatcccaaggacgcagaccagtggtcaagctgagacactctgccctacaggcaaaacaactctagtaccctgcttctctgcatctggactagtgtcctacagtatgagctgctgagataccccacttgctggaaagtaaaataatcactgtgctgcttcctgcctcttctcacagcccaagtggcagctgcgctctgccattctgggctacttccttccactgtacctggcctcaccaaatctgggatactactgaaccccaacatctcaaggtttatagtcacaactacaaagtatctcatctcctgggacctgaattgccagaaaggcttactagttcaaatttcaaaatcgtagatataccctgtttcctggacccaaacctccaaaatatctccttttacacagag

SEQ ID NO: 372017 - DNA, 553 bp, Homo sapiens
gaaagcaaagcttgattctgccttctgggcttgagcatgtgggcatagctgggttgtcctgcactgcctgaagagctgcaagagacmaggaatatcatgaacagtggtatccctctttgttcttatagcctcacctatggaggaagctacaaaagaggaaatacattcctagaggacaatcttaatctagtcattaacatagttgagtgcgtttgctgctaatggagcacatttcaagccagagatttctaggtatgcattacagggaggatctactttcatatttgagcataagtatttctacaagcatcttagataaaaacagagaggaagcttttcaaggccatgcatgataaaacactcaggaaacagtcaatgagtgatataaaatagttaaaatatgatttgttttcaaaggattcaaaccctaggataaaatttaatgggagcaggtcttaattaacactaattaatttttaaaatatgtgtttatccttttatttatttacctaatagacatggtagtaaacactgggaatatttttttaatgat

SEQ ID NO: 372018 - DNA, 600 bp, Homo sapiens
ttctcatctagttgttcagacccaggtctatgacaattactcaacaaaataaacacaacttcctttctgggaaaataatagagaaaaatccatggcagatactccattgccagacatcaggcttccacaaaaaaactgttcataaaagcactgatagcatttcaagtccacatgggcagggtgaaacaagatatgacttaatgtctgaggaatggagatttgtggagtcaagatagtgtgatggcatgtcatcgctttgcacccttcagagcaaaacactggctattaattatgcttaagctgtcttttccctgtgtatatagtgttaaataatgaagcattgtcttctagatgcctcaggatgtcttctaatttgttagctcatgtcaatttctaaaatttctggcataggtgctaacaaagcattgggtgccaggaacaaaggccaaaagaatttcctgaattttttaggtttgtgcactttttccaagctctttagcaaactaaaataaaacttaatgtgattcctctcctttctgaatttgtcagccataaattacgggagaaaataatyattataggttgacaccaaatacagta

SEQ ID NO: 372019 - DNA, 586 bp, Homo sapiens
cattttgagggtgatattgtttgtctctgtgtccccacccaaatctcatcttgtagctcccataattaccacgtgttgtggcagggaccctgcgggagataactgaatcacggggacaggtctttcctatgctgctcttgtaacartgaataagtctcatgaaatctgatggttttaaaaatgggagtttccctacacaagctctctctctttgcctgttgccctccatgtaaaatgtgacttgctccttcttgtcttctattatgattgtaaggcctccccagccatgtggaactgtaagtccactaaacctctttcttttgtaaattgcccagtttcagatattgtctcggaataatacacagggatttacattttgagtgtagtttggcagtatgctcagtattcaagggaacaagtttgaggtgaagataggtctgtcataagctcagtgatcatttggaaattatcttaacctttttgtggcacaaattccttatatgtaaaaaggaattaaaaacaccatccacatagagtctttgaaagaatgaaatgggtttacaaagggctaagcccagttcttgcc

SEQ ID NO: 372020 - DNA, 559 bp, Homo sapiens
gccctccatgtaaaatgtgacttgctccttcttgtcttctattatgattgtaaggcctccccagccatgtggaactgtaagtccactaaacctctttcttttgtaaattgcccagtttcagatattgtctcggaataatacacagggatttacattttgagtgtagtttggcagtatgctcagtattcaagggaacaagtttgaggtgaagataggtctgtcataagctcagtgatcatttggaaattatcttaacctttttgtggcacaaattccttatatgtaaaaaggaattwaaaacaccatccacatagagtctttgaaagaatgaaatgggtttacaaagggctaagcccagttcttgccaatgaatgagcaagaaatacatttttcctgcatgtataataattttattggtatattcctttatagagacatagaatcatgatacagagtaaaggataaaagtccagggaataaaaatcataacccatataatttttctttaactccatataaagtacaaaacctataaataatcaaatcaagactgtaaaag

SEQ ID NO: 372021 - DNA, 586 bp, Homo sapiens
cattttgagggtgatattgtttgtctctgtgtccccacccaaatctcatcttgtagctcccataattaccacgtgttgtggcagggaccctgcgggagataactgaatcacggggacaggtctttcctatgctgctcttgtaacagtgaataagtctcatgaaatctgatggttttaaaaatgggagtttccctacacaagctctctctctttgcctgttgccctccatgtaaaatgtgacttgctccttcttgtcttctattatgattgtaaggcctccccagccatgtggaactgtaagtccactaaacctctttcttttgtaaattgcccagtttcagatattgtctcggaataatacacagggatttacattttgagtgtagtttggcagtatgctcagtattcaagggaacaagtttgaggtgaagataggtctgtcataagctcagtgatcatttggaaattatcttaacctttttgtggcacaaattccttatatgtaaaaaggaattaaaaacaccatccacatagagtctttgaaagaatkaaatgggtttacaaagggctaagcccagttcttgcc

SEQ ID NO: 372022 - DNA, 559 bp, Homo sapiens
gccctccatgtaaaatgtgacttgctccttcttgtcttctattatgattgtaaggcctccccagccatgtggaactgtaagtccactaaacctctttcttttgtaaattgcccagtttcagatattgtctcggaataatacacagggatttacattttgagtgtagtttggcagtatgctcagtattcaagggaacaagtttgaggtgaagataggtctgtcataagctcagtgatcatttggaaattatcttaacctttttgtggcacaaattccttatatgtaaaaaggaattaaaaacaccatccacatagagtctttgaaagaatgaaatgggtttacaaagggmtaagcccagttcttgccaatgaatgagcaagaaatacatttttcctgcatgtataataattttattggtatattcctttatagagacatagaatcatgatacagagtaaaggataaaagtccagggaataaaaatcataacccatataatttttctttaactccatataaagtacaaaacctataaataatcaaatcaagactgtaaaag

SEQ ID NO: 372023 - DNA, 542 bp, Homo sapiens
atatttacgttatcttaataagtccaatttcagtcagttayagaaaacctaaggtcaaggaaaccactgatgtgattactaactatcaccagggattagctttgcttgttctttattttcatataaatgggatcatacggtatgtactgtgggtgtaagtttctcctcaactctgagtctaccaggttctaccttgcttctgcgtctctgtgctgtgccctgtaatccccctcaagataattacagggctcactcatgtttattttccagggatcagtattcctcattgttaagcaaattggaagctgctgcttcatatattttgtctgtttttgtttgttttagacaagagtgtaaatccagtctctattaagccatgttgacagaaagtagacgtctcacgtccttaattttaactataaattttcacctcgggtttcatgtactacagcctaactttagagacattccttctttccattctcataaagacctcttcctctcagtcctctgaaatttcagtctcaaggttttgttccata

SEQ ID NO: 372024 - DNA, 485 bp, Homo sapiens
cgaggaactttgggcccctaaattaaagtgggttttacctaraagcatgaagtatataaagcagaatatatatgcattattctaaaggtatgctttgcagtaagaatattgctattattgactcatctagtcatttagtactttgtaaactagttccacttttttatccctgggctttccttgaattgctcactaaaatatatgaatataaatatcatttttctatggattaaataaattaatatatgtgaattattgcacatgacacagaaagaagtacacgttaaaggactggtgttatttaaaatgtttttatcgtagaacttaatccagttacttttcttagcaaggtttaaataaaaatcacttgaatgctttcatccaccttgtatggcagtttcctgagaggacttgcattctcttggtcacctctggcccaaacgcccagcccctgcttaaatagttaaattttctataatattttg

SEQ ID NO: 372025 - DNA, 485 bp, Homo sapiens
cgaggaactttgggcccctaaattaaagtgggttttacctagaagcatgaagtatataaagcagaatatatatgcattattctaaaggtatgctttgcagtaagaatattgctattattgactcatctagtcatttartactttgtaaactagttccacttttttatccctgggctttccttgaattgctcactaaaatatatgaatataaatatcatttttctatggattaaataaattaatatatgtgaattattgcacatgacacagaaagaagtacacgttaaaggactggtgttatttaaaatgtttttatcgtagaacttaatccagttacttttcttagcaaggtttaaataaaaatcacttgaatgctttcatccaccttgtatggcagtttcctgagaggacttgcattctcttggtcacctctggcccaaacgcccagcccctgcttaaatagttaaattttctataatattttg

SEQ ID NO: 372026 - DNA, 542 bp, Homo sapiens
atatttacgttatcttaataagtccaatttcagtcagttatagaaaacctaaggtcaaggaaaccactgatgtgattactaactatcaccagggattagctttgcttgttctttattttcatataaatgggatcatacrgtatgtactgtgggtgtaagtttctcctcaactctgagtctaccaggttctaccttgcttctgcgtctctgtgctgtgccctgtaatccccctcaagataattacagggctcactcatgtttattttccagggatcagtattcctcattgttaagcaaattggaagctgctgcttcatatattttgtctgtttttgtttgttttagacaagagtgtaaatccagtctctattaagccatgttgacagaaagtagacgtctcacgtccttaattttaactataaattttcacctcgggtttcatgtactacagcctaactttagagacattccttctttccattctcataaagacctcttcctctcagtcctctgaaatttcagtctcaaggttttgttccata
